United States Patent Application Publication US 2011/0183924 A1 - sequence listing, part 105

SEQ ID NO: 317778 - DNA, 3877 bp, Homo sapiens
cgcgacagtcggggccgaggcccagggggaggtggcctgtcgcgggtcgcccggctcccggaggcgaggggggcgcgggcggatggcggagggcgcccagccgcagcagccgcctcagctcgggcccggcgccgccgcccggggcatgaagcgggagtcggagctggagctgccggtgcccggagcgggaggagacggagccgatcccggcctgagcaagcggccgcgcactgaggaggcggcggccgacggtggcggcgggatgcagaacgagcctctgactccaggttatcatggattcccagcgcgggacagccagggtaaccaggagccgacaacaactcctgacgcaatggttcagccttttactaccatcccatttccaccacctccgcagaatggaattcccacagagtatggggtgccacacactcaagactatgccggccagaccggtgagcataacctgacactctacggaagtacgcaagcccacggggagcagagcagcaactcacccagcacacaaaatggatctcttacgacagaaggtggagcacagacagacggccagcagtcacagacacaaagtagtgaaaattcagagagtaaatctaccccgaaacggctgcatgtctctaatattcctttccgcttccgggaccctgacctccggcagatgtttgggcagtttggcaaaatcctagatgtagaaataatctttaatgaacgtggctctaagggattcgggttcgtaactttcgagaatagtgctgatgcagacagggccagggagaaattacacggcaccgtggtagagggccgtaaaatcgaggtgaataatgctacagcacgtgtaatgaccaataagaagatggtcacaccatatgcaaatggttggaaattaagcccagtagttggagctgtatatggtccggagttatatgcagcatccagctttcaagcagatgtgtccctaggcaatgatgcagcagtgcccctatcaggaagagggggtatcaacacttacattcctttaatcattcctggcttcccttaccctactgcagccaccacggcagccgctttcagaggagcccatttgaggggcagagggcggacagtatatggtgcagtccgagcggtacctccaacagccatccccgcctatccaggtgtggtttaccaggacggattttacggtgctgacctctatggtggatatgcagcctacagatatgcacagcctgctactgcaaccgcagccaccgctgctgcagccgctgcagccgcttacagtgacggttatggcagggtgtacacagccgacccctaccatgcccttgcccctgccgctagctatggagttggcgctgtggcgagtttataccgaggtggctacagccgatttgccccctactgaagtgacgtgagacccctgcaaatgggacagccccccagttcatgaggcctggctattgcaatatttactagtagaggaactctatagcaagatgaagaggaaaaacaaacaaacaaacaaaaaaaaacacaaaaaaagaaagaatacttttttatacctcactatgttctttgaatatgtatttttcctttaaatttctgcctttaattcttttgttccaaagattgtgcatttttttctttttttttttaaactgtggtaaaaaaaaaaaaaataatgcatttccatgtctgtatgtccgtgcttagcttattctatcaatcacggaagaggcagtcaaggaggaaggagagacattaggagccgataaatgcatctgatcagaaatcagcagacagaattaccaaagtgtatctggtgctgaatgactgggggacaagcagaagtggaagagatctttctgcaacaggatattcttctagtcttctgagtttctggtctttgacaggcaattctggttggctgtggctggaatccacatgctgatagataggaatttgtgcttacaaagcaggagaattaaaaagacgctttcctctcctcttccctcctgtcttctccgttctttttacaatcatcttacacgcacagcctgagacagctggcatagtttttggaattatagtattgatatttccaaacgtgctctcagacagtggataataaacacctcattaggaaaccgatctcagaatgaactctggagtatgaaaaagatcatttctttttgttcctgtaacctagcattccttctaggcttcttctcctttaattgaaccacagcttagctcatgtattcttttattaacaccctgctctcatgtccataagattcaggaatttaggacccagggacagaaaagtgaataagccagtgaccagatttcccccagatgtcttgaggattagaagtacaaattgttgacagccattaaagagggtgaggaagggaaaaggaatattagaagatctggtatttcttacttttttcttgcctcagaaagtacaaagtttaaaaaatagaataaagaatctgctggggaaagatagagtaccaggtcctaggtcagtagtccctggaagttttggtgatgaggacatggaagggcaggcagaggcactttgtacttgctccaaagccataggaattttcatcttccagagcctttatgagtcacttctctatccacagtcttgagcctgtggctatcccgctgagcttctcactgtcctccaaaaacaccccgctgagcacccggaccactttgtacacattaacactacaggacataaaatgcagaggccctgagattgctgccctcccatattggaaggagggtctgcgatggcaagggtcttctatatcaccagaaagagtcgcgcagtgagtcactgccgttgccatctggctgtaattttctatgttatcaaggtaggagggagtgtttctcttctagctgttagatagaactgataaaagcaagtgtcctacagcatttcccaaatgaaggcattaggaaatagaaaagcacggtctttttggctccctggtctagtcacattggtactagggtgacctttcacccaagggacagctgctaaagggagtaattcagagacatggagcttctggttatgggtttgttttgggtttgtttttaactcctgcctccacacatgttcttgactgataactgactcatgtccctgaattaaaatgactgacctatgacagcatcagcattctttgtaagcagagtgatatatctgagagggcgttgacctgttgtgtagaatacatatcctttcccccttcagaatcctgtctcgcctcgtaactgggagagaggctgtgcctgaaactaggggcgatgtcaaggaagctagaggcctcgatgcaattattactgactctggggaggaagacagagaataaggggacaccaactgcccagtccactggccatttttaagggtccccccaccccaagccaaagtttggtttgttgctgttaagaatcatattgtatagtagctttcagaccatacagtattcattgggttactcctattattatcaagtagctggaattgtgaaggtcggagtagttagatctttagcttttattccttatttttttgtattactctccatgtgtataaattattgatcatgttgctggcttttataaactctaagcgaaggaggagcactgcctcagcctttgcacatggtaatgaagcactgtttttaaataaaagagagaaacaccaaaaaaaaaaaaaagacacacaggggggggctaaattccgagggccgagtaacgtcccggttttgaaaggcctaagggggaaaaaagacggcggaaaccgagggaagcacggttgagagcc

SEQ ID NO: 317779 - DNA, 2407 bp, Homo sapiens
  misc_feature (2334)..(2334): n is a, c, g, or t
  misc_feature (2372)..(2372): n is a, c, g, or t
  misc_feature (2383)..(2383): n is a, c, g, or t
cgcgacagtcggggccgaggcccagggggaggtggcctgtcgcgggtcgcccggctcccggaggcgaggggggcgcgggcggatggcggagggcgcccagccgcagcagccgcctcagctcgggcccggcgccgccgcccggggcatgaagcgggagtcggagctggagctgccggtgcccggagcgggaggagacggagccgatcccggcctgagcaagcggccgcgcactgaggaggcggcggccgacggtggcggcgggatgcagaacgagcctctgactccaggttatcatggattcccagcgcgggacagccagggtaaccaggagccgacaacaactcctgacgcaatggttcagccttttactaccatcccatttccaccacctccgcagaatggaattcccacagagtatggggtgccacacactcaagactatgccggccagaccggtgagcataacctgacactctacggaagtacgcaagcccacggggagcagagcagcaactcacccagcacacaaaatggatctcttacgacagaaggtggagcacagacagacggccagcagtcacagacacaaagtagtgaaaattcagagagtaaatctaccccgaaacggctgcatgtctctaatattcctttccgcttccgggaccctgacctccggcagatgtttgggcagtttggcaaaatcctagatgtagaaataatctttaatgaacgtggctctaagggattcgggttcgtaactttcgagaatagtgctgatgcagacagggccagggagaaattacacggcaccgtggtagagggccgtaaaatcgaggtgaataatgctacagcacgtgtaatgaccaataagaagatggtcacaccatatgcaaatggttggaaattaagcccagtagttggagctgtatatggtccggagttatatgcagcatccagctttcaagcagatgtgtccctaggcaatgatgcagcagtgcccctatcaggaagagggggtatcaacacttacattcctttaatcattcctggcttcccttaccctactgcagccaccacggcagccgctttcagaggagcccatttgaggggcagagggcggacagtatatggtgcagtccgagcggtacctccaacagccatccccgcctatccaggtgtggtttaccaggacggattttacggtgctgacctctatggtggatatgcagcctacagatatgcacagcctgctactgcaaccgcagccaccgctgctgcagccgctgcagccgcttacagtgacggttatggcagggtgtacacagccgacccctaccatgcccttgcccctgccgctagctatggagttggcgctgtggcgagtttataccgaggtggctacagccgatttgccccctactgaagtgacgtgagacccctgcaaatgggacagccccccagttcatgaggcctggctattgcaatatttactagtagaggaactctatagcaagatgaagaggaaaaacaaacaaacaaacaaaaaaaaacacaaaaaaagaaagaatacttttttatacctcactatgttctttgaatatgtatttttcctttaaatttctgcctttaattcttttgttccaaagattgtgcatttttttctttttttttttaaactgtggtaaaaaaaaaaaaaataatgcatttccatgtctgtatgtccgtgcttagcttattctatcaatcacggaagaggcagtcaaggaggaaggagagacattaggagccgataaatgcatctgatcagaaatcagcagacagaattaccaaagtgtatctggtgctgaatgactgggggacaagcagaagtggaagagatctttctgcaacaggatattcttctagtcttctgagtttctggtctttgacaggcaattctggttggctgtggctggaatccacatgctgatagataggaatttgtgcttacaaagcaggagaattaaaaagacgctttcctctcctcttccctcctgtcttctccgttctttttacaatcatcttacacgcacagcctgagacagctggcatagtttttggaattatagtattgatatttccaaacgtgctctcagacagtggataataaacacctcattaggaaaccgatctcagaatgaactctggagtatgaaaaagatcatttctttttgttcctgtaacctagcattccttctaggcttcttctcctttaattgaaccacagcttagctcatgtattcttttattaacaccctgctctcatgtccataagattcaggaatttaggaaatnaggctggtttgaagagggtagaaagcaataaaggcagnaaaaaataagnctaaaatcaggggaagatgtattt

SEQ ID NO: 317780 - DNA, 1066 bp, Homo sapiens
cggagtattagcaggcgtaccgtttttatttagtacatgggactgggttagttaacatactgggcgtgccgtacaatcaaaagcgaggggggcgcgggcggatggcggagggcgcccagccgcagcagccgcctcagctcgggcccggcgccgccgcccggggcatgaagcgggagtcggagctggagctgccggtgcccggagcgggaggagacggagccgatcccggcctgagcaagcggccgcgcactgaggaggcggcggccgacggtggcggcgggatgcagaacgagcctctgactccaggttatcatggattcccagcgcgggacagccagggtaaccaggagccgacaacaactcctgacgcaatggttcagccttttactaccatcccatttccaccacctccgcagaatggaattcccacagagtatggggtgccacacactcaagactatgccggccagaccggtgagcataacctgacactctacggaagtacgcaagcccacggggagcagagcagcaactcacccagcacacaaaatggatctcttacgacagaaggtggagcacagacagacggccagcagtcacagacacaaagtagtgaaaattcagagagtaaatctaccccgaaacggctgcattgtgacagtctctaattcccttcccttctcgttaagaatcatattgtatagtagctttcagaccatacagtattcattgggttactcctattattatcaagtagctggaattgtgaaggtcggagtagttagatctttagcttttattccttatttttttgtattactctccatgtgtataaattattgatcatgttgctggcttttataaactctaagcgaaggaggagcactgcctcagcctttgcacatggtaatgaagcactgtttttaaataaaagagagaaacaccaaaaaaaaaaaaaagacacacaggggggggctaaattccgagggccgagtaacgtcccggttttgaaaggcctaagggggaaaaaagacggcggaaaccgagggaagcacggttgagagcc

SEQ ID NO: 317781 - DNA, 783 bp, Homo sapiens
ggaagagagcttcagagaaacgtggaacaccattaactgctccaacatacacttagtatctgccagagaggaagagaaaagaaaggaagaaacattagaaagaaaaaggaaggaaaacggtataaagagagatcaattacccacccttaaatagctagattggggggggaggggggtggaaaagaaagctgtggaggtgtgccccagcacggctgctttgaaaggtttatcatctatccgtttggtttatggagaaaaagaaaatggtaactcagggtaaccaggagccgacaacaactcctgacgcaatggttcagccttttactaccatcccatttccaccacctccgcagaatggaattcccacagatgtgacagtctctaattcccttcccttctcgttaagaatcatattgtatagtagctttcagaccatacagtattcattgggttactcctattattatcaagtagctggaattgtgaaggtcggagtagttagatctttagcttttattccttatttttttgtattactctccatgtgtataaattattgatcatgttgctggcttttataaactctaagcgaaggaggagcactgcctcagcctttgcacatggtaatgaagcactgtttttaaataaaagagagaaacaccaaaaaaaaaaaaaagacacacaggggggggctaaattccgagggccgagtaacgtcccggttttgaaaggcctaagggggaaaaaagacggcggaaaccgagggaagcacggttgagagcc

SEQ ID NO: 317782 - DNA, 381 bp, Homo sapiens
gttaaataagtagtttactgaagaagaaaaataaactattcccatttcagaagataacaaaatatgtggataaaaacctgaccataagtaaacgtttttatttttatctctgcagcagtttggcaaaatcctagatgtagaaataatctttaatgaacgtggctctaaggtaagctccatttcagtgtcaagtgtgcttgatttctttttgagttttatgttattttaaatagcaagtattcagaaaacataagctgttttcaagcctgcataaaagtatcctaattatccaccttggtttagattatctctaaaaataagctaccacatggccaaactttattctgatacttatatgggggtggaagggtgatgaagtaa

SEQ ID NO: 317783 - DNA, 411 bp, Homo sapiens
caatttgtgactcctttttaatcttcttgcatttttaaattttttaaaaatccaatcagcatccagctttcaagcagatgtgtccctaggcaatgatgcagcagtgcccctatcaggaagagggggtatcaacacttacattcctttaatcagtaagtagcctatgttggcctggcatggattttgactgttgtgagtgaactatcatgtactgtttttttttttcctagtacagtacataactgaaatggaaatttcttgagagggatattaaatactatcccagtgccctgtcctgcttaacctgtgctagaattttcctgaccaaatattaagattgcacaaagcagaaatagttggaaaaggtagagggggtaagggcatatgaagaatattttagtctgtacttga

SEQ ID NO: 317784 - DNA, 7012 bp, Homo sapiens
cgcgacagtcggggccgaggcccagggggaggtggcctgtcgcgggtcgcccggctcccggaggcgaggggggcgcgggcggatggcggagggcgcccagccgcagcagccgcctcagctcgggcccggcgccgccgcccggggcatgaagcgggagtcggagctggagctgccggtgcccggagcgggaggagacggagccgatcccggcctgagcaagcggccgcgcactgaggaggcggcggccgacggtggcggcgggatgcagaacgagcctctgactccaggttatcatggattcccagcgcgggacagccagggtaaccaggagccgacaacaactcctgacgcaatggttcagccttttactaccatcccatttccaccacctccgcagaatggaattcccacagagtatggggtgccacacactcaagactatgccggccagaccggtgagcataacctgacactctacggaagtacgcaagcccacggggagcagagcagcaactcacccagcacacaaaatggatctcttacgacagaaggtggagcacagacagacggccagcagtcacagacacaaagtagtgaaaattcagagagtaaatctaccccgaaacggctgcatgtctctaatattcctttccgcttccgggaccctgacctccggcagatgtttgggcagtttggcaaaatcctagatgtagaaataatctttaatgaacgtggctctaagggattcgggttcgtaactttcgagaatagtgctgatgcagacagggccagggagaaattacacggcaccgtggtagagggccgtaaaatcgaggtgaataatgctacagcacgtgtaatgaccaataagaagatggtcacaccatatgcaaatggttggaaattaagcccagtagttggagctgtatatggtccggagttatatgcagcatccagctttcaagcagatgtgtccctaggcaatgatgcagcagtgcccctatcaggaagagggggtatcaacacttacattcctttaatcattcctggcttcccttaccctactgcagccaccacggcagccgctttcagaggagcccatttgaggggcagagggcggacagtatatggtgcagtccgagcggtacctccaacagccatccccgcctatccaggtgtggtttaccaggacggattttacggtgctgacctctatggtggatatgcagcctacagatatgcacagcctgctactgcaaccgcagccaccgctgctgcagccgctgcagccgcttacagtgacggttatggcagggtgtacacagccgacccctaccatgcccttgcccctgccgctagctatggagttggcgctgtggcgagtttataccgaggtggctacagccgatttgccccctactgaagtgacgtgagacccctgcaaatgggacagccccccagttcatgaggcctggctattgcaatatttactagtagaggaactctatagcaagatgaagaggaaaaacaaacaaacaaacaaaaaaaaacacaaaaaaagaaagaatacttttttatacctcactatgttctttgaatatgtatttttcctttaaatttctgcctttaattcttttgttccaaagattgtgcatttttttctttttttttttaaactgtggtaaaaaaaaaaaaaataatgcatttccatgtctgtatgtccgtgcttagcttattctatcaatcacggaagaggcagtcaaggaggaaggagagacattaggagccgataaatgcatctgatcagaaatcagcagacagaattaccaaagtgtatctggtgctgaatgactgggggacaagcagaagtggaagagatctttctgcaacaggatattcttctagtcttctgagtttctggtctttgacaggcaattctggttggctgtggctggaatccacatgctgatagataggaatttgtgcttacaaagcaggagaattaaaaagacgctttcctctcctcttccctcctgtcttctccgttctttttacaatcatcttacacgcacagcctgagacagctggcatagtttttggaattatagtattgatatttccaaacgtgctctcagacagtggataataaacacctcattaggaaaccgatctcagaatgaactctggagtatgaaaaagatcatttctttttgttcctgtaacctagcattccttctaggcttcttctcctttaattgaaccacagcttagctcatgtattcttttattaacaccctgctctcatgtccataagattcaggaatttaggacccagggacagaaaagtgaataagccagtgaccagatttcccccagatgtcttgaggattagaagtacaaattgttgacagccattaaagagggtgaggaagggaaaaggaatattagaagatctggtatttcttacttttttcttgcctcagaaagtacaaagtttaaaaaatagaataaagaatctgctggggaaagatagagtaccaggtcctaggtcagtagtccctggaagttttggtgatgaggacatggaagggcaggcagaggcactttgtacttgctccaaagccataggaattttcatcttccagagcctttatgagtcacttctctatccacagtcttgagcctgtggctatcccgctgagcttctcactgtcctccaaaaacaccccgctgagcacccggaccactttgtacacattaacactacaggacataaaatgcagaggccctgagattgctgccctcccatattggaaggagggtctgcgatggcaagggtcttctatatcaccagaaagagtcgcgcagtgagtcactgccgttgccatctggctgtaattttctatgttatcaaggtaggagggagtgtttctcttctagctgttagatagaactgataaaagcaagtgtcctacagcatttcccaaatgaaggcattaggaaatagaaaagcacggtctttttggctccctggtctagtcacattggtactagggtgacctttcacccaagggacagctgctaaagggagtaattcagagacatggagcttctggttatgggtttgttttgggtttgtttttaactcctgcctccacacatgttcttgactgataactgactcatgtccctgaattaaaatgactgacctatgacagcatcagcattctttgtaagcagagtgatatatctgagagggcgttgacctgttgtgtagaatacatatcctttcccccttcagaatcctgtctcgcctcgtaactgggagagaggctgtgcctgaaactaggggcgatgtcaaggaagctagaggcctcgatgcaattattactgactctggggaggaagacagagaataaggggacaccaactgcccagtccactggccatttttaagggtccccccaccccaagccaaagtttggtttgttgctgttaagacaatttttgttgtatgtatataaatattttagttagaggagcggggaatgggatgcgggctttcacagttctagggaatgggggcagggaggattttgcttttgcttttgctttgagggagaactttagctgactaaaaaaacagaagtttggggtcatgatcacaaaggggccattcccaaaagatggcaagccacgtattcagtggagactaggccaaattctaaatggttttatccatagcaggggagaataggagaatgagtttaagagtttttctcttcttttttcctagaaagaggtaaggataatgggaaaggtagagaaggcggctcccacagaccttttaagagaggcagaatcttgagcttgaggcaccttgagtgcatctcagttcagctggttctggctgaggcctccaaaggcaagctctgtgctttccagtggtttctgctgcatttccagggatggtgtttaacaccgcttcctccagctcccttttctaagaaagaataaatggagttctgctttttatgaaagggtctttggttttcagtgtcaacactgagaattggggctcttgcaagcatctggatttcacagtatcaacctccccgtcaccttttgaactttgagactccgtacggtcaacttcaccagaggcaggttgctcgaagcagcactgcttgtctgttcctgactctggttctcactgtattaaaaaaagagagtcagaggagtctggcatttcgtgagtttgttagaggatgctggctgataattccagaaaacttactgatgctaaatcacagtacatgcatgattctttttcagctttactatagttcatgacctggactttctgtactcttggaagctgggctccttaaaggaggcctctagtgaacacctttatctccatgtccctcttagagcccagagagctgcccataggcattttccagaattcctcatgtcacctagttcaatttccattaactcagatcagccattgtgattcaccatttgtcaggctctcaggtttaacaaaacctactatcaccatcatccttcaacagccacagtctgaattgagccaacatttttttttctttgagaaagaagtggactggggcacaacttttagtctgaggggagctagtggaaatctagacaatagaagtcatcgatagcagcttttcctcaaatgtgtgactcctcaggggctaaactgctcttagcttagaattatgctttactagagatctagcagataagtgggttaatcactaccatcctgtaactagttatatagcttccagacatgagggagacatcaaacagggatggaagcaaccccaaggatatgcaagaagggcatgatgaacccccttccctctggcaggagaacaaggccaaccaagggacagactggaaagcacttagatgtttaaggaggagaaaggggaagctttgaccagtccttgccttttgccaagttcagccagttctccgctgcttgcaacctctagcgcagtaacatttgcagaattgcagattttcccccagatactaggaggaaagggactttggggggtggggaaggggtcgtggtgttttaaaagcataagttacctgtttgcactgttttaagataggaaaaaaaaatagtgggcaaggtgaacatcagacgtaaatttgtgtgtttttattttgtcatgctcttgaaaatgtttgaccatttgtagtatacacagtgaaacttgattctctgttgcataaaacactatatttttttggaaatgttactgtccaaaagcctcttccctccctttccttttcctatgtacttccttcatacttgctttactgatcagccaggcaatagccatccaagagctagagcatgaaacagggccctttccaagtaggctctgggtgtcctaagccagcgtgtgccctctggtttagtgagtgtaatagagtccctggcacctttctttgcaaatgaggctaacagaccagactgcagcaagttatcagattcctcaatcagatgcactaggagtgaggagcccagggatggagggggttcctgaagtattgcagttggctgtagtagctgagttcttttccatgttaccgaaactgtagccagttacagtttactcaggaaaacggtagatcaattcagccatggtagtgctggttggcagggattggtaacggagagaactgctcatcagccaaaactcaagccttgccttttaggaggccaccagcagagggacttggtcctccttgtctggtacttgtgtacatgccggtgacctgaggactccactcacactggcgagcaaaaagggagcagtgattctcttttctctccccaccccctgccctttgttaccaacaccagtttcccagggggtacatgagtttctgaatttttaaaaaatgtttttggtttggtttttctggggactgataagtgctttaagcaatgtccataccccgtcaagactcccagcttagtcattttcttgtatttttctgttcacagtatttgtgtgtgtgcttgttttggcagctcattttggctgtattatatattgagtgatgaattgatcctcttttttccctaagggatatgaattgtttttcttgtgttatattctgcttgtgaatagctggagcaaacctggggctgacacgcgtaagctagggctgcaaagcgagaagagagccggtggagtgtacttgtccctgacaggctgacctacctgagtctctgagcttttcagtccaaatctttgcaaggctcaaaatgccacagaacctctcctcttctccccactccccatggcagggaccggaccatccctacatgcaacatgctgttcctccagcccctcccattgccatggcaaaacaggtacctttggggcatgggggcattacatgggatgcttgtgtaatcgaccacctagccttctctctcccctcccgtcctcccccagaatcacttcctaggacacccgagctgcttgcccagggtcctgtttccctgctaactccagagaagcatcccagggctttgtgacagtctctaattcccttcccttctcgttaagaatcatattgtatagtagctttcagaccatacagtattcattgggttactcctattattatcaagtagctggaattgtgaaggtcggagtagttagatctttagcttttattccttatttttttgtattactctccatgtgtataaattattgatcatgttgctggcttttataaactctaagcgaaggaggagcactgcctcagcctttgcacatggtaatgaagcactgtttttaaataaaagagagaaacaccaaaaaaaaaaaaaagacacacaggggggggctaaattccgagggccgagtaacgtcccggttttgaaaggcctaagggggaaaaaagacggcggaaaccgagggaagcacggttgagagcc

SEQ ID NO: 317785 - DNA, 7031 bp, Homo sapiens
cggagtattagcaggcgtaccgtttttatttagtacatgggactgggttagttaacatactgggcgtgccgtacaatcaaaagcgaggggggcgcgggcggatggcggagggcgcccagccgcagcagccgcctcagctcgggcccggcgccgccgcccggggcatgaagcgggagtcggagctggagctgccggtgcccggagcgggaggagacggagccgatcccggcctgagcaagcggccgcgcactgaggaggcggcggccgacggtggcggcgggatgcagaacgagcctctgactccaggttatcatggattcccagcgcgggacagccagggtaaccaggagccgacaacaactcctgacgcaatggttcagccttttactaccatcccatttccaccacctccgcagaatggaattcccacagagtatggggtgccacacactcaagactatgccggccagaccggtgagcataacctgacactctacggaagtacgcaagcccacggggagcagagcagcaactcacccagcacacaaaatggatctcttacgacagaaggtggagcacagacagacggccagcagtcacagacacaaagtagtgaaaattcagagagtaaatctaccccgaaacggctgcatgtctctaatattcctttccgcttccgggaccctgacctccggcagatgtttgggcagtttggcaaaatcctagatgtagaaataatctttaatgaacgtggctctaagggattcgggttcgtaactttcgagaatagtgctgatgcagacagggccagggagaaattacacggcaccgtggtagagggccgtaaaatcgaggtgaataatgctacagcacgtgtaatgaccaataagaagatggtcacaccatatgcaaatggttggaaattaagcccagtagttggagctgtatatggtccggagttatatgcagcatccagctttcaagcagatgtgtccctaggcaatgatgcagcagtgcccctatcaggaagagggggtatcaacacttacattcctttaatcattcctggcttcccttaccctactgcagccaccacggcagccgctttcagaggagcccatttgaggggcagagggcggacagtatatggtgcagtccgagcggtacctccaacagccatccccgcctatccaggtgtggtttaccaggacggattttacggtgctgacctctatggtggatatgcagcctacagatatgcacagcctgctactgcaaccgcagccaccgctgctgcagccgctgcagccgcttacagtgacggttatggcagggtgtacacagccgacccctaccatgcccttgcccctgccgctagctatggagttggcgctgtggcgagtttataccgaggtggctacagccgatttgccccctactgaagtgacgtgagacccctgcaaatgggacagccccccagttcatgaggcctggctattgcaatatttactagtagaggaactctatagcaagatgaagaggaaaaacaaacaaacaaacaaaaaaaaacacaaaaaaagaaagaatacttttttatacctcactatgttctttgaatatgtatttttcctttaaatttctgcctttaattcttttgttccaaagattgtgcatttttttctttttttttttaaactgtggtaaaaaaaaaaaaaataatgcatttccatgtctgtatgtccgtgcttagcttattctatcaatcacggaagaggcagtcaaggaggaaggagagacattaggagccgataaatgcatctgatcagaaatcagcagacagaattaccaaagtgtatctggtgctgaatgactgggggacaagcagaagtggaagagatctttctgcaacaggatattcttctagtcttctgagtttctggtctttgacaggcaattctggttggctgtggctggaatccacatgctgatagataggaatttgtgcttacaaagcaggagaattaaaaagacgctttcctctcctcttccctcctgtcttctccgttctttttacaatcatcttacacgcacagcctgagacagctggcatagtttttggaattatagtattgatatttccaaacgtgctctcagacagtggataataaacacctcattaggaaaccgatctcagaatgaactctggagtatgaaaaagatcatttctttttgttcctgtaacctagcattccttctaggcttcttctcctttaattgaaccacagcttagctcatgtattcttttattaacaccctgctctcatgtccataagattcaggaatttaggacccagggacagaaaagtgaataagccagtgaccagatttcccccagatgtcttgaggattagaagtacaaattgttgacagccattaaagagggtgaggaagggaaaaggaatattagaagatctggtatttcttacttttttcttgcctcagaaagtacaaagtttaaaaaatagaataaagaatctgctggggaaagatagagtaccaggtcctaggtcagtagtccctggaagttttggtgatgaggacatggaagggcaggcagaggcactttgtacttgctccaaagccataggaattttcatcttccagagcctttatgagtcacttctctatccacagtcttgagcctgtggctatcccgctgagcttctcactgtcctccaaaaacaccccgctgagcacccggaccactttgtacacattaacactacaggacataaaatgcagaggccctgagattgctgccctcccatattggaaggagggtctgcgatggcaagggtcttctatatcaccagaaagagtcgcgcagtgagtcactgccgttgccatctggctgtaattttctatgttatcaaggtaggagggagtgtttctcttctagctgttagatagaactgataaaagcaagtgtcctacagcatttcccaaatgaaggcattaggaaatagaaaagcacggtctttttggctccctggtctagtcacattggtactagggtgacctttcacccaagggacagctgctaaagggagtaattcagagacatggagcttctggttatgggtttgttttgggtttgtttttaactcctgcctccacacatgttcttgactgataactgactcatgtccctgaattaaaatgactgacctatgacagcatcagcattctttgtaagcagagtgatatatctgagagggcgttgacctgttgtgtagaatacatatcctttcccccttcagaatcctgtctcgcctcgtaactgggagagaggctgtgcctgaaactaggggcgatgtcaaggaagctagaggcctcgatgcaattattactgactctggggaggaagacagagaataaggggacaccaactgcccagtccactggccatttttaagggtccccccaccccaagccaaagtttggtttgttgctgttaagacaatttttgttgtatgtatataaatattttagttagaggagcggggaatgggatgcgggctttcacagttctagggaatgggggcagggaggattttgcttttgcttttgctttgagggagaactttagctgactaaaaaaacagaagtttggggtcatgatcacaaaggggccattcccaaaagatggcaagccacgtattcagtggagactaggccaaattctaaatggttttatccatagcaggggagaataggagaatgagtttaagagtttttctcttcttttttcctagaaagaggtaaggataatgggaaaggtagagaaggcggctcccacagaccttttaagagaggcagaatcttgagcttgaggcaccttgagtgcatctcagttcagctggttctggctgaggcctccaaaggcaagctctgtgctttccagtggtttctgctgcatttccagggatggtgtttaacaccgcttcctccagctcccttttctaagaaagaataaatggagttctgctttttatgaaagggtctttggttttcagtgtcaacactgagaattggggctcttgcaagcatctggatttcacagtatcaacctccccgtcaccttttgaactttgagactccgtacggtcaacttcaccagaggcaggttgctcgaagcagcactgcttgtctgttcctgactctggttctcactgtattaaaaaaagagagtcagaggagtctggcatttcgtgagtttgttagaggatgctggctgataattccagaaaacttactgatgctaaatcacagtacatgcatgattctttttcagctttactatagttcatgacctggactttctgtactcttggaagctgggctccttaaaggaggcctctagtgaacacctttatctccatgtccctcttagagcccagagagctgcccataggcattttccagaattcctcatgtcacctagttcaatttccattaactcagatcagccattgtgattcaccatttgtcaggctctcaggtttaacaaaacctactatcaccatcatccttcaacagccacagtctgaattgagccaacatttttttttctttgagaaagaagtggactggggcacaacttttagtctgaggggagctagtggaaatctagacaatagaagtcatcgatagcagcttttcctcaaatgtgtgactcctcaggggctaaactgctcttagcttagaattatgctttactagagatctagcagataagtgggttaatcactaccatcctgtaactagttatatagcttccagacatgagggagacatcaaacagggatggaagcaaccccaaggatatgcaagaagggcatgatgaacccccttccctctggcaggagaacaaggccaaccaagggacagactggaaagcacttagatgtttaaggaggagaaaggggaagctttgaccagtccttgccttttgccaagttcagccagttctccgctgcttgcaacctctagcgcagtaacatttgcagaattgcagattttcccccagatactaggaggaaagggactttggggggtggggaaggggtcgtggtgttttaaaagcataagttacctgtttgcactgttttaagataggaaaaaaaaatagtgggcaaggtgaacatcagacgtaaatttgtgtgtttttattttgtcatgctcttgaaaatgtttgaccatttgtagtatacacagtgaaacttgattctctgttgcataaaacactatatttttttggaaatgttactgtccaaaagcctcttccctccctttccttttcctatgtacttccttcatacttgctttactgatcagccaggcaatagccatccaagagctagagcatgaaacagggccctttccaagtaggctctgggtgtcctaagccagcgtgtgccctctggtttagtgagtgtaatagagtccctggcacctttctttgcaaatgaggctaacagaccagactgcagcaagttatcagattcctcaatcagatgcactaggagtgaggagcccagggatggagggggttcctgaagtattgcagttggctgtagtagctgagttcttttccatgttaccgaaactgtagccagttacagtttactcaggaaaacggtagatcaattcagccatggtagtgctggttggcagggattggtaacggagagaactgctcatcagccaaaactcaagccttgccttttaggaggccaccagcagagggacttggtcctccttgtctggtacttgtgtacatgccggtgacctgaggactccactcacactggcgagcaaaaagggagcagtgattctcttttctctccccaccccctgccctttgttaccaacaccagtttcccagggggtacatgagtttctgaatttttaaaaaatgtttttggtttggtttttctggggactgataagtgctttaagcaatgtccataccccgtcaagactcccagcttagtcattttcttgtatttttctgttcacagtatttgtgtgtgtgcttgttttggcagctcattttggctgtattatatattgagtgatgaattgatcctcttttttccctaagggatatgaattgtttttcttgtgttatattctgcttgtgaatagctggagcaaacctggggctgacacgcgtaagctagggctgcaaagcgagaagagagccggtggagtgtacttgtccctgacaggctgacctacctgagtctctgagcttttcagtccaaatctttgcaaggctcaaaatgccacagaacctctcctcttctccccactccccatggcagggaccggaccatccctacatgcaacatgctgttcctccagcccctcccattgccatggcaaaacaggtacctttggggcatgggggcattacatgggatgcttgtgtaatcgaccacctagccttctctctcccctcccgtcctcccccagaatcacttcctaggacacccgagctgcttgcccagggtcctgtttccctgctaactccagagaagcatcccagggctttgtgacagtctctaattcccttcccttctcgttaagaatcatattgtatagtagctttcagaccatacagtattcattgggttactcctattattatcaagtagctggaattgtgaaggtcggagtagttagatctttagcttttattccttatttttttgtattactctccatgtgtataaattattgatcatgttgctggcttttataaactctaagcgaaggaggagcactgcctcagcctttgcacatggtaatgaagcactgtttttaaataaaagagagaaacaccaaaaaaaaaaaaaagacacacaggggggggctaaattccgagggccgagtaacgtcccggttttgaaaggcctaagggggaaaaaagacggcggaaaccgagggaagcacggttgagagcc

SEQ ID NO: 317786 - DNA, 7015 bp, Homo sapiens
cgcgacagtcggggccgaggcccagggggaggtggcctgtcgcgggtcgcccggctcccggaggcgaggggggcgcgggcggatggcggagggcgcccagccgcagcagccgcctcagctcgggcccggcgccgccgcccggggcatgaagcgggagtcggagctggagctgccggtgcccggagcgggaggagacggagccgatcccggcctgagcaagcggccgcgcactgaggaggcggcggccgacggtggcggcgggatgcagaacgagcctctgactccaggttatcatggattcccagcgcgggacagccagggtaaccaggagccgacaacaactcctgacgcaatggttcagccttttactaccatcccatttccaccacctccgcagaatggaattcccacagagtatggggtgccacacactcaagactatgccggccagaccggtgagcataacctgacactctacggaagtacgcaagcccacggggagcagagcagcaactcacccagcacacaaaatggatctcttacgacagaaggtggagcacagacagacggccagcagtcacagacacaaagtagtgaaaattcagagagtaaatctaccccgaaacggctgcatgtctctaatattcctttccgcttccgggaccctgacctccggcagatgtttgggcagtttggcaaaatcctagatgtagaaataatctttaatgaacgtggctctaagggattcgggttcgtaactttcgagaatagtgctgatgcagacagggccagggagaaattacacggcaccgtggtagagggccgtaaaatcgaggtgaataatgctacagcacgtgtaatgaccaataagaagatggtcacaccatatgcaaatggttggaaattaagcccagtagttggagctgtatatggtccggagttatatgcagcatccagctttcaagcagatgtgtccctaggcaatgatgcagcagtgcccctatcaggaagagggggtatcaacacttacattcctttaatcattcctggcttcccttaccctactgcagccaccacggcagccgctttcagaggagcccatttgaggggcagagggcggacagtatatggtgcagtccgagcggtacctccaacagccatccccgcctatccaggaatagtcttacaggaaccaatcattagcgctaaaatacctcagggtggatatgcagcctacagatatgcacagcctgctactgcaaccgcagccaccgctgctgcagccgctgcagccgcttacagtgacggttatggcagggtgtacacagccgacccctaccatgcccttgcccctgccgctagctatggagttggcgctgtggcgagtttataccgaggtggctacagccgatttgccccctactgaagtgacgtgagacccctgcaaatgggacagccccccagttcatgaggcctggctattgcaatatttactagtagaggaactctatagcaagatgaagaggaaaaacaaacaaacaaacaaaaaaaaacacaaaaaaagaaagaatacttttttatacctcactatgttctttgaatatgtatttttcctttaaatttctgcctttaattcttttgttccaaagattgtgcatttttttctttttttttttaaactgtggtaaaaaaaaaaaaaataatgcatttccatgtctgtatgtccgtgcttagcttattctatcaatcacggaagaggcagtcaaggaggaaggagagacattaggagccgataaatgcatctgatcagaaatcagcagacagaattaccaaagtgtatctggtgctgaatgactgggggacaagcagaagtggaagagatctttctgcaacaggatattcttctagtcttctgagtttctggtctttgacaggcaattctggttggctgtggctggaatccacatgctgatagataggaatttgtgcttacaaagcaggagaattaaaaagacgctttcctctcctcttccctcctgtcttctccgttctttttacaatcatcttacacgcacagcctgagacagctggcatagtttttggaattatagtattgatatttccaaacgtgctctcagacagtggataataaacacctcattaggaaaccgatctcagaatgaactctggagtatgaaaaagatcatttctttttgttcctgtaacctagcattccttctaggcttcttctcctttaattgaaccacagcttagctcatgtattcttttattaacaccctgctctcatgtccataagattcaggaatttaggacccagggacagaaaagtgaataagccagtgaccagatttcccccagatgtcttgaggattagaagtacaaattgttgacagccattaaagagggtgaggaagggaaaaggaatattagaagatctggtatttcttacttttttcttgcctcagaaagtacaaagtttaaaaaatagaataaagaatctgctggggaaagatagagtaccaggtcctaggtcagtagtccctggaagttttggtgatgaggacatggaagggcaggcagaggcactttgtacttgctccaaagccataggaattttcatcttccagagcctttatgagtcacttctctatccacagtcttgagcctgtggctatcccgctgagcttctcactgtcctccaaaaacaccccgctgagcacccggaccactttgtacacattaacactacaggacataaaatgcagaggccctgagattgctgccctcccatattggaaggagggtctgcgatggcaagggtcttctatatcaccagaaagagtcgcgcagtgagtcactgccgttgccatctggctgtaattttctatgttatcaaggtaggagggagtgtttctcttctagctgttagatagaactgataaaagcaagtgtcctacagcatttcccaaatgaaggcattaggaaatagaaaagcacggtctttttggctccctggtctagtcacattggtactagggtgacctttcacccaagggacagctgctaaagggagtaattcagagacatggagcttctggttatgggtttgttttgggtttgtttttaactcctgcctccacacatgttcttgactgataactgactcatgtccctgaattaaaatgactgacctatgacagcatcagcattctttgtaagcagagtgatatatctgagagggcgttgacctgttgtgtagaatacatatcctttcccccttcagaatcctgtctcgcctcgtaactgggagagaggctgtgcctgaaactaggggcgatgtcaaggaagctagaggcctcgatgcaattattactgactctggggaggaagacagagaataaggggacaccaactgcccagtccactggccatttttaagggtccccccaccccaagccaaagtttggtttgttgctgttaagacaatttttgttgtatgtatataaatattttagttagaggagcggggaatgggatgcgggctttcacagttctagggaatgggggcagggaggattttgcttttgcttttgctttgagggagaactttagctgactaaaaaaacagaagtttggggtcatgatcacaaaggggccattcccaaaagatggcaagccacgtattcagtggagactaggccaaattctaaatggttttatccatagcaggggagaataggagaatgagtttaagagtttttctcttcttttttcctagaaagaggtaaggataatgggaaaggtagagaaggcggctcccacagaccttttaagagaggcagaatcttgagcttgaggcaccttgagtgcatctcagttcagctggttctggctgaggcctccaaaggcaagctctgtgctttccagtggtttctgctgcatttccagggatggtgtttaacaccgcttcctccagctcccttttctaagaaagaataaatggagttctgctttttatgaaagggtctttggttttcagtgtcaacactgagaattggggctcttgcaagcatctggatttcacagtatcaacctccccgtcaccttttgaactttgagactccgtacggtcaacttcaccagaggcaggttgctcgaagcagcactgcttgtctgttcctgactctggttctcactgtattaaaaaaagagagtcagaggagtctggcatttcgtgagtttgttagaggatgctggctgataattccagaaaacttactgatgctaaatcacagtacatgcatgattctttttcagctttactatagttcatgacctggactttctgtactcttggaagctgggctccttaaaggaggcctctagtgaacacctttatctccatgtccctcttagagcccagagagctgcccataggcattttccagaattcctcatgtcacctagttcaatttccattaactcagatcagccattgtgattcaccatttgtcaggctctcaggtttaacaaaacctactatcaccatcatccttcaacagccacagtctgaattgagccaacatttttttttctttgagaaagaagtggactggggcacaacttttagtctgaggggagctagtggaaatctagacaatagaagtcatcgatagcagcttttcctcaaatgtgtgactcctcaggggctaaactgctcttagcttagaattatgctttactagagatctagcagataagtgggttaatcactaccatcctgtaactagttatatagcttccagacatgagggagacatcaaacagggatggaagcaaccccaaggatatgcaagaagggcatgatgaacccccttccctctggcaggagaacaaggccaaccaagggacagactggaaagcacttagatgtttaaggaggagaaaggggaagctttgaccagtccttgccttttgccaagttcagccagttctccgctgcttgcaacctctagcgcagtaacatttgcagaattgcagattttcccccagatactaggaggaaagggactttggggggtggggaaggggtcgtggtgttttaaaagcataagttacctgtttgcactgttttaagataggaaaaaaaaatagtgggcaaggtgaacatcagacgtaaatttgtgtgtttttattttgtcatgctcttgaaaatgtttgaccatttgtagtatacacagtgaaacttgattctctgttgcataaaacactatatttttttggaaatgttactgtccaaaagcctcttccctccctttccttttcctatgtacttccttcatacttgctttactgatcagccaggcaatagccatccaagagctagagcatgaaacagggccctttccaagtaggctctgggtgtcctaagccagcgtgtgccctctggtttagtgagtgtaatagagtccctggcacctttctttgcaaatgaggctaacagaccagactgcagcaagttatcagattcctcaatcagatgcactaggagtgaggagcccagggatggagggggttcctgaagtattgcagttggctgtagtagctgagttcttttccatgttaccgaaactgtagccagttacagtttactcaggaaaacggtagatcaattcagccatggtagtgctggttggcagggattggtaacggagagaactgctcatcagccaaaactcaagccttgccttttaggaggccaccagcagagggacttggtcctccttgtctggtacttgtgtacatgccggtgacctgaggactccactcacactggcgagcaaaaagggagcagtgattctcttttctctccccaccccctgccctttgttaccaacaccagtttcccagggggtacatgagtttctgaatttttaaaaaatgtttttggtttggtttttctggggactgataagtgctttaagcaatgtccataccccgtcaagactcccagcttagtcattttcttgtatttttctgttcacagtatttgtgtgtgtgcttgttttggcagctcattttggctgtattatatattgagtgatgaattgatcctcttttttccctaagggatatgaattgtttttcttgtgttatattctgcttgtgaatagctggagcaaacctggggctgacacgcgtaagctagggctgcaaagcgagaagagagccggtggagtgtacttgtccctgacaggctgacctacctgagtctctgagcttttcagtccaaatctttgcaaggctcaaaatgccacagaacctctcctcttctccccactccccatggcagggaccggaccatccctacatgcaacatgctgttcctccagcccctcccattgccatggcaaaacaggtacctttggggcatgggggcattacatgggatgcttgtgtaatcgaccacctagccttctctctcccctcccgtcctcccccagaatcacttcctaggacacccgagctgcttgcccagggtcctgtttccctgctaactccagagaagcatcccagggctttgtgacagtctctaattcccttcccttctcgttaagaatcatattgtatagtagctttcagaccatacagtattcattgggttactcctattattatcaagtagctggaattgtgaaggtcggagtagttagatctttagcttttattccttatttttttgtattactctccatgtgtataaattattgatcatgttgctggcttttataaactctaagcgaaggaggagcactgcctcagcctttgcacatggtaatgaagcactgtttttaaataaaagagagaaacaccaaaaaaaaaaaaaagacacacaggggggggctaaattccgagggccgagtaacgtcccggttttgaaaggcctaagggggaaaaaagacggcggaaaccgagggaagcacggttgagagcc

SEQ ID NO: 317787 - DNA, 6848 bp, Homo sapiens
atggtagctgtgtgcaaggggagagcagcagggtttagaattccaggaaggaagagagagtgatgtcatcagattccatggaccagcccaggaacccctgtgagaacgagcctctgactccaggttatcatggattcccagcgcgggacagccagggtaaccaggagccgacaacaactcctgacgcaatggttcagccttttactaccatcccatttccaccacctccgcagaatggaattcccacagagtatggggtgccacacactcaagactatgccggccagaccggtgagcataacctgacactctacggaagtacgcaagcccacggggagcagagcagcaactcacccagcacacaaaatggatctcttacgacagaaggtggagcacagacagacggccagcagtcacagacacaaagtagtgaaaattcagagagtaaatctaccccgaaacggctgcatgtctctaatattcctttccgcttccgggaccctgacctccggcagatgtttgggcagtttggcaaaatcctagatgtagaaataatctttaatgaacgtggctctaagggattcgggttcgtaactttcgagaatagtgctgatgcagacagggccagggagaaattacacggcaccgtggtagagggccgtaaaatcgaggtgaataatgctacagcacgtgtaatgaccaataagaagatggtcacaccatatgcaaatggttggaaattaagcccagtagttggagctgtatatggtccggagttatatgcagcatccagctttcaagcagatgtgtccctaggcaatgatgcagcagtgcccctatcaggaagagggggtatcaacacttacattcctttaatcattcctggcttcccttaccctactgcagccaccacggcagccgctttcagaggagcccatttgaggggcagagggcggacagtatatggtgcagtccgagcggtacctccaacagccatccccgcctatccaggtgtggtttaccaggacggattttacggtgctgacctctatggtggatatgcagcctacagatatgcacagcctgctactgcaaccgcagccaccgctgctgcagccgctgcagccgcttacagtgacggttatggcagggtgtacacagccgacccctaccatgcccttgcccctgccgctagctatggagttggcgctgtggcgagtttataccgaggtggctacagccgatttgccccctactgaagtgacgtgagacccctgcaaatgggacagccccccagttcatgaggcctggctattgcaatatttactagtagaggaactctatagcaagatgaagaggaaaaacaaacaaacaaacaaaaaaaaacacaaaaaaagaaagaatacttttttatacctcactatgttctttgaatatgtatttttcctttaaatttctgcctttaattcttttgttccaaagattgtgcatttttttctttttttttttaaactgtggtaaaaaaaaaaaaaataatgcatttccatgtctgtatgtccgtgcttagcttattctatcaatcacggaagaggcagtcaaggaggaaggagagacattaggagccgataaatgcatctgatcagaaatcagcagacagaattaccaaagtgtatctggtgctgaatgactgggggacaagcagaagtggaagagatctttctgcaacaggatattcttctagtcttctgagtttctggtctttgacaggcaattctggttggctgtggctggaatccacatgctgatagataggaatttgtgcttacaaagcaggagaattaaaaagacgctttcctctcctcttccctcctgtcttctccgttctttttacaatcatcttacacgcacagcctgagacagctggcatagtttttggaattatagtattgatatttccaaacgtgctctcagacagtggataataaacacctcattaggaaaccgatctcagaatgaactctggagtatgaaaaagatcatttctttttgttcctgtaacctagcattccttctaggcttcttctcctttaattgaaccacagcttagctcatgtattcttttattaacaccctgctctcatgtccataagattcaggaatttaggacccagggacagaaaagtgaataagccagtgaccagatttcccccagatgtcttgaggattagaagtacaaattgttgacagccattaaagagggtgaggaagggaaaaggaatattagaagatctggtatttcttacttttttcttgcctcagaaagtacaaagtttaaaaaatagaataaagaatctgctggggaaagatagagtaccaggtcctaggtcagtagtccctggaagttttggtgatgaggacatggaagggcaggcagaggcactttgtacttgctccaaagccataggaattttcatcttccagagcctttatgagtcacttctctatccacagtcttgagcctgtggctatcccgctgagcttctcactgtcctccaaaaacaccccgctgagcacccggaccactttgtacacattaacactacaggacataaaatgcagaggccctgagattgctgccctcccatattggaaggagggtctgcgatggcaagggtcttctatatcaccagaaagagtcgcgcagtgagtcactgccgttgccatctggctgtaattttctatgttatcaaggtaggagggagtgtttctcttctagctgttagatagaactgataaaagcaagtgtcctacagcatttcccaaatgaaggcattaggaaatagaaaagcacggtctttttggctccctggtctagtcacattggtactagggtgacctttcacccaagggacagctgctaaagggagtaattcagagacatggagcttctggttatgggtttgttttgggtttgtttttaactcctgcctccacacatgttcttgactgataactgactcatgtccctgaattaaaatgactgacctatgacagcatcagcattctttgtaagcagagtgatatatctgagagggcgttgacctgttgtgtagaatacatatcctttcccccttcagaatcctgtctcgcctcgtaactgggagagaggctgtgcctgaaactaggggcgatgtcaaggaagctagaggcctcgatgcaattattactgactctggggaggaagacagagaataaggggacaccaactgcccagtccactggccatttttaagggtccccccaccccaagccaaagtttggtttgttgctgttaagacaatttttgttgtatgtatataaatattttagttagaggagcggggaatgggatgcgggctttcacagttctagggaatgggggcagggaggattttgcttttgcttttgctttgagggagaactttagctgactaaaaaaacagaagtttggggtcatgatcacaaaggggccattcccaaaagatggcaagccacgtattcagtggagactaggccaaattctaaatggttttatccatagcaggggagaataggagaatgagtttaagagtttttctcttcttttttcctagaaagaggtaaggataatgggaaaggtagagaaggcggctcccacagaccttttaagagaggcagaatcttgagcttgaggcaccttgagtgcatctcagttcagctggttctggctgaggcctccaaaggcaagctctgtgctttccagtggtttctgctgcatttccagggatggtgtttaacaccgcttcctccagctcccttttctaagaaagaataaatggagttctgctttttatgaaagggtctttggttttcagtgtcaacactgagaattggggctcttgcaagcatctggatttcacagtatcaacctccccgtcaccttttgaactttgagactccgtacggtcaacttcaccagaggcaggttgctcgaagcagcactgcttgtctgttcctgactctggttctcactgtattaaaaaaagagagtcagaggagtctggcatttcgtgagtttgttagaggatgctggctgataattccagaaaacttactgatgctaaatcacagtacatgcatgattctttttcagctttactatagttcatgacctggactttctgtactcttggaagctgggctccttaaaggaggcctctagtgaacacctttatctccatgtccctcttagagcccagagagctgcccataggcattttccagaattcctcatgtcacctagttcaatttccattaactcagatcagccattgtgattcaccatttgtcaggctctcaggtttaacaaaacctactatcaccatcatccttcaacagccacagtctgaattgagccaacatttttttttctttgagaaagaagtggactggggcacaacttttagtctgaggggagctagtggaaatctagacaatagaagtcatcgatagcagcttttcctcaaatgtgtgactcctcaggggctaaactgctcttagcttagaattatgctttactagagatctagcagataagtgggttaatcactaccatcctgtaactagttatatagcttccagacatgagggagacatcaaacagggatggaagcaaccccaaggatatgcaagaagggcatgatgaacccccttccctctggcaggagaacaaggccaaccaagggacagactggaaagcacttagatgtttaaggaggagaaaggggaagctttgaccagtccttgccttttgccaagttcagccagttctccgctgcttgcaacctctagcgcagtaacatttgcagaattgcagattttcccccagatactaggaggaaagggactttggggggtggggaaggggtcgtggtgttttaaaagcataagttacctgtttgcactgttttaagataggaaaaaaaaatagtgggcaaggtgaacatcagacgtaaatttgtgtgtttttattttgtcatgctcttgaaaatgtttgaccatttgtagtatacacagtgaaacttgattctctgttgcataaaacactatatttttttggaaatgttactgtccaaaagcctcttccctccctttccttttcctatgtacttccttcatacttgctttactgatcagccaggcaatagccatccaagagctagagcatgaaacagggccctttccaagtaggctctgggtgtcctaagccagcgtgtgccctctggtttagtgagtgtaatagagtccctggcacctttctttgcaaatgaggctaacagaccagactgcagcaagttatcagattcctcaatcagatgcactaggagtgaggagcccagggatggagggggttcctgaagtattgcagttggctgtagtagctgagttcttttccatgttaccgaaactgtagccagttacagtttactcaggaaaacggtagatcaattcagccatggtagtgctggttggcagggattggtaacggagagaactgctcatcagccaaaactcaagccttgccttttaggaggccaccagcagagggacttggtcctccttgtctggtacttgtgtacatgccggtgacctgaggactccactcacactggcgagcaaaaagggagcagtgattctcttttctctccccaccccctgccctttgttaccaacaccagtttcccagggggtacatgagtttctgaatttttaaaaaatgtttttggtttggtttttctggggactgataagtgctttaagcaatgtccataccccgtcaagactcccagcttagtcattttcttgtatttttctgttcacagtatttgtgtgtgtgcttgttttggcagctcattttggctgtattatatattgagtgatgaattgatcctcttttttccctaagggatatgaattgtttttcttgtgttatattctgcttgtgaatagctggagcaaacctggggctgacacgcgtaagctagggctgcaaagcgagaagagagccggtggagtgtacttgtccctgacaggctgacctacctgagtctctgagcttttcagtccaaatctttgcaaggctcaaaatgccacagaacctctcctcttctccccactccccatggcagggaccggaccatccctacatgcaacatgctgttcctccagcccctcccattgccatggcaaaacaggtacctttggggcatgggggcattacatgggatgcttgtgtaatcgaccacctagccttctctctcccctcccgtcctcccccagaatcacttcctaggacacccgagctgcttgcccagggtcctgtttccctgctaactccagagaagcatcccagggctttgtgacagtctctaattcccttcccttctcgttaagaatcatattgtatagtagctttcagaccatacagtattcattgggttactcctattattatcaagtagctggaattgtgaaggtcggagtagttagatctttagcttttattccttatttttttgtattactctccatgtgtataaattattgatcatgttgctggcttttataaactctaagcgaaggaggagcactgcctcagcctttgcacatggtaatgaagcactgtttttaaataaaagagagaaacaccaaaaaaaaaaaaaagacacacaggggggggctaaattccgagggccgagtaacgtcccggttttgaaaggcctaagggggaaaaaagacggcggaaaccgagggaagcacggttgagagcc

SEQ ID NO: 317788 - DNA, 4063 bp, Homo sapiens
cgcgacagtcggggccgaggcccagggggaggtggcctgtcgcgggtcgcccggctcccggaggcgaggggggcgcgggcggatggcggagggcgcccagccgcagcagccgcctcagctcgggcccggcgccgccgcccggggcatgaagcgggagtcggagctggagctgccggtgcccggagcgggaggagacggagccgatcccggcctgagcaagcggccgcgcactgaggaggcggcggccgacggtggcggcgggatgcagaacgagcctctgactccaggttatcatggattcccagcgcgggacagccagggtaaccaggagccgacaacaactcctgacgcaatggttcagccttttactaccatcccatttccaccacctccgcagaatggaattcccacagagtatggggtgccacacactcaagactatgccggccagaccggtgagcataacctgacactctacggaagtacgcaagcccacggggagcagagcagcaactcacccagcacacaaaatggatctcttacgacagaaggtggagcacagacagacggccagcagtcacagacacaaagtagtgaaaattcagagagtaaatctaccccgaaacggctgcatgtctctaatattcctttccgcttccgggaccctgacctccggcagatgtttgggcagtttggcaaaatcctagatgtagaaataatctttaatgaacgtggctctaagggattcgggttcgtaactttcgagaatagtgctgatgcagacagggccagggagaaattacacggcaccgtggtagagggccgtaaaatcgaggtgaataatgctacagcacgtgtaatgaccaataagaagatggtcacaccatatgcaaatggttggaaattaagcccagtagttggagctgtatatggtccggagttatatgcagcatccagctttcaagcagatgtgtccctaggcaatgatgcagcagtgcccctatcaggaagagggggtatcaacacttacattcctttaatcattcctggcttcccttaccctactgcagccaccacggcagccgctttcagaggagcccatttgaggggcagagggcggacagtatatggtgcagtccgagcggtacctccaacagccatccccgcctatccaggggtggatatgcagcctacagatatgcacagcctgctactgcaaccgcagccaccgctgctgcagccgctgcagccgcttacagtgacggttatggcagggtgtacacagccgacccctaccatgcccttgcccctgccgctagctatggagttggcgctgtggcgagtttataccgaggtggctacagccgatttgccccctactgaagtgacgtgagacccctgcaaatgggactttctgtactcttggaagctgggctccttaaaggaggcctctagtgaacacctttatctccatgtccctcttagagcccagagagctgcccataggcattttccagaattcctcatgtcacctagttcaatttccattaactcagatcagccattgtgattcaccatttgtcaggctctcaggtttaacaaaacctactatcaccatcatccttcaacagccacagtctgaattgagccaacatttttttttctttgagaaagaagtggactggggcacaacttttagtctgaggggagctagtggaaatctagacaatagaagtcatcgatagcagcttttcctcaaatgtgtgactcctcaggggctaaactgctcttagcttagaattatgctttactagagatctagcagataagtgggttaatcactaccatcctgtaactagttatatagcttccagacatgagggagacatcaaacagggatggaagcaaccccaaggatatgcaagaagggcatgatgaacccccttccctctggcaggagaacaaggccaaccaagggacagactggaaagcacttagatgtttaaggaggagaaaggggaagctttgaccagtccttgccttttgccaagttcagccagttctccgctgcttgcaacctctagcgcagtaacatttgcagaattgcagattttcccccagatactaggaggaaagggactttggggggtggggaaggggtcgtggtgttttaaaagcataagttacctgtttgcactgttttaagataggaaaaaaaaatagtgggcaaggtgaacatcagacgtaaatttgtgtgtttttattttgtcatgctcttgaaaatgtttgaccatttgtagtatacacagtgaaacttgattctctgttgcataaaacactatatttttttggaaatgttactgtccaaaagcctcttccctccctttccttttcctatgtacttccttcatacttgctttactgatcagccaggcaatagccatccaagagctagagcatgaaacagggccctttccaagtaggctctgggtgtcctaagccagcgtgtgccctctggtttagtgagtgtaatagagtccctggcacctttctttgcaaatgaggctaacagaccagactgcagcaagttatcagattcctcaatcagatgcactaggagtgaggagcccagggatggagggggttcctgaagtattgcagttggctgtagtagctgagttcttttccatgttaccgaaactgtagccagttacagtttactcaggaaaacggtagatcaattcagccatggtagtgctggttggcagggattggtaacggagagaactgctcatcagccaaaactcaagccttgccttttaggaggccaccagcagagggacttggtcctccttgtctggtacttgtgtacatgccggtgacctgaggactccactcacactggcgagcaaaaagggagcagtgattctcttttctctccccaccccctgccctttgttaccaacaccagtttcccagggggtacatgagtttctgaatttttaaaaaatgtttttggtttggtttttctggggactgataagtgctttaagcaatgtccataccccgtcaagactcccagcttagtcattttcttgtatttttctgttcacagtatttgtgtgtgtgcttgttttggcagctcattttggctgtattatatattgagtgatgaattgatcctcttttttccctaagggatatgaattgtttttcttgtgttatattctgcttgtgaatagctggagcaaacctggggctgacacgcgtaagctagggctgcaaagcgagaagagagccggtggagtgtacttgtccctgacaggctgacctacctgagtctctgagcttttcagtccaaatctttgcaaggctcaaaatgccacagaacctctcctcttctccccactccccatggcagggaccggaccatccctacatgcaacatgctgttcctccagcccctcccattgccatggcaaaacaggtacctttggggcatgggggcattacatgggatgcttgtgtaatcgaccacctagccttctctctcccctcccgtcctcccccagaatcacttcctaggacacccgagctgcttgcccagggtcctgtttccctgctaactccagagaagcatcccagggctttgtgacagtctctaattcccttcccttctcgttaagaatcatattgtatagtagctttcagaccatacagtattcattgggttactcctattattatcaagtagctggaattgtgaaggtcggagtagttagatctttagcttttattccttatttttttgtattactctccatgtgtataaattattgatcatgttgctggcttttataaactctaagcgaaggaggagcactgcctcagcctttgcacatggtaatgaagcactgtttttaaataaaagagagaaacaccaaaaaaaaaaaaaagacacacaggggggggctaaattccgagggccgagtaacgtcccggttttgaaaggcctaagggggaaaaaagacggcggaaaccgagggaagcacggttgagagcc

SEQ ID NO: 317789 - DNA, 6807 bp, Homo sapiens
ggagggagctggagaaagaaggagggggagagactgccagagaggaagagaaaagaaaggaagaaacattagaaagaaaaaggaaggaaaacgaaaaagaaaatggtaactcagggtaaccaggagccgacaacaactcctgacgcaatggttcagccttttactaccatcccatttccaccacctccgcagaatggaattcccacagagtatggggtgccacacactcaagactatgccggccagaccggtgagcataacctgacactctacggaagtacgcaagcccacggggagcagagcagcaactcacccagcacacaaaatggatctcttacgacagaaggtggagcacagacagacggccagcagtcacagacacaaagtagtgaaaattcagagagtaaatctaccccgaaacggctgcatgtctctaatattcctttccgcttccgggaccctgacctccggcagatgtttgggcagtttggcaaaatcctagatgtagaaataatctttaatgaacgtggctctaagggattcgggttcgtaactttcgagaatagtgctgatgcagacagggccagggagaaattacacggcaccgtggtagagggccgtaaaatcgaggtgaataatgctacagcacgtgtaatgaccaataagaagatggtcacaccatatgcaaatggttggaaattaagcccagtagttggagctgtatatggtccggagttatatgcagcatccagctttcaagcagatgtgtccctaggcaatgatgcagcagtgcccctatcaggaagagggggtatcaacacttacattcctttaatcattcctggcttcccttaccctactgcagccaccacggcagccgctttcagaggagcccatttgaggggcagagggcggacagtatatggtgcagtccgagcggtacctccaacagccatccccgcctatccaggtgtggtttaccaggacggattttacggtgctgacctctatggtggatatgcagcctacagatatgcacagcctgctactgcaaccgcagccaccgctgctgcagccgctgcagccgcttacagtgacggttatggcagggtgtacacagccgacccctaccatgcccttgcccctgccgctagctatggagttggcgctgtggcgagtttataccgaggtggctacagccgatttgccccctactgaagtgacgtgagacccctgcaaatgggacagccccccagttcatgaggcctggctattgcaatatttactagtagaggaactctatagcaagatgaagaggaaaaacaaacaaacaaacaaaaaaaaacacaaaaaaagaaagaatacttttttatacctcactatgttctttgaatatgtatttttcctttaaatttctgcctttaattcttttgttccaaagattgtgcatttttttctttttttttttaaactgtggtaaaaaaaaaaaaaataatgcatttccatgtctgtatgtccgtgcttagcttattctatcaatcacggaagaggcagtcaaggaggaaggagagacattaggagccgataaatgcatctgatcagaaatcagcagacagaattaccaaagtgtatctggtgctgaatgactgggggacaagcagaagtggaagagatctttctgcaacaggatattcttctagtcttctgagtttctggtctttgacaggcaattctggttggctgtggctggaatccacatgctgatagataggaatttgtgcttacaaagcaggagaattaaaaagacgctttcctctcctcttccctcctgtcttctccgttctttttacaatcatcttacacgcacagcctgagacagctggcatagtttttggaattatagtattgatatttccaaacgtgctctcagacagtggataataaacacctcattaggaaaccgatctcagaatgaactctggagtatgaaaaagatcatttctttttgttcctgtaacctagcattccttctaggcttcttctcctttaattgaaccacagcttagctcatgtattcttttattaacaccctgctctcatgtccataagattcaggaatttaggacccagggacagaaaagtgaataagccagtgaccagatttcccccagatgtcttgaggattagaagtacaaattgttgacagccattaaagagggtgaggaagggaaaaggaatattagaagatctggtatttcttacttttttcttgcctcagaaagtacaaagtttaaaaaatagaataaagaatctgctggggaaagatagagtaccaggtcctaggtcagtagtccctggaagttttggtgatgaggacatggaagggcaggcagaggcactttgtacttgctccaaagccataggaattttcatcttccagagcctttatgagtcacttctctatccacagtcttgagcctgtggctatcccgctgagcttctcactgtcctccaaaaacaccccgctgagcacccggaccactttgtacacattaacactacaggacataaaatgcagaggccctgagattgctgccctcccatattggaaggagggtctgcgatggcaagggtcttctatatcaccagaaagagtcgcgcagtgagtcactgccgttgccatctggctgtaattttctatgttatcaaggtaggagggagtgtttctcttctagctgttagatagaactgataaaagcaagtgtcctacagcatttcccaaatgaaggcattaggaaatagaaaagcacggtctttttggctccctggtctagtcacattggtactagggtgacctttcacccaagggacagctgctaaagggagtaattcagagacatggagcttctggttatgggtttgttttgggtttgtttttaactcctgcctccacacatgttcttgactgataactgactcatgtccctgaattaaaatgactgacctatgacagcatcagcattctttgtaagcagagtgatatatctgagagggcgttgacctgttgtgtagaatacatatcctttcccccttcagaatcctgtctcgcctcgtaactgggagagaggctgtgcctgaaactaggggcgatgtcaaggaagctagaggcctcgatgcaattattactgactctggggaggaagacagagaataaggggacaccaactgcccagtccactggccatttttaagggtccccccaccccaagccaaagtttggtttgttgctgttaagacaatttttgttgtatgtatataaatattttagttagaggagcggggaatgggatgcgggctttcacagttctagggaatgggggcagggaggattttgcttttgcttttgctttgagggagaactttagctgactaaaaaaacagaagtttggggtcatgatcacaaaggggccattcccaaaagatggcaagccacgtattcagtggagactaggccaaattctaaatggttttatccatagcaggggagaataggagaatgagtttaagagtttttctcttcttttttcctagaaagaggtaaggataatgggaaaggtagagaaggcggctcccacagaccttttaagagaggcagaatcttgagcttgaggcaccttgagtgcatctcagttcagctggttctggctgaggcctccaaaggcaagctctgtgctttccagtggtttctgctgcatttccagggatggtgtttaacaccgcttcctccagctcccttttctaagaaagaataaatggagttctgctttttatgaaagggtctttggttttcagtgtcaacactgagaattggggctcttgcaagcatctggatttcacagtatcaacctccccgtcaccttttgaactttgagactccgtacggtcaacttcaccagaggcaggttgctcgaagcagcactgcttgtctgttcctgactctggttctcactgtattaaaaaaagagagtcagaggagtctggcatttcgtgagtttgttagaggatgctggctgataattccagaaaacttactgatgctaaatcacagtacatgcatgattctttttcagctttactatagttcatgacctggactttctgtactcttggaagctgggctccttaaaggaggcctctagtgaacacctttatctccatgtccctcttagagcccagagagctgcccataggcattttccagaattcctcatgtcacctagttcaatttccattaactcagatcagccattgtgattcaccatttgtcaggctctcaggtttaacaaaacctactatcaccatcatccttcaacagccacagtctgaattgagccaacatttttttttctttgagaaagaagtggactggggcacaacttttagtctgaggggagctagtggaaatctagacaatagaagtcatcgatagcagcttttcctcaaatgtgtgactcctcaggggctaaactgctcttagcttagaattatgctttactagagatctagcagataagtgggttaatcactaccatcctgtaactagttatatagcttccagacatgagggagacatcaaacagggatggaagcaaccccaaggatatgcaagaagggcatgatgaacccccttccctctggcaggagaacaaggccaaccaagggacagactggaaagcacttagatgtttaaggaggagaaaggggaagctttgaccagtccttgccttttgccaagttcagccagttctccgctgcttgcaacctctagcgcagtaacatttgcagaattgcagattttcccccagatactaggaggaaagggactttggggggtggggaaggggtcgtggtgttttaaaagcataagttacctgtttgcactgttttaagataggaaaaaaaaatagtgggcaaggtgaacatcagacgtaaatttgtgtgtttttattttgtcatgctcttgaaaatgtttgaccatttgtagtatacacagtgaaacttgattctctgttgcataaaacactatatttttttggaaatgttactgtccaaaagcctcttccctccctttccttttcctatgtacttccttcatacttgctttactgatcagccaggcaatagccatccaagagctagagcatgaaacagggccctttccaagtaggctctgggtgtcctaagccagcgtgtgccctctggtttagtgagtgtaatagagtccctggcacctttctttgcaaatgaggctaacagaccagactgcagcaagttatcagattcctcaatcagatgcactaggagtgaggagcccagggatggagggggttcctgaagtattgcagttggctgtagtagctgagttcttttccatgttaccgaaactgtagccagttacagtttactcaggaaaacggtagatcaattcagccatggtagtgctggttggcagggattggtaacggagagaactgctcatcagccaaaactcaagccttgccttttaggaggccaccagcagagggacttggtcctccttgtctggtacttgtgtacatgccggtgacctgaggactccactcacactggcgagcaaaaagggagcagtgattctcttttctctccccaccccctgccctttgttaccaacaccagtttcccagggggtacatgagtttctgaatttttaaaaaatgtttttggtttggtttttctggggactgataagtgctttaagcaatgtccataccccgtcaagactcccagcttagtcattttcttgtatttttctgttcacagtatttgtgtgtgtgcttgttttggcagctcattttggctgtattatatattgagtgatgaattgatcctcttttttccctaagggatatgaattgtttttcttgtgttatattctgcttgtgaatagctggagcaaacctggggctgacacgcgtaagctagggctgcaaagcgagaagagagccggtggagtgtacttgtccctgacaggctgacctacctgagtctctgagcttttcagtccaaatctttgcaaggctcaaaatgccacagaacctctcctcttctccccactccccatggcagggaccggaccatccctacatgcaacatgctgttcctccagcccctcccattgccatggcaaaacaggtacctttggggcatgggggcattacatgggatgcttgtgtaatcgaccacctagccttctctctcccctcccgtcctcccccagaatcacttcctaggacacccgagctgcttgcccagggtcctgtttccctgctaactccagagaagcatcccagggctttgtgacagtctctaattcccttcccttctcgttaagaatcatattgtatagtagctttcagaccatacagtattcattgggttactcctattattatcaagtagctggaattgtgaaggtcggagtagttagatctttagcttttattccttatttttttgtattactctccatgtgtataaattattgatcatgttgctggcttttataaactctaagcgaaggaggagcactgcctcagcctttgcacatggtaatgaagcactgtttttaaataaaagagagaaacaccaaaaaaaaaaaaaagacacacaggggggggctaaattccgagggccgagtaacgtcccggttttgaaaggcctaagggggaaaaaagacggcggaaaccgagggaagcacggttgagagcc

SEQ ID NO: 317790 - DNA, 6768 bp, Homo sapiens
taagcggacctgaaggtgtcctgctctgaacgtgctctgaccaggttatcatggattcccagcgcgggacagccaggtaaccaggagccgacaacaactcctgacgcaatggttcagccttttactaccatcccatttccaccacctccgcagaatggaattcccacagagtatggggtgccacacactcaagactatgccggccagaccggtgagcataacctgacactctacggaagtacgcaagcccacggggagcagagcagcaactcacccagcacacaaaatggatctcttacgacagaaggtggagcacagacagacggccagcagtcacagacacaaagtagtgaaaattcagagagtaaatctaccccgaaacggctgcatgtctctaatattcctttccgcttccgggaccctgacctccggcagatgtttgggcagtttggcaaaatcctagatgtagaaataatctttaatgaacgtggctctaagggattcgggttcgtaactttcgagaatagtgctgatgcagacagggccagggagaaattacacggcaccgtggtagagggccgtaaaatcgaggtgaataatgctacagcacgtgtaatgaccaataagaagatggtcacaccatatgcaaatggttggaaattaagcccagtagttggagctgtatatggtccggagttatatgcagcatccagctttcaagcagatgtgtccctaggcaatgatgcagcagtgcccctatcaggaagagggggtatcaacacttacattcctttaatcattcctggcttcccttaccctactgcagccaccacggcagccgctttcagaggagcccatttgaggggcagagggcggacagtatatggtgcagtccgagcggtacctccaacagccatccccgcctatccaggtgtggtttaccaggacggattttacggtgctgacctctatggtggatatgcagcctacagatatgcacagcctgctactgcaaccgcagccaccgctgctgcagccgctgcagccgcttacagtgacggttatggcagggtgtacacagccgacccctaccatgcccttgcccctgccgctagctatggagttggcgctgtggcgagtttataccgaggtggctacagccgatttgccccctactgaagtgacgtgagacccctgcaaatgggacagccccccagttcatgaggcctggctattgcaatatttactagtagaggaactctatagcaagatgaagaggaaaaacaaacaaacaaacaaaaaaaaacacaaaaaaagaaagaatacttttttatacctcactatgttctttgaatatgtatttttcctttaaatttctgcctttaattcttttgttccaaagattgtgcatttttttctttttttttttaaactgtggtaaaaaaaaaaaaaataatgcatttccatgtctgtatgtccgtgcttagcttattctatcaatcacggaagaggcagtcaaggaggaaggagagacattaggagccgataaatgcatctgatcagaaatcagcagacagaattaccaaagtgtatctggtgctgaatgactgggggacaagcagaagtggaagagatctttctgcaacaggatattcttctagtcttctgagtttctggtctttgacaggcaattctggttggctgtggctggaatccacatgctgatagataggaatttgtgcttacaaagcaggagaattaaaaagacgctttcctctcctcttccctcctgtcttctccgttctttttacaatcatcttacacgcacagcctgagacagctggcatagtttttggaattatagtattgatatttccaaacgtgctctcagacagtggataataaacacctcattaggaaaccgatctcagaatgaactctggagtatgaaaaagatcatttctttttgttcctgtaacctagcattccttctaggcttcttctcctttaattgaaccacagcttagctcatgtattcttttattaacaccctgctctcatgtccataagattcaggaatttaggacccagggacagaaaagtgaataagccagtgaccagatttcccccagatgtcttgaggattagaagtacaaattgttgacagccattaaagagggtgaggaagggaaaaggaatattagaagatctggtatttcttacttttttcttgcctcagaaagtacaaagtttaaaaaatagaataaagaatctgctggggaaagatagagtaccaggtcctaggtcagtagtccctggaagttttggtgatgaggacatggaagggcaggcagaggcactttgtacttgctccaaagccataggaattttcatcttccagagcctttatgagtcacttctctatccacagtcttgagcctgtggctatcccgctgagcttctcactgtcctccaaaaacaccccgctgagcacccggaccactttgtacacattaacactacaggacataaaatgcagaggccctgagattgctgccctcccatattggaaggagggtctgcgatggcaagggtcttctatatcaccagaaagagtcgcgcagtgagtcactgccgttgccatctggctgtaattttctatgttatcaaggtaggagggagtgtttctcttctagctgttagatagaactgataaaagcaagtgtcctacagcatttcccaaatgaaggcattaggaaatagaaaagcacggtctttttggctccctggtctagtcacattggtactagggtgacctttcacccaagggacagctgctaaagggagtaattcagagacatggagcttctggttatgggtttgttttgggtttgtttttaactcctgcctccacacatgttcttgactgataactgactcatgtccctgaattaaaatgactgacctatgacagcatcagcattctttgtaagcagagtgatatatctgagagggcgttgacctgttgtgtagaatacatatcctttcccccttcagaatcctgtctcgcctcgtaactgggagagaggctgtgcctgaaactaggggcgatgtcaaggaagctagaggcctcgatgcaattattactgactctggggaggaagacagagaataaggggacaccaactgcccagtccactggccatttttaagggtccccccaccccaagccaaagtttggtttgttgctgttaagacaatttttgttgtatgtatataaatattttagttagaggagcggggaatgggatgcgggctttcacagttctagggaatgggggcagggaggattttgcttttgcttttgctttgagggagaactttagctgactaaaaaaacagaagtttggggtcatgatcacaaaggggccattcccaaaagatggcaagccacgtattcagtggagactaggccaaattctaaatggttttatccatagcaggggagaataggagaatgagtttaagagtttttctcttcttttttcctagaaagaggtaaggataatgggaaaggtagagaaggcggctcccacagaccttttaagagaggcagaatcttgagcttgaggcaccttgagtgcatctcagttcagctggttctggctgaggcctccaaaggcaagctctgtgctttccagtggtttctgctgcatttccagggatggtgtttaacaccgcttcctccagctcccttttctaagaaagaataaatggagttctgctttttatgaaagggtctttggttttcagtgtcaacactgagaattggggctcttgcaagcatctggatttcacagtatcaacctccccgtcaccttttgaactttgagactccgtacggtcaacttcaccagaggcaggttgctcgaagcagcactgcttgtctgttcctgactctggttctcactgtattaaaaaaagagagtcagaggagtctggcatttcgtgagtttgttagaggatgctggctgataattccagaaaacttactgatgctaaatcacagtacatgcatgattctttttcagctttactatagttcatgacctggactttctgtactcttggaagctgggctccttaaaggaggcctctagtgaacacctttatctccatgtccctcttagagcccagagagctgcccataggcattttccagaattcctcatgtcacctagttcaatttccattaactcagatcagccattgtgattcaccatttgtcaggctctcaggtttaacaaaacctactatcaccatcatccttcaacagccacagtctgaattgagccaacatttttttttctttgagaaagaagtggactggggcacaacttttagtctgaggggagctagtggaaatctagacaatagaagtcatcgatagcagcttttcctcaaatgtgtgactcctcaggggctaaactgctcttagcttagaattatgctttactagagatctagcagataagtgggttaatcactaccatcctgtaactagttatatagcttccagacatgagggagacatcaaacagggatggaagcaaccccaaggatatgcaagaagggcatgatgaacccccttccctctggcaggagaacaaggccaaccaagggacagactggaaagcacttagatgtttaaggaggagaaaggggaagctttgaccagtccttgccttttgccaagttcagccagttctccgctgcttgcaacctctagcgcagtaacatttgcagaattgcagattttcccccagatactaggaggaaagggactttggggggtggggaaggggtcgtggtgttttaaaagcataagttacctgtttgcactgttttaagataggaaaaaaaaatagtgggcaaggtgaacatcagacgtaaatttgtgtgtttttattttgtcatgctcttgaaaatgtttgaccatttgtagtatacacagtgaaacttgattctctgttgcataaaacactatatttttttggaaatgttactgtccaaaagcctcttccctccctttccttttcctatgtacttccttcatacttgctttactgatcagccaggcaatagccatccaagagctagagcatgaaacagggccctttccaagtaggctctgggtgtcctaagccagcgtgtgccctctggtttagtgagtgtaatagagtccctggcacctttctttgcaaatgaggctaacagaccagactgcagcaagttatcagattcctcaatcagatgcactaggagtgaggagcccagggatggagggggttcctgaagtattgcagttggctgtagtagctgagttcttttccatgttaccgaaactgtagccagttacagtttactcaggaaaacggtagatcaattcagccatggtagtgctggttggcagggattggtaacggagagaactgctcatcagccaaaactcaagccttgccttttaggaggccaccagcagagggacttggtcctccttgtctggtacttgtgtacatgccggtgacctgaggactccactcacactggcgagcaaaaagggagcagtgattctcttttctctccccaccccctgccctttgttaccaacaccagtttcccagggggtacatgagtttctgaatttttaaaaaatgtttttggtttggtttttctggggactgataagtgctttaagcaatgtccataccccgtcaagactcccagcttagtcattttcttgtatttttctgttcacagtatttgtgtgtgtgcttgttttggcagctcattttggctgtattatatattgagtgatgaattgatcctcttttttccctaagggatatgaattgtttttcttgtgttatattctgcttgtgaatagctggagcaaacctggggctgacacgcgtaagctagggctgcaaagcgagaagagagccggtggagtgtacttgtccctgacaggctgacctacctgagtctctgagcttttcagtccaaatctttgcaaggctcaaaatgccacagaacctctcctcttctccccactccccatggcagggaccggaccatccctacatgcaacatgctgttcctccagcccctcccattgccatggcaaaacaggtacctttggggcatgggggcattacatgggatgcttgtgtaatcgaccacctagccttctctctcccctcccgtcctcccccagaatcacttcctaggacacccgagctgcttgcccagggtcctgtttccctgctaactccagagaagcatcccagggctttgtgacagtctctaattcccttcccttctcgttaagaatcatattgtatagtagctttcagaccatacagtattcattgggttactcctattattatcaagtagctggaattgtgaaggtcggagtagttagatctttagcttttattccttatttttttgtattactctccatgtgtataaattattgatcatgttgctggcttttataaactctaagcgaaggaggagcactgcctcagcctttgcacatggtaatgaagcactgtttttaaataaaagagagaaacaccaaaaaaaaaaaaaagacacacaggggggggctaaattccgagggccgagtaacgtcccggttttgaaaggcctaagggggaaaaaagacggcggaaaccgagggaagcacggttgagagcc

SEQ ID NO: 317791 - DNA, 6448 bp, Homo sapiens
aacatagaagttaaataagtagtttactgaagaagaaaaataaactattcccatttcagaagataacaaaatatgtggataaaaacctgaccataagtaaacgtttttatttttatctctgcagcagtttggcaaaatcctagatgtagaaataatctttaatgaacgtggctctaagggattcgggttcgtaactttcgagaatagtgctgatgcagacagggccagggagaaattacacggcaccgtggtagagggccgtaaaatcgaggtgaataatgctacagcacgtgtaatgaccaataagaagatggtcacaccatatgcaaatggttggaaattaagcccagtagttggagctgtatatggtccggagttatatgcagcatccagctttcaagcagatgtgtccctaggcaatgatgcagcagtgcccctatcaggaagagggggtatcaacacttacattcctttaatcattcctggcttcccttaccctactgcagccaccacggcagccgctttcagaggagcccatttgaggggcagagggcggacagtatatggtgcagtccgagcggtacctccaacagccatccccgcctatccaggtgtggtttaccaggacggattttacggtgctgacctctatggtggatatgcagcctacagatatgcacagcctgctactgcaaccgcagccaccgctgctgcagccgctgcagccgcttacagtgacggttatggcagggtgtacacagccgacccctaccatgcccttgcccctgccgctagctatggagttggcgctgtggcgagtttataccgaggtggctacagccgatttgccccctactgaagtgacgtgagacccctgcaaatgggacagccccccagttcatgaggcctggctattgcaatatttactagtagaggaactctatagcaagatgaagaggaaaaacaaacaaacaaacaaaaaaaaacacaaaaaaagaaagaatacttttttatacctcactatgttctttgaatatgtatttttcctttaaatttctgcctttaattcttttgttccaaagattgtgcatttttttctttttttttttaaactgtggtaaaaaaaaaaaaaataatgcatttccatgtctgtatgtccgtgcttagcttattctatcaatcacggaagaggcagtcaaggaggaaggagagacattaggagccgataaatgcatctgatcagaaatcagcagacagaattaccaaagtgtatctggtgctgaatgactgggggacaagcagaagtggaagagatctttctgcaacaggatattcttctagtcttctgagtttctggtctttgacaggcaattctggttggctgtggctggaatccacatgctgatagataggaatttgtgcttacaaagcaggagaattaaaaagacgctttcctctcctcttccctcctgtcttctccgttctttttacaatcatcttacacgcacagcctgagacagctggcatagtttttggaattatagtattgatatttccaaacgtgctctcagacagtggataataaacacctcattaggaaaccgatctcagaatgaactctggagtatgaaaaagatcatttctttttgttcctgtaacctagcattccttctaggcttcttctcctttaattgaaccacagcttagctcatgtattcttttattaacaccctgctctcatgtccataagattcaggaatttaggacccagggacagaaaagtgaataagccagtgaccagatttcccccagatgtcttgaggattagaagtacaaattgttgacagccattaaagagggtgaggaagggaaaaggaatattagaagatctggtatttcttacttttttcttgcctcagaaagtacaaagtttaaaaaatagaataaagaatctgctggggaaagatagagtaccaggtcctaggtcagtagtccctggaagttttggtgatgaggacatggaagggcaggcagaggcactttgtacttgctccaaagccataggaattttcatcttccagagcctttatgagtcacttctctatccacagtcttgagcctgtggctatcccgctgagcttctcactgtcctccaaaaacaccccgctgagcacccggaccactttgtacacattaacactacaggacataaaatgcagaggccctgagattgctgccctcccatattggaaggagggtctgcgatggcaagggtcttctatatcaccagaaagagtcgcgcagtgagtcactgccgttgccatctggctgtaattttctatgttatcaaggtaggagggagtgtttctcttctagctgttagatagaactgataaaagcaagtgtcctacagcatttcccaaatgaaggcattaggaaatagaaaagcacggtctttttggctccctggtctagtcacattggtactagggtgacctttcacccaagggacagctgctaaagggagtaattcagagacatggagcttctggttatgggtttgttttgggtttgtttttaactcctgcctccacacatgttcttgactgataactgactcatgtccctgaattaaaatgactgacctatgacagcatcagcattctttgtaagcagagtgatatatctgagagggcgttgacctgttgtgtagaatacatatcctttcccccttcagaatcctgtctcgcctcgtaactgggagagaggctgtgcctgaaactaggggcgatgtcaaggaagctagaggcctcgatgcaattattactgactctggggaggaagacagagaataaggggacaccaactgcccagtccactggccatttttaagggtccccccaccccaagccaaagtttggtttgttgctgttaagacaatttttgttgtatgtatataaatattttagttagaggagcggggaatgggatgcgggctttcacagttctagggaatgggggcagggaggattttgcttttgcttttgctttgagggagaactttagctgactaaaaaaacagaagtttggggtcatgatcacaaaggggccattcccaaaagatggcaagccacgtattcagtggagactaggccaaattctaaatggttttatccatagcaggggagaataggagaatgagtttaagagtttttctcttcttttttcctagaaagaggtaaggataatgggaaaggtagagaaggcggctcccacagaccttttaagagaggcagaatcttgagcttgaggcaccttgagtgcatctcagttcagctggttctggctgaggcctccaaaggcaagctctgtgctttccagtggtttctgctgcatttccagggatggtgtttaacaccgcttcctccagctcccttttctaagaaagaataaatggagttctgctttttatgaaagggtctttggttttcagtgtcaacactgagaattggggctcttgcaagcatctggatttcacagtatcaacctccccgtcaccttttgaactttgagactccgtacggtcaacttcaccagaggcaggttgctcgaagcagcactgcttgtctgttcctgactctggttctcactgtattaaaaaaagagagtcagaggagtctggcatttcgtgagtttgttagaggatgctggctgataattccagaaaacttactgatgctaaatcacagtacatgcatgattctttttcagctttactatagttcatgacctggactttctgtactcttggaagctgggctccttaaaggaggcctctagtgaacacctttatctccatgtccctcttagagcccagagagctgcccataggcattttccagaattcctcatgtcacctagttcaatttccattaactcagatcagccattgtgattcaccatttgtcaggctctcaggtttaacaaaacctactatcaccatcatccttcaacagccacagtctgaattgagccaacatttttttttctttgagaaagaagtggactggggcacaacttttagtctgaggggagctagtggaaatctagacaatagaagtcatcgatagcagcttttcctcaaatgtgtgactcctcaggggctaaactgctcttagcttagaattatgctttactagagatctagcagataagtgggttaatcactaccatcctgtaactagttatatagcttccagacatgagggagacatcaaacagggatggaagcaaccccaaggatatgcaagaagggcatgatgaacccccttccctctggcaggagaacaaggccaaccaagggacagactggaaagcacttagatgtttaaggaggagaaaggggaagctttgaccagtccttgccttttgccaagttcagccagttctccgctgcttgcaacctctagcgcagtaacatttgcagaattgcagattttcccccagatactaggaggaaagggactttggggggtggggaaggggtcgtggtgttttaaaagcataagttacctgtttgcactgttttaagataggaaaaaaaaatagtgggcaaggtgaacatcagacgtaaatttgtgtgtttttattttgtcatgctcttgaaaatgtttgaccatttgtagtatacacagtgaaacttgattctctgttgcataaaacactatatttttttggaaatgttactgtccaaaagcctcttccctccctttccttttcctatgtacttccttcatacttgctttactgatcagccaggcaatagccatccaagagctagagcatgaaacagggccctttccaagtaggctctgggtgtcctaagccagcgtgtgccctctggtttagtgagtgtaatagagtccctggcacctttctttgcaaatgaggctaacagaccagactgcagcaagttatcagattcctcaatcagatgcactaggagtgaggagcccagggatggagggggttcctgaagtattgcagttggctgtagtagctgagttcttttccatgttaccgaaactgtagccagttacagtttactcaggaaaacggtagatcaattcagccatggtagtgctggttggcagggattggtaacggagagaactgctcatcagccaaaactcaagccttgccttttaggaggccaccagcagagggacttggtcctccttgtctggtacttgtgtacatgccggtgacctgaggactccactcacactggcgagcaaaaagggagcagtgattctcttttctctccccaccccctgccctttgttaccaacaccagtttcccagggggtacatgagtttctgaatttttaaaaaatgtttttggtttggtttttctggggactgataagtgctttaagcaatgtccataccccgtcaagactcccagcttagtcattttcttgtatttttctgttcacagtatttgtgtgtgtgcttgttttggcagctcattttggctgtattatatattgagtgatgaattgatcctcttttttccctaagggatatgaattgtttttcttgtgttatattctgcttgtgaatagctggagcaaacctggggctgacacgcgtaagctagggctgcaaagcgagaagagagccggtggagtgtacttgtccctgacaggctgacctacctgagtctctgagcttttcagtccaaatctttgcaaggctcaaaatgccacagaacctctcctcttctccccactccccatggcagggaccggaccatccctacatgcaacatgctgttcctccagcccctcccattgccatggcaaaacaggtacctttggggcatgggggcattacatgggatgcttgtgtaatcgaccacctagccttctctctcccctcccgtcctcccccagaatcacttcctaggacacccgagctgcttgcccagggtcctgtttccctgctaactccagagaagcatcccagggctttgtgacagtctctaattcccttcccttctcgttaagaatcatattgtatagtagctttcagaccatacagtattcattgggttactcctattattatcaagtagctggaattgtgaaggtcggagtagttagatctttagcttttattccttatttttttgtattactctccatgtgtataaattattgatcatgttgctggcttttataaactctaagcgaaggaggagcactgcctcagcctttgcacatggtaatgaagcactgtttttaaataaaagagagaaacaccaaaaaaaaaaaaaagacacacaggggggggctaaattccgagggccgagtaacgtcccggttttgaaaggcctaagggggaaaaaagacggcggaaaccgagggaagcacggttgagagcc

SEQ ID NO: 317792 - DNA, 6928 bp, Homo sapiens
cgcgacagtcggggccgaggcccagggggaggtggcctgtcgcgggtcgcccggctcccggaggcgaggggggcgcgggcggatggcggagggcgcccagccgcagcagccgcctcagctcgggcccggcgccgccgcccggggcatgaagcgggagtcggagctggagctgccggtgcccggagcgggaggagacggagccgatcccggcctgagcaagcggccgcgcactgaggaggcggcggccgacggtggcggcgggatgcagaacgagcctctgactccaggttatcatggattcccagcgcgggacagccagggtaaccaggagccgacaacaactcctgacgcaatggttcagccttttactaccatcccatttccaccacctccgcagaatggaattcccacagagtatggggtgccacacactcaagactatgccggccagaccggtgagcataacctgacactctacggaagtacgcaagcccacggggagcagagcagcaactcacccagcacacaaaatggatctcttacgacagaaggtggagcacagacagacggccagcagtcacagacacaaagtagtgaaaattcagagagtaaatctaccccgaaacggctgcatgtctctaatattcctttccgcttccgggaccctgacctccggcagatgtttgggcagtttggcaaaatcctagatgtagaaataatctttaatgaacgtggctctaagggattcgggttcgtaactttcgagaatagtgctgatgcagacagggccagggagaaattacacggcaccgtggtagagggccgtaaaatcgaggtgaataatgctacagcacgtgtaatgaccaataagaagatggtcacaccatatgcaaatggttggaaattaagcccagtagttggagctgtatatggtccggagttatatgcagcatccagctttcaagcagatgtgtccctaggcaatgatgcagcagtgcccctatcaggaagagggggtatcaacacttacattcctttaatcattcctggcttcccttaccctactgcagccaccacggcagccgctttcagaggagcccatttgaggggcagagggcggacagtatatggtgcagtccgagcggtacctccaacagccatccccgcctatccaggtgtggtttaccaggacggattttacggtgctgacctctatggtggatatgcagcctacagatatgcacagcctgctactgcaaccgcagccaccgctgctgcagccgctgcagccgcttacagtgacggttatggcagggtgtacacagccgacccctaccatgcccttgcccctgccgctagctatggagttggcgctgtggcgagtttataccgaggtggctacagccgatttgccccctactgaagtgacgtgagacccctgcaaatgggacagccccccagttcatgaggcctggctattgcaatatttactagtagaggaactctatagcaagatgaagaggaaaaacaaacaaacaaacaaaaaaaaacacaaaaaaagaaagaatacttttttatacctcactatgttctttgaatatgtatttttcctttaaatttctgcctttaattcttttgttccaaagattgtgcatttttttctttttttttttaaactgtggtaaaaaaaaaaaaaataatgcatttccatgtctgtatgtccgtgcttagcttattctatcaatcacggaagaggcagtcaaggaggaaggagagacattaggagccgataaatgcatctgatcagaaatcagcagacagaattaccaaagtgtatctggtgctgaatgactgggggacaagcagaagtggaagagatctttctgcaacaggatattcttctagtcttctgagtttctggtctttgacaggcaattctggttggctgtggctggaatccacatgctgatagataggaatttgtgcttacaaagcaggagaattaaaaagacgctttcctctcctcttccctcctgtcttctccgttctttttacaatcatcttacacgcacagcctgagacagctggcatagtttttggaattatagtattgatatttccaaacgtgctctcagacagtggataataaacacctcattaggaaaccgatctcagaatgaactctggagtatgaaaaagatcatttctttttgttcctgtaacctagcattccttctaggcttcttctcctttaattgaaccacagcttagctcatgtattcttttattaacaccctgctctcatgtccataagattcaggaatttaggacccagggacagaaaagtgaataagccagtgaccagatttcccccagatgtcttgaggattagaagtacaaattgttgacagccattaaagagggtgaggaagggaaaaggaatattagaagatctggtatttcttacttttttcttgcctcagaaagtacaaagtttaaaaaatagaataaagaatctgctggggaaagatagagtaccaggtcctaggtcagtagtccctggaagttttggtgatgaggacatggaagggcaggcagaggcactttgtacttgctccaaagccataggaattttcatcttccagagcctttatgagtcacttctctatccacagtcttgagcctgtggctatcccgctgagcttctcactgtcctccaaaaacaccccgctgagcacccggaccactttgtacacattaacactacaggacataaaatgcagaggccctgagattgctgccctcccatattggaaggagggtctgcgatggcaagggtcttctatatcaccagaaagagtcgcgcagtgagtcactgccgttgccatctggctgtaattttctatgttatcaaggtaggagggagtgtttctcttctagctgttagatagaactgataaaagcaagtgtcctacagcatttcccaaatgaaggcattaggaaatagaaaagcacggtctttttggctccctggtctagtcacattggtactagggtgacctttcacccaagggacagctgctaaagggagtaattcagagacatggagcttctggttatgggtttgttttgggtttgtttttaactcctgcctccacacatgttcttgactgataactgactcatgtccctgaattaaaatgactgacctatgacagcatcagcattctttgtaagcagagtgatatatctgagagggcgttgacctgttgtgtagaatacatatcctttcccccttcagaatcctgtctcgcctcgtaactgggagagaggctgtgcctgaaactaggggcgatgtcaaggaagctagaggcctcgatgcaattattactgactctggggaggaagacagagaataaggggacaccaactgcccagtccactggccatttttaagggtccccccaccccaagccaaagtttggtttgttgctgttaagacaatttttgttgtatgtatataaatattttagttagaggagcggggaatgggatgcgggctttcacagttctagggaatgggggcagggaggattttgcttttgcttttgctttgagggagaactttagctgactaaaaaaacagaagtttggggtcatgatcacaaaggggccattcccaaaagatggcaagccacgtattcagtggagactaggccaaattctaaatggttttatccatagcaggggagaataggagaatgagtttaagagtttttctcttcttttttcctagaaagaggtaaggataatgggaaaggtagagaaggcggctcccacagaccttttaagagaggcagaatcttgagcttgaggcaccttgagtgcatctcagttcagctggttctggctgaggcctccaaaggcaagctctgtgctttccagtggtttctgctgcatttccagggatggtgtttaacaccgcttcctccagctcccttttctaagaaagaataaatggagttctgctttttatgaaagggtctttggttttcagtgtcaacactgagaattggggctcttgcaagcatctggatttcacagtatcaacctccccgtcaccttttgaactttgagactccgtacggtcaacttcaccagaggcaggttgctcgaagcagcactgcttgtctgttcctgactctggttctcactgtattaaaaaaagagagtcagaggagtctggcatttcgtgagtttgttagaggatgctggctgataattccagaaaacttactgatgctaaatcacagtacatgcatgattctttttcagctttactatagttcatgacctggactttctgtactcttggaagctgggctccttaaaggaggcctctagtgaacacctttatctccatgtccctcttagagcccagagagctgcccataggcattttccagaattcctcatgtcacctagttcaatttccattaactcagatcagccattgtgattcaccatttgtcaggctctcaggtttaacaaaacctactatcaccatcatccttcaacagccacagtctgaattgagccaacatttttttttctttgagaaagaagtggactggggcacaacttttagtctgaggggagctagtggaaatctagacaatagaagtcatcgatagcagcttttcctcaaatgtgtgactcctcaggggctaaactgctcttagcttagaattatgctttactagagatctagcagataagtgggttaatcactaccatcctgtaactagttatatagcttccagacatgagggagacatcaaacagggatggaagcaaccccaaggatatgcaagaagggcatgatgaacccccttccctctggcaggagaacaaggccaaccaagggacagactggaaagcacttagatgtttaaggaggagaaaggggaagctttgaccagtccttgccttttgccaagttcagccagttctccgctgcttgcaacctctagcgcagtaacatttgcagaattgcagattttcccccagatactaggaggaaagggactttggggggtggggaaggggtcgtggtgttttaaaagcataagttacctgtttgcactgttttaagataggaaaaaaaaatagtgggcaaggtgaacatcagacgtaaatttgtgtgtttttattttgtcatgctcttgaaaatgtttgaccatttgtagtatacacagtgaaacttgattctctgttgcataaaacactatatttttttggaaatgttactgtccaaaagcctcttccctccctttccttttcctatgtacttccttcatacttgctttactgatcagccaggcaatagccatccaagagctagagcatgaaacagggccctttccaagtaggctctgggtgtcctaagccagcgtgtgccctctggtttagtgagtgtaatagagtccctggcacctttctttgcaaatgaggctaacagaccagactgcagcaagttatcagattcctcaatcagatgcactaggagtgaggagcccagggatggagggggttcctgaagtattgcagttggctgtagtagctgagttcttttccatgttaccgaaactgtagccagttacagtttactcaggaaaacggtagatcaattcagccatggtagtgctggttggcagggattggtaacggagagaactgctcatcagccaaaactcaagccttgccttttaggaggccaccagcagagggacttggtcctccttgtctggtacttgtgtacatgccggtgacctgaggactccactcacactggcgagcaaaaagggagcagtgattctcttttctctccccaccccctgccctttgttaccaacaccagtttcccagggggtacatgagtttctgaatttttaaaaaatgtttttggtttggtttttctggggactgataagtgctttaagcaatgtccataccccgtcaagactcccagcttagtcattttcttgtatttttctgttcacagtatttgtgtgtgtgcttgttttggcagctcattttggctgtattatatattgagtgatgaattgatcctcttttttccctaagggatatgaattgtttttcttgtgttatattctgcttgtgaatagctggagcaaacctggggctgacacgcgtaagctagggctgcaaagcgagaagagagccggtggagtgtacttgtccctgacaggctgacctacctgagtctctgagcttttcagtccaaatctttgcaaggctcaaaatgccacagaacctctcctcttctccccactccccatggcagggaccggaccatccctacatgcaacatgctgttcctccagcccctcccattgccatggcaaaacaggtacctttggggcatgggggcattacatgggatgcttgtgtaatcgaccacctagccttctctctcccctcccgtcctcccccagaatcacttcctaggacacccgagctgcttgcccagggtcctgtttccctgctaactccagagaagcatcccagggctttgtgacagtctctaattcccttcccttctcgttaagaatcatattgtatagtagctttcagaccatacagtattcattgggttactcctattattatcaagtagctggaattgtgaaggtcggagtagttagatctttagcttttattccttatttttttgtattactctccatgtgtataaattattgatcatgttgctggcttttataaactctaagcgaaggaggagcactgcctcagcctttgcacatggtaatgaagcactgttttaaacaggactcgccgtgtctcgcgtcgtgcgcgcgggggtggaggcggtgtgggggtg

SEQ ID NO: 317793 - DNA, 5932 bp, Homo sapiens
aacttgttttcaactgtgtattgtttcccttctgtgctaattcatgtaaataatgaaataaaatgtcgtcatactctccttgagaatatcaggtcagcaataaatgtgttgggctctggtctgagcaccttagaagcagaagttggtttcctgacttcactgcacaaggcaatgcttgatcagttgctttgaggcttcgaagcaggctgtttctagatccctctctggacatttttcttcactgttaatgcttctctcatcaaccttttaattatttttatctctttaattactgcaggcgagtttataccgaggtggctacagccgatttgccccctactgaagtgacgtgagacccctgcaaatgggacagccccccagttcatgaggcctggctattgcaatatttactagtagaggaactctatagcaagatgaagaggaaaaacaaacaaacaaacaaaaaaaaacacaaaaaaagaaagaatacttttttatacctcactatgttctttgaatatgtatttttcctttaaatttctgcctttaattcttttgttccaaagattgtgcatttttttctttttttttttaaactgtggtaaaaaaaaaaaaaataatgcatttccatgtctgtatgtccgtgcttagcttattctatcaatcacggaagaggcagtcaaggaggaaggagagacattaggagccgataaatgcatctgatcagaaatcagcagacagaattaccaaagtgtatctggtgctgaatgactgggggacaagcagaagtggaagagatctttctgcaacaggatattcttctagtcttctgagtttctggtctttgacaggcaattctggttggctgtggctggaatccacatgctgatagataggaatttgtgcttacaaagcaggagaattaaaaagacgctttcctctcctcttccctcctgtcttctccgttctttttacaatcatcttacacgcacagcctgagacagctggcatagtttttggaattatagtattgatatttccaaacgtgctctcagacagtggataataaacacctcattaggaaaccgatctcagaatgaactctggagtatgaaaaagatcatttctttttgttcctgtaacctagcattccttctaggcttcttctcctttaattgaaccacagcttagctcatgtattcttttattaacaccctgctctcatgtccataagattcaggaatttaggacccagggacagaaaagtgaataagccagtgaccagatttcccccagatgtcttgaggattagaagtacaaattgttgacagccattaaagagggtgaggaagggaaaaggaatattagaagatctggtatttcttacttttttcttgcctcagaaagtacaaagtttaaaaaatagaataaagaatctgctggggaaagatagagtaccaggtcctaggtcagtagtccctggaagttttggtgatgaggacatggaagggcaggcagaggcactttgtacttgctccaaagccataggaattttcatcttccagagcctttatgagtcacttctctatccacagtcttgagcctgtggctatcccgctgagcttctcactgtcctccaaaaacaccccgctgagcacccggaccactttgtacacattaacactacaggacataaaatgcagaggccctgagattgctgccctcccatattggaaggagggtctgcgatggcaagggtcttctatatcaccagaaagagtcgcgcagtgagtcactgccgttgccatctggctgtaattttctatgttatcaaggtaggagggagtgtttctcttctagctgttagatagaactgataaaagcaagtgtcctacagcatttcccaaatgaaggcattaggaaatagaaaagcacggtctttttggctccctggtctagtcacattggtactagggtgacctttcacccaagggacagctgctaaagggagtaattcagagacatggagcttctggttatgggtttgttttgggtttgtttttaactcctgcctccacacatgttcttgactgataactgactcatgtccctgaattaaaatgactgacctatgacagcatcagcattctttgtaagcagagtgatatatctgagagggcgttgacctgttgtgtagaatacatatcctttcccccttcagaatcctgtctcgcctcgtaactgggagagaggctgtgcctgaaactaggggcgatgtcaaggaagctagaggcctcgatgcaattattactgactctggggaggaagacagagaataaggggacaccaactgcccagtccactggccatttttaagggtccccccaccccaagccaaagtttggtttgttgctgttaagacaatttttgttgtatgtatataaatattttagttagaggagcggggaatgggatgcgggctttcacagttctagggaatgggggcagggaggattttgcttttgcttttgctttgagggagaactttagctgactaaaaaaacagaagtttggggtcatgatcacaaaggggccattcccaaaagatggcaagccacgtattcagtggagactaggccaaattctaaatggttttatccatagcaggggagaataggagaatgagtttaagagtttttctcttcttttttcctagaaagaggtaaggataatgggaaaggtagagaaggcggctcccacagaccttttaagagaggcagaatcttgagcttgaggcaccttgagtgcatctcagttcagctggttctggctgaggcctccaaaggcaagctctgtgctttccagtggtttctgctgcatttccagggatggtgtttaacaccgcttcctccagctcccttttctaagaaagaataaatggagttctgctttttatgaaagggtctttggttttcagtgtcaacactgagaattggggctcttgcaagcatctggatttcacagtatcaacctccccgtcaccttttgaactttgagactccgtacggtcaacttcaccagaggcaggttgctcgaagcagcactgcttgtctgttcctgactctggttctcactgtattaaaaaaagagagtcagaggagtctggcatttcgtgagtttgttagaggatgctggctgataattccagaaaacttactgatgctaaatcacagtacatgcatgattctttttcagctttactatagttcatgacctggactttctgtactcttggaagctgggctccttaaaggaggcctctagtgaacacctttatctccatgtccctcttagagcccagagagctgcccataggcattttccagaattcctcatgtcacctagttcaatttccattaactcagatcagccattgtgattcaccatttgtcaggctctcaggtttaacaaaacctactatcaccatcatccttcaacagccacagtctgaattgagccaacatttttttttctttgagaaagaagtggactggggcacaacttttagtctgaggggagctagtggaaatctagacaatagaagtcatcgatagcagcttttcctcaaatgtgtgactcctcaggggctaaactgctcttagcttagaattatgctttactagagatctagcagataagtgggttaatcactaccatcctgtaactagttatatagcttccagacatgagggagacatcaaacagggatggaagcaaccccaaggatatgcaagaagggcatgatgaacccccttccctctggcaggagaacaaggccaaccaagggacagactggaaagcacttagatgtttaaggaggagaaaggggaagctttgaccagtccttgccttttgccaagttcagccagttctccgctgcttgcaacctctagcgcagtaacatttgcagaattgcagattttcccccagatactaggaggaaagggactttggggggtggggaaggggtcgtggtgttttaaaagcataagttacctgtttgcactgttttaagataggaaaaaaaaatagtgggcaaggtgaacatcagacgtaaatttgtgtgtttttattttgtcatgctcttgaaaatgtttgaccatttgtagtatacacagtgaaacttgattctctgttgcataaaacactatatttttttggaaatgttactgtccaaaagcctcttccctccctttccttttcctatgtacttccttcatacttgctttactgatcagccaggcaatagccatccaagagctagagcatgaaacagggccctttccaagtaggctctgggtgtcctaagccagcgtgtgccctctggtttagtgagtgtaatagagtccctggcacctttctttgcaaatgaggctaacagaccagactgcagcaagttatcagattcctcaatcagatgcactaggagtgaggagcccagggatggagggggttcctgaagtattgcagttggctgtagtagctgagttcttttccatgttaccgaaactgtagccagttacagtttactcaggaaaacggtagatcaattcagccatggtagtgctggttggcagggattggtaacggagagaactgctcatcagccaaaactcaagccttgccttttaggaggccaccagcagagggacttggtcctccttgtctggtacttgtgtacatgccggtgacctgaggactccactcacactggcgagcaaaaagggagcagtgattctcttttctctccccaccccctgccctttgttaccaacaccagtttcccagggggtacatgagtttctgaatttttaaaaaatgtttttggtttggtttttctggggactgataagtgctttaagcaatgtccataccccgtcaagactcccagcttagtcattttcttgtatttttctgttcacagtatttgtgtgtgtgcttgttttggcagctcattttggctgtattatatattgagtgatgaattgatcctcttttttccctaagggatatgaattgtttttcttgtgttatattctgcttgtgaatagctggagcaaacctggggctgacacgcgtaagctagggctgcaaagcgagaagagagccggtggagtgtacttgtccctgacaggctgacctacctgagtctctgagcttttcagtccaaatctttgcaaggctcaaaatgccacagaacctctcctcttctccccactccccatggcagggaccggaccatccctacatgcaacatgctgttcctccagcccctcccattgccatggcaaaacaggtacctttggggcatgggggcattacatgggatgcttgtgtaatcgaccacctagccttctctctcccctcccgtcctcccccagaatcacttcctaggacacccgagctgcttgcccagggtcctgtttccctgctaactccagagaagcatcccagggctttgtgacagtctctaattcccttcccttctcgttaagaatcatattgtatagtagctttcagaccatacagtattcattgggttactcctattattatcaagtagctggaattgtgaaggtcggagtagttagatctttagcttttattccttatttttttgtattactctccatgtgtataaattattgatcatgttgctggcttttataaactctaagcgaaggaggagcactgcctcagcctttgcacatggtaatgaagcactgtttttaaataaaagagagaaacaccaaaaaaaaaaaaaagacacacaggggggggctaaattccgagggccgagtaacgtcccggttttgaaaggcctaagggggaaaaaagacggcggaaaccgagggaagcacggttgagagcc

SEQ ID NO: 317794 - DNA, 2503 bp, Homo sapiens
  misc_feature (2491)..(2491): n is a, c, g, or t
cgcgacagtcggggccgaggcccagggggaggtggcctgtcgcgggtcgcccggctcccggaggcgaggggggcgcgggcggatggcggagggcgcccagccgcagcagccgcctcagctcgggcccggcgccgccgcccggggcatgaagcgggagtcggagctggagctgccggtgcccggagcgggaggagacggagccgatcccggcctgagcaagcggccgcgcactgaggaggcggcggccgacggtggcggcgggatgcagaacgagcctctgactccaggttatcatggattcccagcgcgggacagccagggtaaccaggagccgacaacaactcctgacgcaatggttcagccttttactaccatcccatttccaccacctccgcagaatggaattcccacagagtatggggtgccacacactcaagactatgccggccagaccggtgagcataacctgacactctacggaagtacgcaagcccacggggagcagagcagcaactcacccagcacacaaaatggatctcttacgacagaaggtggagcacagacagacggccagcagtcacagacacaaagtagtgaaaattcagagagtaaatctaccccgaaacggctgcatgtctctaatattcctttccgcttccgggaccctgacctccggcagatgtttgggcagtttggcaaaatcctagatgtagaaataatctttaatgaacgtggctctaagggattcgggttcgtaactttcgagaatagtgctgatgcagacagggccagggagaaattacacggcaccgtggtagagggccgtaaaatcgaggtgaataatgctacagcacgtgtaatgaccaataagaagatggtcacaccatatgcaaatggttggaaattaagcccagtagttggagctgtatatggtccggagttatatgcagcatccagctttcaagcagatgtgtccctaggcaatgatgcagcagtgcccctatcaggaagagggggtatcaacacttacattcctttaatcattcctggcttcccttaccctactgcagccaccacggcagccgctttcagaggagcccatttgaggggcagagggcggacagtatatggtgcagtccgagcggtacctccaacagccatccccgcctatccaggtgtggtttaccaggacggattttacggtgctgacctctatggtggatatgcagcctacagatatgcacagcctgctactgcaaccgcagccaccgctgctgcagccgctgcagccgcttacagtgacggttatggcagggtgtacacagccgacccctaccatgcccttgcccctgccgctagctatggagttggcgctgtggcgagtttataccgaggtggctacagccgatttgccccctactgaagtgacgtgagacccctgcaaatgggacagccccccagttcatgaggcctggctattgcaatatttactagtagaggaactctatagcaagatgaagaggaaaaacaaacaaacaaacaaaaaaaaacacaaaaaaagaaagaatacttttttatacctcactatgttctttgaatatgtatttttcctttaaatttctgcctttaattcttttgttccaaagattgtgcatttttttctttttttttttaaactgtggtaaaaaaaaaaaaaataatgcatttccatgtctgtatgtccgtgcttagcttattctatcaatcacggaagaggcagtcaaggaggaaggagagacattaggagccgataaatgcatctgatcagaaatcagcagacagaattaccaaagtgtatctggtgctgaatgactgggggacaagcagaagtggaagagatctttctgcaacaggatattcttctagtcttctgagtttctggtctttgacaggcaattctggttggctgtggctggaatccacatgctgatagataggaatttgtgcttacaaagcaggagaattaaaaagacgctttcctctcctcttccctcctgtcttctccgttctttttacaatcatcttacacgcacagcctgagacagctggcatagtttttggaattatagtattgatatttccaaacgtgctctcagacagtggataataaacacctcattaggaaaccgatctcagaatgaactctggagtatgaaaaagatcatttctttttgttcctgtaacctagcattccttctaggcttcttctcctttaattgaaccacagcttagctcatgtattcttttattaacaccctgctctcatgtccataagattcaggaatttaggacccagggacagaaaagtgaataagccagtgaccagatttcccccagatgtcttgaggattagaagtacaaatgggacagccccccagttcatgaggcctggctattgcaatatttactagtagaggaactctatagcaagatgaagaggaaaaacaaacanacaaacaaaaaa

SEQ ID NO: 317795 - DNA, 1810 bp, Homo sapiens
cgcgacagtcggggccgaggcccagggggaggtggcctgtcgcgggtcgcccggctcccggaggcgaggggggcgcgggcggatggcggagggcgcccagccgcagcagccgcctcagctcgggcccggcgccgccgcccggggcatgaagcgggagtcggagctggagctgccggtgcccggagcgggaggagacggagccgatcccggcctgagcaagcggccgcgcactgaggaggcggcggccgacggtggcggcgggatgcagaacgagcctctgactccaggttatcatggattcccagcgcgggacagccagggtaaccaggagccgacaacaactcctgacgcaatggttcagccttttactaccatcccatttccaccacctccgcagaatggaattcccacagagtatggggtgccacacactcaagactatgccggccagaccggtgagcataacctgacactctacggaagtacgcaagcccacggggagcagagcagcaactcacccagcacacaaaatggatctcttacgacagaaggtggagcacagacagacggccagcagtcacagacacaaagtagtgaaaattcagagagtaaatctaccccgaaacggctgcatgtctctaatattcctttccgcttccgggaccctgacctccggcagatgtttgggcagtttggcaaaatcctagatgtagaaataatctttaatgaacgtggctctaagggattcgggttcgtaactttcgagaatagtgctgatgcagacagggccagggagaaattacacggcaccgtggtagagggccgtaaaatcgaggtgaataatgctacagcacgtgtaatgaccaataagaagatggtcacaccatatgcaaatggttggaaattaagcccagtagttggagctgtatatggtccggagttatatgcagcatccagctttcaagcagatgtgtccctaggcaatgatgcagcagtgcccctatcaggaagagggggtatcaacacttacattcctttaatcattcctggcttcccttaccctactgcagccaccacggcagccgctttcagaggagcccatttgaggggcagagggcggacagtatatggtgcagtccgagcggtacctccaacagccatccccgcctatccaggggtggatatgcagcctacagatatgcacagcctgctactgcaaccgcagccaccgctgctgcagccgctgcagccgcttacagtgacggttatggcagggtgtacacagccgacccctaccatgcccttgcccctgccgctagctatggagttggcgctgtggcgagtttataccgaggtggctacagccgatttgccccctactgaagtgacgtgagacccctgcaaatgggacagccccccagttcatgaggcctggctattgcaatatttactagtagaggaactctatagcaagatgaagaggaaaaacaaacaaacaaacaaaaaaaaacacaaaaaaagaaagaatacttttttatacctcactgaaccaaggaggtgaaagacctctaaaaggaaaactacaaaaacactgctgaaagaaatcacagatggcacaaacaactggaaacaaattcccggctcatggatatgtagaatcaatattgtgaaaatgaccacactgccaaaagcaatctacaaattgaatgcaattcaaatcaaaataccaccataattcttcacagaactagaaaaaaataattctaaaattcatatgaaacccaaaaaagagtctgtatagccaaagcaa

SEQ ID NO: 317796 - DNA, 972 bp, Homo sapiens
cggagtattagcaggcgtaccgtttttatttagtacatgggactgggttagttaacatactgggcgtgccgtacaatcaaaagcgaggggggcgcgggcggatggcggagggcgcccagccgcagcagccgcctcagctcgggcccggcgccgccgcccggggcatgaagcgggagtcggagctggagctgccggtgcccggagcgggaggagacggagccgatcccggcctgagcaagcggccgcgcactgaggaggcggcggccgacggtggcggcgggatgcagaacgagcctctgactccaggttatcatggattcccagcgcgggacagccaggttggtatctgctgtttgtaactcagatgatgtatgtgtgtggtgtgtttcatcaaagggttgctatgatagagagcatttcctgaaattacttactttgaaaggaaatgtggcttgtttcagcagtgaatttacttttacagatgtaaattaagcatatttttaaattctataagtattatgttattaaaattgtggatattagaagagaaaataatcactcaagcacagtcatgattggttttgtattttcttctccaggctacataataattttttgacctggttttcttgatgccttataattctgaatgctggacttgtctctttattacctgccagttagcccctgcctgcacagagtttttgagtccttgtaatgatctgtagcaagaaaattccattctcctccctgggggaattcagccttatggttttaatcagggaaagcttgcctgagaaagcaaagtttctgccacctttctttgttagatgggaggatgactggaaaagcccaggccctattatgggtcagagcagaattgcttcctacgagacaccctcagtatggtttaggcaagtgtgtaaaatgccttccctatctttttgttgtttgaatacttgagcccatgac

SEQ ID NO: 317797 - DNA, 2752 bp, Homo sapiens
gcggaagtgccggcctggagcccgctctaggtgggtgtcccctcggtgcttcccagctgccgtctgcaccagccatggactgctacacggcgaactggaacccactcggggactctgccttttaccggaaatatgagctgtacagcatggactgggacctgaaggaggaactcagggattgcctggtggctgctgcaccctatgggggccccattgcactgctgaggaacccctggcggaaggagaaagctgctagtgtgaggccagtgctcgatatatactctgcttccggcatgcctctggccagcctgctgtggaagagtggacccgtggtgtccctgggctggtcagctgaggaggagctgctctgtgtgcaggaagatggtgctgtactggtttatgggcttcatggtgacttccggagacacttcagcatgggcaatgaagtgctccagaaccgggttctggatgcccggatctttcacactgagtttggttccggagtggccatcctcacaggggcccaccgcttcaccctcagtgccaatgtgggtgacctcaaactccgccggatgccagaggtgccaggtctgcaaagtgcaccctcctgctggactgtgctgtgccaggaccgagtggcacacattcttctggctgtggggcctgacctttacctcttggaccatgcagcctgctccgcagtgacgccccctggcctggccccaggagtaagcagcttcctacagatggctgtctccttcacctaccgacacctggcactcttcacagacacaggctacatctggatggggacagcatcactcaaggagaagctatgtgagttcaactgcaacatccgggcacctccaaagcagatggtctggtgcagccgtcctcgtagcaaggagagggccgtggtggtggcctgggaaaggcggctgatggtggtgggcgatgcacccgagagcatccagtttgtgctggatgaggactcctacctggtgcctgagctcgatggggtccgcatcttctcccgcagcacccacgagttcctgcatgaggttccagcggccagcgaggaaatcttcaaaattgcctcaatggcccccggggcgctgctcctggaggctcagaaggagtatgagaaagagagccagaaggcggacgagtacctgcgggagatccaggagctgggccagctgacccaggccgtgcagcagtgcattgaggctgcaggacatgagcaccagccagacatgcagaagagtctgctcagggccgcctccttcggaaagtgtttcctggacagatttccacccgacagcttcgtgcacatgtgtcaggacctgcgtgtgctcaatgctgttcgggactatcacatcgggatcccgctcacctatagccaatataagcagctcaccatccaggtgctgctggacaggctcgtgttgcggagactttaccccctggccatccagatatgcgagtacttgcgccttcctgaagtacagggcgtcagcaggatcctggcccactgggcctgctacaaggtgcaacagaaggatgtctcagatgaggatgtggctcgagccattaaccagaagctgggggacacgcctggtgtctcttactccgacattgctgcacgagcctatggttgtggccgcacggagctggccatcaagctgctggagtatgagccacgctcaggggagcaggtaccccttctcctaaagatgaagaggagcaaactggcactaagcaaggccatcgagagcggggacactgacctggtgttcacggtgttgctgcacctgaagaacgagctgaaccgaggagattttttcatgacccttcggaatcagcccatggccctcagtttgtaccgacagttctgtaagcatcaggagctagagacgctgaaggacctttacaatcaggatgacaatcaccaggaattgggcagcttccacatccgagccagctatgctgcagaagagcgtattgaggggcgagtagcagctctgcagacagccgccgatgccttctacaaggccaagaatgagtttgcagccaaggctacagaggatcaaatgcggctcctacggctgcagcggcgcctagaagacgagctggggggccagttcctagacctgtctctacatgacacagttaccaccctcattcttggcggtcacaacaagcgtgcagagcagctggcacgtgacttccgcatccctgacaagaggctctggtggctgaagctgactgccctggcagatttggaagattgggaagagctagagaagttttccaagagcaagaaatcacccattggctacctgccttttgtggagatctgcatgaaacaacataacaaatacgaagccaagaagtatgcttcccgcgtgggtcccgagcagaaggtcaaggctttgcttcttgttggcgatgtggctcaggctgcagatgtggccatcgaacaccggaatgaggctgagctgagcctcgtattgtcccactgcacgggagccacagatggggccacagctgacaagattcaacgggccagggcacaagcccagaagaagtgaggagtccatcctgtacatctcaagcaaggggttcctcccctagcacctgggcttggcagaagggccatagttcatccagctcctcccctagagcaatgctgaggagcgggggcatggtagcagggctgtctggttttaaataaagttggaacacttca

SEQ ID NO: 317798 - DNA, 235 bp, Homo sapiens
gggccaagatgttcgctcgacgctaggtctattcagaattgaacagcaagttgtacccacagctgttaggatagggattgaaggtgtgcccccaagctcagaaaaaaatcctcccctctctccctggtcccctcccccatccccaccactgatatcatggggagtaataggaccagagcggtatctctggcaccacactagggactatcaggtaataaaagctttgactccctga

SEQ ID NO: 317799 - DNA, 450 bp, Homo sapiens
tctctacctggtgtggctgtgctctgcagtgagccacatgagcctgaatatactgttggggttccctggttggattccagtgtgccaagggtaaacaggagtatcccgaggtactcggtcaccccagcatgctgctgcctcagggtgtgcatgacctgtctctaaaaaagcccgattatttttaaaggcgatttagaaaggctgaattgatgagcaggaatacagaggtgtgatttgcctctcccacctctgtgctccattcttcactgtgatcattttctcattaggtttaagaaatacaagcaagctgggagccattccaattctttccgcttatccaacggccgcactgaggatgtgggtaaggcattccttaatgtcatggggaaccttcacaaggaaggaaatcaagaaattaggagtttctccatccttttaaaagaataagac

SEQ ID NO: 317800 - DNA, 1214 bp, Homo sapiens
gtaccttcccttccttcccatctgattccttatcagtatttacacatgattagttcttgcctaacctaatagaccctttcttgagtgcaaatcagtggctatttttgctagggtataaaaattacctatctaatcaccttgacaaagttaccctgttatttccaataacttacttcctatggattcttgtagattttcttttttttttttttaatttttttattttcagatgttttctcgctttgtcaccatgcctggcctaaattctcgtaggttttctatgtaaacaatcagattttctgcaagtattagtctcctttctaattgttataattttaatttctttttctttttaaaatttttcgtagagacaaggttttgctatgttgtccagcctggtcttgaactcctgggctcaagcaatcctcccatctcagcctcccaaatgtgtattacagtggcatgagccactgtgcctggccaaatttcttttcttgttgcgaaggcagacttttcatacaatactgaatagaagtgatagtagattactttatttctgattttcaaaggaatgctttccgtttctctctgttgaagataattgcgtattgtttttttttttaaatagtaacttttatcaggttaaggaaggtttcttctatttctatttaaaaggattttttaaaatcttgaattcatatgtttttatctaatgcattttctacatcagttgaaatggttgtatgaactcttttaatatgggtgaattatatttatagattttatgttaaaatatccttgtatatcttggataaactcaactggatcatgatttatctttttttatatgctagattcaatttgttgatactttgttatgatttttgaatatatattattgtgtaaaagtgagcctgtgattttctttcttgtaatgtttctgtccagttttggtgcctggttttgctctctccttagaatgagctgggaactagtcactcttgttttctcacctataatagcatctgggtccagtgttttttatgtgggacaaatttgaacttgtggtcaacctctttaattgtaaggatattcaggtcttttgttcttcctgggctagttttttattctttttctagagattcgttcatttttcttagttttatttgcctataattgtggataatctgttttttatctgctacttctgtaat

SEQ ID NO: 317801 - DNA, 5417 bp, Homo sapiens
gcggaagtgccggcctggagcccgctctaggtgggtgtcccctcggtgcttcccagctgccgtctgcaccagccatggactgctacacggcgaactggaacccactcggggactctgccttttaccggaaatatgagctgtacagcatggactgggacctgaaggaggaactcagggattgcctggtggctgctgcaccctatgggggccccattgcactgctgaggaacccctggcggaaggagaaagctgctagtgtgaggccagtgctcgatatatactctgcttccggcatgcctctggccagcctgctgtggaagagtggacccgtggtgtccctgggctggtcagctgaggaggagctgctctgtgtgcaggaagatggtgctgtactggtttatgggcttcatggtgacttccggagacacttcagcatgggcaatgaagtgctccagaaccgggttctggatgcccggatctttcacactgagtttggttccggagtggccatcctcacaggggcccaccgcttcaccctcagtgccaatgtgggtgacctcaaactccgccggatgccagaggtgccaggtctgcaaagtgcaccctcctgctggactgtgctgtgccaggaccgagtggcacacattcttctggctgtggggcctgacctttacctcttggaccatgcagcctgctccgcagtgacgccccctggcctggccccaggagtaagcagcttcctacagatggctgtctccttcacctaccgacacctggcactcttcacagacacaggctacatctggatggggacagcatcactcaaggagaagctatgtgagttcaactgcaacatccgggcacctccaaagcagatggtctggtgcagccgtcctcgtagcaaggagagggccgtggtggtggcctgggaaaggcggctgatggtggtgggcgatgcacccgagagcatccagtttgtgctggatgaggactcctacctggtgcctgagctcgatggggtccgcatcttctcccgcagcacccacgagttcctgcatgaggttccagcggccagcgaggaaatcttcaaaattgcctcaatggcccccggggcgctgctcctggaggctcagaaggagtatgagaaagagagccagaaggcggacgagtacctgcgggagatccaggagctgggccagctgacccaggccgtgcagcagtgcattgaggctgcaggacatgagcaccagccagacatgcagaagagtctgctcagggttggcctggatggccgggccggggagggtggggctgggagggggtgggatgggcagcagggaagctctctcctatcgccctctggctcttctcaggccgcctccttcggaaagtgtttcctggacagatttccacccgacagcttcgtgcacatgtgtcaggacctgcgtgtgctcaatgctgttcgggactatcacatcgggatcccgctcacctatagccaatataagcagctcaccatccaggtgctgctggacaggctcgtgttgcggagactttaccccctggccatccagatatgcgagtacttgcgccttcctgaagtacagggcgtcagcaggatcctggcccactgggcctgctacaaggtgcaacagaaggatgtctcagatgaggatgtggctcgagccattaaccagaagctgggggacacgcctggtgtctcttactccgacattgctgcacgagcctatggttgtggccgcacggagctggccatcaagctgctggagtatgagccacgctcaggggagcaggtaccccttctcctaaagatgaagaggagcaaactggcactaagcaaggccatcgagagcggggacactgacctggtgttcacggtgttgctgcacctgaagaacgagctgaaccgaggagattttttcatgacccttcggaatcagcccatggccctcagtttgtaccgacagttctgtaagcatcaggagctagagacgctgaaggacctttacaatcaggatgacaatcaccaggaattgggcagcttccacatccgagccagctatgctgcagaagagcgtattgaggggcgagtagcagctctgcagacagccgccgatgccttctacaaggccaagaatgagtttgcagccaaggctacagaggatcaaatgcggctcctacggctgcagcggcgcctagaagacgagctggggggccagttcctagacctgtctctacatgacacagttaccaccctcattcttggcggtcacaacaagcgtgcagagcagctggcacgtgacttccgcatccctgacaagaggtgacacaactaaaaaaaaacaaaggtatttatggaattccactgagtggtaatggatgatgcagttcaaataactaaggacacatgttcaaagagcataattaactttttaaaagaagctaataagcatggattcctggttcattcttgttctgctcggcagtggtctgatatgtgtcagtgccaacaatgctaccacagttgcaccttctgtaggaattacaagattaattaactcatcaacggcagaaccagttaaagaagaggccaaaacttcaaatccaacttcttcactaacttctctttctgtggcaccaacattcagcccaaatataactctgggacccacctatttaaccactgtcaattcttcagactctgacaatgggaccacaagaacagcaagcaccaattctataggcattacaatttcaccaaatggaacgtggcttccagataaccagttcacggatgccagaacagaaccctgggaggggaattccagcaccgcagcaaccactccagaaactttccctccttcaggtaattctgactcgaaggacagaagagatgagacaccaattattgcggtgatggtggccctgtcctctctgctagtgatcgtgtttattatcatagttttgtacatgttaaggtttaagaaatacaagcaagctgggagccattccaattctttccgcttatccaacggccgcactgaggatgtggagccccagagtgtgccacttctggccagatccccaagcaccaacaggaaatacccacccctgcccgtggacaagctggaagaggaaattaaccggagaatggcagacgacaataagctcttcagggaggaattcaacgctctccctgcatgtcctatccaggccacctgtgaggctgcttccaaggaggaaaacaaggaaaaaaatcgatatgtaaacatcttgccttatgaccactctagagtccacctgacaccggttgaaggggttccagattctgattacatcaatgcttcattcatcaacggttaccaagaaaagaacaaattcattgctgcacaaggaccaaaagaagaaacggtgaatgatttctggcggatgatctgggaacaaaacacagccaccatcgtcatggttaccaacctgaaggagagaaaggagtgcaagtgcgcccagtactggccagaccaaggctgctggacctatgggaatattcgggtgtctgtagaggatgtgactgtcctggtggactacacagtacggaagttctgcatccagcaggtgggcgacatgaccaacagaaagccacagcgcctcatcactcagttccactttaccagctggccagactttggggtgccttttaccccgatcggcatgctcaagttcctcaagaaggtgaaggcctgtaaccctcagtatgcaggggccatcgtggtccactgcagtgcaggtgtagggcgtacaggtacctttgtcgtcattgatgccatgctggacatgatgcatacagaacggaaggtggacgtgtatggctttgtgagccggatccgggcacagcgctgccagatggtgcaaaccgatatgcagtatgtcttcatataccaagcccttctggagcattatctctatggagatacagaactggaagtgacctctctagaaacccacctgcagaaaatttacaacaaaatcccagggaccagcaacaatggattagaggaggagtttaagaagttaacatcaatcaaaatccagaatgacaagatgcggactggaaaccttccagccaacatgaagaagaaccgtgttttacagatcattccatatgaattcaacagagtgatcattccagttaagcggggcgaagagaatacagactatgtgaacgcatcctttattgatggctaccggcagaaggactcctatatcgccagccagggccctcttctccacacaattgaggacttctggcgaatgatctgggagtggaaatcctgctctatcgtgatgctaacagaactggaggagagaggccaggagaagtgtgcccagtactggccatctgatggactggtgtcctatggagatattacagtggaactgaagaaggaggaggaatgtgagagctacaccgtccgagacctcctggtcaccaacaccagggagaataagagccggcagatccggcagttccacttccatggctggcctgaagtgggcatccccagtgacggaaagggcatgatcagcatcatcgccgccgtgcagaagcagcagcagcagtcagggaaccaccccatcaccgtgcactgcagcgccggggcaggaaggacggggaccttctgtgccctgagcaccgtcctggagcgtgtgaaagcagaggggattttggatgtcttccagactgtcaagagcctgcggctacagaggccacacatggtccagacactggaacagtatgagttctgctacaaggtggtgcaggagtatattgatgcattctcagattatgccaacttcaagtaagcggcaacaagggtccgtggaccaggaggattgcctttaatattttgtaatattctgttttgttaatataccccaaattgtgtatatatcttataactgttttagaaattggtacataggcttctattacctattaggtggaaattttatatgtaaatgtgttagcactgatagtcctttttccaatgttttattggggaattaaatagtgtgatgtttggattgatatcgtgaaatcctcagccgagaaattgggctggattgtgctttggttaatacatctttccctaaagaagataaacacaaaatccattccaggtagctcggcaccaactaagaaaaaaagcacaaagttctcagagctctcgaggaaagtggttgtccccgtaccaccatgcactgtaaatatccctcccctctctccctggtcccctcccccatccccaccactgatatcatggggagtaataggaccagagcggtatctctggcaccacactagggactatcaggtaataaaagctttgactccctga

SEQ ID NO: 317802 - DNA, 5321 bp, Homo sapiens
gcggaagtgccggcctggagcccgctctaggtgggtgtcccctcggtgcttcccagctgccgtctgcaccagccatggactgctacacggcgaactggaacccactcggggactctgccttttaccggaaatatgagctgtacagcatggactgggacctgaaggaggaactcagggattgcctggtggctgctgcaccctatgggggccccattgcactgctgaggaacccctggcggaaggagaaagctgctagtgtgaggccagtgctcgatatatactctgcttccggcatgcctctggccagcctgctgtggaagagtggacccgtggtgtccctgggctggtcagctgaggaggagctgctctgtgtgcaggaagatggtgctgtactggtttatgggcttcatggtgacttccggagacacttcagcatgggcaatgaagtgctccagaaccgggttctggatgcccggatctttcacactgagtttggttccggagtggccatcctcacaggggcccaccgcttcaccctcagtgccaatgtgggtgacctcaaactccgccggatgccagaggtgccaggtctgcaaagtgcaccctcctgctggactgtgctgtgccaggaccgagtggcacacattcttctggctgtggggcctgacctttacctcttggaccatgcagcctgctccgcagtgacgccccctggcctggccccaggagtaagcagcttcctacagatggctgtctccttcacctaccgacacctggcactcttcacagacacaggctacatctggatggggacagcatcactcaaggagaagctatgtgagttcaactgcaacatccgggcacctccaaagcagatggtctggtgcagccgtcctcgtagcaaggagagggccgtggtggtggcctgggaaaggcggctgatggtggtgggcgatgcacccgagagcatccagtttgtgctggatgaggactcctacctggtgcctgagctcgatggggtccgcatcttctcccgcagcacccacgagttcctgcatgaggttccagcggccagcgaggaaatcttcaaaattgcctcaatggcccccggggcgctgctcctggaggctcagaaggagtatgagaaagagagccagaaggcggacgagtacctgcgggagatccaggagctgggccagctgacccaggccgtgcagcagtgcattgaggctgcaggacatgagcaccagccagacatgcagaagagtctgctcagggccgcctccttcggaaagtgtttcctggacagatttccacccgacagcttcgtgcacatgtgtcaggacctgcgtgtgctcaatgctgttcgggactatcacatcgggatcccgctcacctatagccaatataagcagctcaccatccaggtgctgctggacaggctcgtgttgcggagactttaccccctggccatccagatatgcgagtacttgcgccttcctgaagtacagggcgtcagcaggatcctggcccactgggcctgctacaaggtgcaacagaaggatgtctcagatgaggatgtggctcgagccattaaccagaagctgggggacacgcctggtgtctcttactccgacattgctgcacgagcctatggttgtggccgcacggagctggccatcaagctgctggagtatgagccacgctcaggggagcaggtaccccttctcctaaagatgaagaggagcaaactggcactaagcaaggccatcgagagcggggacactgacctggtgttcacggtgttgctgcacctgaagaacgagctgaaccgaggagattttttcatgacccttcggaatcagcccatggccctcagtttgtaccgacagttctgtaagcatcaggagctagagacgctgaaggacctttacaatcaggatgacaatcaccaggaattgggcagcttccacatccgagccagctatgctgcagaagagcgtattgaggggcgagtagcagctctgcagacagccgccgatgccttctacaaggccaagaatgagtttgcagccaaggctacagaggatcaaatgcggctcctacggctgcagcggcgcctagaagacgagctggggggccagttcctagacctgtctctacatgacacagttaccaccctcattcttggcggtcacaacaagcgtgcagagcagctggcacgtgacttccgcatccctgacaagaggtgacacaactaaaaaaaaacaaaggtatttatggaattccactgagtggtaatggatgatgcagttcaaataactaaggacacatgttcaaagagcataattaactttttaaaagaagctaataagcatggattcctggttcattcttgttctgctcggcagtggtctgatatgtgtcagtgccaacaatgctaccacagttgcaccttctgtaggaattacaagattaattaactcatcaacggcagaaccagttaaagaagaggccaaaacttcaaatccaacttcttcactaacttctctttctgtggcaccaacattcagcccaaatataactctgggacccacctatttaaccactgtcaattcttcagactctgacaatgggaccacaagaacagcaagcaccaattctataggcattacaatttcaccaaatggaacgtggcttccagataaccagttcacggatgccagaacagaaccctgggaggggaattccagcaccgcagcaaccactccagaaactttccctccttcaggtaattctgactcgaaggacagaagagatgagacaccaattattgcggtgatggtggccctgtcctctctgctagtgatcgtgtttattatcatagttttgtacatgttaaggtttaagaaatacaagcaagctgggagccattccaattctttccgcttatccaacggccgcactgaggatgtggagccccagagtgtgccacttctggccagatccccaagcaccaacaggaaatacccacccctgcccgtggacaagctggaagaggaaattaaccggagaatggcagacgacaataagctcttcagggaggaattcaacgctctccctgcatgtcctatccaggccacctgtgaggctgcttccaaggaggaaaacaaggaaaaaaatcgatatgtaaacatcttgccttatgaccactctagagtccacctgacaccggttgaaggggttccagattctgattacatcaatgcttcattcatcaacggttaccaagaaaagaacaaattcattgctgcacaaggaccaaaagaagaaacggtgaatgatttctggcggatgatctgggaacaaaacacagccaccatcgtcatggttaccaacctgaaggagagaaaggagtgcaagtgcgcccagtactggccagaccaaggctgctggacctatgggaatattcgggtgtctgtagaggatgtgactgtcctggtggactacacagtacggaagttctgcatccagcaggtgggcgacatgaccaacagaaagccacagcgcctcatcactcagttccactttaccagctggccagactttggggtgccttttaccccgatcggcatgctcaagttcctcaagaaggtgaaggcctgtaaccctcagtatgcaggggccatcgtggtccactgcagtgcaggtgtagggcgtacaggtacctttgtcgtcattgatgccatgctggacatgatgcatacagaacggaaggtggacgtgtatggctttgtgagccggatccgggcacagcgctgccagatggtgcaaaccgatatgcagtatgtcttcatataccaagcccttctggagcattatctctatggagatacagaactggaagtgacctctctagaaacccacctgcagaaaatttacaacaaaatcccagggaccagcaacaatggattagaggaggagtttaagaagttaacatcaatcaaaatccagaatgacaagatgcggactggaaaccttccagccaacatgaagaagaaccgtgttttacagatcattccatatgaattcaacagagtgatcattccagttaagcggggcgaagagaatacagactatgtgaacgcatcctttattgatggctaccggcagaaggactcctatatcgccagccagggccctcttctccacacaattgaggacttctggcgaatgatctgggagtggaaatcctgctctatcgtgatgctaacagaactggaggagagaggccaggagaagtgtgcccagtactggccatctgatggactggtgtcctatggagatattacagtggaactgaagaaggaggaggaatgtgagagctacaccgtccgagacctcctggtcaccaacaccagggagaataagagccggcagatccggcagttccacttccatggctggcctgaagtgggcatccccagtgacggaaagggcatgatcagcatcatcgccgccgtgcagaagcagcagcagcagtcagggaaccaccccatcaccgtgcactgcagcgccggggcaggaaggacggggaccttctgtgccctgagcaccgtcctggagcgtgtgaaagcagaggggattttggatgtcttccagactgtcaagagcctgcggctacagaggccacacatggtccagacactggaacagtatgagttctgctacaaggtggtgcaggagtatattgatgcattctcagattatgccaacttcaagtaagcggcaacaagggtccgtggaccaggaggattgcctttaatattttgtaatattctgttttgttaatataccccaaattgtgtatatatcttataactgttttagaaattggtacataggcttctattacctattaggtggaaattttatatgtaaatgtgttagcactgatagtcctttttccaatgttttattggggaattaaatagtgtgatgtttggattgatatcgtgaaatcctcagccgagaaattgggctggattgtgctttggttaatacatctttccctaaagaagataaacacaaaatccattccaggtagctcggcaccaactaagaaaaaaagcacaaagttctcagagctctcgaggaaagtggttgtccccgtaccaccatgcactgtaaatatccctcccctctctccctggtcccctcccccatccccaccactgatatcatggggagtaataggaccagagcggtatctctggcaccacactagggactatcaggtaataaaagctttgactccctga

SEQ ID NO: 317803 - DNA, 5490 bp, Homo sapiens
gcggaagtgccggcctggagcccgctctaggtgggtgtcccctcggtgcttcccagctgccgtctgcaccagccatggactgctacacggcgaactggaacccactcggggactctgccttttaccggaaatatgagctgtacagcatggactgggacctgaaggaggaactcagggattgcctggtggctgctgcaccctatgggggccccattgcactgctgaggaacccctggcggaaggagaaagctgctagtgtgaggccagtgctcgatatatactctgcttccggcatgcctctggccagcctgctgtggaagagtggacccgtggtgtccctgggctggtcagctgaggaggagctgctctgtgtgcaggaagatggtgctgtactggtttatgggcttcatggtgacttccggagacacttcagcatgggcaatgaagtgctccagaaccgggttctggatgcccggatctttcacactgagtttggttccggagtggccatcctcacaggggcccaccgcttcaccctcagtgccaatgtgggtgacctcaaactccgccggatgccagaggtgccaggtctgcaaagtgcaccctcctgctggactgtgctgtgccaggaccgagtggcacacattcttctggctgtggggcctgacctttacctcttggaccatgcagcctgctccgcagtgacgccccctggcctggccccaggagtaagcagcttcctacagatggctgtctccttcacctaccgacacctggcactcttcacagacacaggctacatctggatggggacagcatcactcaaggagaagctatgtgagttcaactgcaacatccgggcacctccaaagcagatggtctggtgcagccgtcctcgtagcaaggagagggccgtggtggtggcctgggaaaggcggctgatggtggtgggcgatgcacccgagagcatccagtttgtgctggatgaggactcctacctggtgcctgagctcgatggggtccgcatcttctcccgcagcacccacgagttcctgcatgaggttccagcggccagcgaggaaatcttcaaagagagccagaaggcggacgagtacctgcgggagatccaggagctgggccagctgacccaggccgtgcagcagtgcattgaggctgcaggacatgagcaccagccagacatgcagaagagtctgctcagggttggcctggatggccgggccggggagggtggggctgggagggggtgggatgggcagcagggaagctctctcctatcgccctctggctcttctcaggccgcctccttcggaaagtgtttcctggacagatttccacccgacagcttcgtgcacatgtgtcaggacctgcgtgtgctcaatgctgttcgggactatcacatcgggatcccgctcacctatagccagtatccctgtgcacgccagaagggtaccctacagccaggggtggcaggggaaggggctggagatgcgtctgcaggtacctggcaagcggggcttattctccaactggatccttaaccgaggaaaatacagatataagcagctcaccatccaggtgctgctggacaggctcgtgttgcggagactttaccccctggccatccagatatgcgagtacttgcgccttcctgaagtacagggcgtcagcaggatcctggcccactgggcctgctacaaggtgcaacagaaggatgtctcagatgaggatgtggctcgagccattaaccagaagctgggggacacgcctggtgtctcttactccgacattgctgcacgagcctatggttgtggccgcacggagctggccatcaagctgctggagtatgagccacgctcaggggagcaggtaccccttctcctaaagatgaagaggagcaaactggcactaagcaaggccatcgagagcggggacactgacctggtgttcacggtgttgctgcacctgaagaacgagctgaaccgaggagattttttcatgacccttcggaatcagcccatggccctcagtttgtaccgacagttctgtaagcatcaggagctagagacgctgaaggacctttacaatcaggatgacaatcaccaggaattgggcagcttccacatccgagccagctatgctgcagaagagcgtattgaggggcgagtagcagctctgcagacagccgccgatgccttctacaaggccaagaatgagtttgcagccaaggctacagaggatcaaatgcggctcctacggctgcagcggcgcctagaagacgagctggggggccagttcctagacctgtctctacatgacacagttaccaccctcattcttggcggtcacaacaagcgtgcagagcagctggcacgtgacttccgcatccctgacaagaggtgacacaactaaaaaaaaacaaaggtatttatggaattccactgagtggtaatggatgatgcagttcaaataactaaggacacatgttcaaagagcataattaactttttaaaagaagctaataagcatggattcctggttcattcttgttctgctcggcagtggtctgatatgtgtcagtgccaacaatgctaccacagttgcaccttctgtaggaattacaagattaattaactcatcaacggcagaaccagttaaagaagaggccaaaacttcaaatccaacttcttcactaacttctctttctgtggcaccaacattcagcccaaatataactctgggacccacctatttaaccactgtcaattcttcagactctgacaatgggaccacaagaacagcaagcaccaattctataggcattacaatttcaccaaatggaacgtggcttccagataaccagttcacggatgccagaacagaaccctgggaggggaattccagcaccgcagcaaccactccagaaactttccctccttcaggtaattctgactcgaaggacagaagagatgagacaccaattattgcggtgatggtggccctgtcctctctgctagtgatcgtgtttattatcatagttttgtacatgttaaggtttaagaaatacaagcaagctgggagccattccaattctttccgcttatccaacggccgcactgaggatgtggagccccagagtgtgccacttctggccagatccccaagcaccaacaggaaatacccacccctgcccgtggacaagctggaagaggaaattaaccggagaatggcagacgacaataagctcttcagggaggaattcaacgctctccctgcatgtcctatccaggccacctgtgaggctgcttccaaggaggaaaacaaggaaaaaaatcgatatgtaaacatcttgccttatgaccactctagagtccacctgacaccggttgaaggggttccagattctgattacatcaatgcttcattcatcaacggttaccaagaaaagaacaaattcattgctgcacaaggaccaaaagaagaaacggtgaatgatttctggcggatgatctgggaacaaaacacagccaccatcgtcatggttaccaacctgaaggagagaaaggagtgcaagtgcgcccagtactggccagaccaaggctgctggacctatgggaatattcgggtgtctgtagaggatgtgactgtcctggtggactacacagtacggaagttctgcatccagcaggtgggcgacatgaccaacagaaagccacagcgcctcatcactcagttccactttaccagctggccagactttggggtgccttttaccccgatcggcatgctcaagttcctcaagaaggtgaaggcctgtaaccctcagtatgcaggggccatcgtggtccactgcagtgcaggtgtagggcgtacaggtacctttgtcgtcattgatgccatgctggacatgatgcatacagaacggaaggtggacgtgtatggctttgtgagccggatccgggcacagcgctgccagatggtgcaaaccgatatgcagtatgtcttcatataccaagcccttctggagcattatctctatggagatacagaactggaagtgacctctctagaaacccacctgcagaaaatttacaacaaaatcccagggaccagcaacaatggattagaggaggagtttaagaagttaacatcaatcaaaatccagaatgacaagatgcggactggaaaccttccagccaacatgaagaagaaccgtgttttacagatcattccatatgaattcaacagagtgatcattccagttaagcggggcgaagagaatacagactatgtgaacgcatcctttattgatggctaccggcagaaggactcctatatcgccagccagggccctcttctccacacaattgaggacttctggcgaatgatctgggagtggaaatcctgctctatcgtgatgctaacagaactggaggagagaggccaggagaagtgtgcccagtactggccatctgatggactggtgtcctatggagatattacagtggaactgaagaaggaggaggaatgtgagagctacaccgtccgagacctcctggtcaccaacaccagggagaataagagccggcagatccggcagttccacttccatggctggcctgaagtgggcatccccagtgacggaaagggcatgatcagcatcatcgccgccgtgcagaagcagcagcagcagtcagggaaccaccccatcaccgtgcactgcagcgccggggcaggaaggacggggaccttctgtgccctgagcaccgtcctggagcgtgtgaaagcagaggggattttggatgtcttccagactgtcaagagcctgcggctacagaggccacacatggtccagacactggaacagtatgagttctgctacaaggtggtgcaggagtatattgatgcattctcagattatgccaacttcaagtaagcggcaacaagggtccgtggaccaggaggattgcctttaatattttgtaatattctgttttgttaatataccccaaattgtgtatatatcttataactgttttagaaattggtacataggcttctattacctattaggtggaaattttatatgtaaatgtgttagcactgatagtcctttttccaatgttttattggggaattaaatagtgtgatgtttggattgatatcgtgaaatcctcagccgagaaattgggctggattgtgctttggttaatacatctttccctaaagaagataaacacaaaatccattccaggtagctcggcaccaactaagaaaaaaagcacaaagttctcagagctctcgaggaaagtggttgtccccgtaccaccatgcactgtaaatatccctcccctctctccctggtcccctcccccatccccaccactgatatcatggggagtaataggaccagagcggtatctctggcaccacactagggactatcaggtaataaaagctttgactccctga

SEQ ID NO: 317804 - DNA, 5498 bp, Homo sapiens
actgctgctgctgctgaattgcctcctgcagactctgctggtattgctggtatgctgcagtagggagcctggggacagccccatcagggcctgcgacagtgcagggctgtaggggaacaggccttccatgccatacataggctgcaggtacccgctctgcagggcgccagggatctggggagcataataaggagaaaagcctggtacaaagtaaggaaggaactggcttgtgagcaatgctgtggggtccgaagtcaacgcggcctgcagggcctgcagctgtgcagggtctaccgcatactccatggtgggcagctcgcccctggaaagctgctagtgtgaggccagtgctcgatatatactctgcttccggcatgcctctggccagcctgctgtggaagagtggacccgtggtgtccctgggctggtcagctgaggaggagctgctctgtgtgcaggaagatggtgctgtactggtttatgggcttcatggtgacttccggagacacttcagcatgggcaatgaagtgctccagaaccgggttctggatgcccggatctttcacactgagtttggttccggagtggccatcctcacaggggcccaccgcttcaccctcagtgccaatgtgggtgacctcaaactccgccggatgccagaggtgccaggtctgcaaagtgcaccctcctgctggactgtgctgtgccaggaccgagtggcacacattcttctggctgtggggcctgacctttacctcttggaccatgcagcctgctccgcagtgacgccccctggcctggccccaggagtaagcagcttcctacagatggctgtctccttcacctaccgacacctggcactcttcacagacacaggctacatctggatggggacagcatcactcaaggagaagctatgtgagttcaactgcaacatccgggcacctccaaagcagatggtctggtgcagccgtcctcgtagcaaggagagggccgtggtggtggcctgggaaaggcggctgatggtggtgggcgatgcacccgagagcatccagtttgtgctggatgaggactcctacctggtgcctgagctcgatggggtccgcatcttctcccgcagcacccacgagttcctgcatgaggttccagcggccagcgaggaaatcttcaaaattgcctcaatggcccccggggcgctgctcctggaggctcagaaggagtatgagaaagagagccagaaggcggacgagtacctgcgggagatccaggagctgggccagctgacccaggccgtgcagcagtgcattgaggctgcaggacatgagcaccagccagacatgcagaagagtctgctcagggttggcctggatggccgggccggggagggtggggctgggagggggtgggatgggcagcagggaagctctctcctatcgccctctggctcttctcaggccgcctccttcggaaagtgtttcctggacagatttccacccgacagcttcgtgcacatgtgtcaggacctgcgtgtgctcaatgctgttcgggactatcacatcgggatcccgctcacctatagccaatataagcagctcaccatccaggtgctgctggacaggctcgtgttgcggagactttaccccctggccatccagatatgcgagtacttgcgccttcctgaagtacagggcgtcagcaggatcctggcccactgggcctgctacaaggtgcaacagaaggatgtctcagatgaggatgtggctcgagccattaaccagaagctgggggacacgcctggtgtctcttactccgacattgctgcacgagcctatggttgtggccgcacggagctggccatcaagctgctggagtatgagccacgctcaggggagcaggtaccccttctcctaaagatgaagaggagcaaactggcactaagcaaggccatcgagagcggggacactgacctggtgttcacggtgttgctgcacctgaagaacgagctgaaccgaggagattttttcatgacccttcggaatcagcccatggccctcagtttgtaccgacagttctgtaagcatcaggagctagagacgctgaaggacctttacaatcaggatgacaatcaccaggaattgggcagcttccacatccgagccagctatgctgcagaagagcgtattgaggggcgagtagcagctctgcagacagccgccgatgccttctacaaggccaagaatgagtttgcagccaaggctacagaggatcaaatgcggctcctacggctgcagcggcgcctagaagacgagctggggggccagttcctagacctgtctctacatgacacagttaccaccctcattcttggcggtcacaacaagcgtgcagagcagctggcacgtgacttccgcatccctgacaagaggtgacacaactaaaaaaaaacaaaggtatttatggaattccactgagtggtaatggatgatgcagttcaaataactaaggacacatgttcaaagagcataattaactttttaaaagaagctaataagcatggattcctggttcattcttgttctgctcggcagtggtctgatatgtgtcagtgccaacaatgctaccacagttgcaccttctgtaggaattacaagattaattaactcatcaacggcagaaccagttaaagaagaggccaaaacttcaaatccaacttcttcactaacttctctttctgtggcaccaacattcagcccaaatataactctgggacccacctatttaaccactgtcaattcttcagactctgacaatgggaccacaagaacagcaagcaccaattctataggcattacaatttcaccaaatggaacgtggcttccagataaccagttcacggatgccagaacagaaccctgggaggggaattccagcaccgcagcaaccactccagaaactttccctccttcaggtaattctgactcgaaggacagaagagatgagacaccaattattgcggtgatggtggccctgtcctctctgctagtgatcgtgtttattatcatagttttgtacatgttaaggtttaagaaatacaagcaagctgggagccattccaattctttccgcttatccaacggccgcactgaggatgtggagccccagagtgtgccacttctggccagatccccaagcaccaacaggaaatacccacccctgcccgtggacaagctggaagaggaaattaaccggagaatggcagacgacaataagctcttcagggaggaattcaacgctctccctgcatgtcctatccaggccacctgtgaggctgcttccaaggaggaaaacaaggaaaaaaatcgatatgtaaacatcttgccttatgaccactctagagtccacctgacaccggttgaaggggttccagattctgattacatcaatgcttcattcatcaacggttaccaagaaaagaacaaattcattgctgcacaaggaccaaaagaagaaacggtgaatgatttctggcggatgatctgggaacaaaacacagccaccatcgtcatggttaccaacctgaaggagagaaaggagtgcaagtgcgcccagtactggccagaccaaggctgctggacctatgggaatattcgggtgtctgtagaggatgtgactgtcctggtggactacacagtacggaagttctgcatccagcaggtgggcgacatgaccaacagaaagccacagcgcctcatcactcagttccactttaccagctggccagactttggggtgccttttaccccgatcggcatgctcaagttcctcaagaaggtgaaggcctgtaaccctcagtatgcaggggccatcgtggtccactgcagtgcaggtgtagggcgtacaggtacctttgtcgtcattgatgccatgctggacatgatgcatacagaacggaaggtggacgtgtatggctttgtgagccggatccgggcacagcgctgccagatggtgcaaaccgatatgcagtatgtcttcatataccaagcccttctggagcattatctctatggagatacagaactggaagtgacctctctagaaacccacctgcagaaaatttacaacaaaatcccagggaccagcaacaatggattagaggaggagtttaagaagttaacatcaatcaaaatccagaatgacaagatgcggactggaaaccttccagccaacatgaagaagaaccgtgttttacagatcattccatatgaattcaacagagtgatcattccagttaagcggggcgaagagaatacagactatgtgaacgcatcctttattgatggctaccggcagaaggactcctatatcgccagccagggccctcttctccacacaattgaggacttctggcgaatgatctgggagtggaaatcctgctctatcgtgatgctaacagaactggaggagagaggccaggagaagtgtgcccagtactggccatctgatggactggtgtcctatggagatattacagtggaactgaagaaggaggaggaatgtgagagctacaccgtccgagacctcctggtcaccaacaccagggagaataagagccggcagatccggcagttccacttccatggctggcctgaagtgggcatccccagtgacggaaagggcatgatcagcatcatcgccgccgtgcagaagcagcagcagcagtcagggaaccaccccatcaccgtgcactgcagcgccggggcaggaaggacggggaccttctgtgccctgagcaccgtcctggagcgtgtgaaagcagaggggattttggatgtcttccagactgtcaagagcctgcggctacagaggccacacatggtccagacactggaacagtatgagttctgctacaaggtggtgcaggagtatattgatgcattctcagattatgccaacttcaagtaagcggcaacaagggtccgtggaccaggaggattgcctttaatattttgtaatattctgttttgttaatataccccaaattgtgtatatatcttataactgttttagaaattggtacataggcttctattacctattaggtggaaattttatatgtaaatgtgttagcactgatagtcctttttccaatgttttattggggaattaaatagtgtgatgtttggattgatatcgtgaaatcctcagccgagaaattgggctggattgtgctttggttaatacatctttccctaaagaagataaacacaaaatccattccaggtagctcggcaccaactaagaaaaaaagcacaaagttctcagagctctcgaggaaagtggttgtccccgtaccaccatgcactgtaaatatccctcccctctctccctggtcccctcccccatccccaccactgatatcatggggagtaataggaccagagcggtatctctggcaccacactagggactatcaggtaataaaagctttgactccctga

SEQ ID NO: 317805 - DNA, 8198 bp, Homo sapiens
  misc_feature (7454)..(7454): n is a, c, g, or t
gcggaagtgccggcctggagcccgctctaggtgggtgtcccctcggtgcttcccagctgccgtctgcaccagccatggactgctacacggcgaactggaacccactcggggactctgccttttaccggaaatatgagctgtacagcatggactgggacctgaaggaggaactcagggattgcctggtggctgctgcaccctatgggggccccattgcactgctgaggaacccctggcggaaggagaaagctgctagtgtgaggccagtgctcgatatatactctgcttccggcatgcctctggccagcctgctgtggaagagtggacccgtggtgtccctgggctggtcagctgaggaggagctgctctgtgtgcaggaagatggtgctgtactggtttatgggcttcatggtgacttccggagacacttcagcatgggcaatgaagtgctccagaaccgggttctggatgcccggatctttcacactgagtttggttccggagtggccatcctcacaggggcccaccgcttcaccctcagtgccaatgtgggtgacctcaaactccgccggatgccagaggtgccaggtctgcaaagtgcaccctcctgctggactgtgctgtgccaggaccgagtggcacacattcttctggctgtggggcctgacctttacctcttggaccatgcagcctgctccgcagtgacgccccctggcctggccccaggagtaagcagcttcctacagatggctgtctccttcacctaccgacacctggcactcttcacagacacaggctacatctggatggggacagcatcactcaaggagaagctatgtgagttcaactgcaacatccgggcacctccaaagcagatggtctggtgcagccgtcctcgtagcaaggagagggccgtggtggtggcctgggaaaggcggctgatggtggtgggcgatgcacccgagagcatccagtttgtgctggatgaggactcctacctggtgcctgagctcgatggggtccgcatcttctcccgcagcacccacgagttcctgcatgaggttccagcggccagcgaggaaatcttcaaaattgcctcaatggcccccggggcgctgctcctggaggctcagaaggagtatgagaaagagagccagaaggcggacgagtacctgcgggagatccaggagctgggccagctgacccaggccgtgcagcagtgcattgaggctgcaggacatgagcaccagccagacatgcagaagagtctgctcagggttggcctggatggccgggccggggagggtggggctgggagggggtgggatgggcagcagggaagctctctcctatcgccctctggctcttctcaggccgcctccttcggaaagtgtttcctggacagatttccacccgacagcttcgtgcacatgtgtcaggacctgcgtgtgctcaatgctgttcgggactatcacatcgggatcccgctcacctatagccaatataagcagctcaccatccaggtgctgctggacaggctcgtgttgcggagactttaccccctggccatccagatatgcgagtacttgcgccttcctgaagtacagggcgtcagcaggatcctggcccactgggcctgctacaaggtgcaacagaaggatgtctcagatgaggatgtggctcgagccattaaccagaagctgggggacacgcctggtgtctcttactccgacattgctgcacgagcctatggttgtggccgcacggagctggccatcaagctgctggagtatgagccacgctcaggggagcaggtaccccttctcctaaagatgaagaggagcaaactggcactaagcaaggccatcgagagcggggacactgacctggtgttcacggtgttgctgcacctgaagaacgagctgaaccgaggagattttttcatgacccttcggaatcagcccatggccctcagtttgtaccgacagttctgtaagcatcaggagctagagacgctgaaggacctttacaatcaggatgacaatcaccaggaattgggcagcttccacatccgagccagctatgctgcagaagagcgtattgaggggcgagtagcagctctgcagacagccgccgatgccttctacaaggccaagaatgagtttgcagccaaggctacagaggatcaaatgcggctcctacggctgcagcggcgcctagaagacgagctggggggccagttcctagacctgtctctacatgacacagttaccaccctcattcttggcggtcacaacaagcgtgcagagcagctggcacgtgacttccgcatccctgacaagaggtgacacaactaaaaaaaaacaaaggtatttatggaattccactgagtggtaatggatgatgcagttcaaataactaaggacacatgttcaaagagcataattaactttttaaaagaagctagacttcttcagaagcttgccagtttttcaagctgatttctctcactggcaactcttcagagtgctgttcctactccaccctcccctggtgataagcatggattcctggttcattcttgttctgctcggcagtggtctgatatgtgtcagtgccaacaatgctaccacagttgcaccttctgtaggaattacaagattaattaactcatcaacggcagaaccagttaaagaagaggccaaaacttcaaatccaacttcttcactaacttctctttctgtggcaccaacattcagcccaaatataactctgggacccacctatttaaccactgtcaattcttcagactctgacaatgggaccacaagaacagcaagcaccaattctataggcattacaatttcaccaaatggaacgtggcttccagataaccagttcacggatgccagaacagaaccctgggaggggaattccagcaccgcagcaaccactccagaaactttccctccttcagatgagacaccaattattgcggtgatggtggccctgtcctctctgctagtgatcgtgtttattatcatagttttgtacatgttaaggtttaagaaatacaagcaagctgggagccattccaattctttccgcttatccaacggccgcactgaggatgtggagccccagagtgtgccacttctggccagatccccaagcaccaacaggaaatacccacccctgcccgtggacaagctggaagaggaaattaaccggagaatggcagacgacaataagctcttcagggaggaattcaacgctctccctgcatgtcctatccaggccacctgtgaggctgcttccaaggaggaaaacaaggaaaaaaatcgatatgtaaacatcttgccttatgaccactctagagtccacctgacaccggttgaaggggttccagattctgattacatcaatgcttcattcatcaacggttaccaagaaaagaacaaattcattgctgcacaaggaccaaaagaagaaacggtgaatgatttctggcggatgatctgggaacaaaacacagccaccatcgtcatggttaccaacctgaaggagagaaaggagtgcaagtgcgcccagtactggccagaccaaggctgctggacctatgggaatattcgggtgtctgtagaggatgtgactgtcctggtggactacacagtacggaagttctgcatccagcaggtgggcgacatgaccaacagaaagccacagcgcctcatcactcagttccactttaccagctggccagactttggggtgccttttaccccgatcggcatgctcaagttcctcaagaaggtgaaggcctgtaaccctcagtatgcaggggccatcgtggtccactgcagtgcaggtgtagggcgtacaggtacctttgtcgtcattgatgccatgctggacatgatgcatacagaacggaaggtggacgtgtatggctttgtgagccggatccgggcacagcgctgccagatggtgcaaaccgatatgcagtatgtcttcatataccaagcccttctggagcattatctctatggagatacagaactggaagtgacctctctagaaacccacctgcagaaaatttacaacaaaatcccagggaccagcaacaatggattagaggaggagtttaagaagttaacatcaatcaaaatccagaatgacaagatgcggactggaaaccttccagccaacatgaagaagaaccgtgttttacagatcattccatatgaattcaacagagtgatcattccagttaagcggggcgaagagaatacagactatgtgaacgcatcctttattgatggctaccggcagaaggactcctatatcgccagccagggccctcttctccacacaattgaggacttctggcgaatgatctgggagtggaaatcctgctctatcgtgatgctaacagaactggaggagagaggccaggagaagtgtgcccagtactggccatctgatggactggtgtcctatggagatattacagtggaactgaagaaggaggaggaatgtgagagctacaccgtccgagacctcctggtcaccaacaccagggagaataagagccggcagatccggcagttccacttccatggctggcctgaagtgggcatccccagtgacggaaagggcatgatcagcatcatcgccgccgtgcagaagcagcagcagcagtcagggaaccaccccatcaccgtgcactgcagcgccggggcaggaaggacggggaccttctgtgccctgagcaccgtcctggagcgtgtgaaagcagaggggattttggatgtcttccagactgtcaagagcctgcggctacagaggccacacatggtccagacactggaacagtatgagttctgctacaaggtggtgcaggagtatattgatgcattctcagattatgccaacttcaagtaagcggcaacaagggtccgtggaccaggaggattgcctttaatattttgtaatattctgttttgttaatataccccaaattgtgtatatatcttataactgttttagaaattggtacataggcttctattacctattaggtggaaattttatatgtaaatgtgttagcactgatagtcctttttccaatgttttattggggaattaaatagtgtgatgtttggattgatatcgtgaaatcctcagccgagaaattgggctggattgtgctttggttaatacatctttccctaaagaagataaacacaaaatccattccaggtagctcggcaccaactaagaaaaaaagcacaaagttctcagagctctcgaggaaagtggttgtccccgtaccaccatgcactgtaaatatccctcccctctctccctggtcccctcccccatccccaccactgatatcatggggagtaataggaccagagcggtatctctggcaccacactagggactatcaggtaataaaagctttgactccctgaggaaatgtctctccctttgtctgggggtggggcagccatacaggctggggctctcctcggctgttcatggccctcctgttgctgttctctctgagttatctgagagaggccacagtcccccagctcctcctgtccaccaaacacagcccttccagttcttaggtgatctccaggaccctcctttcattcccagcacatctttggtttagtggtcctggccagcctccctccctaggaaggtggccaggtcctcactgagtctccttaaggacaggggcacaggggagactagagctggctcagctttgggctgaggccagtctgacctctccagtctgtggtgctttgctacaaaactgtctggattgtgtcaccctatctaggataaatctttatgtccacatatattgtgttgaattgttcccattttctttcatacgtgtcctcatttctgggacagtgtgaatgtttctcagatctagaagtcagatggtgggagtcttagatccgaacttggttttgagtgacatgttagacaaaagtgttgaacttttgtttcttaaagaagctggatgttcatttatgtctcccgtaacagtctgtgctgtccagagacccagtatccttaggatattattctcatcctcatggttgaagctgggtcactgccatgtccataatccaccctgaggaaagagcatggagagccagcagcttcatttctaaggacaggaagccaaatctgcacttttcacttccactcataatccaccctgcattccactcatcagcttcacaagtaggttttcacctggtcatagctatgcctaactacagggagtgctggggaagtgtgatcttttgttgggggcacactgggagagtgggtctgtccactgcctcccagcctcagagcagctcaccacaggagcaggagagtgaactcgtggctgtggctgtcaggcagggcctttcttgagagccagcgcaggcctgggctcctcagaggcttctggagtgagagatggcacctcagcctggcccatggaggcatgttcagggatcagcactactgtgcttcttggaggaggtgggacttgagctggacccatgggaggctggaaatttagatgagtgaaaaggaggaaaggcgaagtagagccacattacagagggcctcagagtccagataaagcagttaacatgtagtggctccaggagggaagcctgtctgtgcaccacatacccaggatgtttgtgggaaggaaggagatgtgcggaagggacccaggagacctgcaggaggcaagggctgcaacagaccccctctggaagtttacaggaggtgagtgtgagtcattagagacattcagttctgtaggaactaacgaactcccaagaggcagtaaacttaaaactcagcagtctcgataagtatggataaattaggcaaagacagattctgaggaatttctggtgaggggtgccaagtttggggagcagcccctggctccttgcaagctacccttcagtgctctgtgtgaccaagtccaagtcgatgcaggagggcaggcactgggtcagcaagccactcagtgaatgtgcaggtgaggccgttcataggcgcttgtgtgcctcccagcaggctgcctgccattgccagggctggccttcagcagggtgcgccaccatggcctgagtggttttctgctgaagtccgtgctgatttggccagtggataggcatcacctgggtgcaaaaccattgtctccaggtaggaatgacctcagctgtttgctccgtgtctcgctcagcctgtagatgtgtccctcatcccttcatgcctccctcttcactcctcttttactttctactcggggcttgcatgtttacaagagaggtgaacccaacagaaactagtataggccaaaaggaaaatgtgctgaagctcacacagcacagtcgtgtggaaanggcagcagtgactgcttcatccagtgcccttcccacagccagtcagttgcgacccaaggggcttagggtaggagtgtttctccataggggaagagtaacagcctgcacccaccacacacccaaagccctacatcctgccacactgagacctcacttcatttgggcgggtccctcctgggttgcagtttccttcattgctcccctgtcccaaatactcaagtctctctcattaaaaataaagagcaggccaggtgcagtggctcacacctgtaatcccacactttgggaggccaaggcgggtggatcacttgagcccaggattcgagaccaacctgggcaacatgacaagatcctgtctctacaaaaaataacaaaaatcatctgggcatggaggcacacgcctgtagtcccagctacttgggaggctgaggtggaaggatcacctgagcccatgaggtggaggctacagtgagctgagatcacgccactgcactccagcctggatgacagcgagactccatctcaaaaaaaaaaaaagaaaaagaaaaagaattaattaattaattaaataaagagcatgtctcccaccccaggcctaagttcttccctctatgagagactacttgcagaaacctgtgttctcactcttcccccttcctcacttcattcccacacatttcttttccatccctgcgcaccaaggtcaccttggtgctaaacaccagggacccatggtctcttccc

SEQ ID NO: 317806 - DNA, 7929 bp, Homo sapiens
  misc_feature (7185)..(7185): n is a, c, g, or t
gcggaagtgccggcctggagcccgctctaggtgggtgtcccctcggtgcttcccagctgccgtctgcaccagccatggactgctacacggcgaactggaacccactcggggactctgccttttaccggaaatatgagctgtacagcatggactgggacctgaaggaggaactcagggattgcctggtggctgctgcaccctatgggggccccattgcactgctgaggaacccctggcggaaggagaaagctgctagtgtgaggccagtgctcgatatatactctgcttccggcatgcctctggccagcctgctgtggaagagtggacccgtggtgtccctgggctggtcagctgaggaggagctgctctgtgtgcaggaagatggtgctgtactggtttatgggcttcatggtgacttccggagacacttcagcatgggcaatgaagtgctccagaaccgggttctggatgcccggatctttcacactgagtttggttccggagtggccatcctcacaggggcccaccgcttcaccctcagtgccaatgtgggtgacctcaaactccgccggatgccagaggtgccaggtctgcaaagtgcaccctcctgctggactgtgctgtgccaggaccgagtggcacacattcttctggctgtggggcctgacctttacctcttggaccatgcagcctgctccgcagtgacgccccctggcctggccccaggagtaagcagcttcctacagatggctgtctccttcacctaccgacacctggcactcttcacagacacaggctacatctggatggggacagcatcactcaaggagaagctatgtgagttcaactgcaacatccgggcacctccaaagcagatggtctggtgcagccgtcctcgtagcaaggagagggccgtggtggtggcctgggaaaggcggctgatggtggtgggcgatgcacccgagagcatccagtttgtgctggatgaggactcctacctggtgcctgagctcgatggggtccgcatcttctcccgcagcacccacgagttcctgcatgaggttccagcggccagcgaggaaatcttcaaaattgcctcaatggcccccggggcgctgctcctggaggctcagaaggagtatgagaaagagagccagaaggcggacgagtacctgcgggagatccaggagctgggccagctgacccaggccgtgcagcagtgcattgaggctgcaggacatgagcaccagccagacatgcagaagagtctgctcagggttggcctggatggccgggccggggagggtggggctgggagggggtgggatgggcagcagggaagctctctcctatcgccctctggctcttctcaggccgcctccttcggaaagtgtttcctggacagatttccacccgacagcttcgtgcacatgtgtcaggacctgcgtgtgctcaatgctgttcgggactatcacatcgggatcccgctcacctatagccaatataagcagctcaccatccaggtgctgctggacaggctcgtgttgcggagactttaccccctggccatccagatatgcgagtacttgcgccttcctgaagtacagggcgtcagcaggatcctggcccactgggcctgctacaaggtgcaacagaaggatgtctcagatgaggatgtggctcgagccattaaccagaagctgggggacacgcctggtgtctcttactccgacattgctgcacgagcctatggttgtggccgcacggagctggccatcaagctgctggagtatgagccacgctcaggggagcaggtaccccttctcctaaagatgaagaggagcaaactggcactaagcaaggccatcgagagcggggacactgacctggtgttcacggtgttgctgcacctgaagaacgagctgaaccgaggagattttttcatgacccttcggaatcagcccatggccctcagtttgtaccgacagttctgtaagcatcaggagctagagacgctgaaggacctttacaatcaggatgacaatcaccaggaattgggcagcttccacatccgagccagctatgctgcagaagagcgtattgaggggcgagtagcagctctgcagacagccgccgatgccttctacaaggccaagaatgagtttgcagccaaggctacagaggatcaaatgcggctcctacggctgcagcggcgcctagaagacgagctggggggccagttcctagacctgtctctacatgacacagttaccaccctcattcttggcggtcacaacaagcgtgcagagcagctggcacgtgacttccgcatccctgacaagaggtgacacaactaaaaaaaaacaaaggtatttatggaattccactgagtggtaatggatgatgcagttcaaataactaaggacacatgttcaaagagcataattaactttttaaaagaagctaataagcatggattcctggttcattcttgttctgctcggcagtggtctgatatgtgtcagtgccaacaatgctaccacagttgcaccttctgtaggaattacaagattaattaactcatcaacggcagaaccagttaaagaagaggccaaaacttcaaatccaacttcttcactaacttctctttctgtggcaccaacattcagcccaaatataactctgggacccacctatttaaccactgtcaattcttcagactctgacaatgggaccacaagaacagcaagcaccaattctataggcattacaatttcaccaaatggaacgtggcttccagataaccagttcacggatgccagaacagaaccctgggaggggaattccagcaccgcagcaaccactccagaaactttccctccttcagatgagacaccaattattgcggtgatggtggccctgtcctctctgctagtgatcgtgtttattatcatagttttgtacatgttaaggtttaagaaatacaagcaagctgggagccattccaattctttccgcttatccaacggccgcactgaggatgtggagccccagagtgtgccacttctggccagatccccaagcaccaacaggaaatacccacccctgcccgtggacaagctggaagaggaaattaaccggagaatggcagacgacaataagctcttcagggaggaattcaacgctctccctgcatgtcctatccaggccacctgtgaggctgcttccaaggaggaaaacaaggaaaaaaatcgatatgtaaacatcttgccttatgaccactctagagtccacctgacaccggttgaaggggttccagattctgattacatcaatgcttcattcatcaacggttaccaagaaaagaacaaattcattgctgcacaaggaccaaaagaagaaacggtgaatgatttctggcggatgatctgggaacaaaacacagccaccatcgtcatggttaccaacctgaaggagagaaaggagctggccagactttggggtgccttttaccccgatcggcatgctcaagttcctcaagaaggtgaaggcctgtaaccctcagtatgcaggggccatcgtggtccactgcagtgcaggtgtagggcgtacaggtacctttgtcgtcattgatgccatgctggacatgatgcatacagaacggaaggtggacgtgtatggctttgtgagccggatccgggcacagcgctgccagatggtgcaaaccgatatgcagtatgtcttcatataccaagcccttctggagcattatctctatggagatacagaactggaagtgacctctctagaaacccacctgcagaaaatttacaacaaaatcccagggaccagcaacaatggattagaggaggagtttaagaagttaacatcaatcaaaatccagaatgacaagatgcggactggaaaccttccagccaacatgaagaagaaccgtgttttacagatcattccatatgaattcaacagagtgatcattccagttaagcggggcgaagagaatacagactatgtgaacgcatcctttattgatggctaccggcagaaggactcctatatcgccagccagggccctcttctccacacaattgaggacttctggcgaatgatctgggagtggaaatcctgctctatcgtgatgctaacagaactggaggagagaggccaggagaagtgtgcccagtactggccatctgatggactggtgtcctatggagatattacagtggaactgaagaaggaggaggaatgtgagagctacaccgtccgagacctcctggtcaccaacaccagggagaataagagccggcagatccggcagttccacttccatggctggcctgaagtgggcatccccagtgacggaaagggcatgatcagcatcatcgccgccgtgcagaagcagcagcagcagtcagggaaccaccccatcaccgtgcactgcagcgccggggcaggaaggacggggaccttctgtgccctgagcaccgtcctggagcgtgtgaaagcagaggggattttggatgtcttccagactgtcaagagcctgcggctacagaggccacacatggtccagacactggaacagtatgagttctgctacaaggtggtgcaggagtatattgatgcattctcagattatgccaacttcaagtaagcggcaacaagggtccgtggaccaggaggattgcctttaatattttgtaatattctgttttgttaatataccccaaattgtgtatatatcttataactgttttagaaattggtacataggcttctattacctattaggtggaaattttatatgtaaatgtgttagcactgatagtcctttttccaatgttttattggggaattaaatagtgtgatgtttggattgatatcgtgaaatcctcagccgagaaattgggctggattgtgctttggttaatacatctttccctaaagaagataaacacaaaatccattccaggtagctcggcaccaactaagaaaaaaagcacaaagttctcagagctctcgaggaaagtggttgtccccgtaccaccatgcactgtaaatatccctcccctctctccctggtcccctcccccatccccaccactgatatcatggggagtaataggaccagagcggtatctctggcaccacactagggactatcaggtaataaaagctttgactccctgaggaaatgtctctccctttgtctgggggtggggcagccatacaggctggggctctcctcggctgttcatggccctcctgttgctgttctctctgagttatctgagagaggccacagtcccccagctcctcctgtccaccaaacacagcccttccagttcttaggtgatctccaggaccctcctttcattcccagcacatctttggtttagtggtcctggccagcctccctccctaggaaggtggccaggtcctcactgagtctccttaaggacaggggcacaggggagactagagctggctcagctttgggctgaggccagtctgacctctccagtctgtggtgctttgctacaaaactgtctggattgtgtcaccctatctaggataaatctttatgtccacatatattgtgttgaattgttcccattttctttcatacgtgtcctcatttctgggacagtgtgaatgtttctcagatctagaagtcagatggtgggagtcttagatccgaacttggttttgagtgacatgttagacaaaagtgttgaacttttgtttcttaaagaagctggatgttcatttatgtctcccgtaacagtctgtgctgtccagagacccagtatccttaggatattattctcatcctcatggttgaagctgggtcactgccatgtccataatccaccctgaggaaagagcatggagagccagcagcttcatttctaaggacaggaagccaaatctgcacttttcacttccactcataatccaccctgcattccactcatcagcttcacaagtaggttttcacctggtcatagctatgcctaactacagggagtgctggggaagtgtgatcttttgttgggggcacactgggagagtgggtctgtccactgcctcccagcctcagagcagctcaccacaggagcaggagagtgaactcgtggctgtggctgtcaggcagggcctttcttgagagccagcgcaggcctgggctcctcagaggcttctggagtgagagatggcacctcagcctggcccatggaggcatgttcagggatcagcactactgtgcttcttggaggaggtgggacttgagctggacccatgggaggctggaaatttagatgagtgaaaaggaggaaaggcgaagtagagccacattacagagggcctcagagtccagataaagcagttaacatgtagtggctccaggagggaagcctgtctgtgcaccacatacccaggatgtttgtgggaaggaaggagatgtgcggaagggacccaggagacctgcaggaggcaagggctgcaacagaccccctctggaagtttacaggaggtgagtgtgagtcattagagacattcagttctgtaggaactaacgaactcccaagaggcagtaaacttaaaactcagcagtctcgataagtatggataaattaggcaaagacagattctgaggaatttctggtgaggggtgccaagtttggggagcagcccctggctccttgcaagctacccttcagtgctctgtgtgaccaagtccaagtcgatgcaggagggcaggcactgggtcagcaagccactcagtgaatgtgcaggtgaggccgttcataggcgcttgtgtgcctcccagcaggctgcctgccattgccagggctggccttcagcagggtgcgccaccatggcctgagtggttttctgctgaagtccgtgctgatttggccagtggataggcatcacctgggtgcaaaaccattgtctccaggtaggaatgacctcagctgtttgctccgtgtctcgctcagcctgtagatgtgtccctcatcccttcatgcctccctcttcactcctcttttactttctactcggggcttgcatgtttacaagagaggtgaacccaacagaaactagtataggccaaaaggaaaatgtgctgaagctcacacagcacagtcgtgtggaaanggcagcagtgactgcttcatccagtgcccttcccacagccagtcagttgcgacccaaggggcttagggtaggagtgtttctccataggggaagagtaacagcctgcacccaccacacacccaaagccctacatcctgccacactgagacctcacttcatttgggcgggtccctcctgggttgcagtttccttcattgctcccctgtcccaaatactcaagtctctctcattaaaaataaagagcaggccaggtgcagtggctcacacctgtaatcccacactttgggaggccaaggcgggtggatcacttgagcccaggattcgagaccaacctgggcaacatgacaagatcctgtctctacaaaaaataacaaaaatcatctgggcatggaggcacacgcctgtagtcccagctacttgggaggctgaggtggaaggatcacctgagcccatgaggtggaggctacagtgagctgagatcacgccactgcactccagcctggatgacagcgagactccatctcaaaaaaaaaaaaagaaaaagaaaaagaattaattaattaattaaataaagagcatgtctcccaccccaggcctaagttcttccctctatgagagactacttgcagaaacctgtgttctcactcttcccccttcctcacttcattcccacacatttcttttccatccctgcgcaccaaggtcaccttggtgctaaacaccagggacccatggtctcttccc

SEQ ID NO: 317807 - DNA, 7778 bp, Homo sapiens
  misc_feature (7034)..(7034): n is a, c, g, or t
gcggaagtgccggcctggagcccgctctaggtgggtgtcccctcggtgcttcccagctgccgtctgcaccagccatggactgctacacggcgaactggaacccactcggggactctgccttttaccggaaatatgagctgtacagcatggactgggacctgaaggaggaactcagggattgcctggtggctgctgcaccctatgggggccccattgcactgctgaggaacccctggcggaaggagaaagctgctagtgtgaggccagtgctcgatatatactctgcttccggcatgcctctggccagcctgctgtggaagagtggacccgtggtgtccctgggctggtcagctgaggaggagctgctctgtgtgcaggaagatggtgctgtactggtttatgggcttcatggtgacttccggagacacttcagcatgggcaatgaagtgctccagaaccgggttctggatgcccggatctttcacactgagtttggttccggagtggccatcctcacaggggcccaccgcttcaccctcagtgccaatgtgggtgacctcaaactccgccggatgccagaggtgccaggtctgcaaagtgcaccctcctgctggactgtgctgtgccaggaccgagtggcacacattcttctggctgtggggcctgacctttacctcttggaccatgcagcctgctccgcagtgacgccccctggcctggccccaggagtaagcagcttcctacagatggctgtctccttcacctaccgacacctggcactcttcacagacacaggctacatctggatggggacagcatcactcaaggagaagctatgtgagttcaactgcaacatccgggcacctccaaagcagatggtctggtgcagccgtcctcgtagcaaggagagggccgtggtggtggcctgggaaaggcggctgatggtggtgggcgatgcacccgagagcatccagtttgtgctggatgaggactcctacctggtgcctgagctcgatggggtccgcatcttctcccgcagcacccacgagttcctgcatgaggttccagcggccagcgaggaaatcttcaaaattgcctcaatggcccccggggcgctgctcctggaggctcagaaggagtatgagaaagagagccagaaggcggacgagtacctgcgggagatccaggagctgggccagctgacccaggccgtgcagcagtgcattgaggctgcaggacatgagcaccagccagacatgcagaagagtctgctcagggttggcctggatggccgggccggggagggtggggctgggagggggtgggatgggcagcagggaagctctctcctatcgccctctggctcttctcaggccgcctccttcggaaagtgtttcctggacagatttccacccgacagcttcgtgcacatgtgtcaggacctgcgtgtgctcaatgctgttcgggactatcacatcgggatcccgctcacctatagccaatataagcagctcaccatccaggtgctgctggacaggctcgtgttgcggagactttaccccctggccatccagatatgcgagtacttgcgccttcctgaagtacagggcgtcagcaggatcctggcccactgggcctgctacaaggtgcaacagaaggatgtctcagatgaggatgtggctcgagccattaaccagaagctgggggacacgcctggtgtctcttactccgacattgctgcacgagcctatggttgtggccgcacggagctggccatcaagctgctggagtatgagccacgctcaggggagcaggtaccccttctcctaaagatgaagaggagcaaactggcactaagcaaggccatcgagagcggggacactgacctggtgttcacggtgttgctgcacctgaagaacgagctgaaccgaggagattttttcatgacccttcggaatcagcccatggccctcagtttgtaccgacagttctgtaagcatcaggagctagagacgctgaaggacctttacaatcaggatgacaatcaccaggaattgggcagcttccacatccgagccagctatgctgcagaagagcgtattgaggggcgagtagcagctctgcagacagccgccgatgccttctacaaggccaagaatgagtttgcagccaaggctacagaggatcaaatgcggctcctacggctgcagcggcgcctagaagacgagctggggggccagttcctagacctgtctctacatgacacagttaccaccctcattcttggcggtcacaacaagcgtgcagagcagctggcacgtgacttccgcatccctgacaagaggtgacacaactaaaaaaaaacaaaggtatttatggaattccactgagtggtaatggatgatgcagttcaaataactaaggacacatgttcaaagagcataattaactttttaaaagaagctaataagcatggattcctggttcattcttgttctgctcggcagtggtctgatatgtgtcagtgccaacaatgctaccacagttgcaccttctgtaggaattacaagattaattaactcatcaacggcagaaccagttaaagaagaggccaaaacttcaaatccaacttcttcactaacttctctttctgtggcaccaacattcagcccaaatataactctgggacccacctatttaaccactgtcaattcttcagactctgacaatgggaccacaagaacagcaagcaccaattctataggcattacaatttcaccaaatggaacgtggcttccagataaccagttcacggatgccagaacagaaccctgggaggggaattccagcaccgcagcaaccactccagaaactttccctccttcagatgagacaccaattattgcggtgatggtggccctgtcctctctgctagtgatcgtgtttattatcatagttttgtacatgttaaggtttaagaaatacaagcaagctgggagccattccaattctttccgcttatccaacggccgcactgaggatgtggagccccagagtgtgccacttctggccagatccccaagcaccaacaggaaatacccacccctgcccgtggacaagctggaagaggaaattaaccggagaatggcagacgacaataagctcttcagggaggaattcaacgctctccctgcatgtcctatccaggccacctgtgaggctgcttccaaggaggaaaacaaggaaaaaaatcgatatgtaaacatcttgccttatgaccactctagagtccacctgacaccggttgaaggggttccagattctgattacatcaatgcttcattcatcaacggttaccaagaaaagaacaaattcattgctgcacaaggaccaaaagaagaaacggtgaatgatttctggcggatgatctgggaacaaaacacagccaccatcgtcatggttaccaacctgaaggagagaaaggagtgcaagtgcgcccagtactggccagaccaaggctgctggacctatgggaatattcgggtgtctgtagaggatgtgactgtcctggtggactacacagtacggaagttctgcatccagcaggtgggcgacatgaccaacagaaagccacagcgcctcatcactcagttccactttaccagctggccagactttggggtgccttttaccccgatcggcatgctcaagttcctcaagaaggtgaaggcctgtaaccctcagtatgcaggggccatcgtggtccactgcagtgcaggtgtagggcgtacaggtacctttgtcgtcattgatgccatgctggacatgatgcatacagaacggaaggtggacgtgtatggctttgtgagccggatccgggcacagcgctgccagatggtgcaaaccgatatgcagtatgtcttcatataccaagcccttctggagcattatctctatggagatacagaactggaagtgacctctctagaaacccacctgcagaaaatttacaacaaaatcccagggaccagcaacaatggattagaggaggagtttaagaagttaacatcaatcaaaatccagaatgacaagatgcggactggaaaccttccagccaacatgaagaagaaccgtgttttacagatcattccatatgaattcaacagagtgatcattccagttaagcggggcgaagagaatacagactatgtgaacgcatcctttattgatggctaccggcagaaggactcctatatcgccagccagggccctcttctccacacaattgaggacttctggcgaatgatctgggagtggaaatcctgctctatcgtgatgctaacagaactggaggagagaggccagcgtgtgaaagcagaggggattttggatgtcttccagactgtcaagagcctgcggctacagaggccacacatggtccagacactggaacagtatgagttctgctacaaggtggtgcaggagtatattgatgcattctcagattatgccaacttcaagtaagcggcaacaagggtccgtggaccaggaggattgcctttaatattttgtaatattctgttttgttaatataccccaaattgtgtatatatcttataactgttttagaaattggtacataggcttctattacctattaggtggaaattttatatgtaaatgtgttagcactgatagtcctttttccaatgttttattggggaattaaatagtgtgatgtttggattgatatcgtgaaatcctcagccgagaaattgggctggattgtgctttggttaatacatctttccctaaagaagataaacacaaaatccattccaggtagctcggcaccaactaagaaaaaaagcacaaagttctcagagctctcgaggaaagtggttgtccccgtaccaccatgcactgtaaatatccctcccctctctccctggtcccctcccccatccccaccactgatatcatggggagtaataggaccagagcggtatctctggcaccacactagggactatcaggtaataaaagctttgactccctgaggaaatgtctctccctttgtctgggggtggggcagccatacaggctggggctctcctcggctgttcatggccctcctgttgctgttctctctgagttatctgagagaggccacagtcccccagctcctcctgtccaccaaacacagcccttccagttcttaggtgatctccaggaccctcctttcattcccagcacatctttggtttagtggtcctggccagcctccctccctaggaaggtggccaggtcctcactgagtctccttaaggacaggggcacaggggagactagagctggctcagctttgggctgaggccagtctgacctctccagtctgtggtgctttgctacaaaactgtctggattgtgtcaccctatctaggataaatctttatgtccacatatattgtgttgaattgttcccattttctttcatacgtgtcctcatttctgggacagtgtgaatgtttctcagatctagaagtcagatggtgggagtcttagatccgaacttggttttgagtgacatgttagacaaaagtgttgaacttttgtttcttaaagaagctggatgttcatttatgtctcccgtaacagtctgtgctgtccagagacccagtatccttaggatattattctcatcctcatggttgaagctgggtcactgccatgtccataatccaccctgaggaaagagcatggagagccagcagcttcatttctaaggacaggaagccaaatctgcacttttcacttccactcataatccaccctgcattccactcatcagcttcacaagtaggttttcacctggtcatagctatgcctaactacagggagtgctggggaagtgtgatcttttgttgggggcacactgggagagtgggtctgtccactgcctcccagcctcagagcagctcaccacaggagcaggagagtgaactcgtggctgtggctgtcaggcagggcctttcttgagagccagcgcaggcctgggctcctcagaggcttctggagtgagagatggcacctcagcctggcccatggaggcatgttcagggatcagcactactgtgcttcttggaggaggtgggacttgagctggacccatgggaggctggaaatttagatgagtgaaaaggaggaaaggcgaagtagagccacattacagagggcctcagagtccagataaagcagttaacatgtagtggctccaggagggaagcctgtctgtgcaccacatacccaggatgtttgtgggaaggaaggagatgtgcggaagggacccaggagacctgcaggaggcaagggctgcaacagaccccctctggaagtttacaggaggtgagtgtgagtcattagagacattcagttctgtaggaactaacgaactcccaagaggcagtaaacttaaaactcagcagtctcgataagtatggataaattaggcaaagacagattctgaggaatttctggtgaggggtgccaagtttggggagcagcccctggctccttgcaagctacccttcagtgctctgtgtgaccaagtccaagtcgatgcaggagggcaggcactgggtcagcaagccactcagtgaatgtgcaggtgaggccgttcataggcgcttgtgtgcctcccagcaggctgcctgccattgccagggctggccttcagcagggtgcgccaccatggcctgagtggttttctgctgaagtccgtgctgatttggccagtggataggcatcacctgggtgcaaaaccattgtctccaggtaggaatgacctcagctgtttgctccgtgtctcgctcagcctgtagatgtgtccctcatcccttcatgcctccctcttcactcctcttttactttctactcggggcttgcatgtttacaagagaggtgaacccaacagaaactagtataggccaaaaggaaaatgtgctgaagctcacacagcacagtcgtgtggaaanggcagcagtgactgcttcatccagtgcccttcccacagccagtcagttgcgacccaaggggcttagggtaggagtgtttctccataggggaagagtaacagcctgcacccaccacacacccaaagccctacatcctgccacactgagacctcacttcatttgggcgggtccctcctgggttgcagtttccttcattgctcccctgtcccaaatactcaagtctctctcattaaaaataaagagcaggccaggtgcagtggctcacacctgtaatcccacactttgggaggccaaggcgggtggatcacttgagcccaggattcgagaccaacctgggcaacatgacaagatcctgtctctacaaaaaataacaaaaatcatctgggcatggaggcacacgcctgtagtcccagctacttgggaggctgaggtggaaggatcacctgagcccatgaggtggaggctacagtgagctgagatcacgccactgcactccagcctggatgacagcgagactccatctcaaaaaaaaaaaaagaaaaagaaaaagaattaattaattaattaaataaagagcatgtctcccaccccaggcctaagttcttccctctatgagagactacttgcagaaacctgtgttctcactcttcccccttcctcacttcattcccacacatttcttttccatccctgcgcaccaaggtcaccttggtgctaaacaccagggacccatggtctcttccc

SEQ ID NO: 317808 - DNA, 7086 bp, Homo sapiens
  misc_feature (6342)..(6342): n is a, c, g, or t
gcggaagtgccggcctggagcccgctctaggtgggtgtcccctcggtgcttcccagctgccgtctgcaccagccatggactgctacacggcgaactggaacccactcggggactctgccttttaccggaaatatgagctgtacagcatggactgggacctgaaggaggaactcagggattgcctggtggctgctgcaccctatgggggccccattgcactgctgaggaacccctggcggaaggagaaagctgctagtgtgaggccagtgctcgatatatactctgcttccggcatgcctctggccagcctgctgtggaagagtggacccgtggtgtccctgggctggtcagctgaggaggagctgctctgtgtgcaggaagatggtgctgtactggtttatgggcttcatggtgacttccggagacacttcagcatgggcaatgaagtgctccagaaccgggttctggatgcccggatctttcacactgagtttggttccggagtggccatcctcacaggggcccaccgcttcaccctcagtgccaatgtgggtgacctcaaactccgccggatgccagaggtgccaggtctgcaaagtgcaccctcctgctggactgtgctgtgccaggaccgagtggcacacattcttctggctgtggggcctgacctttacctcttggaccatgcagcctgctccgcagtgacgccccctggcctggccccaggagtaagcagcttcctacagatggctgtctccttcacctaccgacacctggcactcttcacagacacaggctacatctggatggggacagcatcactcaaggagaagctatgtgagttcaactgcaacatccgggcacctccaaagcagatggtctggtgcagccgtcctcgtagcaaggagagggccgtggtggtggcctgggaaaggcggctgatggtggtgggcgatgcacccgagagcatccagtttgtgctggatgaggactcctacctggtgcctgagctcgatggggtccgcatcttctcccgcagcacccacgagttcctgcatgaggttccagcggccagcgaggaaatcttcaaaattgcctcaatggcccccggggcgctgctcctggaggctcagaaggagtatgagaaagagagccagaaggcggacgagtacctgcgggagatccaggagctgggccagctgacccaggccgtgcagcagtgcattgaggctgcaggacatgagcaccagccagacatgcagaagagtctgctcagggttggcctggatggccgggccggggagggtggggctgggagggggtgggatgggcagcagggaagctctctcctatcgccctctggctcttctcaggccgcctccttcggaaagtgtttcctggacagatttccacccgacagcttcgtgcacatgtgtcaggacctgcgtgtgctcaatgctgttcgggactatcacatcgggatcccgctcacctatagccaatataagcagctcaccatccaggtgctgctggacaggctcgtgttgcggagactttaccccctggccatccagatatgcgagtacttgcgccttcctgaagtacagggcgtcagcaggatcctggcccactgggcctgctacaaggtgcaacagaaggatgtctcagatgaggatgtggctcgagccattaaccagaagctgggggacacgcctggtgtctcttactccgacattgctgcacgagcctatggttgtggccgcacggagctggccatcaagctgctggagtatgagccacgctcaggggagcaggtaccccttctcctaaagatgaagaggagcaaactggcactaagcaaggccatcgagagcggggacactgacctggtgttcacggtgttgctgcacctgaagaacgagctgaaccgaggagattttttcatgacccttcggaatcagcccatggccctcagtttgtaccgacagttctgtaagcatcaggagctagagacgctgaaggacctttacaatcaggatgacaatcaccaggaattgggcagcttccacatccgagccagctatgctgcagaagagcgtattgaggggcgagtagcagctctgcagacagccgccgatgccttctacaaggccaagaatgagtttgcagccaaggctacagaggatcaaatgcggctcctacggctgcagcggcgcctagaagacgagctggggggccagttcctagacctgtctctacatgacacagttaccaccctcattcttggcggtcacaacaagcgtgcagagcagctggcacgtgacttccgcatccctgacaagaggtgacacaactaaaaaaaaacaaaggtatttatggaattccactgagtggtaatggatgatgcagttcaaataactaaggacacatgttcaaagagcataattaactttttaaaagaagctaataagcatggattcctggttcattcttgttctgctcggcagtggtctgatatgtgtcagtgccaacaatgctaccacagttgcaccttctgtaggaattacaagattaattaactcatcaacggcagaaccagttaaagaagaggccaaaacttcaaatccaacttcttcactaacttctctttctgtggcaccaacattcagcccaaatataactctgggacccacctatttaaccactgtcaattcttcagactctgacaatgggaccacaagaacagcaagcaccaattctataggcattacaatttcaccaaatggaacgtggcttccagataaccagttcacggatgccagaacagaaccctgggaggggaattccagcaccgcagcaaccactccagaaactttccctccttcagatgagacaccaattattgcggtgatggtggccctgtcctctctgctagtgatcgtgtttattatcatagttttgtacatgttaaggtttaagaaatacaagcaagctgggagccattccaattctttccgcttatccaacggccgcactgaggatgtggagccccagagtgtgccacttctggccagatccccaagcacttccagccaacatgaagaagaaccgtgttttacagatcattccatatgaattcaacagagtgatcattccagttaagcggggcgaagagaatacagactatgtgaacgcatcctttattgatggctaccggcagaaggactcctatatcgccagccagggccctcttctccacacaattgaggacttctggcgaatgatctgggagtggaaatcctgctctatcgtgatgctaacagaactggaggagagaggccaggagaagtgtgcccagtactggccatctgatggactggtgtcctatggagatattacagtggaactgaagaaggaggaggaatgtgagagctacaccgtccgagacctcctggtcaccaacaccagggagaataagagccggcagatccggcagttccacttccatggctggcctgaagtgggcatccccagtgacggaaagggcatgatcagcatcatcgccgccgtgcagaagcagcagcagcagtcagggaaccaccccatcaccgtgcactgcagcgccggggcaggaaggacggggaccttctgtgccctgagcaccgtcctggagcgtgtgaaagcagaggggattttggatgtcttccagactgtcaagagcctgcggctacagaggccacacatggtccagacactggaacagtatgagttctgctacaaggtggtgcaggagtatattgatgcattctcagattatgccaacttcaagtaagcggcaacaagggtccgtggaccaggaggattgcctttaatattttgtaatattctgttttgttaatataccccaaattgtgtatatatcttataactgttttagaaattggtacataggcttctattacctattaggtggaaattttatatgtaaatgtgttagcactgatagtcctttttccaatgttttattggggaattaaatagtgtgatgtttggattgatatcgtgaaatcctcagccgagaaattgggctggattgtgctttggttaatacatctttccctaaagaagataaacacaaaatccattccaggtagctcggcaccaactaagaaaaaaagcacaaagttctcagagctctcgaggaaagtggttgtccccgtaccaccatgcactgtaaatatccctcccctctctccctggtcccctcccccatccccaccactgatatcatggggagtaataggaccagagcggtatctctggcaccacactagggactatcaggtaataaaagctttgactccctgaggaaatgtctctccctttgtctgggggtggggcagccatacaggctggggctctcctcggctgttcatggccctcctgttgctgttctctctgagttatctgagagaggccacagtcccccagctcctcctgtccaccaaacacagcccttccagttcttaggtgatctccaggaccctcctttcattcccagcacatctttggtttagtggtcctggccagcctccctccctaggaaggtggccaggtcctcactgagtctccttaaggacaggggcacaggggagactagagctggctcagctttgggctgaggccagtctgacctctccagtctgtggtgctttgctacaaaactgtctggattgtgtcaccctatctaggataaatctttatgtccacatatattgtgttgaattgttcccattttctttcatacgtgtcctcatttctgggacagtgtgaatgtttctcagatctagaagtcagatggtgggagtcttagatccgaacttggttttgagtgacatgttagacaaaagtgttgaacttttgtttcttaaagaagctggatgttcatttatgtctcccgtaacagtctgtgctgtccagagacccagtatccttaggatattattctcatcctcatggttgaagctgggtcactgccatgtccataatccaccctgaggaaagagcatggagagccagcagcttcatttctaaggacaggaagccaaatctgcacttttcacttccactcataatccaccctgcattccactcatcagcttcacaagtaggttttcacctggtcatagctatgcctaactacagggagtgctggggaagtgtgatcttttgttgggggcacactgggagagtgggtctgtccactgcctcccagcctcagagcagctcaccacaggagcaggagagtgaactcgtggctgtggctgtcaggcagggcctttcttgagagccagcgcaggcctgggctcctcagaggcttctggagtgagagatggcacctcagcctggcccatggaggcatgttcagggatcagcactactgtgcttcttggaggaggtgggacttgagctggacccatgggaggctggaaatttagatgagtgaaaaggaggaaaggcgaagtagagccacattacagagggcctcagagtccagataaagcagttaacatgtagtggctccaggagggaagcctgtctgtgcaccacatacccaggatgtttgtgggaaggaaggagatgtgcggaagggacccaggagacctgcaggaggcaagggctgcaacagaccccctctggaagtttacaggaggtgagtgtgagtcattagagacattcagttctgtaggaactaacgaactcccaagaggcagtaaacttaaaactcagcagtctcgataagtatggataaattaggcaaagacagattctgaggaatttctggtgaggggtgccaagtttggggagcagcccctggctccttgcaagctacccttcagtgctctgtgtgaccaagtccaagtcgatgcaggagggcaggcactgggtcagcaagccactcagtgaatgtgcaggtgaggccgttcataggcgcttgtgtgcctcccagcaggctgcctgccattgccagggctggccttcagcagggtgcgccaccatggcctgagtggttttctgctgaagtccgtgctgatttggccagtggataggcatcacctgggtgcaaaaccattgtctccaggtaggaatgacctcagctgtttgctccgtgtctcgctcagcctgtagatgtgtccctcatcccttcatgcctccctcttcactcctcttttactttctactcggggcttgcatgtttacaagagaggtgaacccaacagaaactagtataggccaaaaggaaaatgtgctgaagctcacacagcacagtcgtgtggaaanggcagcagtgactgcttcatccagtgcccttcccacagccagtcagttgcgacccaaggggcttagggtaggagtgtttctccataggggaagagtaacagcctgcacccaccacacacccaaagccctacatcctgccacactgagacctcacttcatttgggcgggtccctcctgggttgcagtttccttcattgctcccctgtcccaaatactcaagtctctctcattaaaaataaagagcaggccaggtgcagtggctcacacctgtaatcccacactttgggaggccaaggcgggtggatcacttgagcccaggattcgagaccaacctgggcaacatgacaagatcctgtctctacaaaaaataacaaaaatcatctgggcatggaggcacacgcctgtagtcccagctacttgggaggctgaggtggaaggatcacctgagcccatgaggtggaggctacagtgagctgagatcacgccactgcactccagcctggatgacagcgagactccatctcaaaaaaaaaaaaagaaaaagaaaaagaattaattaattaattaaataaagagcatgtctcccaccccaggcctaagttcttccctctatgagagactacttgcagaaacctgtgttctcactcttcccccttcctcacttcattcccacacatttcttttccatccctgcgcaccaaggtcaccttggtgctaaacaccagggacccatggtctcttccc

SEQ ID NO: 317809 - DNA, 4775 bp, Homo sapiens
  misc_feature (4662)..(4662): n is a, c, g, or t
gcggaagtgccggcctggagcccgctctaggtgggtgtcccctcggtgcttcccagctgccgtctgcaccagccatggactgctacacggcgaactggaacccactcggggactctgccttttaccggaaatatgagctgtacagcatggactgggacctgaaggaggaactcagggattgcctggtggctgctgcaccctatgggggccccattgcactgctgaggaacccctggcggaaggagaaagctgctagtgtgaggccagtgctcgatatatactctgcttccggcatgcctctggccagcctgctgtggaagagtggacccgtggtgtccctgggctggtcagctgaggaggagctgctctgtgtgcaggaagatggtgctgtactggtttatgggcttcatggtgacttccggagacacttcagcatgggcaatgaagtgctccagaaccgggttctggatgcccggatctttcacactgagtttggttccggagtggccatcctcacaggggcccaccgcttcaccctcagtgccaatgtgggtgacctcaaactccgccggatgccagaggtgccaggtctgcaaagtgcaccctcctgctggactgtgctgtgccaggaccgagtggcacacattcttctggctgtggggcctgacctttacctcttggaccatgcagcctgctccgcagtgacgccccctggcctggccccaggagtaagcagcttcctacagatggctgtctccttcacctaccgacacctggcactcttcacagacacaggctacatctggatggggacagcatcactcaaggagaagctatgtgagttcaactgcaacatccgggcacctccaaagcagatggtctggtgcagccgtcctcgtagcaaggagagggccgtggtggtggcctgggaaaggcggctgatggtggtgggcgatgcacccgagagcatccagtttgtgctggatgaggactcctacctggtgcctgagctcgatggggtccgcatcttctcccgcagcacccacgagttcctgcatgaggttccagcggccagcgaggaaatcttcaaaattgcctcaatggcccccggggcgctgctcctggaggctcagaaggagtatgagaaagagagccagaaggcggacgagtacctgcgggagatccaggagctgggccagctgacccaggccgtgcagcagtgcattgaggctgcaggacatgagcaccagccagacatgcagaagagtctgctcagggttggcctggatggccgggccggggagggtggggctgggagggggtgggatgggcagcagggaagctctctcctatcgccctctggctcttctcaggccgcctccttcggaaagtgtttcctggacagatttccacccgacagcttcgtgcacatgtgtcaggacctgcgtgtgctcaatgctgttcgggactatcacatcgggatcccgctcacctatagccaatataagcagctcaccatccaggtgctgctggacaggctcgtgttgcggagactttaccccctggccatccagatatgcgagtacttgcgccttcctgaagtacagggcgtcagcaggatcctggcccactgggcctgctacaaggtgcaacagaaggatgtctcagatgaggatgtggctcgagccattaaccagaagctgggggacacgcctggtgtctcttactccgacattgctgcacgagcctatggttgtggccgcacggagctggccatcaagctgctggagtatgagccacgctcaggggagcaggtaccccttctcctaaagatgaagaggagcaaactggcactaagcaaggccatcgagagcggggacactgacctggtgttcacggtgttgctgcacctgaagaacgagctgaaccgaggagattttttcatgacccttcggaatcagcccatggccctcagtttgtaccgacagttctgtaagcatcaggagctagagacgctgaaggacctttacaatcaggatgacaatcaccaggaattgggcagcttccacatccgagccagctatgctgcagaagagcgtattgaggggcgagtagcagctctgcagacagccgccgatgccttctacaaggccaagaatgagtttgcagccaaggctacagaggatcaaatgcggctcctacggctgcagcggcgcctagaagacgagctggggggccagttcctagacctgtctctacatgacacagttaccaccctcattcttggcggtcacaacaagcgtgcagagcagctggcacgtgacttccgcatccctgacaagaggtgacacaactaaaaaaaaacaaaggtatttatggaattccactgagtggtaatggatgatgcagttcaaataactaaggacacatgttcaaagagcataattaactttttaaaagaagctaataagcatggattcctggttcattcttgttctgctcggcagtggtctgatatgtgtcagtgccaacaatgctaccacagttgcaccttctgtaggaattacaagattaattaactcatcaacggcagaaccagttaaagaagaggccaaaacttcaaatccaacttcttcactaacttctctttctgtggcaccaacattcagcccaaatataactctgggacccacctatttaaccactgtcaattcttcagactctgacaatgggaccacaagaacagcaagcaccaattctataggcattacaatttcaccaaatggaacgtggcttccagataaccagttcacggatgccagaacagaaccctgggaggggaattccagcaccgcagcaaccactccagaaactttccctccttcagatgagacaccaattattgcggtgatggtggccctgtcctctctgctagtgatcgtgtttattatcatagttttgtacatgttaaggtttaagaaatacaagcaagctgggagccattccaattctttccgcttatccaacggccgcactgaggatgtggagccccagagtgtgccacttctggccagatccccaagcaccaacaggaaatacccacccctgcccgtggacaagctggaagaggaaattaaccggagaatggcagacgacaataagctcttcagggaggaattcaacgctctccctgcatgtcctatccaggccacctgtgaggctgcttccaaggaggaaaacaaggaaaaaaatcgatatgtaaacatcttgccttatgaccactctagagtccacctgacaccggttgaaggggttccagattctgattacatcaatgcttcattcatcaacggttaccaagaaaagaacaaattcattgctgcacaaggaccaaaagaagaaacggtgaatgatttctggcggatgatctgggaacaaaacacagccaccatcgtcatggttaccaacctgaaggagagaaaggagtgcaagtgcgcccagtactggccagaccaaggctgctggacctatgggaatattcgggtgtctgtagaggatgtgactgtcctggtggactacacagtacggaagttctgcatccagcaggtgggcgacatgaccaacagaaagccacagcgcctcatcactcagttccactttaccagctggccagactttggggtgccttttaccccgatcggcatgctcaagttcctcaagaaggtgaaggcctgtaaccctcagtatgcaggggccatcgtggtccactgcagtgcaggtgtagggcgtacaggtacctttgtcgtcattgatgccatgctggacatgatgcatacagaacggaaggtggacgtgtatggctttgtgagccggatccgggcacagcgctgccagatggtgcaaaccgatatgcagtatgtcttcatataccaagcccttctggagcattatctctatggagatacagaactggaagtgacctctctagaaacccacctgcagaaaatttacaacaaaatcccagggaccagcaacaatggattagaggaggagtttaagaagttaacatcaatcaaaatccagaatgacaagatgcggactggaaaccttccagccaacatgaagaagaaccgtgttttacagatcattccatatgaattcaacagagtgatcattccagttaagcggggcgaagagaatacagactatgtgaacgcatcctttattgatggctaccggcagaaggactcctatatcgccagccagggccctcttctccacacaattgaggacttctggcgaatgatctgggagtggaaatcctgctctatcgtgatgctaacagaactggaggagagaggccaggagaagtgtgcccagtactggccatctgatggactggtgtcctatggagatattacagtggaactgaagaaggaggaggaatgtgagagctacaccgtccgagacctcctggtcaccaacaccagggagaataagagccggcagatccggcagttccacttccatggctggcctgaagtgggcatccccagtgacggaaagggcatgatcagcatcatcgccgccgtgcagaagcagcagcagcagtcagggaaccaccccatcaccgtgcacttgaacgccggggaaggatggacngggaacctcttgtgccttagcacctccttgaacgttgtgaagcatatgcgaattttgatgtttccaaactgtcataagctttcgttcatttttttaccttttcaattattcct

SEQ ID NO: 317810 - DNA, 4758 bp, Homo sapiens
gcggaagtgccggcctggagcccgctctaggtgggtgtcccctcggtgcttcccagctgccgtctgcaccagccatggactgctacacggcgaactggaacccactcggggactctgccttttaccggaaatatgagctgtacagcatggactgggacctgaaggaggaactcagggattgcctggtggctgctgcaccctatgggggccccattgcactgctgaggaacccctggcggaaggagaaagctgctagtgtgaggccagtgctcgatatatactctgcttccggcatgcctctggccagcctgctgtggaagagtggacccgtggtgtccctgggctggtcagctgaggaggagctgctctgtgtgcaggaagatggtgctgtactggtttatgggcttcatggtgacttccggagacacttcagcatgggcaatgaagtgctccagaaccgggttctggatgcccggatctttcacactgagtttggttccggagtggccatcctcacaggggcccaccgcttcaccctcagtgccaatgtgggtgacctcaaactccgccggatgccagaggtgccaggtctgcaaagtgcaccctcctgctggactgtgctgtgccaggaccgagtggcacacattcttctggctgtggggcctgacctttacctcttggaccatgcagcctgctccgcagtgacgccccctggcctggccccaggagtaagcagcttcctacagatggctgtctccttcacctaccgacacctggcactcttcacagacacaggctacatctggatggggacagcatcactcaaggagaagctatgtgagttcaactgcaacatccgggcacctccaaagcagatggtctggtgcagccgtcctcgtagcaaggagagggccgtggtggtggcctgggaaaggcggctgatggtggtgggcgatgcacccgagagcatccagtttgtgctggatgaggactcctacctggtgcctgagctcgatggggtccgcatcttctcccgcagcacccacgagttcctgcatgaggttccagcggccagcgaggaaatcttcaaaattgcctcaatggcccccggggcgctgctcctggaggctcagaaggagtatgagaaagagagccagaaggcggacgagtacctgcgggagatccaggagctgggccagctgacccaggccgtgcagcagtgcattgaggctgcaggacatgagcaccagccagacatgcagaagagtctgctcagggttggcctggatggccgggccggggagggtggggctgggagggggtgggatgggcagcagggaagctctctcctatcgccctctggctcttctcaggccgcctccttcggaaagtgtttcctggacagatttccacccgacagcttcgtgcacatgtgtcaggacctgcgtgtgctcaatgctgttcgggactatcacatcgggatcccgctcacctatagccaatataagcagctcaccatccaggtgctgctggacaggctcgtgttgcggagactttaccccctggccatccagatatgcgagtacttgcgccttcctgaagtacagggcgtcagcaggatcctggcccactgggcctgctacaaggtgcaacagaaggatgtctcagatgaggatgtggctcgagccattaaccagaagctgggggacacgcctggtgtctcttactccgacattgctgcacgagcctatggttgtggccgcacggagctggccatcaagctgctggagtatgagccacgctcaggggagcaggtaccccttctcctaaagatgaagaggagcaaactggcactaagcaaggccatcgagagcggggacactgacctggtgttcacggtgttgctgcacctgaagaacgagctgaaccgaggagattttttcatgacccttcggaatcagcccatggccctcagtttgtaccgacagttctgtaagcatcaggagctagagacgctgaaggacctttacaatcaggatgacaatcaccaggaattgggcagcttccacatccgagccagctatgctgcagaagagcgtattgaggggcgagtagcagctctgcagacagccgccgatgccttctacaaggccaagaatgagtttgcagccaaggctacagaggatcaaatgcggctcctacggctgcagcggcgcctagaagacgagctggggggccagttcctagacctgtctctacatgacacagttaccaccctcattcttggcggtcacaacaagcgtgcagagcagctggcacgtgacttccgcatccctgacaagaggtgacacaactaaaaaaaaacaaaggtatttatggaattccactgagtggtaatggatgatgcagttcaaataactaaggacacatgttcaaagagcataattaactttttaaaagaagctaataagcatggattcctggttcattcttgttctgctcggcagtggtctgatatgtgtcagtgccaacaatgctaccacagttgcaccttctgtaggaattacaagattaattaactcatcaacggcagaaccagttaaagaagaggccaaaacttcaaatccaacttcttcactaacttctctttctgtggcaccaacattcagcccaaatataactctgggacccacctatttaaccactgtcaattcttcagactctgacaatgggaccacaagaacagcaagcaccaattctataggcattacaatttcaccaaatggaacgtggcttccagataaccagttcacggatgccagaacagaaccctgggaggggaattccagcaccgcagcaaccactccagaaactttccctccttcagatgagacaccaattattgcggtgatggtggccctgtcctctctgctagtgatcgtgtttattatcatagttttgtacatgttaaggtttaagaaatacaagcaagctgggagccattccaattctttccgcttatccaacggccgcactgaggatgtggagccccagagtgtgccacttctggccagatccccaagcaccaacaggaaatacccacccctgcccgtggacaagctggaagaggaaattaaccggagaatggcagacgacaataagctcttcagggaggaattcaacgctctccctgcatgtcctatccaggccacctgtgaggctgcttccaaggaggaaaacaaggaaaaaaatcgatatgtaaacatcttgccttatgaccactctagagtccacctgacaccggttgaaggggttccagattctgattacatcaatgcttcattcatcaacggttaccaagaaaagaacaaattcattgctgcacaaggaccaaaagaagaaacggtgaatgatttctggcggatgatctgggaacaaaacacagccaccatcgtcatggttaccaacctgaaggagagaaaggagtgcaagtgcgcccagtactggccagaccaaggctgctggacctatgggaatattcgggtgtctgtagaggatgtgactgtcctggtggactacacagtacggaagttctgcatccagcaggtgggcgacatgaccaacagaaagccacagcgcctcatcactcagttccactttaccagctggccagactttggggtgccttttaccccgatcggcatgctcaagttcctcaagaaggtgaaggcctgtaaccctcagtatgcaggggccatcgtggtccactgcagtgcaggtgtagggcgtacaggtacctttgtcgtcattgatgccatgctggacatgatgcatacagaacggaaggtggacgtgtatggctttgtgagccggatccgggcacagcgctgccagatggtgcaaaccgatatgcagtatgtcttcatataccaagcccttctggagcattatctctatggagatacagaactggaagtgacctctctagaaacccacctgcagaaaatttacaacaaaatcccagggaccagcaacaatggattagaggaggagtttaagaagttaacatcaatcaaaatccagaatgacaagatgcggactggaaaccttccagccaacatgaagaagaaccgtgttttacagatcattccatatgaattcaacagagtgatcattccagttaagcggggcgaagagaatacagactatgtgaacgcatcctttattgatggctaccggcagaaggactcctatatcgccagccagggccctcttctccacacaattgaggacttctggcgaatgatctgggagtggaaatcctgctctatcgtgatgctaacagaactggaggagagaggccagacattgaacaaattcatttaccagatactgagagcctaccatgtgccaggcattgtgcaaggtgtggggaatacagagatgaaaagagacgcagccactcccacaaggagctgtagagggaagtgagccaggtgcaagcaaagacagacagtagaccacctcctgctcactagcaaggacagaaaggcgagtgctagcaacttgaaggtaccttgcagatcaaagagataaaggtaaaagggagaaaggatactgtggcctgggcggtggtgaagcccatggctgtgtgggaatgtgaattggttctgattttctgaattagcagtctggcggatgtaagcagcattaaatatgaaaacaccccatgggagaaaaagaaaggaattggaacaa

SEQ ID NO: 317811 - DNA, 3939 bp, Homo sapiens
gcggaagtgccggcctggagcccgctctaggtgggtgtcccctcggtgcttcccagctgccgtctgcaccagccatggactgctacacggcgaactggaacccactcggggactctgccttttaccggaaatatgagctgtacagcatggactgggacctgaaggaggaactcagggattgcctggtggctgctgcaccctatgggggccccattgcactgctgaggaacccctggcggaaggagaaagctgctagtgtgaggccagtgctcgatatatactctgcttccggcatgcctctggccagcctgctgtggaagagtggacccgtggtgtccctgggctggtcagctgaggaggagctgctctgtgtgcaggaagatggtgctgtactggtttatgggcttcatggtgacttccggagacacttcagcatgggcaatgaagtgctccagaaccgggttctggatgcccggatctttcacactgagtttggttccggagtggccatcctcacaggggcccaccgcttcaccctcagtgccaatgtgggtgacctcaaactccgccggatgccagaggtgccaggtctgcaaagtgcaccctcctgctggactgtgctgtgccaggaccgagtggcacacattcttctggctgtggggcctgacctttacctcttggaccatgcagcctgctccgcagtgacgccccctggcctggccccaggagtaagcagcttcctacagatggctgtctccttcacctaccgacacctggcactcttcacagacacaggctacatctggatggggacagcatcactcaaggagaagctatgtgagttcaactgcaacatccgggcacctccaaagcagatggtctggtgcagccgtcctcgtagcaaggagagggccgtggtggtggcctgggaaaggcggctgatggtggtgggcgatgcacccgagagcatccagtttgtgctggatgaggactcctacctggtgcctgagctcgatggggtccgcatcttctcccgcagcacccacgagttcctgcatgaggttccagcggccagcgaggaaatcttcaaaattgcctcaatggcccccggggcgctgctcctggaggctcagaaggagtatgagaaagagagccagaaggcggacgagtacctgcgggagatccaggagctgggccagctgacccaggccgtgcagcagtgcattgaggctgcaggacatgagcaccagccagacatgcagaagagtctgctcagggttggcctggatggccgggccggggagggtggggctgggagggggtgggatgggcagcagggaagctctctcctatcgccctctggctcttctcaggccgcctccttcggaaagtgtttcctggacagatttccacccgacagcttcgtgcacatgtgtcaggacctgcgtgtgctcaatgctgttcgggactatcacatcgggatcccgctcacctatagccaatataagcagctcaccatccaggtgctgctggacaggctcgtgttgcggagactttaccccctggccatccagatatgcgagtacttgcgccttcctgaagtacagggcgtcagcaggatcctggcccactgggcctgctacaaggtgcaacagaaggatgtctcagatgaggatgtggctcgagccattaaccagaagctgggggacacgcctggtgtctcttactccgacattgctgcacgagcctatggttgtggccgcacggagctggccatcaagctgctggagtatgagccacgctcaggggagcaggtaccccttctcctaaagatgaagaggagcaaactggcactaagcaaggccatcgagagcggggacactgacctggtgttcacggtgttgctgcacctgaagaacgagctgaaccgaggagattttttcatgacccttcggaatcagcccatggccctcagtttgtaccgacagttctgtaagcatcaggagctagagacgctgaaggacctttacaatcaggatgacaatcaccaggaattgggcagcttccacatccgagccagctatgctgcagaagagcgtattgaggggcgagtagcagctctgcagacagccgccgatgccttctacaaggccaagaatgagtttgcagccaaggctacagaggatcaaatgcggctcctacggctgcagcggcgcctagaagacgagctggggggccagttcctagacctgtctctacatgacacagttaccaccctcattcttggcggtcacaacaagcgtgcagagcagctggcacgtgacttccgcatccctgacaagaggtgacacaactaaaaaaaaacaaaggtatttatggaattccactgagtggtaatggatgatgcagttcaaataactaaggacacatgttcaaagagcataattaactttttaaaagaagctaataagcatggattcctggttcattcttgttctgctcggcagtggtctgatatgtgtcagtgccaacaatgctaccacagttgcaccttctgtaggaattacaagattaattaactcatcaacggcagaaccagttaaagaagaggccaaaacttcaaatccaacttcttcactaacttctctttctgtggcaccaacattcagcccaaatataactctgggacccacctatttaaccactgtcaattcttcagactctgacaatgggaccacaagaacagcaagcaccaattctataggcattacaatttcaccaaatggaacgtggcttccagataaccagttcacggatgccagaacagaaccctgggaggggaattccagcaccgcagcaaccactccagaaactttccctccttcagatgagacaccaattattgcggtgatggtggccctgtcctctctgctagtgatcgtgtttattatcatagttttgtacatgttaaggtttaagaaatacaagcaagctgggagccattccaattctttccgcttatccaacggccgcactgaggatgtggagccccagagtgtgccacttctggccagatccccaagcaccaacaggaaatacccacccctgcccgtggacaagctggaagaggaaattaaccggagaatggcagacgacaataagctcttcagggaggaattcaacgctctccctgcatgtcctatccaggccacctgtgaggctgcttccaaggaggaaaacaaggaaaaaaatcgatatgtaaacatcttgccttatgaccactctagagtccacctgacaccggttgaaggggttccagattctgattacatcaatgcttcattcatcaacggttaccaagaaaagaacaaattcattgctgcacaaggaccaaaagaagaaacggtgaatgatttctggcggatgatctgggaacaaaacacagccaccatcgtcatggttaccaacctgaaggagagaaaggagtgcaagtgcgcccagtactggccagaccaaggctgctggacctatgggaatattcgggtgtctgtagaggatgtgactgtcctggtggactacacagtacggaagttctgcatccagcaggtgggcgacatgaccaacagaaagccacagcgcctcatcactcagttccactttaccagctggccagactttggggtgccttttaccccgatcggcatgctcaagttcctcaagaaggtgaaggcctgtaaccctcagtatgcaggggccatcgtggtccactgcagtgcaggtgtagggcgtacaggtacctttgtcgtcattgatgccatgctggacatgatgcatacagaacggaaggtggacgtgtatggctttgtgagccggatccgggcacagcgctgccagatggtgcaaaccgatgtgagtgatctgtgggtcaggtgagggtgg

SEQ ID NO: 317812 - DNA, 3556 bp, Homo sapiens
gcggaagtgccggcctggagcccgctctaggtgggtgtcccctcggtgcttcccagctgccgtctgcaccagccatggactgctacacggcgaactggaacccactcggggactctgccttttaccggaaatatgagctgtacagcatggactgggacctgaaggaggaactcagggattgcctggtggctgctgcaccctatgggggccccattgcactgctgaggaacccctggcggaaggagaaagctgctagtgtgaggccagtgctcgatatatactctgcttccggcatgcctctggccagcctgctgtggaagagtggacccgtggtgtccctgggctggtcagctgaggaggagctgctctgtgtgcaggaagatggtgctgtactggtttatgggcttcatggtgacttccggagacacttcagcatgggcaatgaagtgctccagaaccgggttctggatgcccggatctttcacactgagtttggttccggagtggccatcctcacaggggcccaccgcttcaccctcagtgccaatgtgggtgacctcaaactccgccggatgccagaggtgccaggtctgcaaagtgcaccctcctgctggactgtgctgtgccaggaccgagtggcacacattcttctggctgtggggcctgacctttacctcttggaccatgcagcctgctccgcagtgacgccccctggcctggccccaggagtaagcagcttcctacagatggctgtctccttcacctaccgacacctggcactcttcacagacacaggctacatctggatggggacagcatcactcaaggagaagctatgtgagttcaactgcaacatccgggcacctccaaagcagatggtctggtgcagccgtcctcgtagcaaggagagggccgtggtggtggcctgggaaaggcggctgatggtggtgggcgatgcacccgagagcatccagtttgtgctggatgaggactcctacctggtgcctgagctcgatggggtccgcatcttctcccgcagcacccacgagttcctgcatgaggttccagcggccagcgaggaaatcttcaaaattgcctcaatggcccccggggcgctgctcctggaggctcagaaggagtatgagaaagagagccagaaggcggacgagtacctgcgggagatccaggagctgggccagctgacccaggccgtgcagcagtgcattgaggctgcaggacatgagcaccagccagacatgcagaagagtctgctcagggttggcctggatggccgggccggggagggtggggctgggagggggtgggatgggcagcagggaagctctctcctatcgccctctggctcttctcaggccgcctccttcggaaagtgtttcctggacagatttccacccgacagcttcgtgcacatgtgtcaggacctgcgtgtgctcaatgctgttcgggactatcacatcgggatcccgctcacctatagccaatataagcagctcaccatccaggtgctgctggacaggctcgtgttgcggagactttaccccctggccatccagatatgcgagtacttgcgccttcctgaagtacagggcgtcagcaggatcctggcccactgggcctgctacaaggtgcaacagaaggatgtctcagatgaggatgtggctcgagccattaaccagaagctgggggacacgcctggtgtctcttactccgacattgctgcacgagcctatggttgtggccgcacggagctggccatcaagctgctggagtatgagccacgctcaggggagcaggtaccccttctcctaaagatgaagaggagcaaactggcactaagcaaggccatcgagagcggggacactgacctggtgttcacggtgttgctgcacctgaagaacgagctgaaccgaggagattttttcatgacccttcggaatcagcccatggccctcagtttgtaccgacagttctgtaagcatcaggagctagagacgctgaaggacctttacaatcaggatgacaatcaccaggaattgggcagcttccacatccgagccagctatgctgcagaagagcgtattgaggggcgagtagcagctctgcagacagccgccgatgccttctacaaggccaagaatgagtttgcagccaaggctacagaggatcaaatgcggctcctacggctgcagcggcgcctagaagacgagctggggggccagttcctagacctgtctctacatgacacagttaccaccctcattcttggcggtcacaacaagcgtgcagagcagctggcacgtgacttccgcatccctgacaagaggtgacacaactaaaaaaaaacaaaggtatttatggaattccactgagtggtaatggatgatgcagttcaaataactaaggacacatgttcaaagagcataattaactttttaaaagaagctaataagcatggattcctggttcattcttgttctgctcggcagtggtctgatatgtgtcagtgccaacaatgctaccacagttgcaccttctgtaggaattacaagattaattaactcatcaacggcagaaccagttaaagaagaggccaaaacttcaaatccaacttcttcactaacttctctttctgtggcaccaacattcagcccaaatataactctgggacccacctatttaaccactgtcaattcttcagactctgacaatgggaccacaagaacagcaagcaccaattctataggcattacaatttcaccaaatggaacgtggcttccagataaccagttcacggatgccagaacagaaccctgggaggggaattccagcaccgcagcaaccactccagaaactttccctccttcagatgagacaccaattattgcggtgatggtggccctgtcctctctgctagtgatcgtgtttattatcatagttttgtacatgttaaggtttaagaaatacaagcaagctgggagccattccaattctttccgcttatccaacggccgcactgaggatgtggagccccagagtgtgccacttctggccagatccccaagcaccaacaggaaatacccacccctgcccgtggacaagctggaagaggaaattaaccggagaatggcagacgacaataagctcttcagggaggaattcaacgctctccctgcatgtcctatccaggccacctgtgaggctgcttccaaggaggaaaacaaggaaaaaaatcgatatgtaaacatcttgccttatgaccactctagagtccacctgacaccggttgaaggggttccagattctgattacatcaatgcttcattcatcaacggctactaagaaaagcgaaattcataaaagagaccatgtgattctataaagcaacacagaatccgttttcagaagaggccaacgtggaccaccatacgccagtgttgcctgtgaagagagatacagttaaaaggaagaattcacggtggccccgtataggtcaaggtgtgggagtacaggaggcgactgaatgatcctccgtcca

SEQ ID NO: 317813 - DNA, 2754 bp, Homo sapiens
gcggaagtgccggcctggagcccgctctaggtgggtgtcccctcggtgcttcccagctgccgtctgcaccagccatggactgctacacggcgaactggaacccactcggggactctgccttttaccggaaatatgagctgtacagcatggactgggacctgaaggaggaactcagggattgcctggtggctgctgcaccctatgggggccccattgcactgctgaggaacccctggcggaaggagaaagctgctagtgtgaggccagtgctcgatatatactctgcttccggcatgcctctggccagcctgctgtggaagagtggacccgtggtgtccctgggctggtcagctgaggaggagctgctctgtgtgcaggaagatggtgctgtactggtttatgggcttcatggtgacttccggagacacttcagcatgggcaatgaagtgctccagaaccgggttctggatgcccggatctttcacactgagtttggttccggagtggccatcctcacaggggcccaccgcttcaccctcagtgccaatgtgggtgacctcaaactccgccggatgccagaggtgccaggtctgcaaagtgcaccctcctgctggactgtgctgtgccaggaccgagtggcacacattcttctggctgtggggcctgacctttacctcttggaccatgcagcctgctccgcagtgacgccccctggcctggccccaggagtaagcagcttcctacagatggctgtctccttcacctaccgacacctggcactcttcacagacacaggctacatctggatggggacagcatcactcaaggagaagctatgtgagttcaactgcaacatccgggcacctccaaagcagatggtctggtgcagccgtcctcgtagcaaggagagggccgtggtggtggcctgggaaaggcggctgatggtggtgggcgatgcacccgagagcatccagtttgtgctggatgaggactcctacctggtgcctgagctcgatggggtccgcatcttctcccgcagcacccacgagttcctgcatgaggttccagcggccagcgaggaaatcttcaaaattgcctcaatggcccccggggcgctgctcctggaggctcagaaggagtatgagaaagagagccagaaggcggacgagtacctgcgggagatccaggagctgggccagctgacccaggccgtgcagcagtgcattgaggctgcaggacatgagcaccagccagacatgcagaagagtctgctcagggttggcctggatggccgggccggggagggtggggctgggagggggtgggatgggcagcagggaagctctctcctatcgccctctggctcttctcaggccgcctccttcggaaagtgtttcctggacagatttccacccgacagcttcgtgcacatgtgtcaggacctgcgtgtgctcaatgctgttcgggactatcacatcgggatcccgctcacctatagccaatataagcagctcaccatccaggtgctgctggacaggctcgtgttgcggagactttaccccctggccatccagatatgcgagtacttgcgccttcctgaagtacagggcgtcagcaggatcctggcccactgggcctgctacaaggtgcaacagaaggatgtctcagatgaggatgtggctcgagccattaaccagaagctgggggacacgcctggtgtctcttactccgacattgctgcacgagcctatggttgtggccgcacggagctggccatcaagctgctggagtatgagccacgctcaggggagcaggtaccccttctcctaaagatgaagaggagcaaactggcactaagcaaggccatcgagagcggggacactgacctggtgttcacggtgttgctgcacctgaagaacgagctgaaccgaggagattttttcatgacccttcggaatcagcccatggccctcagtttgtaccgacagttctgtaagcatcaggagctagagacgctgaaggacctttacaatcaggatgacaatcaccaggaattgggcagcttccacatccgagccagctatgctgcagaagagcgtattgaggggcgagtagcagctctgcagacagccgccgatgccttctacaaggccaagaatgagtttgcagccaaggctacagaggatcaaatgcggctcctacggctgcagcggcgcctagaagacgagctggggggccagttcctagacctgtctctacatgacacagttaccaccctcattcttggcggtcacaacaagcgtgcagagcagctggcacgtgacttccgcatccctgacaagaggctctggtggctgaagctgactgccctggcagatttggaagattgggaagagctagagaagttttccaagagcaagaaatcacccattggctacctgccttttgtggagatctgcatgaaacaacataacaaatacgaagccaagaagtatgcttcccgcgtgggtcccgagcagaaggtcaaggctttgcttcttgttggcgatgtggctcaggctgcagatgtggccatcgaacaccggaatgaggctgagctgagcctcgtattgtcccactgcacgggagccacagatggggccacagctgacaagattcaacgggccagggcacaagcccagaagaagtgaggagtccatcctgagagatcagcatagtgcgttctttagatgactcttcagtattctggtgacc

SEQ ID NO: 317814 - DNA, 2825 bp, Homo sapiens
gcggaagtgccggcctggagcccgctctaggtgggtgtcccctcggtgcttcccagctgccgtctgcaccagccatggactgctacacggcgaactggaacccactcggggactctgccttttaccggaaatatgagctgtacagcatggactgggacctgaaggaggaactcagggattgcctggtggctgctgcaccctatgggggccccattgcactgctgaggaacccctggcggaaggagaaagctgctagtgtgaggccagtgctcgatatatactctgcttccggcatgcctctggccagcctgctgtggaagagtggacccgtggtgtccctgggctggtcagctgaggaggagctgctctgtgtgcaggaagatggtgctgtactggtttatgggcttcatggtgacttccggagacacttcagcatgggcaatgaagtgctccagaaccgggttctggatgcccggatctttcacactgagtttggttccggagtggccatcctcacaggggcccaccgcttcaccctcagtgccaatgtgggtgacctcaaactccgccggatgccagaggtgccaggtctgcaaagtgcaccctcctgctggactgtgctgtgccaggaccgagtggcacacattcttctggctgtggggcctgacctttacctcttggaccatgcagcctgctccgcagtgacgccccctggcctggccccaggagtaagcagcttcctacagatggctgtctccttcacctaccgacacctggcactcttcacagacacaggctacatctggatggggacagcatcactcaaggagaagctatgtgagttcaactgcaacatccgggcacctccaaagcagatggtctggtgcagccgtcctcgtagcaaggagagggccgtggtggtggcctgggaaaggcggctgatggtggtgggcgatgcacccgagagcatccagtttgtgctggatgaggactcctacctggtgcctgagctcgatggggtccgcatcttctcccgcagcacccacgagttcctgcatgaggttccagcggccagcgaggaaatcttcaaaattgcctcaatggcccccggggcgctgctcctggaggctcagaaggagtatgagaaagagagccagaaggcggacgagtacctgcgggagatccaggagctgggccagctgacccaggccgtgcagcagtgcattgaggctgcaggacatgagcaccagccagacatgcagaagagtctgctcagggttggcctggatggccgggccggggagggtggggctgggagggggtgggatgggcagcagggaagctctctcctatcgccctctggctcttctcaggccgcctccttcggaaagtgtttcctggacagatttccacccgacagcttcgtgcacatgtgtcaggacctgcgtgtgctcaatgctgttcgggactatcacatcgggatcccgctcacctatagccaatataagcagctcaccatccaggtgctgctggacaggctcgtgttgcggagactttaccccctggccatccagatatgcgagtacttgcgccttcctgaagtacagggcgtcagcaggatcctggcccactgggcctgctacaaggtgcaacagaaggatgtctcagatgaggatgtggctcgagccattaaccagaagctgggggacacgcctggtgtctcttactccgacattgctgcacgagcctatggttgtggccgcacggagctggccatcaagctgctggagtatgagccacgctcaggggagcaggtaccccttctcctaaagatgaagaggagcaaactggcactaagcaaggccatcgagagcggggacactgacctggtgttcacggtgttgctgcacctgaagaacgagctgaaccgaggagattttttcatgacccttcggaatcagcccatggccctcagtttgtaccgacagttctgtaagcatcaggagctagagacgctgaaggacctttacaatcaggatgacaatcaccaggaattgggcagcttccacatccgagccagctatgctgcagaagagcgtattgaggggcgagtagcagctctgcagacagccgccgatgccttctacaaggccaagaatgagtttgcagccaaggctacagaggatcaaatgcggctcctacggctgcagcggcgcctagaagacgagctggggggccagttcctagacctgtctctacatgacacagttaccaccctcattcttggcggtcacaacaagcgtgcagagcagctggcacgtgacttccgcatccctgacaagaggctctggtggctgaagctgactgccctggcagatttggaagattgggaagagctagagaagttttccaagagcaagaaatcacccattggctacctgccttttgtggagatctgcatgaaacaacataacaaatacgaagccaagaagtatgcttcccgcgtgggtcccgagcagaagcgatgtggctcaggctgcagatgtggccatcgaacaccggaatgaggctgagctgagcctcgtattgtcccactgcacgggagccacagatggggccacagctgacaagattcaacgggccagggcacaagcccagaagaagtgaggagtccatcctgtacatctcaagcaaggggttcctcccctagcacctgggcttggcagaagggccatagttcatccagctcctcccctagagcaatgctgaggagcgggggcatggtagcagggctgtctggttttaaataaagttggaacacttca

SEQ ID NO: 317815 - DNA, 2849 bp, Homo sapiens
gcggaagtgccggcctggagcccgctctaggtgggtgtcccctcggtgcttcccagctgccgtctgcaccagccatggactgctacacggcgaactggaacccactcggggactctgccttttaccggaaatatgagctgtacagcatggactgggacctgaaggaggaactcagggattgcctggtggctgctgcaccctatgggggccccattgcactgctgaggaacccctggcggaaggagaaagctgctagtgtgaggccagtgctcgatatatactctgcttccggcatgcctctggccagcctgctgtggaagagtggacccgtggtgtccctgggctggtcagctgaggaggagctgctctgtgtgcaggaagatggtgctgtactggtttatgggcttcatggtgacttccggagacacttcagcatgggcaatgaagtgctccagaaccgggttctggatgcccggatctttcacactgagtttggttccggagtggccatcctcacaggggcccaccgcttcaccctcagtgccaatgtgggtgacctcaaactccgccggatgccagaggtgccaggtctgcaaagtgcaccctcctgctggactgtgctgtgccaggaccgagtggcacacattcttctggctgtggggcctgacctttacctcttggaccatgcagcctgctccgcagtgacgccccctggcctggccccaggagtaagcagcttcctacagatggctgtctccttcacctaccgacacctggcactcttcacagacacaggctacatctggatggggacagcatcactcaaggagaagctatgtgagttcaactgcaacatccgggcacctccaaagcagatggtctggtgcagccgtcctcgtagcaaggagagggccgtggtggtggcctgggaaaggcggctgatggtggtgggcgatgcacccgagagcatccagtttgtgctggatgaggactcctacctggtgcctgagctcgatggggtccgcatcttctcccgcagcacccacgagttcctgcatgaggttccagcggccagcgaggaaatcttcaaaattgcctcaatggcccccggggcgctgctcctggaggctcagaaggagtatgagaaagagagccagaaggcggacgagtacctgcgggagatccaggagctgggccagctgacccaggccgtgcagcagtgcattgaggctgcaggacatgagcaccagccagacatgcagaagagtctgctcagggttggcctggatggccgggccggggagggtggggctgggagggggtgggatgggcagcagggaagctctctcctatcgccctctggctcttctcaggccgcctccttcggaaagtgtttcctggacagatttccacccgacagcttcgtgcacatgtgtcaggacctgcgtgtgctcaatgctgttcgggactatcacatcgggatcccgctcacctatagccaatataagcagctcaccatccaggtgctgctggacaggctcgtgttgcggagactttaccccctggccatccagatatgcgagtacttgcgccttcctgaagtacagggcgtcagcaggatcctggcccactgggcctgctacaaggtgcaacagaaggatgtctcagatgaggatgtggctcgagccattaaccagaagctgggggacacgcctggtgtctcttactccgacattgctgcacgagcctatggttgtggccgcacggagctggccatcaagctgctggagtatgagccacgctcaggggagcaggtaccccttctcctaaagatgaagaggagcaaactggcactaagcaaggccatcgagagcggggacactgacctggtgttcacggtgttgctgcacctgaagaacgagctgaaccgaggagattttttcatgacccttcggaatcagcccatggccctcagtttgtaccgacagttctgtaagcatcaggagctagagacgctgaaggacctttacaatcaggatgacaatcaccaggaattgggcagcttccacatccgagccagctatgctgcagaagagcgtattgaggggcgagtagcagctctgcagacagccgccgatgccttctacaaggccaagaatgagtttgcagccaaggctacagaggatcaaatgcggctcctacggctgcagcggcgcctagaagacgagctggggggccagttcctagacctgtctctacatgacacagttaccaccctcattcttggcggtcacaacaagcgtgcagagcagctggcacgtgacttccgcatccctgacaagaggtgacacaactaaaaaaaaacaaaggtatttatggaattccactgagtggtaatggatgatgcagttcaaataactaaggacacatgttcaaagagcataattaactttttaaaagaagctagcgtcgtggctcacacctgtaatcccagcactttgggaggccgaggcgggcggatcacgaggtcaagagatcgagaccatcctggccatcatggtgaaaccccgtctctactaaaaatacaaaaaaaaaaattagccgggcgtggtggcaggcacctgtagtcccagctactcagaaggctgaggcaggagaatggcgtgaacccaggaggcggaggttgcagtgagccgagatcgcaccactgcactccagcctgggcgacagagcgagactccatctcaaaaaaaaaaaaaatttacttgtgtcttctctttttacctgtttgttaatttatcaaataactacttttggctttgtttcatttttattatacaataaaatga

SEQ ID NO: 317816 - DNA, 2140 bp, Homo sapiens
gcggaagtgccggcctggagcccgctctaggtgggtgtcccctcggtgcttcccagctgccgtctgcaccagccatggactgctacacggcgaactggaacccactcggggactctgccttttaccggaaatatgagctgtacagcatggactgggacctgaaggaggaactcagggattgcctggtggctgctgcaccctatgggggccccattgcactgctgaggaacccctggcggaaggagaaagctgctagtgtgaggccagtgctcgatatatactctgcttccggcatgcctctggccagcctgctgtggaagagtggacccgtggtgtccctgggctggtcagctgaggaggagctgctctgtgtgcaggaagatggtgctgtactggtttatgggcttcatggtgacttccggagacacttcagcatgggcaatgaagtgctccagaaccgggttctggatgcccggatctttcacactgagtttggttccggagtggccatcctcacaggggcccaccgcttcaccctcagtgccaatgtgggtgacctcaaactccgccggatgccagaggtgccaggtctgcaaagtgcaccctcctgctggactgtgctgtgccaggaccgagtggcacacattcttctggctgtggggcctgacctttacctcttggaccatgcagcctgctccgcagtgacgccccctggcctggccccaggagtaagcagcttcctacagatggctgtctccttcacctaccgacacctggcactcttcacagacacaggctacatctggatggggacagcatcactcaaggagaagctatgtgagttcaactgcaacatccgggcacctccaaagcagatggtctggtgcagccgtcctcgtagcaaggagagggccgtggtggtggcctgggaaaggcggctgatggtggtgggcgatgcacccgagagcatccagtttgtgctggatgaggactcctacctggtgcctgagctcgatggggtccgcatcttctcccgcagcacccacgagttcctgcatgaggttccagcggccagcgaggaaatcttcaaaattgcctcaatggcccccggggcgctgctcctggaggctcagaaggagtatgagaaagagagccagaaggcggacgagtacctgcgggagatccaggagctgggccagctgacccaggccgtgcagcagtgcattgaggctgcaggacatgagcaccagccagacatgcagaagagtctgctcagggttggcctggatggccgggccggggagggtggggctgggagggggtgggatgggcagcagggaagctctctcctatcgccctctggctcttctcaggccgcctccttcggaaagtgtttcctggacagatttccacccgacagcttcgtgcacatgtgtcaggacctgcgtgtgctcaatgctgttcgggactatcacatcgggatcccgctcacctatagccagtatccctgtgcacgccagaagggtaccctacagccaggggtggcaggggaaggggctggagatgcgtctgcaggtacctggcaagcggggcttattctccaactggatccttaaccgaggaaaatacagatataagcagctcaccatccaggtgctgctggacaggctcgtgttgcggagactttaccccctggccatccagatatgcgagtacttgcgccttcctgaagtacagggcgtcagcaggatcctggcccactgggcctgctacaaggtgcaacagaaggatgtctcagatgaggatgtggctcgagccattaaccagaagctgggggacacgcctggtgtctcttactccgacattgctgcacgagcctatggttgtggccgcacggagctggccatcaaggtgtgggtgcccagccctccacagacactctgatgtggttgttcagggcccccatgccagctccttctctctgtgccttccttctcacctcacagctgctggagtatgagccacgctcaggggagcaggtaccccttctcctaaagatgaagaggagcaaactggcactaagcaaggccatcgagagcggggacactgacctgggtgagggcaaggctggggggcccct

SEQ ID NO: 317817 - DNA, 378 bp, Homo sapiens
cccctcgcgactgcccaggaactttgcatgcgtccttctgggaccaggccagggcactgccagagttgattctcagagaagaaacttagaacggcgagaacagaatttgctcaggtccatttaatgggaggaaagaggaaaactcttggcatgagaaaatttgcttttgcagtgaccaacttttctttcccttcaagtccacctccctcggtcccccggcccgtctcccaggcccctctccttgccgccctctcccaactgttgaggctgtttaagaagggaaataagggctgagagctgcccagaattcagaataggccaattgagaacgcaggtcccctccctttttactttcggtaaataaaaaattttttttga

SEQ ID NO: 317818 - DNA, 418 bp, Homo sapiens
ctggaagaggaaattaaccggagaatggcagacgacaataagctcttcagggaggaattcaacgtgagtactttgttgaggctggtgtatcagcagggaagaaggcagacctaaagtcagacctttcagatctttggagtcatgaagtaaaaaatgggcttttaatgtttaagaggtgagaaatgttttaccaagtttatctgactccctgtatgatcatggataggaaatgaagtgagatttgcctcacctccctaatctacccatccattcagtcatcatcacatctcttacttcttttgtttaataaatacttagcaagcatctaatatttgtcaggtaatattctagttgccagtgatatgatgaggagcagaaacagatccaatccctattctcaaggaactcactgtccagg

SEQ ID NO: 317819 - DNA, 377 bp, Homo sapiens
tgtgggctggtgagaggcagggtttgtgcccttgagcagccccaacaccacctcctctcttgctcaaaccacagcgatgtggctcaggctgcagatgtggccatcgaacaccggaatgaggctgagctgagcctcgtattgtcccactgcacgggagccacagatggggccacagctgacaagattcaacgggccagggcacaagcccagaagaagtgaggagtccatcctgtacatctcaagcaaggggttcctcccctagcacctgggcttggcagaagggccatagttcatccagctcctcccctagagcaatgctgaggagcgggggcatggtagcagggctgtctggttttaaataaagttggaacacttca

SEQ ID NO: 317820 - DNA, 396 bp, Homo sapiens
aatgagctgggaactagtcactcttgttttctcacctataatagcatctgggtccagtgttttttatgtgggacaaatttgaacttgtggtcaacctctttaattgtaaggatattcaggtcttttgttcttcctgggctagttttttattctttttctagagattcgttcatttttcttagttttatttgcctataattgtggataatctgttttttatctgctacttctgtaattatttccacatttgatttataatattaacttgtgggccaggcgtcgtggctcacacctgtaatcccagcactttgggaggccgaggcgggcggatcacgaggtcaagagatcgagaccatcctggccatcatggtgaaaccccgtctctactaaaaatac

SEQ ID NO: 317821 - DNA, 615 bp, Homo sapiens
gagtgttcgcggccgctgcgcccgggtgggctccggaagggggagcggctcccgggggcggtgggaggggtcccgggccacagcccagagcccggagcccgaagccctaagccatcttttccgggtagaagcctgcgggcgcctgcaggttgattgtgcatccttgcgggtccgtcgcggggagggggtccccggaaacgtgccggcccgagtgccgacccctcgcgactgcccaggaactttgcatgcgtccttctgggaccaggccagggcactgccagagttgattctcagagaagaaacttagaacggcgagaacagaatttgctcaggtccatttaatgggaggaaagaggaaaactcttggcatgagaaaatttgcttttgcagtgaccaacttttctttcccttcaagtccacctccctcggtcccccggcccgtccttgccgccctctcccaactgttgaggctgtttaagaagggaaataagggctgagagctgcccagaattcagaataggccaattgagaacgcaggtcccctccctttttactttcggtaaataaaaaattttttttgaaaaaattagttactaattatatctcctgaagatt

SEQ ID NO: 317822 - DNA, 5416 bp, Homo sapiens
gcggaagtgccggcctggagcccgctctaggtgggtgtcccctcggtgcttcccagctgccgtctgcaccagccatggactgctacacggcgaactggaacccactcggggactctgccttttaccggaaatatgagctgtacagcatggactgggacctgaaggaggaactcagggattgcctggtggctgctgcaccctatgggggccccattgcactgctgaggaacccctggcggaaggagaaagctgctagtgtgaggccagtgctcgatatatactctgcttccggcatgcctctggccagcctgctgtggaagagtggacccgtggtgtccctgggctggtcagctgaggaggagctgctctgtgtgcaggaagatggtgctgtactggtttatgggcttcatggtgacttccggagacacttcagcatgggcaatgaagtgctccagaaccgggttctggatgcccggatctttcacactgagtttggttccggagtggccatcctcacaggggcccaccgcttcaccctcagtgccaatgtgggtgacctcaaactccgccggatgccagaggtgccaggtctgcaaagtgcaccctcctgctggactgtgctgtgccaggaccgagtggcacacattcttctggctgtggggcctgacctttacctcttggaccatgcagcctgctccgcagtgacgccccctggcctggccccaggagtaagcagcttcctacagatggctgtctccttcacctaccgacacctggcactcttcacagacacaggctacatctggatggggacagcatcactcaaggagaagctatgtgagttcaactgcaacatccgggcacctccaaagcagatggtctggtgcagccgtcctcgtagcaaggagagggccgtggtggtggcctgggaaaggcggctgatggtggtgggcgatgcacccgagagcatccagtttgtgctggatgaggactcctacctggtgcctgagctcgatggggtccgcatcttctcccgcagcacccacgagttcctgcatgaggttccagcggccagcgaggaaatcttcaaaattgcctcaatggcccccggggcgctgctcctggaggctcagaaggagtatgagaaagagagccagaaggcggacgagtacctgcgggagatccaggagctgggccagctgacccaggccgtgcagcagtgcattgaggctgcaggacatgagcaccagccagacatgcagaagagtctgctcagggccgcctccttcggaaagtgtttcctggacagatttccacccgacagcttcgtgcacatgtgtcaggacctgcgtgtgctcaatgctgttcgggactatcacatcgggatcccgctcacctatagccaatataagcagctcaccatccaggtgctgctggacaggctcgtgttgcggagactttaccccctggccatccagatatgcgagtacttgcgccttcctgaagtacagggcgtcagcaggatcctggcccactgggcctgctacaaggtgcaacagaaggatgtctcagatgaggatgtggctcgagccattaaccagaagctgggggacacgcctggtgtctcttactccgacattgctgcacgagcctatggttgtggccgcacggagctggccatcaaggtgtgggtgcccagccctccacagacactctgatgtggttgttcagggcccccatgccagctccttctctctgtgccttccttctcacctcacagctgctggagtatgagccacgctcaggggagcaggtaccccttctcctaaagatgaagaggagcaaactggcactaagcaaggccatcgagagcggggacactgacctggtgttcacggtgttgctgcacctgaagaacgagctgaaccgaggagattttttcatgacccttcggaatcagcccatggccctcagtttgtaccgacagttctgtaagcatcaggagctagagacgctgaaggacctttacaatcaggatgacaatcaccaggaattgggcagcttccacatccgagccagctatgctgcagaagagcgtattgaggggcgagtagcagctctgcagacagccgccgatgccttctacaaggccaagaatgagtttgcagccaaggctacagaggatcaaatgcggctcctacggctgcagcggcgcctagaagacgagctggggggccagttcctagacctgtctctacatgacacagttaccaccctcattcttggcggtcacaacaagcgtgcagagcagctggcacgtgacttccgcatccctgacaagaggtgacacaactaaaaaaaaacaaaggtatttatggaattccactgagtggtaatggatgatgcagttcaaataactaaggacacatgttcaaagagcataattaactttttaaaagaagctaataagcatggattcctggttcattcttgttctgctcggcagtggtctgatatgtgtcagtgccaacaatgctaccacagttgcaccttctgtaggaattacaagattaattaactcatcaacggcagaaccagttaaagaagaggccaaaacttcaaatccaacttcttcactaacttctctttctgtggcaccaacattcagcccaaatataactctgggacccacctatttaaccactgtcaattcttcagactctgacaatgggaccacaagaacagcaagcaccaattctataggcattacaatttcaccaaatggaacgtggcttccagataaccagttcacggatgccagaacagaaccctgggaggggaattccagcaccgcagcaaccactccagaaactttccctccttcaggtaattctgactcgaaggacagaagagatgagacaccaattattgcggtgatggtggccctgtcctctctgctagtgatcgtgtttattatcatagttttgtacatgttaaggtttaagaaatacaagcaagctgggagccattccaattctttccgcttatccaacggccgcactgaggatgtggagccccagagtgtgccacttctggccagatccccaagcaccaacaggaaatacccacccctgcccgtggacaagctggaagaggaaattaaccggagaatggcagacgacaataagctcttcagggaggaattcaacgctctccctgcatgtcctatccaggccacctgtgaggctgcttccaaggaggaaaacaaggaaaaaaatcgatatgtaaacatcttgccttatgaccactctagagtccacctgacaccggttgaaggggttccagattctgattacatcaatgcttcattcatcaacggttaccaagaaaagaacaaattcattgctgcacaaggaccaaaagaagaaacggtgaatgatttctggcggatgatctgggaacaaaacacagccaccatcgtcatggttaccaacctgaaggagagaaaggagtgcaagtgcgcccagtactggccagaccaaggctgctggacctatgggaatattcgggtgtctgtagaggatgtgactgtcctggtggactacacagtacggaagttctgcatccagcaggtgggcgacatgaccaacagaaagccacagcgcctcatcactcagttccactttaccagctggccagactttggggtgccttttaccccgatcggcatgctcaagttcctcaagaaggtgaaggcctgtaaccctcagtatgcaggggccatcgtggtccactgcagtgcaggtgtagggcgtacaggtacctttgtcgtcattgatgccatgctggacatgatgcatacagaacggaaggtggacgtgtatggctttgtgagccggatccgggcacagcgctgccagatggtgcaaaccgatatgcagtatgtcttcatataccaagcccttctggagcattatctctatggagatacagaactggaagtgacctctctagaaacccacctgcagaaaatttacaacaaaatcccagggaccagcaacaatggattagaggaggagtttaagaagttaacatcaatcaaaatccagaatgacaagatgcggactggaaaccttccagccaacatgaagaagaaccgtgttttacagatcattccatatgaattcaacagagtgatcattccagttaagcggggcgaagagaatacagactatgtgaacgcatcctttattgatggctaccggcagaaggactcctatatcgccagccagggccctcttctccacacaattgaggacttctggcgaatgatctgggagtggaaatcctgctctatcgtgatgctaacagaactggaggagagaggccaggagaagtgtgcccagtactggccatctgatggactggtgtcctatggagatattacagtggaactgaagaaggaggaggaatgtgagagctacaccgtccgagacctcctggtcaccaacaccagggagaataagagccggcagatccggcagttccacttccatggctggcctgaagtgggcatccccagtgacggaaagggcatgatcagcatcatcgccgccgtgcagaagcagcagcagcagtcagggaaccaccccatcaccgtgcactgcagcgccggggcaggaaggacggggaccttctgtgccctgagcaccgtcctggagcgtgtgaaagcagaggggattttggatgtcttccagactgtcaagagcctgcggctacagaggccacacatggtccagacactggaacagtatgagttctgctacaaggtggtgcaggagtatattgatgcattctcagattatgccaacttcaagtaagcggcaacaagggtccgtggaccaggaggattgcctttaatattttgtaatattctgttttgttaatataccccaaattgtgtatatatcttataactgttttagaaattggtacataggcttctattacctattaggtggaaattttatatgtaaatgtgttagcactgatagtcctttttccaatgttttattggggaattaaatagtgtgatgtttggattgatatcgtgaaatcctcagccgagaaattgggctggattgtgctttggttaatacatctttccctaaagaagataaacacaaaatccattccaggtagctcggcaccaactaagaaaaaaagcacaaagttctcagagctctcgaggaaagtggttgtccccgtaccaccatgcactgtaaatatccctcccctctctccctggtcccctcccccatccccaccactgatatcatggggagtaataggaccagagcggtatctctggcaccacactagggactatcaggtaataaaagctttgactccctga

SEQ ID NO: 317823 - DNA, 5325 bp, Homo sapiens
actgctgctgctgctgaattgcctcctgcagactctgctggtattgctggtatgctgcagtagggagcctggggacagccccatcagggcctgcgacagtgcagggctgtaggggaacaggccttccatgccatacataggctgcaggtacccgctctgcagggcgccagggatctggggagcataataaggagaaaagcctggtacaaagtaaggaaggaactggcttgtgagcaatgctgtggggtccgaagtcaacgcggcctgcagggcctgcagctgtgcagggtctaccgcatactccatggtgggcagctcgcccctggaaagctgctagtgtgaggccagtgctcgatatatactctgcttccggcatgcctctggccagcctgctgtggaagagtggacccgtggtgtccctgggctggtcagctgaggaggagctgctctgtgtgcaggaagatggtgctgtactggtttatgggcttcatggtgacttccggagacacttcagcatgggcaatgaagtgctccagaaccgggttctggatgcccggatctttcacactgagtttggttccggagtggccatcctcacaggggcccaccgcttcaccctcagtgccaatgtgggtgacctcaaactccgccggatgccagaggtgccaggtctgcaaagtgcaccctcctgctggactgtgctgtgccaggaccgagtggcacacattcttctggctgtggggcctgacctttacctcttggaccatgcagcctgctccgcagtgacgccccctggcctggccccaggagtaagcagcttcctacagatggctgtctccttcacctaccgacacctggcactcttcacagacacaggctacatctggatggggacagcatcactcaaggagaagctatgtgagttcaactgcaacatccgggcacctccaaagcagatggtctggtgcagccgtcctcgtagcaaggagagggccgtggtggtggcctgggaaaggcggctgatggtggtgggcgatgcacccgagagcatccagtttgtgctggatgaggactcctacctggtgcctgagctcgatggggtccgcatcttctcccgcagcacccacgagttcctgcatgaggttccagaaagagagccagaaggcggacgagtacctgcgggagatccaggagctgggccagctgacccaggccgtgcagcagtgcattgaggctgcaggacatgagcaccagccagacatgcagaagagtctgctcagggccgcctccttcggaaagtgtttcctggacagatttccacccgacagcttcgtgcacatgtgtcaggacctgcgtgtgctcaatgctgttcgggactatcacatcgggatcccgctcacctatagccaatataagcagctcaccatccaggtgctgctggacaggctcgtgttgcggagactttaccccctggccatccagatatgcgagtacttgcgccttcctgaagtacagggcgtcagcaggatcctggcccactgggcctgctacaaggtgcaacagaaggatgtctcagatgaggatgtggctcgagccattaaccagaagctgggggacacgcctggtgtctcttactccgacattgctgcacgagcctatggttgtggccgcacggagctggccatcaagctgctggagtatgagccacgctcaggggagcaggtaccccttctcctaaagatgaagaggagcaaactggcactaagcaaggccatcgagagcggggacactgacctggtgttcacggtgttgctgcacctgaagaacgagctgaaccgaggagattttttcatgacccttcggaatcagcccatggccctcagtttgtaccgacagttctgtaagcatcaggagctagagacgctgaaggacctttacaatcaggatgacaatcaccaggaattgggcagcttccacatccgagccagctatgctgcagaagagcgtattgaggggcgagtagcagctctgcagacagccgccgatgccttctacaaggccaagaatgagtttgcagccaaggctacagaggatcaaatgcggctcctacggctgcagcggcgcctagaagacgagctggggggccagttcctagacctgtctctacatgacacagttaccaccctcattcttggcggtcacaacaagcgtgcagagcagctggcacgtgacttccgcatccctgacaagaggtgacacaactaaaaaaaaacaaaggtatttatggaattccactgagtggtaatggatgatgcagttcaaataactaaggacacatgttcaaagagcataattaactttttaaaagaagctaataagcatggattcctggttcattcttgttctgctcggcagtggtctgatatgtgtcagtgccaacaatgctaccacagttgcaccttctgtaggaattacaagattaattaactcatcaacggcagaaccagttaaagaagaggccaaaacttcaaatccaacttcttcactaacttctctttctgtggcaccaacattcagcccaaatataactctgggacccacctatttaaccactgtcaattcttcagactctgacaatgggaccacaagaacagcaagcaccaattctataggcattacaatttcaccaaatggaacgtggcttccagataaccagttcacggatgccagaacagaaccctgggaggggaattccagcaccgcagcaaccactccagaaactttccctccttcaggtaattctgactcgaaggacagaagagatgagacaccaattattgcggtgatggtggccctgtcctctctgctagtgatcgtgtttattatcatagttttgtacatgttaaggtttaagaaatacaagcaagctgggagccattccaattctttccgcttatccaacggccgcactgaggatgtggagccccagagtgtgccacttctggccagatccccaagcaccaacaggaaatacccacccctgcccgtggacaagctggaagaggaaattaaccggagaatggcagacgacaataagctcttcagggaggaattcaacgctctccctgcatgtcctatccaggccacctgtgaggctgcttccaaggaggaaaacaaggaaaaaaatcgatatgtaaacatcttgccttatgaccactctagagtccacctgacaccggttgaaggggttccagattctgattacatcaatgcttcattcatcaacggttaccaagaaaagaacaaattcattgctgcacaaggaccaaaagaagaaacggtgaatgatttctggcggatgatctgggaacaaaacacagccaccatcgtcatggttaccaacctgaaggagagaaaggagtgcaagtgcgcccagtactggccagaccaaggctgctggacctatgggaatattcgggtgtctgtagaggatgtgactgtcctggtggactacacagtacggaagttctgcatccagcaggtgggcgacatgaccaacagaaagccacagcgcctcatcactcagttccactttaccagctggccagactttggggtgccttttaccccgatcggcatgctcaagttcctcaagaaggtgaaggcctgtaaccctcagtatgcaggggccatcgtggtccactgcagtgcaggtgtagggcgtacaggtacctttgtcgtcattgatgccatgctggacatgatgcatacagaacggaaggtggacgtgtatggctttgtgagccggatccgggcacagcgctgccagatggtgcaaaccgatatgcagtatgtcttcatataccaagcccttctggagcattatctctatggagatacagaactggaagtgacctctctagaaacccacctgcagaaaatttacaacaaaatcccagggaccagcaacaatggattagaggaggagtttaagaagttaacatcaatcaaaatccagaatgacaagatgcggactggaaaccttccagccaacatgaagaagaaccgtgttttacagatcattccatatgaattcaacagagtgatcattccagttaagcggggcgaagagaatacagactatgtgaacgcatcctttattgatggctaccggcagaaggactcctatatcgccagccagggccctcttctccacacaattgaggacttctggcgaatgatctgggagtggaaatcctgctctatcgtgatgctaacagaactggaggagagaggccaggagaagtgtgcccagtactggccatctgatggactggtgtcctatggagatattacagtggaactgaagaaggaggaggaatgtgagagctacaccgtccgagacctcctggtcaccaacaccagggagaataagagccggcagatccggcagttccacttccatggctggcctgaagtgggcatccccagtgacggaaagggcatgatcagcatcatcgccgccgtgcagaagcagcagcagcagtcagggaaccaccccatcaccgtgcactgcagcgccggggcaggaaggacggggaccttctgtgccctgagcaccgtcctggagcgtgtgaaagcagaggggattttggatgtcttccagactgtcaagagcctgcggctacagaggccacacatggtccagacactggaacagtatgagttctgctacaaggtggtgcaggagtatattgatgcattctcagattatgccaacttcaagtaagcggcaacaagggtccgtggaccaggaggattgcctttaatattttgtaatattctgttttgttaatataccccaaattgtgtatatatcttataactgttttagaaattggtacataggcttctattacctattaggtggaaattttatatgtaaatgtgttagcactgatagtcctttttccaatgttttattggggaattaaatagtgtgatgtttggattgatatcgtgaaatcctcagccgagaaattgggctggattgtgctttggttaatacatctttccctaaagaagataaacacaaaatccattccaggtagctcggcaccaactaagaaaaaaagcacaaagttctcagagctctcgaggaaagtggttgtccccgtaccaccatgcactgtaaatatccctcccctctctccctggtcccctcccccatccccaccactgatatcatggggagtaataggaccagagcggtatctctggcaccacactagggactatcaggtaataaaagctttgactccctga

SEQ ID NO: 317824 - DNA, 4318 bp, Homo sapiens
aggtttgcttgatgttacatgcaagactgttgccaatatgatcaaggggaaaactcctgaggagattcgcaagaccttcaatatcaaaaatgacttactgaagaggaggaagcccaggtacgcaaagagaaccagtggtgtgaagagaagtgaaatgttgtgcctgacactgtaacactgtaaggattgttccaaatactagttgcactgctctgtttataattgttaatattagacaaacagtagacaaatgcagcagcaagtcaattgtattagcagaatattgtcctcattgcatgtgtagtttgagcacagatcccaaaccttacggccaagtttcttctagtatgatggaaagtttcttttttctttgctctgaataaaactgaactgtgggttctctaaaaaaaaaaaaaaaagggcgccgctcgcgatctagctcgtgttgcggagactttaccccctggccatccagatatgcgagtacttgcgccttcctgaagtacagggcgtcagcaggatcctggcccactgggcctgctacaaggtgcaacagaaggatgtctcagatgaggatgtggctcgagccattaaccagaagctgggggacacgcctggtgtctcttactccgacattgctgcacgagcctatggttgtggccgcacggagctggccatcaagctgctggagtatgagccacgctcaggggagcaggtaccccttctcctaaagatgaagaggagcaaactggcactaagcaaggccatcgagagcggggacactgacctggtgttcacggtgttgctgcacctgaagaacgagctgaaccgaggagattttttcatgacccttcggaatcagcccatggccctcagtttgtaccgacagttctgtaagcatcaggagctagagacgctgaaggacctttacaatcaggatgacaatcaccaggaattgggcagcttccacatccgagccagctatgctgcagaagagcgtattgaggggcgagtagcagctctgcagacagccgccgatgccttctacaaggccaagaatgagtttgcagccaaggctacagaggatcaaatgcggctcctacggctgcagcggcgcctagaagacgagctggggggccagttcctagacctgtctctacatgacacagttaccaccctcattcttggcggtcacaacaagcgtgcagagcagctggcacgtgacttccgcatccctgacaagaggtgacacaactaaaaaaaaacaaaggtatttatggaattccactgagtggtaatggatgatgcagttcaaataactaaggacacatgttcaaagagcataattaactttttaaaagaagctaataagcatggattcctggttcattcttgttctgctcggcagtggtctgatatgtgtcagtgccaacaatgctaccacagttgcaccttctgtaggaattacaagattaattaactcatcaacggcagaaccagttaaagaagaggccaaaacttcaaatccaacttcttcactaacttctctttctgtggcaccaacattcagcccaaatataactctgggacccacctatttaaccactgtcaattcttcagactctgacaatgggaccacaagaacagcaagcaccaattctataggcattacaatttcaccaaatggaacgtggcttccagataaccagttcacggatgccagaacagaaccctgggaggggaattccagcaccgcagcaaccactccagaaactttccctccttcaggtaattctgactcgaaggacagaagagatgagacaccaattattgcggtgatggtggccctgtcctctctgctagtgatcgtgtttattatcatagttttgtacatgttaaggtttaagaaatacaagcaagctgggagccattccaattctttccgcttatccaacggccgcactgaggatgtggagccccagagtgtgccacttctggccagatccccaagcaccaacaggaaatacccacccctgcccgtggacaagctggaagaggaaattaaccggagaatggcagacgacaataagctcttcagggaggaattcaacgctctccctgcatgtcctatccaggccacctgtgaggctgcttccaaggaggaaaacaaggaaaaaaatcgatatgtaaacatcttgccttatgaccactctagagtccacctgacaccggttgaaggggttccagattctgattacatcaatgcttcattcatcaacggttaccaagaaaagaacaaattcattgctgcacaaggaccaaaagaagaaacggtgaatgatttctggcggatgatctgggaacaaaacacagccaccatcgtcatggttaccaacctgaaggagagaaaggagtgcaagtgcgcccagtactggccagaccaaggctgctggacctatgggaatattcgggtgtctgtagaggatgtgactgtcctggtggactacacagtacggaagttctgcatccagcaggtgggcgacatgaccaacagaaagccacagcgcctcatcactcagttccactttaccagctggccagactttggggtgccttttaccccgatcggcatgctcaagttcctcaagaaggtgaaggcctgtaaccctcagtatgcaggggccatcgtggtccactgcagtgcaggtgtagggcgtacaggtacctttgtcgtcattgatgccatgctggacatgatgcatacagaacggaaggtggacgtgtatggctttgtgagccggatccgggcacagcgctgccagatggtgcaaaccgatatgcagtatgtcttcatataccaagcccttctggagcattatctctatggagatacagaactggaagtgacctctctagaaacccacctgcagaaaatttacaacaaaatcccagggaccagcaacaatggattagaggaggagtttaagaagttaacatcaatcaaaatccagaatgacaagatgcggactggaaaccttccagccaacatgaagaagaaccgtgttttacagatcattccatatgaattcaacagagtgatcattccagttaagcggggcgaagagaatacagactatgtgaacgcatcctttattgatggctaccggcagaaggactcctatatcgccagccagggccctcttctccacacaattgaggacttctggcgaatgatctgggagtggaaatcctgctctatcgtgatgctaacagaactggaggagagaggccaggagaagtgtgcccagtactggccatctgatggactggtgtcctatggagatattacagtggaactgaagaaggaggaggaatgtgagagctacaccgtccgagacctcctggtcaccaacaccagggagaataagagccggcagatccggcagttccacttccatggctggcctgaagtgggcatccccagtgacggaaagggcatgatcagcatcatcgccgccgtgcagaagcagcagcagcagtcagggaaccaccccatcaccgtgcactgcagcgccggggcaggaaggacggggaccttctgtgccctgagcaccgtcctggagcgtgtgaaagcagaggggattttggatgtcttccagactgtcaagagcctgcggctacagaggccacacatggtccagacactggaacagtatgagttctgctacaaggtggtgcaggagtatattgatgcattctcagattatgccaacttcaagtaagcggcaacaagggtccgtggaccaggaggattgcctttaatattttgtaatattctgttttgttaatataccccaaattgtgtatatatcttataactgttttagaaattggtacataggcttctattacctattaggtggaaattttatatgtaaatgtgttagcactgatagtcctttttccaatgttttattggggaattaaatagtgtgatgtttggattgatatcgtgaaatcctcagccgagaaattgggctggattgtgctttggttaatacatctttccctaaagaagataaacacaaaatccattccaggtagctcggcaccaactaagaaaaaaagcacaaagttctcagagctctcgaggaaagtggttgtccccgtaccaccatgcactgtaaatatccctcccctctctccctggtcccctcccccatccccaccactgatatcatggggagtaataggaccagagcggtatctctggcaccacactagggactatcaggtaataaaagctttgactccctga

SEQ ID NO: 317825 - DNA, 5369 bp, Homo sapiens
gcggaagtgccggcctggagcccgctctaggtgggtgtcccctcggtgcttcccagctgccgtctgcaccagccatggactgctacacggcgaactggaacccactcggggactctgccttttaccggaaatatgagctgtacagcatggactgggacctgaaggaggaactcagggattgcctggtggctgctgcaccctatgggggccccattgcactgctgaggaacccctggcggaaggagaaagctgctagtgtgaggccagtgctcgatatatactctgcttccggcatgcctctggccagcctgctgtggaagagtggacccgtggtgtccctgggctggtcagctgaggaggagctgctctgtgtgcaggaagatggtgctgtactggtttatgggcttcatggtgacttccggagacacttcagcatgggcaatgaagtgctccagaaccgggttctggatgcccggatctttcacactgagtttggttccggagtggccatcctcacaggggcccaccgcttcaccctcagtgccaatgtgggtgacctcaaactccgccggatgccagaggtgccaggtctgcaaagtgcaccctcctgctggactgtgctgtgccaggaccgagtggcacacattcttctggctgtggggcctgacctttacctcttggaccatgcagcctgctccgcagtgacgccccctggcctggccccaggagtaagcagcttcctacagatggctgtctccttcacctaccgacacctggcactcttcacagacacaggctacatctggatggggacagcatcactcaaggagaagctatgtgagttcaactgcaacatccgggcacctccaaagcagatggtctggtgcagccgtcctcgtagcaaggagagggccgtggtggtggcctgggaaaggcggctgatggtggtgggcgatgcacccgagagcatccagtttgtgctggatgaggactcctacctggtgcctgagctcgatggggtccgcatcttctcccgcagcacccacgagttcctgcatgaggttccagcggccagcgaggaaatcttcaaaattgcctcaatggcccccggggcgctgctcctggaggctcagaaggagtatgagaaagagagccagaaggcggacgagtacctgcgggagatccaggagctgggccagctgacccaggccgtgcagcagtgcattgaggctgcaggacatgagcaccagccagacatgcagaagagtctgctcagggttggcctggatggccgggccggggagggtggggctgggagggggtgggatgggcagcagggaagctctctcctatcgccctctggctcttctcaggccgcctccttcggaaagtgtttcctggacagatttccacccgacagcttcgtgcacatgtgtcaggacctgcgtgtgctcaatgctgttcgggactatcacatcgggatcccgctcacctatagccaatataagcagctcaccatccaggtgctgctggacaggctcgtgttgcggagactttaccccctggccatccagatatgcgagtacttgcgccttcctgaagtacagggcgtcagcaggatcctggcccactgggcctgctacaaggtgcaacagaaggatgtctcagatgaggatgtggctcgagccattaaccagaagctgggggacacgcctggtgtctcttactccgacattgctgcacgagcctatggttgtggccgcacggagctggccatcaagctgctggagtatgagccacgctcaggggagcaggtaccccttctcctaaagatgaagaggagcaaactggcactaagcaaggccatcgagagcggggacactgacctggtgttcacggtgttgctgcacctgaagaacgagctgaaccgaggagattttttcatgacccttcggaatcagcccatggccctcagtttgtaccgacagttctgtaagcatcaggagctagagacgctgaaggacctttacaatcaggatgacaatcaccaggaattgggcagcttccacatccgagccagctatgctgcagaagagcgtattgaggggcgagtagcagctctgcagacagccgccgatgccttctacaaggccaagaatgagtttgcagccaaggctacagaggatcaaatgcggctcctacggctgcagcggcgcctagaagacgagctggggggccagttcctagacctgtctctacatgacacagttaccaccctcattcttggcggtcacaacaagcgtgcagagcagctggcacgtgacttccgcatccctgacaagaggtgacacaactaaaaaaaaacaaaggtatttatggaattccactgagtggtaatggatgatgcagttcaaataactaaggacacatgttcaaagagcataattaactttttaaaagaagctaataagcatggattcctggttcattcttgttctgctcggcagtggtctgatatgtgtcagtgccaacaatgctaccacagttgcaccttctgtaggaattacaagattaattaactcatcaacggcagaaccagttaaagaagaggccaaaacttcaaatccaacttcttcactaacttctctttctgtggcaccaacattcagcccaaatataactctgggacccacctatttaaccactgtcaattcttcagactctgacaatgggaccacaagaacagcaagcaccaattctataggcattacaatttcaccaaatggaacgtggcttccagataaccagttcacggatgccagaacagaaccctgggaggggaattccagcaccgcagcaaccactccagaaactttccctccttcagatgagacaccaattattgcggtgatggtggccctgtcctctctgctagtgatcgtgtttattatcatagttttgtacatgttaaggtttaagaaatacaagcaagctgggagccattccaattctttccgcttatccaacggccgcactgaggatgtggagccccagagtgtgccacttctggccagatccccaagcaccaacaggaaatacccacccctgcccgtggacaagctggaagaggaaattaaccggagaatggcagacgacaataagctcttcagggaggaattcaacgctctccctgcatgtcctatccaggccacctgtgaggctgcttccaaggaggaaaacaaggaaaaaaatcgatatgtaaacatcttgccttatgaccactctagagtccacctgacaccggttgaaggggttccagattctgattacatcaatgcttcattcatcaacggttaccaagaaaagaacaaattcattgctgcacaaggaccaaaagaagaaacggtgaatgatttctggcggatgatctgggaacaaaacacagccaccatcgtcatggttaccaacctgaaggagagaaaggagtgcaagtgcgcccagtactggccagaccaaggctgctggacctatgggaatattcgggtgtctgtagaggatgtgactgtcctggtggactacacagtacggaagttctgcatccagcaggtgggcgacatgaccaacagaaagccacagcgcctcatcactcagttccactttaccagctggccagactttggggtgccttttaccccgatcggcatgctcaagttcctcaagaaggtgaaggcctgtaaccctcagtatgcaggggccatcgtggtccactgcagtgcaggtgtagggcgtacaggtacctttgtcgtcattgatgccatgctggacatgatgcatacagaacggaaggtggacgtgtatggctttgtgagccggatccgggcacagcgctgccagatggtgcaaaccgatatgcagtatgtcttcatataccaagcccttctggagcattatctctatggagatacagaactggaagtgacctctctagaaacccacctgcagaaaatttacaacaaaatcccagggaccagcaacaatggattagaggaggagtttaagaagttaacatcaatcaaaatccagaatgacaagatgcggactggaaaccttccagccaacatgaagaagaaccgtgttttacagatcattccatatgaattcaacagagtgatcattccagttaagcggggcgaagagaatacagactatgtgaacgcatcctttattgatggctaccggcagaaggactcctatatcgccagccagggccctcttctccacacaattgaggacttctggcgaatgatctgggagtggaaatcctgctctatcgtgatgctaacagaactggaggagagaggccaggagaagtgtgcccagtactggccatctgatggactggtgtcctatggagatattacagtggaactgaagaaggaggaggaatgtgagagctacaccgtccgagacctcctggtcaccaacaccagggagaataagagccggcagatccggcagttccacttccatggctggcctgaagtgggcatccccagtgacggaaagggcatgatcagcatcatcgccgccgtgcagaagcagcagcagcagtcagggaaccaccccatcaccgtgcactgcagcgccggggcaggaaggacggggaccttctgtgccctgagcaccgtcctggagcgtgtgaaagcagaggggattttggatgtcttccagactgtcaagagcctgcggctacagaggccacacatggtccagacactggaacagtatgagttctgctacaaggtggtgcaggagtatattgatgcattctcagattatgccaacttcaagtaagcggcaacaagggtccgtggaccaggaggattgcctttaatattttgtaatattctgttttgttaatataccccaaattgtgtatatatcttataactgttttagaaattggtacataggcttctattacctattaggtggaaattttatatgtaaatgtgttagcactgatagtcctttttccaatgttttattggggaattaaatagtgtgatgtttggattgatatcgtgaaatcctcagccgagaaattgggctggattgtgctttggttaatacatctttccctaaagaagataaacacaaaatccattccaggtagctcggcaccaactaagaaaaaaagcacaaagttctcagagctctcgaggaaagtggttgtccccgtaccaccatgcactgtaaatatccctcccccatccccaccactgatatcatggggagtaataggaccagagcggtatctctggcaccacactagggactatcaggtaataaaagctttgactccctga

SEQ ID NO: 317826 - DNA, 5080 bp, Homo sapiens
gcggaagtgccggcctggagcccgctctaggtgggtgtcccctcggtgcttcccagctgccgtctgcaccagccatggactgctacacggcgaactggaacccactcggggactctgccttttaccggaaatatgagctgtacagcatggactgggacctgaaggaggaactcagggattgcctggtggctgctgcaccctatgggggccccattgcactgctgaggaacccctggcggaaggagaaagctgctagtgtgaggccagtgctcgatatatactctgcttccggcatgcctctggccagcctgctgtggaagagtggacccgtggtgtccctgggctggtcagctgaggaggagctgctctgtgtgcaggaagatggtgctgtactggtttatgggcttcatggtgacttccggagacacttcagcatgggcaatgaagtgctccagaaccgggttctggatgcccggatctttcacactgagtttggttccggagtggccatcctcacaggggcccaccgcttcaccctcagtgccaatgtgggtgacctcaaactccgccggatgccagaggtgccaggtctgcaaagtgcaccctcctgctggactgtgctgtgccaggaccgagtggcacacattcttctggctgtggggcctgacctttacctcttggaccatgcagcctgctccgcagtgacgccccctggcctggccccaggagtaagcagcttcctacagatggctgtctccttcacctaccgacacctggcactcttcacagacacaggctacatctggatggggacagcatcactcaaggagaagctatgtgagttcaactgcaacatccgggcacctccaaagcagatggtctggtgcagccgtcctcgtagcaaggagagggccgtggtggtggcctgggaaaggcggctgatggtggtgggcgatgcacccgagagcatccagtttgtgctggatgaggactcctacctggtgcctgagctcgatggggtccgcatcttctcccgcagcacccacgagttcctgcatgaggttccagcggccagcgaggaaatcttcaaaattgcctcaatggcccccggggcgctgctcctggaggctcagaaggagtatgagaaagagagccagaaggcggacgagtacctgcgggagatccaggagctgggccagctgacccaggccgtgcagcagtgcattgaggctgcaggacatgagcaccagccagacatgcagaagagtctgctcagggttggcctggatggccgggccggggagggtggggctgggagggggtgggatgggcagcagggaagctctctcctatcgccctctggctcttctcaggccgcctccttcggaaagtgtttcctggacagatttccacccgacagcttcgtgcacatgtgtcaggacctgcgtgtgctcaatgctgttcgggactatcacatcgggatcccgctcacctatagccaatataagcagctcaccatccaggtgctgctggacaggctcgtgttgcggagactttaccccctggccatccagatatgcgagtacttgcgccttcctgaagtacagggcgtcagcaggatcctggcccactgggcctgctacaaggtgcaacagaaggatgtctcagatgaggatgtggctcgagccattaaccagaagctgggggacacgcctggtgtctcttactccgacattgctgcacgagcctatggttgtggccgcacggagctggccatcaagctgctggagtatgagccacgctcaggggagcaggtaccccttctcctaaagatgaagaggagcaaactggcactaagcaaggccatcgagagcggggacactgacctggtgttcacggtgttgctgcacctgaagaacgagctgaaccgaggagattttttcatgacccttcggaatcagcccatggccctcagtttgtaccgacagttctgtaagcatcaggagctagagacgctgaaggacctttacaatcaggatgacaatcaccaggaattgggcagcttccacatccgagccagctatgctgcagaagagcgtattgaggggcgagtagcagctctgcagacagccgccgatgccttctacaaggccaagaatgagtttgcagccaaggctacagaggatcaaatgcggctcctacggctgcagcggcgcctagaagacgagctggggggccagttcctagacctgtctctacatgacacagttaccaccctcattcttggcggtcacaacaagcgtgcagagcagctggcacgtgacttccgcatccctgacaagaggtgacacaactaaaaaaaaacaaaggtatttatggaattccactgagtggtaatggatgatgcagttcaaataactaaggacacatgttcaaagagcataattaactttttaaaagaagctaataagcatggattcctggttcattcttgttctgctcggcagtggtctgatatgtgtcagtgccaacaatgctaccacagttgcaccttctgtaggaattacaagattaattaactcatcaacggcagaaccagttaaagaagaggccaaaacttcaaatccaacttcttcactaacttctctttctgtggcaccaacattcagcccaaatataactctgggacccacctatttaaccactgtcaattcttcagactctgacaatgggaccacaagaacagcaagcaccaattctataggcattacaatttcaccaaatggaacgtggcttccagataaccagttcacggatgccagaacagaaccctgggaggggaattccagcaccgcagcaaccactccagaaactttccctccttcagatgagacaccaattattgcggtgatggtggccctgtcctctctgctagtgatcgtgtttattatcatagttttgtacatgttaaggtttaagaaatacaagcaagctgggagccattccaattctttccgcttatccaacggccgcactgaggatgtggagccccagagtgtgccacttctggccagatccccaagcaccaacaggaaatacccacccctgcccgtggacaagctggaagaggaaattaaccggagaatggcagacgacaataagctcttcagggaggaattcaacgctctccctgcatgtcctatccaggccacctgtgaggctgcttccaaggaggaaaacaaggaaaaaaatcgatatgtaaacatcttgccttatgaccactctagagtccacctgacaccggttgaaggggttccagattctgattacatcaatgcttcattcatcaacggttaccaagaaaagaacaaattcattgctgcacaaggaccaaaagaagaaacggtgaatgatttctggcggatgatctgggaacaaaacacagccaccatcgtcatggttaccaacctgaaggagagaaaggagtgcaagtgcgcccagtactggccagaccaaggctgctggacctatgggaatattcgggtgtctgtagaggatgtgactgtcctggtggactacacagtacggaagttctgcatccagcaggtgggcgacatgaccaacagaaagccacagcgcctcatcactcagttccactttaccagctggccagactttggggtgccttttaccccgatcggcatgctcaagttcctcaagaaggtgaaggcctgtaaccctcagtatgcaggggccatcgtggtccactgcagtgcaggtgtagggcgtacaggtacctttgtcgtcattgatgccatgctggacatgatgcatacagaacggaaggtggacgtgtatggctttgtgagccggatccgggcacagcgctgccagatggtgcaaaccgatatgcagtatgtcttcatataccaagcccttctggagcattatctctatggagatacagaactggaagtgacctctctagaaacccacctgcagaaaatttacaacaaaatcccagggaccagcaacaatggattagaggaggagtttaagaagttaacatcaatcaaaatccagaatgacaagatgcggactggaaaccttccagccaacatgaagaagaaccgtgttttacagatcattccatatgaattcaacagagtgatcattccagttaagcggggcgaagagaatacagactatgtgaacgcatcctttattgatggctaccggcagaaggactcctatatcgccagccagggccctcttctccacacaattgaggacttctggcgaatgatctgggagtggaaatcctgctctatcgtgatgctaacagaactggaggagagaggccaggagaagtgtgcccagtactggccatctgatggactggtgtcctatggagatattacagtggaactgaagaaggaggaggaatgtgagagctacaccgtccgagacctcctggtcaccaacaccagggagaataagagccggcagatccggcagttccacttccatggctggcctgaagtgggcatccccagtgacggaaagggcatgatcagcatcatcgccgccgtgcagaagcagcagcagcagtcagggaaccaccccatcaccgtgcactgcagcgccggggcaggaaggacggggaccttctgtgccctgagcaccgtcctggagcgtgtgaaagcagaggggattttggatgtcttccagactgtcaagagcctgcggctacagaggccacacatggtccagacactggaacagtatgagttctgctacaaggtggtgcaggagtatattgatgcattctcagattatgccaacttcaagtaagcggcaacaagggtccgtggaccaggaggattgcctttaatattttgtaatattctgttttgttaatataccccaaattgtgtatatatcttataactgttttagaaattggtacataggcttctattacctattaggtggaaattttatatgtaaatgtgttagcactgatagtcctttttccaatgttttattggggaattaaatagtgtgatgtttggattga

SEQ ID NO: 317827 - DNA, 5544 bp, Homo sapiens
  misc_feature (4800)..(4800): n is a, c, g, or t
gttcggttcggcatccgtgaacggttatctggaagccacgttcgattgggtgaaatagtaatgcctatagaatgggtgttctctttctgtggcaccaacattcagcccaaatataactctgggacccacctatttaaccactgtcaattcttcagactctgacaatgggaccacaagaacagcaagcaccaattctataggcattacaatttcaccaaatggaacgtggcttccagataaccagttcacggatgccagaacagaaccctgggaggggaattccagcaccgcagcaaccactccagaaactttccctccttcagatgagacaccaattattgcggtgatggtggccctgtcctctctgctagtgatcgtgtttattatcatagttttgtacatgttaaggtttaagaaatacaagcaagctgggagccattccaattctttccgcttatccaacggccgcactgaggatgtggagccccagagtgtgccacttctggccagatccccaagcaccaacaggaaatacccacccctgcccgtggacaagctggaagaggaaattaaccggagaatggcagacgacaataagctcttcagggaggaattcaacgctctccctgcatgtcctatccaggccacctgtgaggctgcttccaaggaggaaaacaaggaaaaaaatcgatatgtaaacatcttgccttatgaccactctagagtccacctgacaccggttgaaggggttccagattctgattacatcaatgcttcattcatcaacggttaccaagaaaagaacaaattcattgctgcacaaggaccaaaagaagaaacggtgaatgatttctggcggatgatctgggaacaaaacacagccaccatcgtcatggttaccaacctgaaggagagaaaggagtgcaagtgcgcccagtactggccagaccaaggctgctggacctatgggaatattcgggtgtctgtagaggatgtgactgtcctggtggactacacagtacggaagttctgcatccagcaggtgggcgacatgaccaacagaaagccacagcgcctcatcactcagttccactttaccagctggccagactttggggtgccttttaccccgatcggcatgctcaagttcctcaagaaggtgaaggcctgtaaccctcagtatgcaggggccatcgtggtccactgcagtgcaggtgtagggcgtacaggtacctttgtcgtcattgatgccatgctggacatgatgcatacagaacggaaggtggacgtgtatggctttgtgagccggatccgggcacagcgctgccagatggtgcaaaccgatatgcagtatgtcttcatataccaagcccttctggagcattatctctatggagatacagaactggaagtgacctctctagaaacccacctgcagaaaatttacaacaaaatcccagggaccagcaacaatggattagaggaggagtttaagaagttaacatcaatcaaaatccagaatgacaagatgcggactggaaaccttccagccaacatgaagaagaaccgtgttttacagatcattccatatgaattcaacagagtgatcattccagttaagcggggcgaagagaatacagactatgtgaacgcatcctttattgatggctaccggcagaaggactcctatatcgccagccagggccctcttctccacacaattgaggacttctggcgaatgatctgggagtggaaatcctgctctatcgtgatgctaacagaactggaggagagaggccaggagaagtgtgcccagtactggccatctgatggactggtgtcctatggagatattacagtggaactgaagaaggaggaggaatgtgagagctacaccgtccgagacctcctggtcaccaacaccagggagaataagagccggcagatccggcagttccacttccatggctggcctgaagtgggcatccccagtgacggaaagggcatgatcagcatcatcgccgccgtgcagaagcagcagcagcagtcagggaaccaccccatcaccgtgcactgcagcgccggggcaggaaggacggggaccttctgtgccctgagcaccgtcctggagcgtgtgaaagcagaggggattttggatgtcttccagactgtcaagagcctgcggctacagaggccacacatggtccagacactggaacagtatgagttctgctacaaggtggtgcaggagtatattgatgcattctcagattatgccaacttcaagtaagcggcaacaagggtccgtggaccaggaggattgcctttaatattttgtaatattctgttttgttaatataccccaaattgtgtatatatcttataactgttttagaaattggtacataggcttctattacctattaggtggaaattttatatgtaaatgtgttagcactgatagtcctttttccaatgttttattggggaattaaatagtgtgatgtttggattgatatcgtgaaatcctcagccgagaaattgggctggattgtgctttggttaatacatctttccctaaagaagataaacacaaaatccattccaggtagctcggcaccaactaagaaaaaaagcacaaagttctcagagctctcgaggaaagtggttgtccccgtaccaccatgcactgtaaatatccctcccctctctccctggtcccctcccccatccccaccactgatatcatggggagtaataggaccagagcggtatctctggcaccacactagggactatcaggtaataaaagctttgactccctgaggaaatgtctctccctttgtctgggggtggggcagccatacaggctggggctctcctcggctgttcatggccctcctgttgctgttctctctgagttatctgagagaggccacagtcccccagctcctcctgtccaccaaacacagcccttccagttcttaggtgatctccaggaccctcctttcattcccagcacatctttggtttagtggtcctggccagcctccctccctaggaaggtggccaggtcctcactgagtctccttaaggacaggggcacaggggagactagagctggctcagctttgggctgaggccagtctgacctctccagtctgtggtgctttgctacaaaactgtctggattgtgtcaccctatctaggataaatctttatgtccacatatattgtgttgaattgttcccattttctttcatacgtgtcctcatttctgggacagtgtgaatgtttctcagatctagaagtcagatggtgggagtcttagatccgaacttggttttgagtgacatgttagacaaaagtgttgaacttttgtttcttaaagaagctggatgttcatttatgtctcccgtaacagtctgtgctgtccagagacccagtatccttaggatattattctcatcctcatggttgaagctgggtcactgccatgtccataatccaccctgaggaaagagcatggagagccagcagcttcatttctaaggacaggaagccaaatctgcacttttcacttccactcataatccaccctgcattccactcatcagcttcacaagtaggttttcacctggtcatagctatgcctaactacagggagtgctggggaagtgtgatcttttgttgggggcacactgggagagtgggtctgtccactgcctcccagcctcagagcagctcaccacaggagcaggagagtgaactcgtggctgtggctgtcaggcagggcctttcttgagagccagcgcaggcctgggctcctcagaggcttctggagtgagagatggcacctcagcctggcccatggaggcatgttcagggatcagcactactgtgcttcttggaggaggtgggacttgagctggacccatgggaggctggaaatttagatgagtgaaaaggaggaaaggcgaagtagagccacattacagagggcctcagagtccagataaagcagttaacatgtagtggctccaggagggaagcctgtctgtgcaccacatacccaggatgtttgtgggaaggaaggagatgtgcggaagggacccaggagacctgcaggaggcaagggctgcaacagaccccctctggaagtttacaggaggtgagtgtgagtcattagagacattcagttctgtaggaactaacgaactcccaagaggcagtaaacttaaaactcagcagtctcgataagtatggataaattaggcaaagacagattctgaggaatttctggtgaggggtgccaagtttggggagcagcccctggctccttgcaagctacccttcagtgctctgtgtgaccaagtccaagtcgatgcaggagggcaggcactgggtcagcaagccactcagtgaatgtgcaggtgaggccgttcataggcgcttgtgtgcctcccagcaggctgcctgccattgccagggctggccttcagcagggtgcgccaccatggcctgagtggttttctgctgaagtccgtgctgatttggccagtggataggcatcacctgggtgcaaaaccattgtctccaggtaggaatgacctcagctgtttgctccgtgtctcgctcagcctgtagatgtgtccctcatcccttcatgcctccctcttcactcctcttttactttctactcggggcttgcatgtttacaagagaggtgaacccaacagaaactagtataggccaaaaggaaaatgtgctgaagctcacacagcacagtcgtgtggaaanggcagcagtgactgcttcatccagtgcccttcccacagccagtcagttgcgacccaaggggcttagggtaggagtgtttctccataggggaagagtaacagcctgcacccaccacacacccaaagccctacatcctgccacactgagacctcacttcatttgggcgggtccctcctgggttgcagtttccttcattgctcccctgtcccaaatactcaagtctctctcattaaaaataaagagcaggccaggtgcagtggctcacacctgtaatcccacactttgggaggccaaggcgggtggatcacttgagcccaggattcgagaccaacctgggcaacatgacaagatcctgtctctacaaaaaataacaaaaatcatctgggcatggaggcacacgcctgtagtcccagctacttgggaggctgaggtggaaggatcacctgagcccatgaggtggaggctacagtgagctgagatcacgccactgcactccagcctggatgacagcgagactccatctcaaaaaaaaaaaaagaaaaagaaaaagaattaattaattaattaaataaagagcatgtctcccaccccaggcctaagttcttccctctatgagagactacttgcagaaacctgtgttctcactcttcccccttcctcacttcattcccacacatttcttttccatccctgcgcaccaaggtcaccttggtgctaaacaccagggacccatggtctcttccc

SEQ ID NO: 317828 - DNA, 3129 bp, Homo sapiens
gcggaagtgccggcctggagcccgctctaggtgggtgtcccctcggtgcttcccagctgccgtctgcaccagccatggactgctacacggcgaactggaacccactcggggactctgccttttaccggaaatatgagctgtacagcatggactgggacctgaaggaggaactcagggattgcctggtggctgctgcaccctatgggggccccattgcactgctgaggaacccctggcggaaggagaaagctgctagtgtgaggccagtgctcgatatatactctgcttccggcatgcctctggccagcctgctgtggaagagtggacccgtggtgtccctgggctggtcagctgaggaggagctgctctgtgtgcaggaagatggtgctgtactggtttatgggcttcatggtgacttccggagacacttcagcatgggcaatgaagtgctccagaaccgggttctggatgcccggatctttcacactgagtttggttccggagtggccatcctcacaggggcccaccgcttcaccctcagtgccaatgtgggtgacctcaaactccgccggatgccagaggtgccaggtctgcaaagtgcaccctcctgctggactgtgctgtgccaggaccgagtggcacacattcttctggctgtggggcctgacctttacctcttggaccatgcagcctgctccgcagtgacgccccctggcctggccccaggagtaagcagcttcctacagatggctgtctccttcacctaccgacacctggcactcttcacagacacaggctacatctggatggggacagcatcactcaaggagaagctatgtgagttcaactgcaacatccgggcacctccaaagcagatggtctggtgcagccgtcctcgtagcaaggagagggccgtggtggtggcctgggaaaggcggctgatggtggtgggcgatgcacccgagagcatccagtttgtgctggatgaggactcctacctggtgcctgagctcgatggggtccgcatcttctcccgcagcacccacgagttcctgcatgaggttccagcggccagcgaggaaatcttcaaaattgcctcaatggcccccggggcgctgctcctggaggctcagaaggagtatgagaaagagagccagaaggcggacgagtacctgcgggagatccaggagctgggccagctgacccaggccgtgcagcagtgcattgaggctgcaggacatgagcaccagccagacatgcagaagagtctgctcagggttggcctggatggccgggccggggagggtggggctgggagggggtgggatgggcagcagggaagctctctcctatcgccctctggctcttctcaggccgcctccttcggaaagtgtttcctggacagatttccacccgacagcttcgtgcacatgtgtcaggacctgcgtgtgctcaatgctgttcgggactatcacatcgggatcccgctcacctatagccaatataagcagctcaccatccaggtgctgctggacaggctcgtgttgcggagactttaccccctggccatccagatatgcgagtacttgcgccttcctgaagtacagggcgtcagcaggatcctggcccactgggcctgctacaaggtgcaacagaaggatgtctcagatgaggatgtggctcgagccattaaccagaagctgggggacacgcctggtgtctcttactccgacattgctgcacgagcctatggttgtggccgcacggagctggccatcaagctgctggagtatgagccacgctcaggggagcaggtaccccttctcctaaagatgaagaggagcaaactggcactaagcaaggccatcgagagcggggacactgacctggtgttcacggtgttgctgcacctgaagaacgagctgaaccgaggagattttttcatgacccttcggaatcagcccatggccctcagtttgtaccgacagttctgtaagcatcaggagctagagacgctgaaggacctttacaatcaggatgacaatcaccaggaattgggcagcttccacatccgagccagctatgctgcagaagagcgtattgaggggcgagtagcagctctgcagacagccgccgatgccttctacaaggccaagaatgagtttgcagccaaggctacagaggatcaaatgcggctcctacggctgcagcggcgcctagaagacgagctggggggccagttcctagacctgtctctacatgacacagttaccaccctcattcttggcggtcacaacaagcgtgcagagcagctggcacgtgacttccgcatccctgacaagaggctctggtggctgaagctgactgccctggcagatttggaagattgggaagagctagagaagttttccaagagcaagaaatcacccattggctacctgccttttgtggagatctgcatgaaacaacataacaaatacgaagccaagaagtatgcttcccgcgtgggtcccgagcagaaggtcaaggctttgcttcttgttggcgatgtggctcaggctgcagatgtggccatcgaacaccggaatgaggctgagctgagcctcgtattgtcccactgcacgggagccacagatggggccacagctgacaagattcaacgggccagggcacaagcccagaagaagtgaggagtccatcctgtacatctcaagcaaggggttcctcccctagcacctgggcttggcagaagggccatagttcatccagctcctcccctagagcaatgctgaggagcgggggcatggtagcagggctgtctggttttaaataaagttggaacacttcacagtgcttgtcttacacagtccagcctaagcaaaggcaagctcaagacaggatcctccagacaccacagcaaaactccatgtgttccgttgtgttgggaccggaggtgggggcttctccagccatactcgcaagaaacgtgtcctctccacagttaccaaggaaagctttctctatctcacagctcctaggaagattatagggagagatggcacaaaacttaagcaccagctcaccaagaacatactgtaaagcattctgtgtgtgtgcgtgtaaacacgc

SEQ ID NO: 317829 - DNA, 2862 bp, Homo sapiens
gcggaagtgccggcctggagcccgctctaggtgggtgtcccctcggtgcttcccagctgccgtctgcaccagccatggactgctacacggcgaactggaacccactcggggactctgccttttaccggaaatatgagctgtacagcatggactgggacctgaaggaggaactcagggattgcctggtggctgctgcaccctatgggggccccattgcactgctgaggaacccctggcggaaggagaaagctgctagtgtgaggccagtgctcgatatatactctgcttccggcatgcctctggccagcctgctgtggaagagtggacccgtggtgtccctgggctggtcagctgaggaggagctgctctgtgtgcaggaagatggtgctgtactggtttatgggcttcatggtgacttccggagacacttcagcatgggcaatgaagtgctccagaaccgggttctggatgcccggatctttcacactgagtttggttccggagtggccatcctcacaggggcccaccgcttcaccctcagtgccaatgtgggtgacctcaaactccgccggatgccagaggtgccaggtctgcaaagtgcaccctcctgctggactgtgctgtgccaggaccgagtggcacacattcttctggctgtggggcctgacctttacctcttggaccatgcagcctgctccgcagtgacgccccctggcctggccccaggagtaagcagcttcctacagatggctgtctccttcacctaccgacacctggcactcttcacagacacaggctacatctggatggggacagcatcactcaaggagaagctatgtgagttcaactgcaacatccgggcacctccaaagcagatggtctggtgcagccgtcctcgtagcaaggagagggccgtggtggtggcctgggaaaggcggctgatggtggtgggcgatgcacccgagagcatccagtttgtgctggatgaggactcctacctggtgcctgagctcgatggggtccgcatcttctcccgcagcacccacgagttcctgcatgaggttccagcggccagcgaggaaatcttcaaaattgcctcaatggcccccggggcgctgctcctggaggctcagaaggagtatgagaaagagagccagaaggcggacgagtacctgcgggagatccaggagctgggccagctgacccaggccgtgcagcagtgcattgaggctgcaggacatgagcaccagccagacatgcagaagagtctgctcagggttggcctggatggccgggccggggagggtggggctgggagggggtgggatgggcagcagggaagctctctcctatcgccctctggctcttctcaggccgcctccttcggaaagtgtttcctggacagatttccacccgacagcttcgtgcacatgtgtcaggacctgcgtgtgctcaatgctgttcgggactatcacatcgggatcccgctcacctatagccaatataagcagctcaccatccaggtgctgctggacaggctcgtgttgcggagactttaccccctggccatccagatatgcgagtacttgcgccttcctgaagtacagggcgtcagcaggatcctggcccactgggcctgctacaaggtgcaacagaaggatgtctcagatgaggatgtggctcgagccattaaccagaagctgggggacacgcctggtgtctcttactccgacattgctgcacgagcctatggttgtggccgcacggagctggccatcaagctgctggagtatgagccacgctcaggggagcaggtaccccttctcctaaagatgaagaggagcaaactggcactaagcaaggccatcgagagcggggacactgacctggtgttcacggtgttgctgcacctgaagaacgagctgaaccgaggagattttttcatgacccttcggaatcagcccatggccctcagtttgtaccgacagttctgtaagcatcaggagctagagacgctgaaggacctttacaatcaggatgacaatcaccaggaattgggcagcttccacatccgagccagctatgctgcagaagagcgtattgaggggcgagtagcagctctgcagacagccgccgatgccttctacaaggccaagaatgagtttgcagccaaggctacagaggatcaaatgcggctcctacggctgcagcggcgcctagaagacgagctggggggccagttcctagacctgtctctacatgacacagttaccaccctcattcttggcggtcacaacaagcgtgcagagcagctggcacgtgacttccgcatccctgacaagaggctctggtggctgaagctgactgccctggcagatttggaagattgggaagagctagagaagttttccaagagcaagaaatcacccattggctacctgccttttgtggagatctgcatgaaacaacataacaaatacgaagccaagaagtatgcttcccgcgtgggtcccgagcagaaggtcaaggctttgcttcttgttggcgatgtggctcaggctgcagatgtggccatcgaacaccggaatgaggctgagctgagcctcgtattgtcccactgcacgggagccacagatggggccacagctgacaagattcaacgggccagggcacaagcccagaagaagtgaggagtccatcctgtacatctcaagcaaggggttcctcccctagcacctgggcttggcagaagggccatagttcatccagctcctcccctagagcaatgctgaggagcgggggcatggttcagctttttctccagggccatggcagctttcttaactatcctaacaagccttg

SEQ ID NO: 317830 - DNA, 2967 bp, Homo sapiens
gcggaagtgccggcctggagcccgctctaggtgggtgtcccctcggtgcttcccagctgccgtctgcaccagccatggactgctacacggcgaactggaacccactcggggactctgccttttaccggaaatatgagctgtacagcatggactgggacctgaaggaggaactcagggattgcctggtggctgctgcaccctatgggggccccattgcactgctgaggaacccctggcggaaggagaaagctgctagtgtgaggccagtgctcgatatatactctgcttccggcatgcctctggccagcctgctgtggaagagtggacccgtggtgtccctgggctggtcagctgaggaggagctgctctgtgtgcaggaagatggtgctgtactggtttatgggcttcatggtgacttccggagacacttcagcatgggcaatgaagtgctccagaaccgggttctggatgcccggatctttcacactgagtttggttccggagtggccatcctcacaggggcccaccgcttcaccctcagtgccaatgtgggtgacctcaaactccgccggatgccagaggtgccaggtctgcaaagtgcaccctcctgctggactgtgctgtgccaggaccgagtggcacacattcttctggctgtggggcctgacctttacctcttggaccatgcagcctgctccgcagtgacgccccctggcctggccccaggagtaagcagcttcctacagatggctgtctccttcacctaccgacacctggcactcttcacagacacaggctacatctggatggggacagcatcactcaaggagaagctatgtgagttcaactgcaacatccgggcacctccaaagcagatggtctggtgcagccgtcctcgtagcaaggagagggccgtggtggtggcctgggaaaggcggctgatggtggtgggcgatgcacccgagagcatccagtttgtgctggatgaggactcctacctggtgcctgagctcgatggggtccgcatcttctcccgcagcacccacgagttcctgcatgaggttccagcggccagcgaggaaatcttcaaaattgcctcaatggcccccggggcgctgctcctggaggctcagaaggagtatgagaaagagagccagaaggcggacgagtacctgcgggagatccaggagctgggccagctgacccaggccgtgcagcagtgcattgaggctgcaggacatgagcaccagccagacatgcagaagagtctgctcagggttggcctggatggccgggccggggagggtggggctgggagggggtgggatgggcagcagggaagctctctcctatcgccctctggctcttctcaggccgcctccttcggaaagtgtttcctggacagatttccacccgacagcttcgtgcacatgtgtcaggacctgcgtgtgctcaatgctgttcgggactatcacatcgggatcccgctcacctatagccaatataagcagctcaccatccaggtgctgctggacaggctcgtgttgcggagactttaccccctggccatccagatatgcgagtacttgcgccttcctgaagtacagggcgtcagcaggatcctggcccactgggcctgctacaaggtgcaacagaaggatgtctcagatgaggatgtggctcgagccattaaccagaagctgggggacacgcctggtgtctcttactccgacattgctgcacgagcctatggttgtggccgcacggagctggccatcaagctgctggagtatgagccacgctcaggggagcaggtaccccttctcctaaagatgaagaggagcaaactggcactaagcaaggccatcgagagcggggacactgacctggtgttcacggtgttgctgcacctgaagaacgagctgaaccgaggagattttttcatgacccttcggaatcagcccatggccctcagtttgtaccgacagttctgtaagcatcaggagctagagacgctgaaggacctttacaatcaggatgacaatcaccaggaattgggcagcttccacatccgagccagctatgctgcagaagagcgtattgaggggcgagtagcagctctgcagacagccgccgatgccttctacaaggccaagaatgagtttgcagccaaggctacagaggatcaaatgcggctcctacggctgcagcggcgcctagaagacgagctggggggccagttcctagacctgtctctacatgacacagttaccaccctcattcttggcggtcacaacaagcgtgcagagcagctggcacgtgacttccgcatccctgacaagaggtgacacaactaaaaaaaaacaaaggtatttatggaattccactgagtggtaatggatgatgcagttcaaataactaaggacacatgttcaaagagcataattaactttttaaaagaagctaataagcatggattcctggttcattcttgttctgctcggcagtggtctgatatgtgtcagtgccaacaatgctaccacagttgcaccttctgtaggaattacaagattaattaactcatcaacggcagaaccagttaaagaagaggccaaaacttcaaatccaacttcttcactaacttctctttctgtggcaccaacattcagcccaaatataactctgggacccacctatttaaccactgtcaattcttcagactctgacaatgggaccacaagaacagcaagcaccaattctataggcattacaatttcaccaaatggaacgtggcttccagataaccagttcacggatgccagaacagaaccctgggaggggaattccagcaccgcagcaaccactccagaaactttccctccttcagataagcatggattcctggttcattcttgttctgctcggcagtggtctgactatgtgtcagtgccacaatgctaccacact

SEQ ID NO: 317831 - DNA, 944 bp, Homo sapiens
actgctgctgctgctgaattgcctcctgcagactctgctggtattgctggtatgctgcagtagggagcctggggacagccccatcagggcctgcgacagtgcagggctgtaggggaacaggccttccatgccatacataggctgcaggtacccgctctgcagggcgccagggatctggggagcataataaggagaaaagcctggtacaaagtaaggaaggaactggcttgtgagcaatgctgtggggtccgaagtcaacgcggcctgcagggcctgcagctgtgcagggtctaccgcatactccatggtgggcagctcgcccctggaaagctgctagtgtgaggccagtgctcgatatatactctgcttccggcatgcctctggccagcctgctgtggaagagtggacccgtggtgtccctgggctggtcagctgaggaggagctgctctgtgtgcaggaagatggtgctgtactggtttatgggcttcatggtgacttccggagacacttcagcatgggcaatgaagtgctccagaaccgggttctggatgcccggatctttcacactgagtttggttccggagtggccatcctcacaggggcccaccgcttcaccctcagtgccaatgtgggtgacctcaaactccgccggatgccagaggtgccaggtctgcaaagtgcaccctcctgctggactgtgctgtgccaggaccgagtggcacacattcttctggctgtggggcctgacctttacctcttggaccatgcagcctgctccgcagtgcccctgagttgatcgccaaggccgtgaacgagaagtcctgcagctcgcccactgagttaactcaggggcgagctgcaccgtagtcctagcctcctataaggcccaggaagagggcagaggccagaagactccatggcccaaaaccctcctcctaccggg

SEQ ID NO: 317832 - DNA, 345 bp, Homo sapiens
gcctgcggctacagaggccacacatggtccagacactggtatgctgcccacatatttgtccctgccaccacaccacctgcagcccttctctcagggaggaggctcttcagaggggcccacccagtagtcagaagactgtctaaacacagacctgcccttgccctcccaaggtgccccaaatacacaggaaacattgggaggcaggatggcagcaatgggagcatagcccctgttgccagaggttgggccaggttagaaggggtgtctgggtgccccacagggctcatctgtacttctctgtgggtcttgggtaaggaagatccatgaagagtacctgcctttggg

SEQ ID NO: 317833 - DNA, 496 bp, Homo sapiens
tcccacagccagtcagttgcgacccaaggggcttagggtaggagtgtttctccataggggaagagtaacagcctgcacccaccacacacccaaagccctacatcctgccacactgagacctcacttcatttgggcgggtccctcctgggttgcagtttccttcattgctcccctgtcccaaatactcaagtctctctcattaaaaataaagagcaggccaggtgcagtggctcacacctgtaatcccacactttgggaggccaaggcgggtggatcacttgagcccaggattcgagaccaacctgggcaacatgacaagatcctgtctctacaaaaaataacaaaaatcatctgggcatggaggcacacgcctgtagtcccagctacttgggaggctgaggtggaaggatcacctgagcccatgaggtggaggctacagtgagctgtgatcatgccactgcactccagcctgggtcaaagagtgagaccctgtctc

SEQ ID NO: 317834 - DNA, 8108 bp, Homo sapiens
  misc_feature (7364)..(7364): n is a, c, g, or t
gcggaagtgccggcctggagcccgctctaggtgggtgtcccctcggtgcttcccagctgccgtctgcaccagccatggactgctacacggcgaactggaacccactcggggactctgccttttaccggaaatatgagctgtacagcatggactgggacctgaaggaggaactcagggattgcctggtggctgctgcaccctatgggggccccattgcactgctgaggaacccctggcggaaggagaaagctgctagtgtgaggccagtgctcgatatatactctgcttccggcatgcctctggccagcctgctgtggaagagtggacccgtggtgtccctgggctggtcagctgaggaggagctgctctgtgtgcaggaagatggtgctgtactggtttatgggcttcatggtgacttccggagacacttcagcatgggcaatgaagtgctccagaaccgggttctggatgcccggatctttcacactgagtttggttccggagtggccatcctcacaggggcccaccgcttcaccctcagtgccaatgtgggtgacctcaaactccgccggatgccagaggtgccaggtctgcaaagtgcaccctcctgctggactgtgctgtgccaggaccgagtggcacacattcttctggctgtggggcctgacctttacctcttggaccatgcagcctgctccgcagtgacgccccctggcctggccccaggagtaagcagcttcctacagatggctgtctccttcacctaccgacacctggcactcttcacagacacaggctacatctggatggggacagcatcactcaaggagaagctatgtgagttcaactgcaacatccgggcacctccaaagcagatggtctggtgcagccgtcctcgtagcaaggagagggccgtggtggtggcctgggaaaggcggctgatggtggtgggcgatgcacccgagagcatccagtttgtgctggatgaggactcctacctggtgcctgagctcgatggggtccgcatcttctcccgcagcacccacgagttcctgcatgaggttccagcggccagcgaggaaatcttcaaaattgcctcaatggcccccggggcgctgctcctggaggctcagaaggagtatgagaaagagagccagaaggcggacgagtacctgcgggagatccaggagctgggccagctgacccaggccgtgcagcagtgcattgaggctgcaggacatgagcaccagccagacatgcagaagagtctgctcagggttggcctggatggccgggccggggagggtggggctgggagggggtgggatgggcagcagggaagctctctcctatcgccctctggctcttctcaggccgcctccttcggaaagtgtttcctggacagatttccacccgacagcttcgtgcacatgtgtcaggacctgcgtgtgctcaatgctgttcgggactatcacatcgggatcccgctcacctatagccaatataagcagctcaccatccaggtgctgctggacaggctcgtgttgcggagactttaccccctggccatccagatatgcgagtacttgcgccttcctgaagtacagggcgtcagcaggatcctggcccactgggcctgctacaaggtgcaacagaaggatgtctcagatgaggatgtggctcgagccattaaccagaagctgggggacacgcctggtgtctcttactccgacattgctgcacgagcctatggttgtggccgcacggagctggccatcaagctgctggagtatgagccacgctcaggggagcaggtaccccttctcctaaagatgaagaggagcaaactggcactaagcaaggccatcgagagcggggacactgacctggtgttcacggtgttgctgcacctgaagaacgagctgaaccgaggagattttttcatgacccttcggaatcagcccatggccctcagtttgtaccgacagttctgtaagcatcaggagctagagacgctgaaggacctttacaatcaggatgacaatcaccaggaattgggcagcttccacatccgagccagctatgctgcagaagagcgtattgaggggcgagtagcagctctgcagacagccgccgatgccttctacaaggccaagaatgagtttgcagccaaggctacagaggatcaaatgcggctcctacggctgcagcggcgcctagaagacgagctggggggccagttcctagacctgtctctacatgacacagttaccaccctcattcttggcggtcacaacaagcgtgcagagcagctggcacgtgacttccgcatccctgacaagaggtgacacaactaaaaaaaaacaaaggtatttatggaattccactgagtggtaatggatgatgcagttcaaataactaaggacacatgttcaaagagcataattaactttttaaaagaagctaataagcatggattcctggttcattcttgttctgctcggcagtggtctgatatgtgtcagtgccaacaatgctaccacagttgcaccttctgtaggaattacaagattaattaactcatcaacggcagaaccagttaaagaagaggccaaaacttcaaatccaacttcttcactaacttctctttctgtggcaccaacattcagcccaaatataactctgggacccacctatttaaccactgtcaattcttcagactctgacaatgggaccacaagaacagcaagcaccaattctataggcattacaatttcaccaaatggaacgtggcttccagataaccagttcacggatgccagaacagaaccctgggaggggaattccagcaccgcagcaaccactccagaaactttccctccttcagatgagacaccaattattgcggtgatggtggccctgtcctctctgctagtgatcgtgtttattatcatagttttgtacatgttaaggtttaagaaatacaagcaagctgggagccattccaattctttccgcttatccaacggccgcactgaggatgtggagccccagagtgtgccacttctggccagatccccaagcaccaacaggaaatacccacccctgcccgtggacaagctggaagaggaaattaaccggagaatggcagacgacaataagctcttcagggaggaattcaacgctctccctgcatgtcctatccaggccacctgtgaggctgcttccaaggaggaaaacaaggaaaaaaatcgatatgtaaacatcttgccttatgaccactctagagtccacctgacaccggttgaaggggttccagattctgattacatcaatgcttcattcatcaacggttaccaagaaaagaacaaattcattgctgcacaaggaccaaaagaagaaacggtgaatgatttctggcggatgatctgggaacaaaacacagccaccatcgtcatggttaccaacctgaaggagagaaaggagtgcaagtgcgcccagtactggccagaccaaggctgctggacctatgggaatattcgggtgtctgtagaggatgtgactgtcctggtggactacacagtacggaagttctgcatccagcaggtgggcgacatgaccaacagaaagccacagcgcctcatcactcagttccactttaccagctggccagactttggggtgccttttaccccgatcggcatgctcaagttcctcaagaaggtgaaggcctgtaaccctcagtatgcaggggccatcgtggtccactgcagtgcaggtgtagggcgtacaggtacctttgtcgtcattgatgccatgctggacatgatgcatacagaacggaaggtggacgtgtatggctttgtgagccggatccgggcacagcgctgccagatggtgcaaaccgatatgcagtatgtcttcatataccaagcccttctggagcattatctctatggagatacagaactggaagtgacctctctagaaacccacctgcagaaaatttacaacaaaatcccagggaccagcaacaatggattagaggaggagtttaagaagttaacatcaatcaaaatccagaatgacaagatgcggactggaaaccttccagccaacatgaagaagaaccgtgttttacagatcattccatatgaattcaacagagtgatcattccagttaagcggggcgaagagaatacagactatgtgaacgcatcctttattgatggctaccggcagaaggactcctatatcgccagccagggccctcttctccacacaattgaggacttctggcgaatgatctgggagtggaaatcctgctctatcgtgatgctaacagaactggaggagagaggccaggagaagtgtgcccagtactggccatctgatggactggtgtcctatggagatattacagtggaactgaagaaggaggaggaatgtgagagctacaccgtccgagacctcctggtcaccaacaccagggagaataagagccggcagatccggcagttccacttccatggctggcctgaagtgggcatccccagtgacggaaagggcatgatcagcatcatcgccgccgtgcagaagcagcagcagcagtcagggaaccaccccatcaccgtgcactgcagcgccggggcaggaaggacggggaccttctgtgccctgagcaccgtcctggagcgtgtgaaagcagaggggattttggatgtcttccagactgtcaagagcctgcggctacagaggccacacatggtccagacactggaacagtatgagttctgctacaaggtggtgcaggagtatattgatgcattctcagattatgccaacttcaagtaagcggcaacaagggtccgtggaccaggaggattgcctttaatattttgtaatattctgttttgttaatataccccaaattgtgtatatatcttataactgttttagaaattggtacataggcttctattacctattaggtggaaattttatatgtaaatgtgttagcactgatagtcctttttccaatgttttattggggaattaaatagtgtgatgtttggattgatatcgtgaaatcctcagccgagaaattgggctggattgtgctttggttaatacatctttccctaaagaagataaacacaaaatccattccaggtagctcggcaccaactaagaaaaaaagcacaaagttctcagagctctcgaggaaagtggttgtccccgtaccaccatgcactgtaaatatccctcccctctctccctggtcccctcccccatccccaccactgatatcatggggagtaataggaccagagcggtatctctggcaccacactagggactatcaggtaataaaagctttgactccctgaggaaatgtctctccctttgtctgggggtggggcagccatacaggctggggctctcctcggctgttcatggccctcctgttgctgttctctctgagttatctgagagaggccacagtcccccagctcctcctgtccaccaaacacagcccttccagttcttaggtgatctccaggaccctcctttcattcccagcacatctttggtttagtggtcctggccagcctccctccctaggaaggtggccaggtcctcactgagtctccttaaggacaggggcacaggggagactagagctggctcagctttgggctgaggccagtctgacctctccagtctgtggtgctttgctacaaaactgtctggattgtgtcaccctatctaggataaatctttatgtccacatatattgtgttgaattgttcccattttctttcatacgtgtcctcatttctgggacagtgtgaatgtttctcagatctagaagtcagatggtgggagtcttagatccgaacttggttttgagtgacatgttagacaaaagtgttgaacttttgtttcttaaagaagctggatgttcatttatgtctcccgtaacagtctgtgctgtccagagacccagtatccttaggatattattctcatcctcatggttgaagctgggtcactgccatgtccataatccaccctgaggaaagagcatggagagccagcagcttcatttctaaggacaggaagccaaatctgcacttttcacttccactcataatccaccctgcattccactcatcagcttcacaagtaggttttcacctggtcatagctatgcctaactacagggagtgctggggaagtgtgatcttttgttgggggcacactgggagagtgggtctgtccactgcctcccagcctcagagcagctcaccacaggagcaggagagtgaactcgtggctgtggctgtcaggcagggcctttcttgagagccagcgcaggcctgggctcctcagaggcttctggagtgagagatggcacctcagcctggcccatggaggcatgttcagggatcagcactactgtgcttcttggaggaggtgggacttgagctggacccatgggaggctggaaatttagatgagtgaaaaggaggaaaggcgaagtagagccacattacagagggcctcagagtccagataaagcagttaacatgtagtggctccaggagggaagcctgtctgtgcaccacatacccaggatgtttgtgggaaggaaggagatgtgcggaagggacccaggagacctgcaggaggcaagggctgcaacagaccccctctggaagtttacaggaggtgagtgtgagtcattagagacattcagttctgtaggaactaacgaactcccaagaggcagtaaacttaaaactcagcagtctcgataagtatggataaattaggcaaagacagattctgaggaatttctggtgaggggtgccaagtttggggagcagcccctggctccttgcaagctacccttcagtgctctgtgtgaccaagtccaagtcgatgcaggagggcaggcactgggtcagcaagccactcagtgaatgtgcaggtgaggccgttcataggcgcttgtgtgcctcccagcaggctgcctgccattgccagggctggccttcagcagggtgcgccaccatggcctgagtggttttctgctgaagtccgtgctgatttggccagtggataggcatcacctgggtgcaaaaccattgtctccaggtaggaatgacctcagctgtttgctccgtgtctcgctcagcctgtagatgtgtccctcatcccttcatgcctccctcttcactcctcttttactttctactcggggcttgcatgtttacaagagaggtgaacccaacagaaactagtataggccaaaaggaaaatgtgctgaagctcacacagcacagtcgtgtggaaanggcagcagtgactgcttcatccagtgcccttcccacagccagtcagttgcgacccaaggggcttagggtaggagtgtttctccataggggaagagtaacagcctgcacccaccacacacccaaagccctacatcctgccacactgagacctcacttcatttgggcgggtccctcctgggttgcagtttccttcattgctcccctgtcccaaatactcaagtctctctcattaaaaataaagagcaggccaggtgcagtggctcacacctgtaatcccacactttgggaggccaaggcgggtggatcacttgagcccaggattcgagaccaacctgggcaacatgacaagatcctgtctctacaaaaaataacaaaaatcatctgggcatggaggcacacgcctgtagtcccagctacttgggaggctgaggtggaaggatcacctgagcccatgaggtggaggctacagtgagctgagatcacgccactgcactccagcctggatgacagcgagactccatctcaaaaaaaaaaaaagaaaaagaaaaagaattaattaattaattaaataaagagcatgtctcccaccccaggcctaagttcttccctctatgagagactacttgcagaaacctgtgttctcactcttcccccttcctcacttcattcccacacatttcttttccatccctgcgcaccaaggtcaccttggtgctaaacaccagggacccatggtctcttccc

SEQ ID NO: 317835 - DNA, 624 bp, Homo sapiens
catgcctcagcctcctgagtagctgggattacaggtgtgtgccaccacatggtatttttagtagagatgggttttgtcatgttggccagactggtctggaactcctggcctcccaaagtgctgggattacaggtgtgagccactgcacctggcctcagagtttcttttgaaaaggctctttgggagtctaagcttctcgtacttgacagtgttgaggatgatggtggcttagattccctggctggaagtgcttcatgaccatggtaaccattccctctcttttcttgcttttgcaggtgttctttgcctctgttcggtctggtggcagcagtcaggtttatttcatgaccttaggcaggacttctcttctgagctggtagaagcagtgtgatccagggattactggcctccagagtcttcaagatcctgagaacttggaattccttgtaactggagctcggagctgcaccgagggcaaccaggacagctgtgtgtgcagacctcatgtgttgggttctctcccctccttcctgttcctcttatataccagtttatccccattctttttttttttcttactccaaaataaatcaaggctgcaatgcagctggtgctgttcagatt

SEQ ID NO: 317836 - DNA, 728 bp, Homo sapiens
caaacttttagatactgtaaatattgcattaaaaattgtataactgcttaaaaataccattttttattcacattagacccagttaatataaaatataatagtttgaggatcataatgtgaaaagtagaatgtttttgaggtaaaatgaaaaagaatgttagggaatatttgagtcagatatttgataattgggtagtgatgaagagcaaagtggtcctcctgtgcccatgtgcttctgagagagaatgagcacttcagaattgctgcacttgggtgtgccgtagaataccagacactgtcagtcttctggaccaaatatatggagcgaatacactggactatgaaatgagctttcagttatttaggtgcctccaaattattatgaattattgaggagcatcacgtttctaggtctttagaaaagagagggcatggcggttaaactggttttcccaatttctccaagatatgttgctcaccttgtgtcttgtctgccctatagcttgttatggagttctgtggggctgggtccattacagaccttgtgaagaacaccaaagggaacacactcaaagaagactggatcgcttacatctccagagaaatcctgagggtaaggaagtgggtggctacagtgctccaactcatgatcctgtgcttccgtttcattttccagccccagtacttctttgcattacttatatctatatagattattctctttgaca

SEQ ID NO: 317837 - DNA, 7155 bp, Homo sapiens
aattcgaggatccgggtaccatggcacagagcgacagagacatttattgttatttgttttttggtggcaaaaagggaaaatggcgaacgactcccctgcaaaaagtctggtggacatcgacctctcctccctgcgggatcctgctgggatttttgagctggtggaagtggttggaaatggcacctatggacaagtctataagggtcgacatgttaaaacgggtcagttggcagccatcaaagttatggatgtcactgaggatgaagaggaagaaatcaaactggagataaatatgctaaagaaatactctcatcacagaaacattgcaacatattatggtgctttcatcaaaaagagccctccaggacatgatgaccaactctggcttgttatggagttctgtggggctgggtccattacagaccttgtgaagaacaccaaagggaacacactcaaagaagactggatcgcttacatctccagagaaatcctgaggggactggcacatcttcacattcatcatgtgattcaccgggatatcaagggccagaatgtgttgctgactgagaatgcagaggtgaaacttgttgactttggtgtgagtgctcagctggacaggactgtggggcggagaaatacgttcataggcactccctactggatggctcctgaggtcatcgcctgtgatgagaacccagatgccacctatgattacagaagtgatctttggtcttgtggcattacagccattgagatggcagaaggtgctccccctctctgtgacatgcatccaatgagagcactgtttctcattcccagaaaccctcctccccggctgaagtcaaaaaaatggtcgaagaagttttttagttttatagaagggtgcctggtgaagaattacatgcagcggccctctacagagcagcttttgaaacatccttttataagggatcagccaaatgaaaggcaagttagaatccagcttaaggatcatatagatcgtaccaggaagaagagaggcgagaaagatgaaactgagtatgagtacagtgggagtgaggaagaagaggaggaagtgcctgaacaggaaggagagccaagttccattgtgaacgtgcctggtgagtctactcttcgccgagatttcctgagactgcagcaggagaacaaggaacgttccgaggctcttcggagacaacagttactacaggagcaacagctccgggagcaggaagaatataaaaggcaactgctggcagagagacagaagcggattgagcagcagaaagaacagaggcgacggctagaagagcaacaaaggagagagcgggaagctagaaggcagcaggaacgtgaacagcgaaggagagaacaagaagaaaagaggcgtctagaggagttggagagaaggcgcaaagaagaagaggagaggagacgggcagaagaagaaaagaggagagttgaaagagaacaggagtatatcaggcgacagctagaagaggagcagcggcacttggaagtccttcagcagcagctgctccaggagcaggccatgttactgcatgaccataggaggccgcacccgcagcactcgcagcagccgccaccaccgcagcaggaaaggagcaagccaagcttccatgctcccgagcccaaagcccactacgagcctgctgaccgagcgcgagaggtggaagatagatttaggaaaactaaccacagctcccctgaagcccagtctaagcagacaggcagagtattggagccaccagtgccttcccgatcagagtctttttccaatggcaactccgagtctgtgcatcccgccctgcagagaccagcggagccacaggttcctgtgagaacaacatctcgctcccctgttctgtcccgtcgagattccccactgcagggcagtgggcagcagaatagccaggcaggacagagaaactccaccagcagtattgagcccaggcttctgtgggagagagtggagaagctggtgcccagacctggcagtggcagctcctcagggtccagcaactcaggatcccagcccgggtctcaccctgggtctcagagtggctccggggaacgcttcagagtgagatcatcatccaagtctgaaggctctccatctcagcgcctggaaaatgcagtgaaaaaacctgaagataaaaaggaagttttcagacccctcaagcctgctgcaagtgatctgaccgcactggccaaagagcttcgagcagtggaagatgtacggccacctcacaaagtaacggactactcctcatccagtgaggagtcggggacgacggatgaggaggacgacgatgtggagcaggaaggggctgacgagtccacctcaggaccagaggacaccagagcagcgtcatctctgaatttgagcaatggtgaaacggaatctgtgaaaaccatgattgtccatgatgatgtagaaagtgagccggccatgaccccatccaaggagggcactctaatcgtccgccagactcagtccgctagtagcacactccagaaacacaaatcttcctcctcctttacaccttttatagaccccagattactacagatttctccatctagcggaacaacagtgacatctgtggtgggattttcctgtgatgggatgagaccagaagccataaggcaagatcctacccggaaaggctcagtggtcaatgtgaatcctaccaacactaggccacagagtgacaccccggagattcgtaaatacaagaagaggtttaactctgagattctgtgtgctgccttatggggagtgaatttgctagtgggtacagagagtggcctgatgctgctggacagaagtggccaagggaaggtctatcctcttatcaaccgaagacgatttcaacaaatggacgtacttgagggcttgaatgtcttggtgacaatatctggcaaaaaggataagttacgtgtctactatttgtcctggttaagaaataaaatacttcacaatgatccagaagttgagaagaagcagggatggacaaccgtaggggatttggaaggatgtgtacattataaagttgtaaaatatgaaagaatcaaatttctggtgattgctttgaagagttctgtggaagtctatgcgtgggcaccaaagccatatcacaaatttatggcctttaagtcatttggagaattggtacataagccattactggtggatctcactgttgaggaaggccagaggttgaaagtgatctatggatcctgtgctggattccatgctgttgatgtggattcaggatcagtctatgacatttatctaccaacacatatccagtgtagcatcaaaccccatgcaatcatcatcctccccaatacagatggaatggagcttctggtgtgctatgaagatgagggggtttatgtaaacacatatggaaggatcaccaaggatgtagttctacagtggggagagatgcctacatcagtagcatatattcgatccaatcagacaatgggctggggagagaaggccatagagatccgatctgtggaaactggtcacttggatggtgtgttcatgcacaaaagggctcaaagactaaaattcttgtgtgaacgcaatgacaaggtgttctttgcctctgttcggtctggtggcagcagtcaggtttatttcatgaccttaggcaggacttctcttctgagctggtagaagcagtgtgatccagggattactggcctccagagtcttcaagatcctgagaacttggaattccttgtaactggagctcggagctgcaccgagggcaaccaggacagctgtgtgtgcagacctcatgtgttgggttctctcccctccttcctgttcctcttatataccagtttatccccattctttttttttttcttactccaaaataaatcaaggctgcaatgcagctggtgctgttcagattctaccatcaggtgctataagtgtttgggattgagcatcatactggaaagcaaacacctttcctccagctccagaattccttgtctctgaatgactctgtcttgtgggtgtctgacagtggcgacgatgaacatgccgttggttttattggcagtgggcacaaggaggtgagaagtggtggtaaaaggagcggagtgctgaagcagagagcagatttaatatagtaacattaacagtgtatttaattgacatttcttttttgtaatgtgacgatatgtggacaaagaagaagatgcaggtttaagaagttaatatttataaaatgtgaaagacacagttactaggataacttttttgtgggtggggcttgggagatggggtggggtgggttaaggggtcccattttgtttctttggatttggggtgggggtcctggccaagaactcagtcatttttctgtgtaccaggttgcctaaatcatgtgcagatggttctaaaaaaaaaaaaaaaaaaaaaaaaaaaggaaaaaaaaaaagaaaaagaaaacgtgtgcattttgtataatggccagaactttgtcgtgtgacagtattagcactgcctcagttaaaggtttaatttttgtttaaacctagacgtgcaacaaaagttttaccacagtctgcacttgcagaagaaagaaaaaaattcaaaccacatgtttattttttttttgcctacctcattgttcttaatgcattgagaggtgatttagtttatatgtttttggaagaaaccattaatgtttaatttaatcttaataccaaaacgaccagattgaagtttgacttttattgtcacaaatcagcaggcacaagaactgtccatgaagatgggaaatagccttaaggctgatgcagtttacttacaagtttagaaaccagaatgctttgtttttaccagattcaccattagaggttgatggggcaactgcagcccatgacacaagatctcattgttctcgatgtagaggggttggtagcagacaggtggttacattagaatagtcacacaaactgttcagtgttgcaggaaccttttcttgggggtgggggagtttcccttttctaaaaatgcaatgcactaaaactattttaagaatgtagttaattctgcttattcataaagtgggcatcttctgtgttttaggtgtaatatcgaagtcctggcttttctcgttttctcacttgctctcttgttctctgtttttttaaaccaattttactttatgaatatattcatgacatttgtaataaatgtcttgagaaagaatttgtttcatggcttcatggtcatcactcaagctcccgtaaggatattaccgtctcaggaaaggatcaggactccatgtcacagtcctgccatcttactttcctcttgtcgagttctgagtggaaataactgcattatggctgctttaacctcagtcatcaaaagaaacttgctgttttttaggcttgatctttttcctttgtggttaattttcctgtatattgtgaaaatgggggattttccctctgctcccacccacctaaacacagcagccatttgtacctgtttgcttcccatcccacttggcacccactctgacctcttgtcagtttcctgttcctggttccatctttttgaaaaaggccctcctttgagctacaaacatctggtaagacaagtacatccactcatgaatgcagacacagcagctggtggttttgtgtatacctgtaaagacaagctgagaagcttactttttggggaagtaaaagaagatggaaatggatgtttcatttgtatgagtttggagcagtgctgaaggccaaagccgcctactggtttgtagttaacctagagaaggttgaaaaattaatcctacctttaaagggatttgaggtaggctggattccatcgccacaggactttagttagaattaaattcctgcttgtaatttatatccatgtttaggcttttcataagatgaaacatgccacagtgaacacactcgtgtacatatcaagagaagaaggaaaggcacaggtggagaacagtaaaaggtgggcagatgtctttgaagaaatgctcaatgtctgatgctaagtgggagaaggcagagaacaaaggatgtggcataatggtcttaacattatccaaagacttgaagctccatgtctgtaagtcaaatgttacacaaaaaaaaatgcaaatggtgtttcattggaattaccaagtgcttagaacttgctggctttcccataggtggtaaaggggtctgagctcacaccgagttgtgcttggcttgcttgtgcagctccaggcacccggtgggcactctggtggtgtttgtggtgaactgaattgaatccattgttgggcttaagttactgaaattggaacaccctttgtccttctcggcgggggcttcctggtctgtgctttacttggcttttttccttcccgtcttagcctcacccccttgtcaaccagattgagttgctatagcttgatgcagggacccagtgaagtttctccgttaaagattgggagtcgtcgaaatgtttagattcttttaggaaaggaattattttccccccttttacagggtagtaacttctccacagaagtgccaatatggcaaaattacacaagaaaacagtattgcaatgacaccattacataaggaacattgaactgttagaggagtgctcttccaaacaaaacaaaaatgtctctaggtttagtcagagctttcacaagtaataacctttctgtattaaaatcagagtaaccctttctgtattgagtgcagtgttttttactcttttctcatgcacatgttacgttggagaaaatgtttacaaaaatggttttgttacactaatgcgcaccacatatttatggtttattttaagtgactttttatgggttatttaggttttcgtcttagttgtagcacacttaccctaattttgccaattattaatttgctaaatagtaatacaaatgacaaactgcattaaatttactaattataaaagctgcaaagcagactggtggcaagtacacagcccttttttttgcagtgctaacttgtctactgtgtattatgaaaattactgttgtccccccacccttttttccttaaataaagtaaaaatgacaccta

SEQ ID NO: 317838 - DNA, 7203 bp, Homo sapiens
caaacttttagatactgtaaatattgcattaaaaattgtataactgcttaaaaataccattttttattcacattagacccagttaatataaaatataatagtttgaggatcataatgtgaaaagtagaatgtttttgaggtaaaatgaaaaagaatgttagggaatatttgagtcagatatttgataattgggtagtgatgaagagcaaagtggtcctcctgtgcccatgtgcttctgagagagaatgagcacttcagaattgctgcacttgggtgtgccgtagaataccagacactgtcagtcttctggaccaaatatatggagcgaatacactggactatgaaatgagctttcagttatttaggtgcctccaaattattatgaattattgaggagcatcacgtttctaggtctttagaaaagagagggcatggcggttaaactggttttcccaatttctccaagatatgttgctcaccttgtgtcttgtctgccctatagcttgttatggagttctgtggggctgggtccattacagaccttgtgaagaacaccaaagggaacacactcaaagaagactggatcgcttacatctccagagaaatcctgaggggactggcacatcttcacattcatcatgtgattcaccgggatatcaagggccagaatgtgttgctgactgagaatgcagaggtgaaacttgttgactttggtgtgagtgctcagctggacaggactgtggggcggagaaatacgttcataggcactccctactggatggctcctgaggtcatcgcctgtgatgagaacccagatgccacctatgattacagaagtgatctttggtcttgtggcattacagccattgagatggcagaaggtgctccccctctctgtgacatgcatccaatgagagcactgtttctcattcccagaaaccctcctccccggctgaagtcaaaaaaatggtcgaagaagttttttagttttatagaagggtgcctggtgaagaattacatgcagcggccctctacagagcagcttttgaaacatccttttataagggatcagccaaatgaaaggcaagttagaatccagcttaaggatcatatagatcgtaccaggaagaagagaggcgagaaagatgaaactgagtatgagtacagtgggagtgaggaagaagaggaggaagtgcctgaacaggaaggagagccaagttccattgtgaacgtgcctggtgagtctactcttcgccgagatttcctgagactgcagcaggagaacaaggaacgttccgaggctcttcggagacaacagttactacaggagcaacagctccgggagcaggaagaatataaaaggcaactgctggcagagagacagaagcggattgagcagcagaaagaacagaggcgacggctagaagagcaacaaaggagagagcgggaagctagaaggcagcaggaacgtgaacagcgaaggagagaacaagaagaaaagaggcgtctagaggagttggagagaaggcgcaaagaagaagaggagaggagacgggcagaagaagaaaagaggagagttgaaagagaacaggagtatatcaggcgacagctagaagaggagcagcggcacttggaagtccttcagcagcagctgctccaggagcaggccatgttactggagtgccgatggcgggagatggaggagcaccggcaggcagagaggctccagaggcagttgcaacaagaacaagcatatctcctgtctctacagcatgaccataggaggccgcacccgcagcactcgcagcagccgccaccaccgcagcaggaaaggagcaagccaagcttccatgctcccgagcccaaagcccactacgagcctgctgaccgagcgcgagaggttcctgtgagaacaacatctcgctcccctgttctgtcccgtcgagattccccactgcagggcagtgggcagcagaatagccaggcaggacagagaaactccaccagcagtattgagcccaggcttctgtgggagagagtggagaagctggtgcccagacctggcagtggcagctcctcagggtccagcaactcaggatcccagcccgggtctcaccctgggtctcagagtggctccggggaacgcttcagagtgagatcatcatccaagtctgaaggctctccatctcagcgcctggaaaatgcagtgaaaaaacctgaagataaaaaggaagttttcagacccctcaagcctgctgcaagtgatctgaccgcactggccaaagagcttcgagcagtggaagatgtacggccacctcacaaagtaacggactactcctcatccagtgaggagtcggggacgacggatgaggaggacgacgatgtggagcaggaaggggctgacgagtccacctcaggaccagaggacaccagagcagcgtcatctctgaatttgagcaatggtgaaacggaatctgtgaaaaccatgattgtccatgatgatgtagaaagtgagccggccatgaccccatccaaggagggcactctaatcgtccgccagactcagtccgctagtagcacactccagaaacacaaatcttcctcctcctttacaccttttatagaccccagattactacagatttctccatctagcggaacaacagtgacatctgtggtgggattttcctgtgatgggatgagaccagaagccataaggcaagatcctacccggaaaggctcagtggtcaatgtgaatcctaccaacactaggccacagagtgacaccccggagattcgtaaatacaagaagaggtttaactctgagattctgtgtgctgccttatggggagtgaatttgctagtgggtacagagagtggcctgatgctgctggacagaagtggccaagggaaggtctatcctcttatcaaccgaagacgatttcaacaaatggacgtacttgagggcttgaatgtcttggtgacaatatctggcaaaaaggataagttacgtgtctactatttgtcctggttaagaaataaaatacttcacaatgatccagaagttgagaagaagcagggatggacaaccgtaggggatttggaaggatgtgtacattataaagttgtaaaatatgaaagaatcaaatttctggtgattgctttgaagagttctgtggaagtctatgcgtgggcaccaaagccatatcacaaatttatggcctttaagtcatttggagaattggtacataagccattactggtggatctcactgttgaggaaggccagaggttgaaagtgatctatggatcctgtgctggattccatgctgttgatgtggattcaggatcagtctatgacatttatctaccaacacatatccagtgtagcatcaaaccccatgcaatcatcatcctccccaatacagatggaatggagcttctggtgtgctatgaagatgagggggtttatgtaaacacatatggaaggatcaccaaggatgtagttctacagtggggagagatgcctacatcagtagcatatattcgatccaatcagacaatgggctggggagagaaggccatagagatccgatctgtggaaactggtcacttggatggtgtgttcatgcacaaaagggctcaaagactaaaattcttgtgtgaacgcaatgacaaggtgttctttgcctctgttcggtctggtggcagcagtcaggtttatttcatgaccttaggcaggacttctcttctgagctggtagaagcagtgtgatccagggattactggcctccagagtcttcaagatcctgagaacttggaattccttgtaactggagctcggagctgcaccgagggcaaccaggacagctgtgtgtgcagacctcatgtgttgggttctctcccctccttcctgttcctcttatataccagtttatccccattctttttttttttcttactccaaaataaatcaaggctgcaatgcagctggtgctgttcagattctaccatcaggtgctataagtgtttgggattgagcatcatactggaaagcaaacacctttcctccagctccagaattccttgtctctgaatgactctgtcttgtgggtgtctgacagtggcgacgatgaacatgccgttggttttattggcagtgggcacaaggaggtgagaagtggtggtaaaaggagcggagtgctgaagcagagagcagatttaatatagtaacattaacagtgtatttaattgacatttcttttttgtaatgtgacgatatgtggacaaagaagaagatgcaggtttaagaagttaatatttataaaatgtgaaagacacagttactaggataacttttttgtgggtggggcttgggagatggggtggggtgggttaaggggtcccattttgtttctttggatttggggtgggggtcctggccaagaactcagtcatttttctgtgtaccaggttgcctaaatcatgtgcagatggttctaaaaaaaaaaaaaaaaaaaaaaaaaaaggaaaaaaaaaaagaaaaagaaaacgtgtgcattttgtataatggccagaactttgtcgtgtgacagtattagcactgcctcagttaaaggtttaatttttgtttaaacctagacgtgcaacaaaagttttaccacagtctgcacttgcagaagaaagaaaaaaattcaaaccacatgtttattttttttttgcctacctcattgttcttaatgcattgagaggtgatttagtttatatgtttttggaagaaaccattaatgtttaatttaatcttaataccaaaacgaccagattgaagtttgacttttattgtcacaaatcagcaggcacaagaactgtccatgaagatgggaaatagccttaaggctgatgcagtttacttacaagtttagaaaccagaatgctttgtttttaccagattcaccattagaggttgatggggcaactgcagcccatgacacaagatctcattgttctcgatgtagaggggttggtagcagacaggtggttacattagaatagtcacacaaactgttcagtgttgcaggaaccttttcttgggggtgggggagtttcccttttctaaaaatgcaatgcactaaaactattttaagaatgtagttaattctgcttattcataaagtgggcatcttctgtgttttaggtgtaatatcgaagtcctggcttttctcgttttctcacttgctctcttgttctctgtttttttaaaccaattttactttatgaatatattcatgacatttgtaataaatgtcttgagaaagaatttgtttcatggcttcatggtcatcactcaagctcccgtaaggatattaccgtctcaggaaaggatcaggactccatgtcacagtcctgccatcttactttcctcttgtcgagttctgagtggaaataactgcattatggctgctttaacctcagtcatcaaaagaaacttgctgttttttaggcttgatctttttcctttgtggttaattttcctgtatattgtgaaaatgggggattttccctctgctcccacccacctaaacacagcagccatttgtacctgtttgcttcccatcccacttggcacccactctgacctcttgtcagtttcctgttcctggttccatctttttgaaaaaggccctcctttgagctacaaacatctggtaagacaagtacatccactcatgaatgcagacacagcagctggtggttttgtgtatacctgtaaagacaagctgagaagcttactttttggggaagtaaaagaagatggaaatggatgtttcatttgtatgagtttggagcagtgctgaaggccaaagccgcctactggtttgtagttaacctagagaaggttgaaaaattaatcctacctttaaagggatttgaggtaggctggattccatcgccacaggactttagttagaattaaattcctgcttgtaatttatatccatgtttaggcttttcataagatgaaacatgccacagtgaacacactcgtgtacatatcaagagaagaaggaaaggcacaggtggagaacagtaaaaggtgggcagatgtctttgaagaaatgctcaatgtctgatgctaagtgggagaaggcagagaacaaaggatgtggcataatggtcttaacattatccaaagacttgaagctccatgtctgtaagtcaaatgttacacaaaaaaaaatgcaaatggtgtttcattggaattaccaagtgcttagaacttgctggctttcccataggtggtaaaggggtctgagctcacaccgagttgtgcttggcttgcttgtgcagctccaggcacccggtgggcactctggtggtgtttgtggtgaactgaattgaatccattgttgggcttaagttactgaaattggaacaccctttgtccttctcggcgggggcttcctggtctgtgctttacttggcttttttccttcccgtcttagcctcacccccttgtcaaccagattgagttgctatagcttgatgcagggacccagtgaagtttctccgttaaagattgggagtcgtcgaaatgtttagattcttttaggaaaggaattattttccccccttttacagggtagtaacttctccacagaagtgccaatatggcaaaattacacaagaaaacagtattgcaatgacaccattacataaggaacattgaactgttagaggagtgctcttccaaacaaaacaaaaatgtctctaggtttagtcagagctttcacaagtaataacctttctgtattaaaatcagagtaaccctttctgtattgagtgcagtgttttttactcttttctcatgcacatgttacgttggagaaaatgtttacaaaaatggttttgttacactaatgcgcaccacatatttatggtttattttaagtgactttttatgggttatttaggttttcgtcttagttgtagcacacttaccctaattttgccaattattaatttgctaaatagtaatacaaatgacaaactgcattaaatttactaattataaaagctgcaaagcagactggtggcaagtacacagcccttttttttgcagtgctaacttgtctactgtgtattatgaaaattactgttgtccccccacccttttttccttaaataaagtaaaaatgacaccta

SEQ ID NO: 317839 - DNA, 7017 bp, Homo sapiens
aattcgaggatccgggtaccatggcacagagcgacagagacatttattgttatttgttttttggtggcaaaaagggaaaatggcgaacgactcccctgcaaaaagtctggtggacatcgacctctcctccctgcgggatcctgctgggatttttgagctggtggaagtggttggaaatggcacctatggacaagtctataagggtcgacatgttaaaacgggtcagttggcagccatcaaagttatggatgtcactgaggatgaagaggaagaaatcaaactggagataaatatgctaaagaaatactctcatcacagaaacattgcaacatattatggtgctttcatcaaaaagagccctccaggacatgatgaccaactctggcttgttatggagttctgtggggctgggtccattacagaccttgtgaagaacaccaaagggaacacactcaaagaagactggatcgcttacatctccagagaaatcctgaggggactggcacatcttcacattcatcatgtgattcaccgggatatcaagggccagaatgtgttgctgactgagaatgcagaggtgaaacttgttgactttggtgtgagtgctcagctggacaggactgtggggcggagaaatacgttcataggcactccctactggatggctcctgaggtcatcgcctgtgatgagaacccagatgccacctatgattacagaagtgatctttggtcttgtggcattacagccattgagatggcagaaggtgctccccctctctgtgacatgcatccaatgagagcactgtttctcattcccagaaaccctcctccccggctgaagtcaaaaaaatggtcgaagaagttttttagttttatagaagggtgcctggtgaagaattacatgcagcggccctctacagagcagcttttgaaacatccttttataagggatcagccaaatgaaaggcaagttagaatccagcttaaggatcatatagatcgtaccaggaagaagagaggcgagaaagatgaaactgagtatgagtacagtgggagtgaggaagaagaggaggaagtgcctgaacaggaaggagagccaagttccattgtgaacgtgcctggtgagtctactcttcgccgagatttcctgagactgcagcaggagaacaaggaacgttccgaggctcttcggagacaacagttactacaggagcaacagctccgggagcaggaagaatataaaaggcaactgctggcagagagacagaagcggattgagcagcagaaagaacagaggcgacggctagaagagcaacaaaggagagagcgggaagctagaaggcagcaggaacgtgaacagcgaaggagagaacaagaagaaaagaggcgtctagaggagttggagagaaggcgcaaagaagaagaggagaggagacgggcagaagaagaaaagaggagagttgaaagagaacaggagtatatcaggcgacagctagaagaggagcagcggcacttggaagtccttcagcagcagctgctccaggagcaggccatgttactgcatgaccataggaggccgcacccgcagcactcgcagcagccgccaccaccgcagcaggaaaggagcaagccaagcttccatgctcccgagcccaaagcccactacgagcctgctgaccgagcgcgagaggttcctgtgagaacaacatctcgctcccctgttctgtcccgtcgagattccccactgcagggcagtgggcagcagaatagccaggcaggacagagaaactccaccagcagtattgagcccaggcttctgtgggagagagtggagaagctggtgcccagacctggcagtggcagctcctcagggtccagcaactcaggatcccagcccgggtctcaccctgggtctcagagtggctccggggaacgcttcagagtgagatcatcatccaagtctgaaggctctccatctcagcgcctggaaaatgcagtgaaaaaacctgaagataaaaaggaagttttcagacccctcaagcctgctgcaagtgatctgaccgcactggccaaagagcttcgagcagtggaagatgtacggccacctcacaaagtaacggactactcctcatccagtgaggagtcggggacgacggatgaggaggacgacgatgtggagcaggaaggggctgacgagtccacctcaggaccagaggacaccagagcagcgtcatctctgaatttgagcaatggtgaaacggaatctgtgaaaaccatgattgtccatgatgatgtagaaagtgagccggccatgaccccatccaaggagggcactctaatcgtccgccagactcagtccgctagtagcacactccagaaacacaaatcttcctcctcctttacaccttttatagaccccagattactacagatttctccatctagcggaacaacagtgacatctgtggtgggattttcctgtgatgggatgagaccagaagccataaggcaagatcctacccggaaaggctcagtggtcaatgtgaatcctaccaacactaggccacagagtgacaccccggagattcgtaaatacaagaagaggtttaactctgagattctgtgtgctgccttatggggagtgaatttgctagtgggtacagagagtggcctgatgctgctggacagaagtggccaagggaaggtctatcctcttatcaaccgaagacgatttcaacaaatggacgtacttgagggcttgaatgtcttggtgacaatatctggcaaaaaggataagttacgtgtctactatttgtcctggttaagaaataaaatacttcacaatgatccagaagttgagaagaagcagggatggacaaccgtaggggatttggaaggatgtgtacattataaagttgtaaaatatgaaagaatcaaatttctggtgattgctttgaagagttctgtggaagtctatgcgtgggcaccaaagccatatcacaaatttatggcctttaagtcatttggagaattggtacataagccattactggtggatctcactgttgaggaaggccagaggttgaaagtgatctatggatcctgtgctggattccatgctgttgatgtggattcaggatcagtctatgacatttatctaccaacacatgtaagaaagaacccacactctatgatccagtgtagcatcaaaccccatgcaatcatcatcctccccaatacagatggaatggagcttctggtgtgctatgaagatgagggggtttatgtaaacacatatggaaggatcaccaaggatgtagttctacagtggggagagatgcctacatcagtagcatatattcgatccaatcagacaatgggctggggagagaaggccatagagatccgatctgtggaaactggtcacttggatggtgtgttcatgcacaaaagggctcaaagactaaaattcttgtgtgaacgcaatgacaaggtgttctttgcctctgttcggtctggtggcagcagtcaggtttatttcatgaccttaggcaggacttctcttctgagctggtagaagcagtgtgatccagggattactggcctccagagtcttcaagatcctgagaacttggaattccttgtaactggagctcggagctgcaccgagggcaaccaggacagctgtgtgtgcagacctcatgtgttgggttctctcccctccttcctgttcctcttatataccagtttatccccattctttttttttttcttactccaaaataaatcaaggctgcaatgcagctggtgctgttcagattctaccatcaggtgctataagtgtttgggattgagcatcatactggaaagcaaacacctttcctccagctccagaattccttgtctctgaatgactctgtcttgtgggtgtctgacagtggcgacgatgaacatgccgttggttttattggcagtgggcacaaggaggtgagaagtggtggtaaaaggagcggagtgctgaagcagagagcagatttaatatagtaacattaacagtgtatttaattgacatttcttttttgtaatgtgacgatatgtggacaaagaagaagatgcaggtttaagaagttaatatttataaaatgtgaaagacacagttactaggataacttttttgtgggtggggcttgggagatggggtggggtgggttaaggggtcccattttgtttctttggatttggggtgggggtcctggccaagaactcagtcatttttctgtgtaccaggttgcctaaatcatgtgcagatggttctaaaaaaaaaaaaaaaaaaaaaaaaaaaggaaaaaaaaaaagaaaaagaaaacgtgtgcattttgtataatggccagaactttgtcgtgtgacagtattagcactgcctcagttaaaggtttaatttttgtttaaacctagacgtgcaacaaaagttttaccacagtctgcacttgcagaagaaagaaaaaaattcaaaccacatgtttattttttttttgcctacctcattgttcttaatgcattgagaggtgatttagtttatatgtttttggaagaaaccattaatgtttaatttaatcttaataccaaaacgaccagattgaagtttgacttttattgtcacaaatcagcaggcacaagaactgtccatgaagatgggaaatagccttaaggctgatgcagtttacttacaagtttagaaaccagaatgctttgtttttaccagattcaccattagaggttgatggggcaactgcagcccatgacacaagatctcattgttctcgatgtagaggggttggtagcagacaggtggttacattagaatagtcacacaaactgttcagtgttgcaggaaccttttcttgggggtgggggagtttcccttttctaaaaatgcaatgcactaaaactattttaagaatgtagttaattctgcttattcataaagtgggcatcttctgtgttttaggtgtaatatcgaagtcctggcttttctcgttttctcacttgctctcttgttctctgtttttttaaaccaattttactttatgaatatattcatgacatttgtaataaatgtcttgagaaagaatttgtttcatggcttcatggtcatcactcaagctcccgtaaggatattaccgtctcaggaaaggatcaggactccatgtcacagtcctgccatcttactttcctcttgtcgagttctgagtggaaataactgcattatggctgctttaacctcagtcatcaaaagaaacttgctgttttttaggcttgatctttttcctttgtggttaattttcctgtatattgtgaaaatgggggattttccctctgctcccacccacctaaacacagcagccatttgtacctgtttgcttcccatcccacttggcacccactctgacctcttgtcagtttcctgttcctggttccatctttttgaaaaaggccctcctttgagctacaaacatctggtaagacaagtacatccactcatgaatgcagacacagcagctggtggttttgtgtatacctgtaaagacaagctgagaagcttactttttggggaagtaaaagaagatggaaatggatgtttcatttgtatgagtttggagcagtgctgaaggccaaagccgcctactggtttgtagttaacctagagaaggttgaaaaattaatcctacctttaaagggatttgaggtaggctggattccatcgccacaggactttagttagaattaaattcctgcttgtaatttatatccatgtttaggcttttcataagatgaaacatgccacagtgaacacactcgtgtacatatcaagagaagaaggaaaggcacaggtggagaacagtaaaaggtgggcagatgtctttgaagaaatgctcaatgtctgatgctaagtgggagaaggcagagaacaaaggatgtggcataatggtcttaacattatccaaagacttgaagctccatgtctgtaagtcaaatgttacacaaaaaaaaatgcaaatggtgtttcattggaattaccaagtgcttagaacttgctggctttcccataggtggtaaaggggtctgagctcacaccgagttgtgcttggcttgcttgtgcagctccaggcacccggtgggcactctggtggtgtttgtggtgaactgaattgaatccattgttgggcttaagttactgaaattggaacaccctttgtccttctcggcgggggcttcctggtctgtgctttacttggcttttttccttcccgtcttagcctcacccccttgtcaaccagattgagttgctatagcttgatgcagggacccagtgaagtttctccgttaaagattgggagtcgtcgaaatgtttagattcttttaggaaaggaattattttccccccttttacagggtagtaacttctccacagaagtgccaatatggcaaaattacacaagaaaacagtattgcaatgacaccattacataaggaacattgaactgttagaggagtgctcttccaaacaaaacaaaaatgtctctaggtttagtcagagctttcacaagtaataacctttctgtattaaaatcagagtaaccctttctgtattgagtgcagtgttttttactcttttctcatgcacatgttacgttggagaaaatgtttacaaaaatggttttgttacactaatgcgcaccacatatttatggtttattttaagtgactttttatgggttatttaggttttcgtcttagttgtagcacacttaccctaattttgccaattattaatttgctaaatagtaatacaaatgacaaactgcattaaatttactaattataaaagctgcaaagcagactggtggcaagtacacagcccttttttttgcagtgctaacttgtctactgtgtattatgaaaattactgttgtccccccacccttttttccttaaataaagtaaaaatgacaccta

SEQ ID NO: 317840 - DNA, 7365 bp, Homo sapiens
caaacttttagatactgtaaatattgcattaaaaattgtataactgcttaaaaataccattttttattcacattagacccagttaatataaaatataatagtttgaggatcataatgtgaaaagtagaatgtttttgaggtaaaatgaaaaagaatgttagggaatatttgagtcagatatttgataattgggtagtgatgaagagcaaagtggtcctcctgtgcccatgtgcttctgagagagaatgagcacttcagaattgctgcacttgggtgtgccgtagaataccagacactgtcagtcttctggaccaaatatatggagcgaatacactggactatgaaatgagctttcagttatttaggtgcctccaaattattatgaattattgaggagcatcacgtttctaggtctttagaaaagagagggcatggcggttaaactggttttcccaatttctccaagatatgttgctcaccttgtgtcttgtctgccctatagcttgttatggagttctgtggggctgggtccattacagaccttgtgaagaacaccaaagggaacacactcaaagaagactggatcgcttacatctccagagaaatcctgaggggactggcacatcttcacattcatcatgtgattcaccgggatatcaagggccagaatgtgttgctgactgagaatgcagaggtgaaacttgttgactttggtgtgagtgctcagctggacaggactgtggggcggagaaatacgttcataggcactccctactggatggctcctgaggtcatcgcctgtgatgagaacccagatgccacctatgattacagaagtgatctttggtcttgtggcattacagccattgagatggcagaaggtgctccccctctctgtgacatgcatccaatgagagcactgtttctcattcccagaaaccctcctccccggctgaagtcaaaaaaatggtcgaagaagttttttagttttatagaagggtgcctggtgaagaattacatgcagcggccctctacagagcagcttttgaaacatccttttataagggatcagccaaatgaaaggcaagttagaatccagcttaaggatcatatagatcgtaccaggaagaagagaggcgagaaagatgaaactgagtatgagtacagtgggagtgaggaagaagaggaggaagtgcctgaacaggaaggagagccaagttccattgtgaacgtgcctggtgagtctactcttcgccgagatttcctgagactgcagcaggagaacaaggaacgttccgaggctcttcggagacaacagttactacaggagcaacagctccgggagcaggaagaatataaaaggcaactgctggcagagagacagaagcggattgagcagcagaaagaacagaggcgacggctagaagagcaacaaaggagagagcgggaagctagaaggcagcaggaacgtgaacagcgaaggagagaacaagaagaaaagaggcgtctagaggagttggagagaaggcgcaaagaagaagaggagaggagacgggcagaagaagaaaagaggagagttgaaagagaacaggagtatatcaggcgacagctagaagaggagcagcggcacttggaagtccttcagcagcagctgctccaggagcaggccatgttactggagtgccgatggcgggagatggaggagcaccggcaggcagagaggctccagaggcagttgcaacaagaacaagcatatctcctgtctctacagcatgaccataggaggccgcacccgcagcactcgcagcagccgccaccaccgcagcaggaaaggagcaagccaagcttccatgctcccgagcccaaagcccactacgagcctgctgaccgagcgcgagaggtggaagatagatttaggaaaactaaccacagctcccctgaagcccagtctaagcagacaggcagagtattggagccaccagtgccttcccgatcagagtctttttccaatggcaactccgagtctgtgcatcccgccctgcagagaccagcggagccacaggttcctgtgagaacaacatctcgctcccctgttctgtcccgtcgagattccccactgcagggcagtgggcagcagaatagccaggcaggacagagaaactccaccagcagtattgagcccaggcttctgtgggagagagtggagaagctggtgcccagacctggcagtggcagctcctcagggtccagcaactcaggatcccagcccgggtctcaccctgggtctcagagtggctccggggaacgcttcagagtgagatcatcatccaagtctgaaggctctccatctcagcgcctggaaaatgcagtgaaaaaacctgaagataaaaaggaagttttcagacccctcaagcctgctgcaagtgatctgaccgcactggccaaagagcttcgagcagtggaagatgtacggccacctcacaaagtaacggactactcctcatccagtgaggagtcggggacgacggatgaggaggacgacgatgtggagcaggaaggggctgacgagtccacctcaggaccagaggacaccagagcagcgtcatctctgaatttgagcaatggtgaaacggaatctgtgaaaaccatgattgtccatgatgatgtagaaagtgagccggccatgaccccatccaaggagggcactctaatcgtccgccagactcagtccgctagtagcacactccagaaacacaaatcttcctcctcctttacaccttttatagaccccagattactacagatttctccatctagcggaacaacagtgacatctgtggtgggattttcctgtgatgggatgagaccagaagccataaggcaagatcctacccggaaaggctcagtggtcaatgtgaatcctaccaacactaggccacagagtgacaccccggagattcgtaaatacaagaagaggtttaactctgagattctgtgtgctgccttatggggagtgaatttgctagtgggtacagagagtggcctgatgctgctggacagaagtggccaagggaaggtctatcctcttatcaaccgaagacgatttcaacaaatggacgtacttgagggcttgaatgtcttggtgacaatatctggcaaaaaggataagttacgtgtctactatttgtcctggttaagaaataaaatacttcacaatgatccagaagttgagaagaagcagggatggacaaccgtaggggatttggaaggatgtgtacattataaagttgtaaaatatgaaagaatcaaatttctggtgattgctttgaagagttctgtggaagtctatgcgtgggcaccaaagccatatcacaaatttatggcctttaagtcatttggagaattggtacataagccattactggtggatctcactgttgaggaaggccagaggttgaaagtgatctatggatcctgtgctggattccatgctgttgatgtggattcaggatcagtctatgacatttatctaccaacacatatccagtgtagcatcaaaccccatgcaatcatcatcctccccaatacagatggaatggagcttctggtgtgctatgaagatgagggggtttatgtaaacacatatggaaggatcaccaaggatgtagttctacagtggggagagatgcctacatcagtagcatatattcgatccaatcagacaatgggctggggagagaaggccatagagatccgatctgtggaaactggtcacttggatggtgtgttcatgcacaaaagggctcaaagactaaaattcttgtgtgaacgcaatgacaaggtgttctttgcctctgttcggtctggtggcagcagtcaggtttatttcatgaccttaggcaggacttctcttctgagctggtagaagcagtgtgatccagggattactggcctccagagtcttcaagatcctgagaacttggaattccttgtaactggagctcggagctgcaccgagggcaaccaggacagctgtgtgtgcagacctcatgtgttgggttctctcccctccttcctgttcctcttatataccagtttatccccattctttttttttttcttactccaaaataaatcaaggctgcaatgcagctggtgctgttcagattctaccatcaggtgctataagtgtttgggattgagcatcatactggaaagcaaacacctttcctccagctccagaattccttgtctctgaatgactctgtcttgtgggtgtctgacagtggcgacgatgaacatgccgttggttttattggcagtgggcacaaggaggtgagaagtggtggtaaaaggagcggagtgctgaagcagagagcagatttaatatagtaacattaacagtgtatttaattgacatttcttttttgtaatgtgacgatatgtggacaaagaagaagatgcaggtttaagaagttaatatttataaaatgtgaaagacacagttactaggataacttttttgtgggtggggcttgggagatggggtggggtgggttaaggggtcccattttgtttctttggatttggggtgggggtcctggccaagaactcagtcatttttctgtgtaccaggttgcctaaatcatgtgcagatggttctaaaaaaaaaaaaaaaaaaaaaaaaaaaggaaaaaaaaaaagaaaaagaaaacgtgtgcattttgtataatggccagaactttgtcgtgtgacagtattagcactgcctcagttaaaggtttaatttttgtttaaacctagacgtgcaacaaaagttttaccacagtctgcacttgcagaagaaagaaaaaaattcaaaccacatgtttattttttttttgcctacctcattgttcttaatgcattgagaggtgatttagtttatatgtttttggaagaaaccattaatgtttaatttaatcttaataccaaaacgaccagattgaagtttgacttttattgtcacaaatcagcaggcacaagaactgtccatgaagatgggaaatagccttaaggctgatgcagtttacttacaagtttagaaaccagaatgctttgtttttaccagattcaccattagaggttgatggggcaactgcagcccatgacacaagatctcattgttctcgatgtagaggggttggtagcagacaggtggttacattagaatagtcacacaaactgttcagtgttgcaggaaccttttcttgggggtgggggagtttcccttttctaaaaatgcaatgcactaaaactattttaagaatgtagttaattctgcttattcataaagtgggcatcttctgtgttttaggtgtaatatcgaagtcctggcttttctcgttttctcacttgctctcttgttctctgtttttttaaaccaattttactttatgaatatattcatgacatttgtaataaatgtcttgagaaagaatttgtttcatggcttcatggtcatcactcaagctcccgtaaggatattaccgtctcaggaaaggatcaggactccatgtcacagtcctgccatcttactttcctcttgtcgagttctgagtggaaataactgcattatggctgctttaacctcagtcatcaaaagaaacttgctgttttttaggcttgatctttttcctttgtggttaattttcctgtatattgtgaaaatgggggattttccctctgctcccacccacctaaacacagcagccatttgtacctgtttgcttcccatcccacttggcacccactctgacctcttgtcagtttcctgttcctggttccatctttttgaaaaaggccctcctttgagctacaaacatctggtaagacaagtacatccactcatgaatgcagacacagcagctggtggttttgtgtatacctgtaaagacaagctgagaagcttactttttggggaagtaaaagaagatggaaatggatgtttcatttgtatgagtttggagcagtgctgaaggccaaagccgcctactggtttgtagttaacctagagaaggttgaaaaattaatcctacctttaaagggatttgaggtaggctggattccatcgccacaggactttagttagaattaaattcctgcttgtaatttatatccatgtttaggcttttcataagatgaaacatgccacagtgaacacactcgtgtacatatcaagagaagaaggaaaggcacaggtggagaacagtaaaaggtgggcagatgtctttgaagaaatgctcaatgtctgatgctaagtgggagaaggcagagaacaaaggatgtggcataatggtcttaacattatccaaagacttgaagctccatgtctgtaagtcaaatgttacacaaaaaaaaatgcaaatggtgtttcattggaattaccaagtgcttagaacttgctggctttcccataggtggtaaaggggtctgagctcacaccgagttgtgcttggcttgcttgtgcagctccaggcacccggtgggcactctggtggtgtttgtggtgaactgaattgaatccattgttgggcttaagttactgaaattggaacaccctttgtccttctcggcgggggcttcctggtctgtgctttacttggcttttttccttcccgtcttagcctcacccccttgtcaaccagattgagttgctatagcttgatgcagggacccagtgaagtttctccgttaaagattgggagtcgtcgaaatgtttagattcttttaggaaaggaattattttccccccttttacagggtagtaacttctccacagaagtgccaatatggcaaaattacacaagaaaacagtattgcaatgacaccattacataaggaacattgaactgttagaggagtgctcttccaaacaaaacaaaaatgtctctaggtttagtcagagctttcacaagtaataacctttctgtattaaaatcagagtaaccctttctgtattgagtgcagtgttttttactcttttctcatgcacatgttacgttggagaaaatgtttacaaaaatggttttgttacactaatgcgcaccacatatttatggtttattttaagtgactttttatgggttatttaggttttcgtcttagttgtagcacacttaccctaattttgccaattattaatttgctaaatagtaatacaaatgacaaactgcattaaatttactaattataaaagctgcaaagcagactggtggcaagtacacagcccttttttttgcagtgctaacttgtctactgtgtattatgaaaattactgttgtccccccacccttttttccttaaataaagtaaaaatgacaccta

SEQ ID NO: 317841 - DNA, 7434 bp, Homo sapiens
caaacttttagatactgtaaatattgcattaaaaattgtataactgcttaaaaataccattttttattcacattagacccagttaatataaaatataatagtttgaggatcataatgtgaaaagtagaatgtttttgaggtaaaatgaaaaagaatgttagggaatatttgagtcagatatttgataattgggtagtgatgaagagcaaagtggtcctcctgtgcccatgtgcttctgagagagaatgagcacttcagaattgctgcacttgggtgtgccgtagaataccagacactgtcagtcttctggaccaaatatatggagcgaatacactggactatgaaatgagctttcagttatttaggtgcctccaaattattatgaattattgaggagcatcacgtttctaggtctttagaaaagagagggcatggcggttaaactggttttcccaatttctccaagatatgttgctcaccttgtgtcttgtctgccctatagcttgttatggagttctgtggggctgggtccattacagaccttgtgaagaacaccaaagggaacacactcaaagaagactggatcgcttacatctccagagaaatcctgaggggactggcacatcttcacattcatcatgtgattcaccgggatatcaagggccagaatgtgttgctgactgagaatgcagaggtgaaacttgttgactttggtgtgagtgctcagctggacaggactgtggggcggagaaatacgttcataggcactccctactggatggctcctgaggtcatcgcctgtgatgagaacccagatgccacctatgattacagaagtgatctttggtcttgtggcattacagccattgagatggcagaaggtgctccccctctctgtgacatgcatccaatgagagcactgtttctcattcccagaaaccctcctccccggctgaagtcaaaaaaatggtcgaagaagttttttagttttatagaagggtgcctggtgaagaattacatgcagcggccctctacagagcagcttttgaaacatccttttataagggatcagccaaatgaaaggcaagttagaatccagcttaaggatcatatagatcgtaccaggaagaagagaggcgagaaagatgaaactgagtatgagtacagtgggagtgaggaagaagaggaggaagtgcctgaacaggaaggagagccaagttccattgtgaacgtgcctggtgagtctactcttcgccgagatttcctgagactgcagcaggagaacaaggaacgttccgaggctcttcggagacaacagttactacaggagcaacagctccgggagcaggaagaatataaaaggcaactgctggcagagagacagaagcggattgagcagcagaaagaacagaggcgacggctagaagagcaacaaaggagagagcgggaagctagaaggcagcaggaacgtgaacagcgaaggagagaacaagaagaaaagaggcgtctagaggagttggagagaaggcgcaaagaagaagaggagaggagacgggcagaagaagaaaagaggagagttgaaagagaacaggagtatatcaggcgacagctagaagaggagcagcggcacttggaagtccttcagcagcagctgctccaggagcaggccatgttactggagtgccgatggcgggagatggaggagcaccggcaggcagagaggctccagaggcagttgcaacaagaacaagcatatctcctgtctctacagcatgaccataggaggccgcacccgcagcactcgcagcagccgccaccaccgcagcaggaaaggagcaagccaagcttccatgctcccgagcccaaagcccactacgagcctgctgaccgagcgcgagaggtacagtggtcccacctggcatctctcaagaacaatgtttcccctgtctcgcgatcccattccttcagtgacccttctcccaaatttgcacaccaccatcttcgttctcaggacccatgtccaccttcccgcagtgaggtgctcagtcagagctctgactctaagtcagaggcgcctgaccctacccaaaaggcttggtctagatcagacagtgacgaggtgcctccaagggttcctgtgagaacaacatctcgctcccctgttctgtcccgtcgagattccccactgcagggcagtgggcagcagaatagccaggcaggacagagaaactccaccagcagtattgagcccaggcttctgtgggagagagtggagaagctggtgcccagacctggcagtggcagctcctcagggtccagcaactcaggatcccagcccgggtctcaccctgggtctcagagtggctccggggaacgcttcagagtgagatcatcatccaagtctgaaggctctccatctcagcgcctggaaaatgcagtgaaaaaacctgaagataaaaaggaagttttcagacccctcaagcctgctgcaagtgatctgaccgcactggccaaagagcttcgagcagtggaagatgtacggccacctcacaaagtaacggactactcctcatccagtgaggagtcggggacgacggatgaggaggacgacgatgtggagcaggaaggggctgacgagtccacctcaggaccagaggacaccagagcagcgtcatctctgaatttgagcaatggtgaaacggaatctgtgaaaaccatgattgtccatgatgatgtagaaagtgagccggccatgaccccatccaaggagggcactctaatcgtccgccagactcagtccgctagtagcacactccagaaacacaaatcttcctcctcctttacaccttttatagaccccagattactacagatttctccatctagcggaacaacagtgacatctgtggtgggattttcctgtgatgggatgagaccagaagccataaggcaagatcctacccggaaaggctcagtggtcaatgtgaatcctaccaacactaggccacagagtgacaccccggagattcgtaaatacaagaagaggtttaactctgagattctgtgtgctgccttatggggagtgaatttgctagtgggtacagagagtggcctgatgctgctggacagaagtggccaagggaaggtctatcctcttatcaaccgaagacgatttcaacaaatggacgtacttgagggcttgaatgtcttggtgacaatatctggcaaaaaggataagttacgtgtctactatttgtcctggttaagaaataaaatacttcacaatgatccagaagttgagaagaagcagggatggacaaccgtaggggatttggaaggatgtgtacattataaagttgtaaaatatgaaagaatcaaatttctggtgattgctttgaagagttctgtggaagtctatgcgtgggcaccaaagccatatcacaaatttatggcctttaagtcatttggagaattggtacataagccattactggtggatctcactgttgaggaaggccagaggttgaaagtgatctatggatcctgtgctggattccatgctgttgatgtggattcaggatcagtctatgacatttatctaccaacacatatccagtgtagcatcaaaccccatgcaatcatcatcctccccaatacagatggaatggagcttctggtgtgctatgaagatgagggggtttatgtaaacacatatggaaggatcaccaaggatgtagttctacagtggggagagatgcctacatcagtagcatatattcgatccaatcagacaatgggctggggagagaaggccatagagatccgatctgtggaaactggtcacttggatggtgtgttcatgcacaaaagggctcaaagactaaaattcttgtgtgaacgcaatgacaaggtgttctttgcctctgttcggtctggtggcagcagtcaggtttatttcatgaccttaggcaggacttctcttctgagctggtagaagcagtgtgatccagggattactggcctccagagtcttcaagatcctgagaacttggaattccttgtaactggagctcggagctgcaccgagggcaaccaggacagctgtgtgtgcagacctcatgtgttgggttctctcccctccttcctgttcctcttatataccagtttatccccattctttttttttttcttactccaaaataaatcaaggctgcaatgcagctggtgctgttcagattctaccatcaggtgctataagtgtttgggattgagcatcatactggaaagcaaacacctttcctccagctccagaattccttgtctctgaatgactctgtcttgtgggtgtctgacagtggcgacgatgaacatgccgttggttttattggcagtgggcacaaggaggtgagaagtggtggtaaaaggagcggagtgctgaagcagagagcagatttaatatagtaacattaacagtgtatttaattgacatttcttttttgtaatgtgacgatatgtggacaaagaagaagatgcaggtttaagaagttaatatttataaaatgtgaaagacacagttactaggataacttttttgtgggtggggcttgggagatggggtggggtgggttaaggggtcccattttgtttctttggatttggggtgggggtcctggccaagaactcagtcatttttctgtgtaccaggttgcctaaatcatgtgcagatggttctaaaaaaaaaaaaaaaaaaaaaaaaaaaggaaaaaaaaaaagaaaaagaaaacgtgtgcattttgtataatggccagaactttgtcgtgtgacagtattagcactgcctcagttaaaggtttaatttttgtttaaacctagacgtgcaacaaaagttttaccacagtctgcacttgcagaagaaagaaaaaaattcaaaccacatgtttattttttttttgcctacctcattgttcttaatgcattgagaggtgatttagtttatatgtttttggaagaaaccattaatgtttaatttaatcttaataccaaaacgaccagattgaagtttgacttttattgtcacaaatcagcaggcacaagaactgtccatgaagatgggaaatagccttaaggctgatgcagtttacttacaagtttagaaaccagaatgctttgtttttaccagattcaccattagaggttgatggggcaactgcagcccatgacacaagatctcattgttctcgatgtagaggggttggtagcagacaggtggttacattagaatagtcacacaaactgttcagtgttgcaggaaccttttcttgggggtgggggagtttcccttttctaaaaatgcaatgcactaaaactattttaagaatgtagttaattctgcttattcataaagtgggcatcttctgtgttttaggtgtaatatcgaagtcctggcttttctcgttttctcacttgctctcttgttctctgtttttttaaaccaattttactttatgaatatattcatgacatttgtaataaatgtcttgagaaagaatttgtttcatggcttcatggtcatcactcaagctcccgtaaggatattaccgtctcaggaaaggatcaggactccatgtcacagtcctgccatcttactttcctcttgtcgagttctgagtggaaataactgcattatggctgctttaacctcagtcatcaaaagaaacttgctgttttttaggcttgatctttttcctttgtggttaattttcctgtatattgtgaaaatgggggattttccctctgctcccacccacctaaacacagcagccatttgtacctgtttgcttcccatcccacttggcacccactctgacctcttgtcagtttcctgttcctggttccatctttttgaaaaaggccctcctttgagctacaaacatctggtaagacaagtacatccactcatgaatgcagacacagcagctggtggttttgtgtatacctgtaaagacaagctgagaagcttactttttggggaagtaaaagaagatggaaatggatgtttcatttgtatgagtttggagcagtgctgaaggccaaagccgcctactggtttgtagttaacctagagaaggttgaaaaattaatcctacctttaaagggatttgaggtaggctggattccatcgccacaggactttagttagaattaaattcctgcttgtaatttatatccatgtttaggcttttcataagatgaaacatgccacagtgaacacactcgtgtacatatcaagagaagaaggaaaggcacaggtggagaacagtaaaaggtgggcagatgtctttgaagaaatgctcaatgtctgatgctaagtgggagaaggcagagaacaaaggatgtggcataatggtcttaacattatccaaagacttgaagctccatgtctgtaagtcaaatgttacacaaaaaaaaatgcaaatggtgtttcattggaattaccaagtgcttagaacttgctggctttcccataggtggtaaaggggtctgagctcacaccgagttgtgcttggcttgcttgtgcagctccaggcacccggtgggcactctggtggtgtttgtggtgaactgaattgaatccattgttgggcttaagttactgaaattggaacaccctttgtccttctcggcgggggcttcctggtctgtgctttacttggcttttttccttcccgtcttagcctcacccccttgtcaaccagattgagttgctatagcttgatgcagggacccagtgaagtttctccgttaaagattgggagtcgtcgaaatgtttagattcttttaggaaaggaattattttccccccttttacagggtagtaacttctccacagaagtgccaatatggcaaaattacacaagaaaacagtattgcaatgacaccattacataaggaacattgaactgttagaggagtgctcttccaaacaaaacaaaaatgtctctaggtttagtcagagctttcacaagtaataacctttctgtattaaaatcagagtaaccctttctgtattgagtgcagtgttttttactcttttctcatgcacatgttacgttggagaaaatgtttacaaaaatggttttgttacactaatgcgcaccacatatttatggtttattttaagtgactttttatgggttatttaggttttcgtcttagttgtagcacacttaccctaattttgccaattattaatttgctaaatagtaatacaaatgacaaactgcattaaatttactaattataaaagctgcaaagcagactggtggcaagtacacagcccttttttttgcagtgctaacttgtctactgtgtattatgaaaattactgttgtccccccacccttttttccttaaataaagtaaaaatgacaccta

SEQ ID NO: 317842 - DNA, 6894 bp, Homo sapiens
caaacttttagatactgtaaatattgcattaaaaattgtataactgcttaaaaataccattttttattcacattagacccagttaatataaaatataatagtttgaggatcataatgtgaaaagtagaatgtttttgaggtaaaatgaaaaagaatgttagggaatatttgagtcagatatttgataattgggtagtgatgaagagcaaagtggtcctcctgtgcccatgtgcttctgagagagaatgagcacttcagaattgctgcacttgggtgtgccgtagaataccagacactgtcagtcttctggaccaaatatatggagcgaatacactggactatgaaatgagctttcagttatttaggtgcctccaaattattatgaattattgaggagcatcacgtttctaggtctttagaaaagagagggcatggcggttaaactggttttcccaatttctccaagatatgttgctcaccttgtgtcttgtctgccctatagcttgttatggagttctgtggggctgggtccattacagaccttgtgaagaacaccaaagggaacacactcaaagaagactggatcgcttacatctccagagaaatcctgaggggactggcacatcttcacattcatcatgtgattcaccgggatatcaagggccagaatgtgttgctgactgagaatgcagaggtgaaacttgttgactttggtgtgagtgctcagctggacaggactgtggggcggagaaatacgttcataggcactccctactggatggctcctgaggtcatcgcctgtgatgagaacccagatgccacctatgattacagaagtgatctttggtcttgtggcattacagccattgagatggcagaaggtgctccccctctctgtgacatgcatccaatgagagcactgtttctcattcccagaaaccctcctccccggctgaagtcaaaaaaatggtcgaagaagttttttagttttatagaagggtgcctggtgaagaattacatgcagcggccctctacagagcagcttttgaaacatccttttataagggatcagccaaatgaaaggcaagttagaatccagcttaaggatcatatagatcgtaccaggaagaagagaggcgagaaagatgaaactgagtatgagtacagtgggagtgaggaagaagaggaggaagtgcctgaacaggaaggagagccaagttccattgtgaacgtgcctggtgagtctactcttcgccgagatttcctgagactgcagcaggagaacaaggaacgttccgaggctcttcggagacaacagttactacaggagcaacagctccgggagcaggaagaatataaaaggcaactgctggcagagagacagaagcggattgagcagcagaaagaacagaggcgacggctagaagagcaacaaaggagagagcgggaagctagaaggcagcaggaacgtgaacagcgaaggagagaacaagaagaaaagaggcgtctagaggagttggagagaaggcgcaaagaagaagaggagaggagacgggcagaagaagaaaagaggagagttgaaagagaacaggttcctgtgagaacaacatctcgctcccctgttctgtcccgtcgagattccccactgcagggcagtgggcagcagaatagccaggcaggacagagaaactccaccagcagtattgagcccaggcttctgtgggagagagtggagaagctggtgcccagacctggcagtggcagctcctcagggtccagcaactcaggatcccagcccgggtctcaccctgggtctcagagtggctccggggaacgcttcagagtgagatcatcatccaagtctgaaggctctccatctcagcgcctggaaaatgcagtgaaaaaacctgaagataaaaaggaagttttcagacccctcaagcctgctgcaagtgatctgaccgcactggccaaagagcttcgagcagtggaagatgtacggccacctcacaaagtaacggactactcctcatccagtgaggagtcggggacgacggatgaggaggacgacgatgtggagcaggaaggggctgacgagtccacctcaggaccagaggacaccagagcagcgtcatctctgaatttgagcaatggtgaaacggaatctgtgaaaaccatgattgtccatgatgatgtagaaagtgagccggccatgaccccatccaaggagggcactctaatcgtccgccagactcagtccgctagtagcacactccagaaacacaaatcttcctcctcctttacaccttttatagaccccagattactacagatttctccatctagcggaacaacagtgacatctgtggtgggattttcctgtgatgggatgagaccagaagccataaggcaagatcctacccggaaaggctcagtggtcaatgtgaatcctaccaacactaggccacagagtgacaccccggagattcgtaaatacaagaagaggtttaactctgagattctgtgtgctgccttatggggagtgaatttgctagtgggtacagagagtggcctgatgctgctggacagaagtggccaagggaaggtctatcctcttatcaaccgaagacgatttcaacaaatggacgtacttgagggcttgaatgtcttggtgacaatatctggcaaaaaggataagttacgtgtctactatttgtcctggttaagaaataaaatacttcacaatgatccagaagttgagaagaagcagggatggacaaccgtaggggatttggaaggatgtgtacattataaagttgtaaaatatgaaagaatcaaatttctggtgattgctttgaagagttctgtggaagtctatgcgtgggcaccaaagccatatcacaaatttatggcctttaagtcatttggagaattggtacataagccattactggtggatctcactgttgaggaaggccagaggttgaaagtgatctatggatcctgtgctggattccatgctgttgatgtggattcaggatcagtctatgacatttatctaccaacacatatccagtgtagcatcaaaccccatgcaatcatcatcctccccaatacagatggaatggagcttctggtgtgctatgaagatgagggggtttatgtaaacacatatggaaggatcaccaaggatgtagttctacagtggggagagatgcctacatcagtagcatatattcgatccaatcagacaatgggctggggagagaaggccatagagatccgatctgtggaaactggtcacttggatggtgtgttcatgcacaaaagggctcaaagactaaaattcttgtgtgaacgcaatgacaaggtgttctttgcctctgttcggtctggtggcagcagtcaggtttatttcatgaccttaggcaggacttctcttctgagctggtagaagcagtgtgatccagggattactggcctccagagtcttcaagatcctgagaacttggaattccttgtaactggagctcggagctgcaccgagggcaaccaggacagctgtgtgtgcagacctcatgtgttgggttctctcccctccttcctgttcctcttatataccagtttatccccattctttttttttttcttactccaaaataaatcaaggctgcaatgcagctggtgctgttcagattctaccatcaggtgctataagtgtttgggattgagcatcatactggaaagcaaacacctttcctccagctccagaattccttgtctctgaatgactctgtcttgtgggtgtctgacagtggcgacgatgaacatgccgttggttttattggcagtgggcacaaggaggtgagaagtggtggtaaaaggagcggagtgctgaagcagagagcagatttaatatagtaacattaacagtgtatttaattgacatttcttttttgtaatgtgacgatatgtggacaaagaagaagatgcaggtttaagaagttaatatttataaaatgtgaaagacacagttactaggataacttttttgtgggtggggcttgggagatggggtggggtgggttaaggggtcccattttgtttctttggatttggggtgggggtcctggccaagaactcagtcatttttctgtgtaccaggttgcctaaatcatgtgcagatggttctaaaaaaaaaaaaaaaaaaaaaaaaaaaggaaaaaaaaaaagaaaaagaaaacgtgtgcattttgtataatggccagaactttgtcgtgtgacagtattagcactgcctcagttaaaggtttaatttttgtttaaacctagacgtgcaacaaaagttttaccacagtctgcacttgcagaagaaagaaaaaaattcaaaccacatgtttattttttttttgcctacctcattgttcttaatgcattgagaggtgatttagtttatatgtttttggaagaaaccattaatgtttaatttaatcttaataccaaaacgaccagattgaagtttgacttttattgtcacaaatcagcaggcacaagaactgtccatgaagatgggaaatagccttaaggctgatgcagtttacttacaagtttagaaaccagaatgctttgtttttaccagattcaccattagaggttgatggggcaactgcagcccatgacacaagatctcattgttctcgatgtagaggggttggtagcagacaggtggttacattagaatagtcacacaaactgttcagtgttgcaggaaccttttcttgggggtgggggagtttcccttttctaaaaatgcaatgcactaaaactattttaagaatgtagttaattctgcttattcataaagtgggcatcttctgtgttttaggtgtaatatcgaagtcctggcttttctcgttttctcacttgctctcttgttctctgtttttttaaaccaattttactttatgaatatattcatgacatttgtaataaatgtcttgagaaagaatttgtttcatggcttcatggtcatcactcaagctcccgtaaggatattaccgtctcaggaaaggatcaggactccatgtcacagtcctgccatcttactttcctcttgtcgagttctgagtggaaataactgcattatggctgctttaacctcagtcatcaaaagaaacttgctgttttttaggcttgatctttttcctttgtggttaattttcctgtatattgtgaaaatgggggattttccctctgctcccacccacctaaacacagcagccatttgtacctgtttgcttcccatcccacttggcacccactctgacctcttgtcagtttcctgttcctggttccatctttttgaaaaaggccctcctttgagctacaaacatctggtaagacaagtacatccactcatgaatgcagacacagcagctggtggttttgtgtatacctgtaaagacaagctgagaagcttactttttggggaagtaaaagaagatggaaatggatgtttcatttgtatgagtttggagcagtgctgaaggccaaagccgcctactggtttgtagttaacctagagaaggttgaaaaattaatcctacctttaaagggatttgaggtaggctggattccatcgccacaggactttagttagaattaaattcctgcttgtaatttatatccatgtttaggcttttcataagatgaaacatgccacagtgaacacactcgtgtacatatcaagagaagaaggaaaggcacaggtggagaacagtaaaaggtgggcagatgtctttgaagaaatgctcaatgtctgatgctaagtgggagaaggcagagaacaaaggatgtggcataatggtcttaacattatccaaagacttgaagctccatgtctgtaagtcaaatgttacacaaaaaaaaatgcaaatggtgtttcattggaattaccaagtgcttagaacttgctggctttcccataggtggtaaaggggtctgagctcacaccgagttgtgcttggcttgcttgtgcagctccaggcacccggtgggcactctggtggtgtttgtggtgaactgaattgaatccattgttgggcttaagttactgaaattggaacaccctttgtccttctcggcgggggcttcctggtctgtgctttacttggcttttttccttcccgtcttagcctcacccccttgtcaaccagattgagttgctatagcttgatgcagggacccagtgaagtttctccgttaaagattgggagtcgtcgaaatgtttagattcttttaggaaaggaattattttccccccttttacagggtagtaacttctccacagaagtgccaatatggcaaaattacacaagaaaacagtattgcaatgacaccattacataaggaacattgaactgttagaggagtgctcttccaaacaaaacaaaaatgtctctaggtttagtcagagctttcacaagtaataacctttctgtattaaaatcagagtaaccctttctgtattgagtgcagtgttttttactcttttctcatgcacatgttacgttggagaaaatgtttacaaaaatggttttgttacactaatgcgcaccacatatttatggtttattttaagtgactttttatgggttatttaggttttcgtcttagttgtagcacacttaccctaattttgccaattattaatttgctaaatagtaatacaaatgacaaactgcattaaatttactaattataaaagctgcaaagcagactggtggcaagtacacagcccttttttttgcagtgctaacttgtctactgtgtattatgaaaattactgttgtccccccacccttttttccttaaataaagtaaaaatgacaccta

SEQ ID NO: 317843 - DNA, 7176 bp, Homo sapiens
aattcgaggatccgggtaccatggcacagagcgacagagacatttattgttatttgttttttggtggcaaaaagggaaaatggcgaacgactcccctgcaaaaagtctggtggacatcgacctctcctccctgcgggatcctgctgggatttttgagctggtggaagtggttggaaatggcacctatggacaagtctataagggtcgacatgttaaaacgggtcagttggcagccatcaaagttatggatgtcactgaggatgaagaggaagaaatcaaactggagataaatatgctaaagaaatactctcatcacagaaacattgcaacatattatggtgctttcatcaaaaagagccctccaggacatgatgaccaactctggcttgttatggagttctgtggggctgggtccattacagaccttgtgaagaacaccaaagggaacacactcaaagaagactggatcgcttacatctccagagaaatcctgaggggactggcacatcttcacattcatcatgtgattcaccgggatatcaagggccagaatgtgttgctgactgagaatgcagaggtgaaacttgttgactttggtgtgagtgctcagctggacaggactgtggggcggagaaatacgttcataggcactccctactggatggctcctgaggtcatcgcctgtgatgagaacccagatgccacctatgattacagaagtgatctttggtcttgtggcattacagccattgagatggcagaaggtgctccccctctctgtgacatgcatccaatgagagcactgtttctcattcccagaaaccctcctccccggctgaagtcaaaaaaatggtcgaagaagttttttagttttatagaagggtgcctggtgaagaattacatgcagcggccctctacagagcagcttttgaaacatccttttataagggatcagccaaatgaaaggcaagttagaatccagcttaaggatcatatagatcgtaccaggaagaagagaggcgagaaagatgaaactgagtatgagtacagtgggagtgaggaagaagaggaggaagtgcctgaacaggaaggagagccaagttccattgtgaacgtgcctggtgagtctactcttcgccgagatttcctgagactgcagcaggagaacaaggaacgttccgaggctcttcggagacaacagttactacaggagcaacagctccgggagcaggaagaatataaaaggcaactgctggcagagagacagaagcggattgagcagcagaaagaacagaggcgacggctagaagagcaacaaaggagagagcgggaagctagaaggcagcaggaacgtgaacagcgaaggagagaacaagaagaaaagaggcgtctagaggagttggagagaaggcgcaaagaagaagaggagaggagacgggcagaagaagaaaagaggagagttgaaagagaacaggagtatatcaggcgacagctagaagaggagcagcggcacttggaagtccttcagcagcagctgctccaggagcaggccatgttactgcatgaccataggaggccgcacccgcagcactcgcagcagccgccaccaccgcagcaggaaaggagcaagccaagcttccatgctcccgagcccaaagcccactacgagcctgctgaccgagcgcgagaggtggaagatagatttaggaaaactaaccacagctcccctgaagcccagtctaagcagacaggcagagtattggagccaccagtgccttcccgatcagagtctttttccaatggcaactccgagtctgtgcatcccgccctgcagagaccagcggagccacaggttcctgtgagaacaacatctcgctcccctgttctgtcccgtcgagattccccactgcagggcagtgggcagcagaatagccaggcaggacagagaaactccaccagcagtattgagcccaggcttctgtgggagagagtggagaagctggtgcccagacctggcagtggcagctcctcagggtccagcaactcaggatcccagcccgggtctcaccctgggtctcagagtggctccggggaacgcttcagagtgagatcatcatccaagtctgaaggctctccatctcagcgcctggaaaatgcagtgaaaaaacctgaagataaaaaggaagttttcagacccctcaagcctgctgcaagtgatctgaccgcactggccaaagagcttcgagcagtggaagatgtacggccacctcacaaagtaacggactactcctcatccagtgaggagtcggggacgacggatgaggaggacgacgatgtggagcaggaaggggctgacgagtccacctcaggaccagaggacaccagagcagcgtcatctctgaatttgagcaatggtgaaacggaatctgtgaaaaccatgattgtccatgatgatgtagaaagtgagccggccatgaccccatccaaggagggcactctaatcgtccgccagactcagtccgctagtagcacactccagaaacacaaatcttcctcctcctttacaccttttatagaccccagattactacagatttctccatctagcggaacaacagtgacatctgtggtgggattttcctgtgatgggatgagaccagaagccataaggcaagatcctacccggaaaggctcagtggtcaatgtgaatcctaccaacactaggccacagagtgacaccccggagattcgtaaatacaagaagaggtttaactctgagattctgtgtgctgccttatggggagtgaatttgctagtgggtacagagagtggcctgatgctgctggacagaagtggccaagggaaggtctatcctcttatcaaccgaagacgatttcaacaaatggacgtacttgagggcttgaatgtcttggtgacaatatctggcaaaaaggataagttacgtgtctactatttgtcctggttaagaaataaaatacttcacaatgatccagaagttgagaagaagcagggatggacaaccgtaggggatttggaaggatgtgtacattataaagttgtaaaatatgaaagaatcaaatttctggtgattgctttgaagagttctgtggaagtctatgcgtgggcaccaaagccatatcacaaatttatggcctttaagtcatttggagaattggtacataagccattactggtggatctcactgttgaggaaggccagaggttgaaagtgatctatggatcctgtgctggattccatgctgttgatgtggattcaggatcagtctatgacatttatctaccaacacatatccagtgtagcatcaaaccccatgcaatcatcatcctccccaatacagatggaatggagcttctggtgtgctatgaagatgagggggtttatgtaaacacatatggaaggatcaccaaggatgtagttctacagtggggagagatgcctacatcagtagcatatattcgatccaatcagacaatgggctggggagagaaggccatagagatccgatctgtggaaactggtcacttggatggtgtgttcatgcacaaaagggctcaaagactaaaattcttgtgtgaacgcaatgacaaggtgttctttgcctctgttcggtctggtggcagcagtcaggtttatttcatgaccttaggcaggacttctcttctgagctggtagaagcagtgtgatccagggattactggcctccagagtcttcaagatcctgagaacttggaattccttgtaactggagctcggagctgcaccgagggcaaccaggacagctgtgtgtgcagacctcatgtgttgggttctctcccctccttcctgttcctcttatataccagtttatccccattctttttttttttcttactccaaaataaatcaaggctgcaatgcagctggtgctgttcagattctaccatcaggtgctataagtgtttgggattgagcatcatactggaaagcaaacacctttcctccagctccagaattccttgtctctgaatgactctgtcttgtgggtgtctgacagtggcgacgatgaacatgccgttggttttattggcagtgggcacaaggaggtgagaagtggtggtaaaaggagcggagtgctgaagcagagagcagatttaatatagtaacattaacagtgtatttaattgacatttcttttttgtaatgtgacgatatgtggacaaagaagaagatgcaggtttaagaagttaatatttataaaatgtgaaagacacagttactaggataacttttttgtgggtggggcttgggagatggggtggggtgggttaaggggtcccattttgtttctttggatttggggtgggggtcctggccaagaactcagtcatttttctgtgtaccaggttgcctaaatcatgtgcagatggttctaaaaaaaaaaaaaaaaaaaaaaaaaaaggaaaaaaaaaaagaaaaagaaaacgtgtgcattttgtataatggccagaactttgtcgtgtgacagtattagcactgcctcagttaaaggtttaatttttgtttaaacctagacgtgcaacaaaagttttaccacagtctgcacttgcagaagaaagaaaaaaattcaaaccacatgtttattttttttttgcctacctcattgttcttaatgcattgagaggtgatttagtttatatgtttttggaagaaaccattaatgtttaatttaatcttaataccaaaacgaccagattgaagtttgacttttattgtcacaaatcagcaggcacaagaactgtccatgaagatgggaaatagccttaaggctgatgcagtttacttacaagtttagaaaccagaatgctttgtttttaccagattcaccattagaggttgatggggcaactgcagcccatgacacaagatctcattgttctcgatgtagaggggttggtagcagacaggtggttacattagaatagtcacacaaactgttcagtgttgcaggaaccttttcttgggggtgggggagtttcccttttctaaaaatgcaatgcactaaaactattttaagaatgtagttaattctgcttattcataaagtgggcatcttctgtgttttaggtgtaatatcgaagtcctggcttttctcgttttctcacttgctctcttgttctctgtttttttaaaccaattttactttatgaatatattcatgacatttgtaataaatgtcttgagaaagaatttgtttcatggcttcatggtcatcactcaagctcccgtaaggatattaccgtctcaggaaaggatcaggactccatgtcacagtcctgccatcttactttcctcttgtcgagttctgagtggaaataactgcattatggctgctttaacctcagtcatcaaaagaaacttgctgttttttaggcttgatctttttcctttgtggttaattttcctgtatattgtgaaaatgggggattttccctctgctcccacccacctaaacacagcagccatttgtacctgtttgcttcccatcccacttggcacccactctgacctcttgtcagtttcctgttcctggttccatctttttgaaaaaggccctcctttgagctacaaacatctggtaagacaagtacatccactcatgaatgcagacacagcagctggtggttttgtgtatacctgtaaagacaagctgagaagcttactttttggggaagtaaaagaagatggaaatggatgtttcatttgtatgagtttggagcagtgctgaaggccaaagccgcctactggtttgtagttaacctagagaaggttgaaaaattaatcctacctttaaagggatttgaggtaggctggattccatcgccacaggactttagttagaattaaattcctgcttgtaatttatatccatgtttaggcttttcataagatgaaacatgccacagtgaacacactcgtgtacatatcaagagaagaaggaaaggcacaggtggagaacagtaaaaggtgggcagatgtctttgaagaaatgctcaatgtctgatgctaagtgggagaaggcagagaacaaaggatgtggcataatggtcttaacattatccaaagacttgaagctccatgtctgtaagtcaaatgttacacaaaaaaaaatgcaaatggtgtttcattggaattaccaagtgcttagaacttgctggctttcccataggtggtaaaggggtctgagctcacaccgagttgtgcttggcttgcttgtgcagctccaggcacccggtgggcactctggtggtgtttgtggtgaactgaattgaatccattgttgggcttaagttactgaaattggaacaccctttgtccttctcggcgggggcttcctggtctgtgctttacttggcttttttccttcccgtcttagcctcacccccttgtcaaccagattgagttgctatagcttgatgcagggacccagtgaagtttctccgttaaagattgggagtcgtcgaaatgtttagattcttttaggaaaggaattattttccccccttttacagggtagtaacttctccacagaagtgccaatatggcaaaattacacaagaaaacagtattgcaatgacaccattacataaggaacattgaactgttagaggagtgctcttccaaacaaaacaaaaatgtctctaggtttagtcagagctttcacaagtaataacctttctgtattaaaatcagagtaaccctttctgtattgagtgcagtgttttttactcttttctcatgcacatgttacgttggagaaaatgtttacaaaaatggttttgttacactaatgcgcaccacatatttatggtttattttaagtgactttttatgggttatttaggttttcgtcttagttgtagcacacttaccctaattttgccaattattaatttgctaaatagtaatacaaatgacaaactgcattaaatttactaattataaaagctgcaaagcagactggtggcaagtacacagcccttttttttgcagtgctaacttgtctactgtgtattatgaaaattactgttgtccccccacccttttttccttaaataaagtaaaaatgacacctaaaaaaaaaaaaaagaaaaaaa

SEQ ID NO: 317844 - DNA, 7972 bp, Homo sapiens
caaacttttagatactgtaaatattgcattaaaaattgtataactgcttaaaaataccattttttattcacattagacccagttaatataaaatataatagtttgaggatcataatgtgaaaagtagaatgtttttgaggtaaaatgaaaaagaatgttagggaatatttgagtcagatatttgataattgggtagtgatgaagagcaaagtggtcctcctgtgcccatgtgcttctgagagagaatgagcacttcagaattgctgcacttgggtgtgccgtagaataccagacactgtcagtcttctggaccaaatatatggagcgaatacactggactatgaaatgagctttcagttatttaggtgcctccaaattattatgaattattgaggagcatcacgtttctaggtctttagaaaagagagggcatggcggttaaactggttttcccaatttctccaagatatgttgctcaccttgtgtcttgtctgccctatagcttgttatggagttctgtggggctgggtccattacagaccttgtgaagaacaccaaagggaacacactcaaagaagactggatcgcttacatctccagagaaatcctgaggggactggcacatcttcacattcatcatgtgattcaccgggatatcaagggccagaatgtgttgctgactgagaatgcagaggtgaaacttgttgactttggtgtgagtgctcagctggacaggactgtggggcggagaaatacgttcataggcactccctactggatggctcctgaggtcatcgcctgtgatgagaacccagatgccacctatgattacagaagtgatctttggtcttgtggcattacagccattgagatggcagaaggtgctccccctctctgtgacatgcatccaatgagagcactgtttctcattcccagaaaccctcctccccggctgaagtcaaaaaaatggtcgaagaagttttttagttttatagaagggtgcctggtgaagaattacatgcagcggccctctacagagcagcttttgaaacatccttttataagggatcagccaaatgaaaggcaagttagaatccagcttaaggatcatatagatcgtaccaggaagaagagaggcgagaaagatgaaactgagtatgagtacagtgggagtgaggaagaagaggaggaagtgcctgaacaggaaggagagccaagttccattgtgaacgtgcctggtgagtctactcttcgccgagatttcctgagactgcagcaggagaacaaggaacgttccgaggctcttcggagacaacagttactacaggagcaacagctccgggagcaggaagaatataaaaggcaactgctggcagagagacagaagcggattgagcagcagaaagaacagaggcgacggctagaagagcaacaaaggagagagcgggaagctagaaggcagcaggaacgtgaacagcgaaggagagaacaagaagaaaagaggcgtctagaggagttggagagaaggcgcaaagaagaagaggagaggagacgggcagaagaagaaaagaggagagttgaaagagaacaggagtatatcaggcgacagctagaagaggagcagcggcacttggaagtccttcagcagcagctgctccaggagcaggccatgttactgcatgaccataggaggccgcacccgcagcactcgcagcagccgccaccaccgcagcaggaaaggagcaagccaagcttccatgctcccgagcccaaagcccactacgagcctgctgaccgagcgcgagaggttcctgtgagaacaacatctcgctcccctgttctgtcccgtcgagattccccactgcagggcagtgggcagcagaatagccaggcaggacagagaaactccaccagcagtattgagcccaggcttctgtgggagagagtggagaagctggtgcccagacctggcagtggcagctcctcagggtccagcaactcaggatcccagcccgggtctcaccctgggtctcagagtggctccggggaacgcttcagagtgagatcatcatccaagtctgaaggctctccatctcagcgcctggaaaatgcagtgaaaaaacctgaagataaaaaggaagttttcagacccctcaagcctgctgcaagtggattgtgcaggatcagttttacttatttcagacttgaatgagatctttctattaaaaatatgtggttgagaggcctgcagtcttttctgcgagggcccctcacagagttgaggaattataaggaatgacctaaaccccagacatacttgttcccttccattggtatcgtctgctttccctgtataaagtctcaagtgagtaaaaccttttttctgttgttccagccatacacttggtgtacagtcagccttacaaaattatgcagaacaaagtatagttcttatttaatgaaatttccttctaaggaaactgatgctttaaaaaaaatacaaaagaaagaaaagcctttttatctctttcttggcattaacctttacttattcttcgtgagttcagcatttacaatactggcttttagactaagtttttaggtgatagttgtgactgcttctcacccttctcttttaatccctctgatgttacctgaccatgtaattgtgcacgctttgtggaattttaagcctgtcagagttttcatttcctgcttgaactgatttctgtacttctccctctccccttctttctcccgcgcttccttgtactgtgcattcctcatcaacgatggcttctcggactccacgaaactgcgctgtactgaagggcgaagtggatctgaccgcactggccaaagagcttcgagcagtggaagatgtacggccacctcacaaagtaacggactactcctcatccagtgaggagtcggggacgacggatgaggaggacgacgatgtggagcaggaaggggctgacgagtccacctcaggaccagaggacaccagagcagcgtcatctctgaatttgagcaatggtgaaacggaatctgtgaaaaccatgattgtccatgatgatgtagaaagtgagccggccatgaccccatccaaggagggcactctaatcgtccgccagagtacagttgaccaaaagcgtgccagccatcatgagagcaatggctttgccggtcgcattcacctcttgccagatctcttacagcaaagccattcctcctccacttcctccacctcctcctccccatcctccagccagccgacacccaccatgtccccacagacaccccaggacaagctcactgctaatgagactcagtccgctagtagcacactccagaaacacaaatcttcctcctcctttacaccttttatagaccccagattactacagatttctccatctagcggaacaacagtgacatctgtggtgggattttcctgtgatgggatgagaccagaagccataaggcaagatcctacccggaaaggctcagtggtcaatgtgaatcctaccaacactaggccacagagtgacaccccggagattcgtaaatacaagaagaggtttaactctgagattctgtgtgctgccttatggggagtgaatttgctagtgggtacagagagtggcctgatgctgctggacagaagtggccaagggaaggtctatcctcttatcaaccgaagacgatttcaacaaatggacgtacttgagggcttgaatgtcttggtgacaatatctggcaaaaaggataagttacgtgtctactatttgtcctggttaagaaataaaatacttcacaatgatccagaagttgagaagaagcagggatggacaaccgtaggggatttggaaggatgtgtacattataaagttgtaaaatatgaaagaatcaaatttctggtgattgctttgaagagttctgtggaagtctatgcgtgggcaccaaagccatatcacaaatttatggcctttaagtcatttggagaattggtacataagccattactggtggatctcactgttgaggaaggccagaggttgaaagtgatctatggatcctgtgctggattccatgctgttgatgtggattcaggatcagtctatgacatttatctaccaacacatatccagtgtagcatcaaaccccatgcaatcatcatcctccccaatacagatggaatggagcttctggtgtgctatgaagatgagggggtttatgtaaacacatatggaaggatcaccaaggatgtagttctacagtggggagagatgcctacatcagtagcatatattcgatccaatcagacaatgggctggggagagaaggccatagagatccgatctgtggaaactggtcacttggatggtgtgttcatgcacaaaagggctcaaagactaaaattcttgtgtgaacgcaatgacaaggtgttctttgcctctgttcggtctggtggcagcagtcaggtttatttcatgaccttaggcaggacttctcttctgagctggtagaagcagtgtgatccagggattactggcctccagagtcttcaagatcctgagaacttggaattccttgtaactggagctcggagctgcaccgagggcaaccaggacagctgtgtgtgcagacctcatgtgttgggttctctcccctccttcctgttcctcttatataccagtttatccccattctttttttttttcttactccaaaataaatcaaggctgcaatgcagctggtgctgttcagattctaccatcaggtgctataagtgtttgggattgagcatcatactggaaagcaaacacctttcctccagctccagaattccttgtctctgaatgactctgtcttgtgggtgtctgacagtggcgacgatgaacatgccgttggttttattggcagtgggcacaaggaggtgagaagtggtggtaaaaggagcggagtgctgaagcagagagcagatttaatatagtaacattaacagtgtatttaattgacatttcttttttgtaatgtgacgatatgtggacaaagaagaagatgcaggtttaagaagttaatatttataaaatgtgaaagacacagttactaggataacttttttgtgggtggggcttgggagatggggtggggtgggttaaggggtcccattttgtttctttggatttggggtgggggtcctggccaagaactcagtcatttttctgtgtaccaggttgcctaaatcatgtgcagatggttctaaaaaaaaaaaaaaaaaaaaaaaaaaaggaaaaaaaaaaagaaaaagaaaacgtgtgcattttgtataatggccagaactttgtcgtgtgacagtattagcactgcctcagttaaaggtttaatttttgtttaaacctagacgtgcaacaaaagttttaccacagtctgcacttgcagaagaaagaaaaaaattcaaaccacatgtttattttttttttgcctacctcattgttcttaatgcattgagaggtgatttagtttatatgtttttggaagaaaccattaatgtttaatttaatcttaataccaaaacgaccagattgaagtttgacttttattgtcacaaatcagcaggcacaagaactgtccatgaagatgggaaatagccttaaggctgatgcagtttacttacaagtttagaaaccagaatgctttgtttttaccagattcaccattagaggttgatggggcaactgcagcccatgacacaagatctcattgttctcgatgtagaggggttggtagcagacaggtggttacattagaatagtcacacaaactgttcagtgttgcaggaaccttttcttgggggtgggggagtttcccttttctaaaaatgcaatgcactaaaactattttaagaatgtagttaattctgcttattcataaagtgggcatcttctgtgttttaggtgtaatatcgaagtcctggcttttctcgttttctcacttgctctcttgttctctgtttttttaaaccaattttactttatgaatatattcatgacatttgtaataaatgtcttgagaaagaatttgtttcatggcttcatggtcatcactcaagctcccgtaaggatattaccgtctcaggaaaggatcaggactccatgtcacagtcctgccatcttactttcctcttgtcgagttctgagtggaaataactgcattatggctgctttaacctcagtcatcaaaagaaacttgctgttttttaggcttgatctttttcctttgtggttaattttcctgtatattgtgaaaatgggggattttccctctgctcccacccacctaaacacagcagccatttgtacctgtttgcttcccatcccacttggcacccactctgacctcttgtcagtttcctgttcctggttccatctttttgaaaaaggccctcctttgagctacaaacatctggtaagacaagtacatccactcatgaatgcagacacagcagctggtggttttgtgtatacctgtaaagacaagctgagaagcttactttttggggaagtaaaagaagatggaaatggatgtttcatttgtatgagtttggagcagtgctgaaggccaaagccgcctactggtttgtagttaacctagagaaggttgaaaaattaatcctacctttaaagggatttgaggtaggctggattccatcgccacaggactttagttagaattaaattcctgcttgtaatttatatccatgtttaggcttttcataagatgaaacatgccacagtgaacacactcgtgtacatatcaagagaagaaggaaaggcacaggtggagaacagtaaaaggtgggcagatgtctttgaagaaatgctcaatgtctgatgctaagtgggagaaggcagagaacaaaggatgtggcataatggtcttaacattatccaaagacttgaagctccatgtctgtaagtcaaatgttacacaaaaaaaaatgcaaatggtgtttcattggaattaccaagtgcttagaacttgctggctttcccataggtggtaaaggggtctgagctcacaccgagttgtgcttggcttgcttgtgcagctccaggcacccggtgggcactctggtggtgtttgtggtgaactgaattgaatccattgttgggcttaagttactgaaattggaacaccctttgtccttctcggcgggggcttcctggtctgtgctttacttggcttttttccttcccgtcttagcctcacccccttgtcaaccagattgagttgctatagcttgatgcagggacccagtgaagtttctccgttaaagattgggagtcgtcgaaatgtttagattcttttaggaaaggaattattttccccccttttacagggtagtaacttctccacagaagtgccaatatggcaaaattacacaagaaaacagtattgcaatgacaccattacataaggaacattgaactgttagaggagtgctcttccaaacaaaacaaaaatgtctctaggtttagtcagagctttcacaagtaataacctttctgtattaaaatcagagtaaccctttctgtattgagtgcagtgttttttactcttttctcatgcacatgttacgttggagaaaatgtttacaaaaatggttttgttacactaatgcgcaccacatatttatggtttattttaagtgactttttatgggttatttaggttttcgtcttagttgtagcacacttaccctaattttgccaattattaatttgctaaatagtaatacaaatgacaaactgcattaaatttactaattataaaagctgcaaagcagactggtggcaagtacacagcccttttttttgcagtgctaacttgtctactgtgtattatgaaaattactgttgtccccccacccttttttccttaaataaagtaaaaatgacaccta

SEQ ID NO: 317845 - DNA, 5424 bp, Homo sapiens
gagagtattctctcagagcctgctttccactgggacctagttgttcctagactattccgtgaccccatgagcacttactatgtagttctcgtggattcagcagcaggtcgccttgtgtttccccttctcttcgttggtgtgtgcatatgtcagtgcttcccccagcaccccagcgtgtactttattttttccttttgatttgaggatatatgatccaggggaaatttcagtttggtataactactttaattagccataattattcattctaagtttttgctcagaaacaaatggcactggaaagaaattctttgttaaagggagaaagctaagcagttgcttttttggaggaggctttatatcggtagcctcatctcatgttttgattttgagaaggcgaaaagcctaaacaggatctccttgactccagagattaaggcctttcacgtctggattttttctccataggtcatctctgaatttgagcaatggtgaaacggaatctgtgaaaaccatgattgtccatgatgatgtagaaagtgagccggccatgaccccatccaaggagggcactctaatcgtccgccagagtacagttgaccaaaagcgtgccagccatcatgagagcaatggctttgccggtcgcattcacctcttgccagatctcttacagcaaagccattcctcctccacttcctccacctcctcctccccatcctccagccagccgacacccaccatgtccccacagacaccccaggacaagctcactgctaatgagactcagtccgctagtagcacactccagaaacacaaatcttcctcctcctttacaccttttatagaccccagattactacagatttctccatctagcggaacaacagtgacatctgtggtgggattttcctgtgatgggatgagaccagaagccataaggcaagatcctacccggaaaggctcagtggtcaatgtgaatcctaccaacactaggccacagagtgacaccccggagattcgtaaatacaagaagaggtttaactctgagattctgtgtgctgccttatggggagtgaatttgctagtgggtacagagagtggcctgatgctgctggacagaagtggccaagggaaggtctatcctcttatcaaccgaagacgatttcaacaaatggacgtacttgagggcttgaatgtcttggtgacaatatctggcaaaaaggataagttacgtgtctactatttgtcctggttaagaaataaaatacttcacaatgatccagaagttgagaagaagcagggatggacaaccgtaggggatttggaaggatgtgtacattataaagttgtaaaatatgaaagaatcaaatttctggtgattgctttgaagagttctgtggaagtctatgcgtgggcaccaaagccatatcacaaatttatggcctttaagtcatttggagaattggtacataagccattactggtggatctcactgttgaggaaggccagaggttgaaagtgatctatggatcctgtgctggattccatgctgttgatgtggattcaggatcagtctatgacatttatctaccaacacatatccagtgtagcatcaaaccccatgcaatcatcatcctccccaatacagatggaatggagcttctggtgtgctatgaagatgagggggtttatgtaaacacatatggaaggatcaccaaggatgtagttctacagtggggagagatgcctacatcagtagcatatattcgatccaatcagacaatgggctggggagagaaggccatagagatccgatctgtggaaactggtcacttggatggtgtgttcatgcacaaaagggctcaaagactaaaattcttgtgtgaacgcaatgacaaggtgttctttgcctctgttcggtctggtggcagcagtcaggtttatttcatgaccttaggcaggacttctcttctgagctggtagaagcagtgtgatccagggattactggcctccagagtcttcaagatcctgagaacttggaattccttgtaactggagctcggagctgcaccgagggcaaccaggacagctgtgtgtgcagacctcatgtgttgggttctctcccctccttcctgttcctcttatataccagtttatccccattctttttttttttcttactccaaaataaatcaaggctgcaatgcagctggtgctgttcagattctaccatcaggtgctataagtgtttgggattgagcatcatactggaaagcaaacacctttcctccagctccagaattccttgtctctgaatgactctgtcttgtgggtgtctgacagtggcgacgatgaacatgccgttggttttattggcagtgggcacaaggaggtgagaagtggtggtaaaaggagcggagtgctgaagcagagagcagatttaatatagtaacattaacagtgtatttaattgacatttcttttttgtaatgtgacgatatgtggacaaagaagaagatgcaggtttaagaagttaatatttataaaatgtgaaagacacagttactaggataacttttttgtgggtggggcttgggagatggggtggggtgggttaaggggtcccattttgtttctttggatttggggtgggggtcctggccaagaactcagtcatttttctgtgtaccaggttgcctaaatcatgtgcagatggttctaaaaaaaaaaaaaaaaaaaaaaaaaaaggaaaaaaaaaaagaaaaagaaaacgtgtgcattttgtataatggccagaactttgtcgtgtgacagtattagcactgcctcagttaaaggtttaatttttgtttaaacctagacgtgcaacaaaagttttaccacagtctgcacttgcagaagaaagaaaaaaattcaaaccacatgtttattttttttttgcctacctcattgttcttaatgcattgagaggtgatttagtttatatgtttttggaagaaaccattaatgtttaatttaatcttaataccaaaacgaccagattgaagtttgacttttattgtcacaaatcagcaggcacaagaactgtccatgaagatgggaaatagccttaaggctgatgcagtttacttacaagtttagaaaccagaatgctttgtttttaccagattcaccattagaggttgatggggcaactgcagcccatgacacaagatctcattgttctcgatgtagaggggttggtagcagacaggtggttacattagaatagtcacacaaactgttcagtgttgcaggaaccttttcttgggggtgggggagtttcccttttctaaaaatgcaatgcactaaaactattttaagaatgtagttaattctgcttattcataaagtgggcatcttctgtgttttaggtgtaatatcgaagtcctggcttttctcgttttctcacttgctctcttgttctctgtttttttaaaccaattttactttatgaatatattcatgacatttgtaataaatgtcttgagaaagaatttgtttcatggcttcatggtcatcactcaagctcccgtaaggatattaccgtctcaggaaaggatcaggactccatgtcacagtcctgccatcttactttcctcttgtcgagttctgagtggaaataactgcattatggctgctttaacctcagtcatcaaaagaaacttgctgttttttaggcttgatctttttcctttgtggttaattttcctgtatattgtgaaaatgggggattttccctctgctcccacccacctaaacacagcagccatttgtacctgtttgcttcccatcccacttggcacccactctgacctcttgtcagtttcctgttcctggttccatctttttgaaaaaggccctcctttgagctacaaacatctggtaagacaagtacatccactcatgaatgcagacacagcagctggtggttttgtgtatacctgtaaagacaagctgagaagcttactttttggggaagtaaaagaagatggaaatggatgtttcatttgtatgagtttggagcagtgctgaaggccaaagccgcctactggtttgtagttaacctagagaaggttgaaaaattaatcctacctttaaagggatttgaggtaggctggattccatcgccacaggactttagttagaattaaattcctgcttgtaatttatatccatgtttaggcttttcataagatgaaacatgccacagtgaacacactcgtgtacatatcaagagaagaaggaaaggcacaggtggagaacagtaaaaggtgggcagatgtctttgaagaaatgctcaatgtctgatgctaagtgggagaaggcagagaacaaaggatgtggcataatggtcttaacattatccaaagacttgaagctccatgtctgtaagtcaaatgttacacaaaaaaaaatgcaaatggtgtttcattggaattaccaagtgcttagaacttgctggctttcccataggtggtaaaggggtctgagctcacaccgagttgtgcttggcttgcttgtgcagctccaggcacccggtgggcactctggtggtgtttgtggtgaactgaattgaatccattgttgggcttaagttactgaaattggaacaccctttgtccttctcggcgggggcttcctggtctgtgctttacttggcttttttccttcccgtcttagcctcacccccttgtcaaccagattgagttgctatagcttgatgcagggacccagtgaagtttctccgttaaagattgggagtcgtcgaaatgtttagattcttttaggaaaggaattattttccccccttttacagggtagtaacttctccacagaagtgccaatatggcaaaattacacaagaaaacagtattgcaatgacaccattacataaggaacattgaactgttagaggagtgctcttccaaacaaaacaaaaatgtctctaggtttagtcagagctttcacaagtaataacctttctgtattaaaatcagagtaaccctttctgtattgagtgcagtgttttttactcttttctcatgcacatgttacgttggagaaaatgtttacaaaaatggttttgttacactaatgcgcaccacatatttatggtttattttaagtgactttttatgggttatttaggttttcgtcttagttgtagcacacttaccctaattttgccaattattaatttgctaaatagtaatacaaatgacaaactgcattaaatttactaattataaaagctgcaaagcagactggtggcaagtacacagcccttttttttgcagtgctaacttgtctactgtgtattatgaaaattactgttgtccccccacccttttttccttaaataaagtaaaaatgacaccta

SEQ ID NO: 317846 - DNA, 5275 bp, Homo sapiens
  misc_feature (5187)..(5187): n is a, c, g, or t
aattcgaggatccgggtaccatggcacagagcgacagagacatttattgttatttgttttttggtggcaaaaagggaaaatggcgaacgactcccctgcaaaaagtctggtggacatcgacctctcctccctgcgggatcctgctgggatttttgagctggtggaagtggttggaaatggcacctatggacaagtctataagggtcgacatgttaaaacgggtcagttggcagccatcaaagttatggatgtcactgaggatgaagaggaagaaatcaaactggagataaatatgctaaagaaatactctcatcacagaaacattgcaacatattatggtgctttcatcaaaaagagccctccaggacatgatgaccaactctggcttgttatggagttctgtggggctgggtccattacagaccttgtgaagaacaccaaagggaacacactcaaagaagactggatcgcttacatctccagagaaatcctgaggggactggcacatcttcacattcatcatgtgattcaccgggatatcaagggccagaatgtgttgctgactgagaatgcagaggtgaaacttgttgactttggtgtgagtgctcagctggacaggactgtggggcggagaaatacgttcataggcactccctactggatggctcctgaggtcatcgcctgtgatgagaacccagatgccacctatgattacagaagtgatctttggtcttgtggcattacagccattgagatggcagaaggtgctccccctctctgtgacatgcatccaatgagagcactgtttctcattcccagaaaccctcctccccggctgaagtcaaaaaaatggtcgaagaagttttttagttttatagaagggtgcctggtgaagaattacatgcagcggccctctacagagcagcttttgaaacatccttttataagggatcagccaaatgaaaggcaagttagaatccagcttaaggatcatatagatcgtaccaggaagaagagaggcgagaaagatgaaactgagtatgagtacagtgggagtgaggaagaagaggaggaagtgcctgaacaggaaggagagccaagttccattgtgaacgtgcctggtgagtctactcttcgccgagatttcctgagactgcagcaggagaacaaggaacgttccgaggctcttcggagacaacagttactacaggagcaacagctccgggagcaggaagaatataaaaggcaactgctggcagagagacagaagcggattgagcagcagaaagaacagaggcgacggctagaagagcaacaaaggagagagcgggaagctagaaggcagcaggaacgtgaacagcgaaggagagaacaagaagaaaagaggcgtctagaggagttggagagaaggcgcaaagaagaagaggagaggagacgggcagaagaagaaaagaggagagttgaaagagaacaggagtatatcaggcgacagctagaagaggagcagcggcacttggaagtccttcagcagcagctgctccaggagcaggccatgttactgcatgaccataggaggccgcacccgcagcactcgcagcagccgccaccaccgcagcaggaaaggagcaagccaagcttccatgctcccgagcccaaagcccactacgagcctgctgaccgagcgcgagaggtggaagatagatttaggaaaactaaccacagctcccctgaagcccagtctaagcagacaggcagagtattggagccaccagtgccttcccgatcagagtctttttccaatggcaactccgagtctgtgcatcccgccctgcagagaccagcggagccacaggttcctgtgagaacaacatctcgctcccctgttctgtcccgtcgagattccccactgcagggcagtgggcagcagaatagccaggcaggacagagaaactccaccagcagtattgagcccaggcttctgtgggagagagtggagaagctggtgcccagacctggcagtggcagctcctcagggtccagcaactcaggatcccagcccgggtctcaccctgggtctcagagtggctccggggaacgcttcagagtgagatcatcatccaagtctgaaggctctccatctcagcgcctggaaaatgcagtgaaaaaacctgaagataaaaaggaagttttcagacccctcaagcctgctgcaagtgatctgaccgcactggccaaagagcttcgagcagtggaagatgtacggccacctcacaaagtaacggactactcctcatccagtgaggagtcggggacgacggatgaggaggacgacgatgtggagcaggaaggggctgacgagtccacctcaggaccagaggacaccagagcagcgtcatctctgaatttgagcaatggtgaaacggaatctgtgaaaaccatgattgtccatgatgatgtagaaagtgagccggccatgaccccatccaaggagggcactctaatcgtccgccagactcagtccgctagtagcacactccagaaacacaaatcttcctcctcctttacaccttttatagaccccagattactacagatttctccatctagcggaacaacagtgacatctgtggtgggattttcctgtgatgggatgagaccagaagccataaggcaagatcctacccggaaaggctcagtggtcaatgtgaatcctaccaacactaggccacagagtgacaccccggagattcgtaaatacaagaagaggtttaactctgagattctgtgtgctgccttatggggagtgaatttgctagtgggtacagagagtggcctgatgctgctggacagaagtggccaagggaaggtctatcctcttatcaaccgaagacgatttcaacaaatggacgtacttgagggcttgaatgtcttggtgacaatatctggcaaaaaggataagttacgtgtctactatttgtcctggttaagaaataaaatacttcacaatgatccagaagttgagaagaagcagggatggacaaccgtaggggatttggaaggatgtgtacattataaagttgtaaaatatgaaagaatcaaatttctggtgattgctttgaagagttctgtggaagtctatgcgtgggcaccaaagccatatcacaaatttatggcctttaagtcatttggagaattggtacataagccattactggtggatctcactgttgaggaaggccagaggttgaaagtgatctatggatcctgtgctggattccatgctgttgatgtggattcaggatcagtctatgacatttatctaccaacacatatccagtgtagcatcaaaccccatgcaatcatcatcctccccaatacagatggaatggagcttctggtgtgctatgaagatgagggggtttatgtaaacacatatggaaggatcaccaaggatgtagttctacagtggggagagatgcctacatcagtagcatatattcgatccaatcagacaatgggctggggagagaaggccatagagatccgatctgtggaaactggtcacttggatggtgtgttcatgcacaaaagggctcaaagactaaaattcttgtgtgaacgcaatgacaaggtgttctttgcctctgttcggtctggtggcagcagtcaggtttatttcatgaccttaggcaggacttctcttctgagctggtagaagcagtgtgatccagggattactggcctccagagtcttcaagatcctgagaacttggaattccttgtaactggagctcggagctgcaccgagggcaaccaggacagctgtgtgtgcagacctcatgtgttgggttctctcccctccttcctgttcctcttatataccagtttatccccattctttttttttttcttactccaaaataaatcaaggctgcaatgcagctggtgctgttcagattctaccatcaggtgctataagtgtttgggattgagcatcatactggaaagcaaacacctttcctccagctccagaattccttgtctctgaatgactctgtcttgtgggtgtctgacagtggcgacgatgaacatgccgttggttttattggcagtgggcacaaggaggtgagaagtggtggtaaaaggagcggagtgctgaagcagagagcagatttaatatagtaacattaacagtgtatttaattgacatttcttttttgtaatgtgacgatatgtggacaaagaagaagatgcaggtttaagaagttaatatttataaaatgtgaaagacacagttactaggataacttttttgtgggtggggcttgggagatggggtggggtgggttaaggggtcccattttgtttctttggatttggggtgggggtcctggccaagaactcagtcatttttctgtgtaccaggttgcctaaatcatgtgcagatggttctaaaaaaaaaaaaaaaaaaaaaaaaaaaggaaaaaaaaaaagaaaaagaaaacgtgtgcattttgtataatggccagaactttgtcgtgtgacagtattagcactgcctcagttaaaggtttaatttttgtttaaacctagacgtgcaacaaaagttttaccacagtctgcacttgcagaagaaagaaaaaaattcaaaccacatgtttattttttttttgcctacctcattgttcttaatgcattgagaggtgatttagtttatatgtttttggaagaaaccattaatgtttaatttaatcttaataccaaaacgaccagattgaagtttgacttttattgtcacaaatcagcaggcacaagaactgtccatgaagatgggaaatagccttaaggctgatgcagtttacttacaagtttagaaaccagaatgctttgtttttaccagattcaccattagaggttgatggggcaactgcagcccatgacacaagatctcattgttctcgatgtagaggggttggtagcagacaggtggttacattagaatagtcacacaaactgttcagtgttgcaggaaccttttcttgggggtgggggagtttcccttttctaaaaatgcaatgcactaaaactattttaagaatgtagttaattctgcttattcataaagtgggcatcttctgtgttttaggtgtaatatcgaagtcctggccaagaactcagtcatttttntgtgtaccaggttgcctaaatcatgtgcagatggttctaaaaaaaaaaaaaaaaaaaaaaaaagggaaaaaaaaaaaaaagaaaaaaa

SEQ ID NO: 317847 - DNA, 6502 bp, Homo sapiens
  misc_feature (5007)..(5007): n is a, c, g, or t
aattcgaggatccgggtaccatggcacagagcgacagagacatttattgttatttgttttttggtggcaaaaagggaaaatggcgaacgactcccctgcaaaaagtctggtggacatcgacctctcctccctgcgggatcctgctgggatttttgagctggtggaagtggttggaaatggcacctatggacaagtctataagggtcgacatgttaaaacgggtcagttggcagccatcaaagttatggatgtcactgaggatgaagaggaagaaatcaaactggagataaatatgctaaagaaatactctcatcacagaaacattgcaacatattatggtgctttcatcaaaaagagccctccaggacatgatgaccaactctggcttgttatggagttctgtggggctgggtccattacagaccttgtgaagaacaccaaagggaacacactcaaagaagactggatcgcttacatctccagagaaatcctgaggggactggcacatcttcacattcatcatgtgattcaccgggatatcaagggccagaatgtgttgctgactgagaatgcagaggtgaaacttgttgactttggtgtgagtgctcagctggacaggactgtggggcggagaaatacgttcataggcactccctactggatggctcctgaggtcatcgcctgtgatgagaacccagatgccacctatgattacagaagtgatctttggtcttgtggcattacagccattgagatggcagaaggtgctccccctctctgtgacatgcatccaatgagagcactgtttctcattcccagaaaccctcctccccggctgaagtcaaaaaaatggtcgaagaagttttttagttttatagaagggtgcctggtgaagaattacatgcagcggccctctacagagcagcttttgaaacatccttttataagggatcagccaaatgaaaggcaagttagaatccagcttaaggatcatatagatcgtaccaggaagaagagaggcgagaaagatgaaactgagtatgagtacagtgggagtgaggaagaagaggaggaagtgcctgaacaggaaggagagccaagttccattgtgaacgtgcctggtgagtctactcttcgccgagatttcctgagactgcagcaggagaacaaggaacgttccgaggctcttcggagacaacagttactacaggagcaacagctccgggagcaggaagaatataaaaggcaactgctggcagagagacagaagcggattgagcagcagaaagaacagaggcgacggctagaagagcaacaaaggagagagcgggaagctagaaggcagcaggaacgtgaacagcgaaggagagaacaagaagaaaagaggcgtctagaggagttggagagaaggcgcaaagaagaagaggagaggagacgggcagaagaagaaaagaggagagttgaaagagaacaggagtatatcaggcgacagctagaagaggagcagcggcacttggaagtccttcagcagcagctgctccaggagcaggccatgttactgcatgaccataggaggccgcacccgcagcactcgcagcagccgccaccaccgcagcaggaaaggagcaagccaagcttccatgctcccgagcccaaagcccactacgagcctgctgaccgagcgcgagaggtggaagatagatttaggaaaactaaccacagctcccctgaagcccagtctaagcagacaggcagagtattggagccaccagtgccttcccgatcagagtctttttccaatggcaactccgagtctgtgcatcccgccctgcagagaccagcggagccacaggttcctgtgagaacaacatctcgctcccctgttctgtcccgtcgagattccccactgcagggcagtgggcagcagaatagccaggcaggacagagaaactccaccagcagtattgagcccaggcttctgtgggagagagtggagaagctggtgcccagacctggcagtggcagctcctcagggtccagcaactcaggatcccagcccgggtctcaccctgggtctcagagtggctccggggaacgcttcagagtgagatcatcatccaagtctgaaggctctccatctcagcgcctggaaaatgcagtgaaaaaacctgaagataaaaaggaagttttcagacccctcaagcctgctgcaagtgatctgaccgcactggccaaagagcttcgagcagtggaagatgtacggccacctcacaaagtaacggactactcctcatccagtgaggagtcggggacgacggatgaggaggacgacgatgtggagcaggaaggggctgacgagtccacctcaggaccagaggacaccagagcagcgtcatctctgaatttgagcaatggtgaaacggaatctgtgaaaaccatgattgtccatgatgatgtagaaagtgagccggccatgaccccatccaaggagggcactctaatcgtccgccagactcagtccgctagtagcacactccagaaacacaaatcttcctcctcctttacaccttttatagaccccagattactacagatttctccatctagcggaacaacagtgacatctgtggtgggattttcctgtgatgggatgagaccagaagccataaggcaagatcctacccggaaaggctcagtggtcaatgtgaatcctaccaacactaggccacagagtgacaccccggagattcgtaaatacaagaagaggtttaactctgagattctgtgtgctgccttatggggagtgaatttgctagtgggtacagagagtggcctgatgctgctggacagaagtggccaagggaaggtctatcctcttatcaaccgaagacgatttcaacaaatggacgtacttgagggcttgaatgtcttggtgacaatatctggcaaaaaggataagttacgtgtctactatttgtcctggttaagaaataaaatacttcacaatgatccagaagttgagaagaagcagggatggacaaccgtaggggatttggaaggatgtgtacattataaagttgtaaaatatgaaagaatcaaatttctggtgattgctttgaagagttctgtggaagtctatgcgtgggcaccaaagccatatcacaaatttatggcctttaagtcatttggagaattggtacataagccattactggtggatctcactgttgaggaaggccagaggttgaaagtgatctatggatcctgtgctggattccatgctgttgatgtggattcaggatcagtctatgacatttatctaccaacacatatccagtgtagcatcaaaccccatgcaatcatcatcctccccaatacagatggaatggagcttctggtgtgctatgaagatgagggggtttatgtaaacacatatggaaggatcaccaaggatgtagttctacagtggggagagatgcctacatcagtagcatatattcgatccaatcagacaatgggctggggagagaaggccatagagatccgatctgtggaaactggtcacttggatggtgtgttcatgcacaaaagggctcaaagactaaaattcttgtgtgaacgcaatgacaaggtgttctttgcctctgttcggtctggtggcagcagtcaggtttatttcatgaccttaggcaggacttctcttctgagctggtagaagcagtgtgatccagggattactggcctccagagtcttcaagatcctgagaacttggaattccttgtaactggagctcggagctgcaccgagggcaaccaggacagctgtgtgtgcagacctcatgtgttgggttctctcccctccttcctgttcctcttatataccagtttatccccattctttttttttttcttactccaaaataaatcaaggctgcaatgcagctggtgctgttcagattctaccatcaggtgctataagtgtttgggattgagcatcatactggaaagcaaacacctttcctccagctccagaattccttgtctctgaatgactctgtcttgtgggtgtctgacagtggcgacgatgaacatgccgttggttttattggcagtgggcacaaggaggtgagaagtggtggtaaaaggagcggagtgctgaagcagagagcagatttaatatagtaacattaacagtgtatttaattgacatttcttttttgtaatgtgacgatatgtggacaaagaagaagatgcaggtttaagaagttaatatttataaaatgtgaaagacacagttactaggataacttttttgtgggtggggcttgggagatggggtggggtgggttaaggggtcccattttgtttctttggatttggggtgggggtcctggccaagaactcagtcatttttctgtgtaccaggttgcctaaatcatgtgcagatggttctaaaaaaaaaaaaaaaaaaaaaaaaaaaggaaaaaaaaaaagaaaaagaaaacgtgtgcattttgtataatggccagaactttgtcgtgtgacagtattagcactgcctcagttaaaggtttaatttttgtttaaacctagacgtgcaacaaaagttttaccacagtctgcacttgcagaagaaagaaaaaaattcaaaccacatgtttattttttttttgcctacctcattgttcttaatgcattgagaggtgatttagtttatatgtttttggaagaaaccattaatgtttaatttaatcttaataccaaaacgaccagattgaagtttgacttttattgtcacaaatcagcaggcacaagaactgtccatgaagatgggaaatagccttaaggctgatgcagtttacttacaagtttagaaaccagaatgctttgtttttaccagattcaccattagaggttgatggggcaactgcagcccatgacacaagatctcattttgtttttttggatttggggtgggggtcctggccaagaactcagtcatttttntgtgtaccaggttgcctaaatcatgtgcagatggttctaaaaaaaaaaaaaaaaaaaaaaaaagggagaaaaacaaaaaagagaaaaaagaaaacggtgggtcgattttgggggttaatgtgggcgcagagaacttttggccggtggtggaccaggttttaggaacttggcgctcaaggtaacaagagtgtagaatttgttgtggtgttatacccttaggaactgtgacaaacaaaagtgttttcacccacaaggtctgggcgatttggggagaaaaggaaacgagaacaaaattttcacacacgccacatgtgtgttttatattttcttttttggacgcatacacccactcatatggtgtgctctaaaagcggcgtattggaaagagggggggattgaacaggttcaatatatgtgtggtttcggggcgagagaaaacaccccattataactgtggctgtataacatttataactctctgtttatatattcccccgaaaaagacgcgacgccaagtagatttttgcgagacgtgtttgggggacaggttctctatatgtgtgggtgcaccacaaatttcgagcgacgaggggcgacacaaagagaaacctgtgggcgccccatgttagaaagaggatttggggagacaaataatagcggccttataaaagggggggggagagatgtgccggcgaatctcttaacttctcacccagagtttttttaagaaaaacaaccccgagaaatgtgtgcgctgcttggtggtttgttcaacacgccgagagatttttttccccccaaatttttgaggagacgggtgtgtgagcggggggggcaccaaagtgtgggcttggccccagatgttaaaaccacaagaagagatttctatccaagtgggggtccccgccgaaaagtgattaacagagggggcggtttgttgatcgatcaccaccaaagcaccaagcggggtggggccgtggtcaccccacctgttagcacaaaatatagtgttctccgaacaaacaaacagctggtgctaccaacgagtgggttttgtggcgaagaggagaacaccactctttttatgtccgtgtggaggggagggaggggaggggggaggacattttcccccctcctgtttgtttctcataagaaaaacgtgtggcataagtggtgccaactataaaaaacgccagatttattgttttcagagacagcacgtgtgtgggtttgcttcacaagctaccgcggccggatataagtcaccacataagaaacggggggggcagaactcactacgcagggaggtgctctaacgaagggggcttgaacaacactctcgcgagagcagctcatgggcggacgttcactaccggcgggtatgtcagcaaacgcagttgtgggccaccgtccttggatgtcaccccaggggaggttgttttcagacagccccaagttttttaccactttattatagaggacgtaccttctgtcg

SEQ ID NO: 317848 - DNA, 3860 bp, Homo sapiens
ttctagaggatcccgaaatgttatcgcccaacacatatccagtgtagcatcaaaccccatgcaatcatcatcctccccaatacagatggaatggagcttctggtgtgctatgaagatgagggggtttatgtaaacacatatggaaggatcaccaaggatgtagttctacagtggggagagatgcctacatcagtagcatatattcgatccaatcagacaatgggctggggagagaaggccatagagatccgatctgtggaaactggtcacttggatggtgtgttcatgcacaaaagggctcaaagactaaaattcttgtgtgaacgcaatgacaaggtgttctttgcctctgttcggtctggtggcagcagtcaggtttatttcatgaccttaggcaggacttctcttctgagctggtagaagcagtgtgatccagggattactggcctccagagtcttcaagatcctgagaacttggaattccttgtaactggagctcggagctgcaccgagggcaaccaggacagctgtgtgtgcagacctcatgtgttgggttctctcccctccttcctgttcctcttatataccagtttatccccattctttttttttttcttactccaaaataaatcaaggctgcaatgcagctggtgctgttcagattctaccatcaggtgctataagtgtttgggattgagcatcatactggaaagcaaacacctttcctccagctccagaattccttgtctctgaatgactctgtcttgtgggtgtctgacagtggcgacgatgaacatgccgttggttttattggcagtgggcacaaggaggtgagaagtggtggtaaaaggagcggagtgctgaagcagagagcagatttaatatagtaacattaacagtgtatttaattgacatttcttttttgtaatgtgacgatatgtggacaaagaagaagatgcaggtttaagaagttaatatttataaaatgtgaaagacacagttactaggataacttttttgtgggtggggcttgggagatggggtggggtgggttaaggggtcccattttgtttctttggatttggggtgggggtcctggccaagaactcagtcatttttctgtgtaccaggttgcctaaatcatgtgcagatggttctaaaaaaaaaaaaaaaaaaaaaaaaaaaggaaaaaaaaaaagaaaaagaaaacgtgtgcattttgtataatggccagaactttgtcgtgtgacagtattagcactgcctcagttaaaggtttaatttttgtttaaacctagacgtgcaacaaaagttttaccacagtctgcacttgcagaagaaagaaaaaaattcaaaccacatgtttattttttttttgcctacctcattgttcttaatgcattgagaggtgatttagtttatatgtttttggaagaaaccattaatgtttaatttaatcttaataccaaaacgaccagattgaagtttgacttttattgtcacaaatcagcaggcacaagaactgtccatgaagatgggaaatagccttaaggctgatgcagtttacttacaagtttagaaaccagaatgctttgtttttaccagattcaccattagaggttgatggggcaactgcagcccatgacacaagatctcattgttctcgatgtagaggggttggtagcagacaggtggttacattagaatagtcacacaaactgttcagtgttgcaggaaccttttcttgggggtgggggagtttcccttttctaaaaatgcaatgcactaaaactattttaagaatgtagttaattctgcttattcataaagtgggcatcttctgtgttttaggtgtaatatcgaagtcctggcttttctcgttttctcacttgctctcttgttctctgtttttttaaaccaattttactttatgaatatattcatgacatttgtaataaatgtcttgagaaagaatttgtttcatggcttcatggtcatcactcaagctcccgtaaggatattaccgtctcaggaaaggatcaggactccatgtcacagtcctgccatcttactttcctcttgtcgagttctgagtggaaataactgcattatggctgctttaacctcagtcatcaaaagaaacttgctgttttttaggcttgatctttttcctttgtggttaattttcctgtatattgtgaaaatgggggattttccctctgctcccacccacctaaacacagcagccatttgtacctgtttgcttcccatcccacttggcacccactctgacctcttgtcagtttcctgttcctggttccatctttttgaaaaaggccctcctttgagctacaaacatctggtaagacaagtacatccactcatgaatgcagacacagcagctggtggttttgtgtatacctgtaaagacaagctgagaagcttactttttggggaagtaaaagaagatggaaatggatgtttcatttgtatgagtttggagcagtgctgaaggccaaagccgcctactggtttgtagttaacctagagaaggttgaaaaattaatcctacctttaaagggatttgaggtaggctggattccatcgccacaggactttagttagaattaaattcctgcttgtaatttatatccatgtttaggcttttcataagatgaaacatgccacagtgaacacactcgtgtacatatcaagagaagaaggaaaggcacaggtggagaacagtaaaaggtgggcagatgtctttgaagaaatgctcaatgtctgatgctaagtgggagaaggcagagaacaaaggatgtggcataatggtcttaacattatccaaagacttgaagctccatgtctgtaagtcaaatgttacacaaaaaaaaatgcaaatggtgtttcattggaattaccaagtgcttagaacttgctggctttcccataggtggtaaaggggtctgagctcacaccgagttgtgcttggcttgcttgtgcagctccaggcacccggtgggcactctggtggtgtttgtggtgaactgaattgaatccattgttgggcttaagttactgaaattggaacaccctttgtccttctcggcgggggcttcctggtctgtgctttacttggcttttttccttcccgtcttagcctcacccccttgtcaaccagattgagttgctatagcttgatgcagggacccagtgaagtttctccgttaaagattgggagtcgtcgaaatgtttagattcttttaggaaaggaattattttccccccttttacagggtagtaacttctccacagaagtgccaatatggcaaaattacacaagaaaacagtattgcaatgacaccattacataaggaacattgaactgttagaggagtgctcttccaaacaaaacaaaaatgtctctaggtttagtcagagctttcacaagtaataacctttctgtattaaaatcagagtaaccctttctgtattgagtgcagtgttttttactcttttctcatgcacatgttacgttggagaaaatgtttacaaaaatggttttgttacactaatgcgcaccacatatttatggtttattttaagtgactttttatgggttatttaggttttcgtcttagttgtagcacacttaccctaattttgccaattattaatttgctaaatagtaatacaaatgacaaactgcattaaatttactaattataaaagctgcaaagcagactggtggcaagtacacagcccttttttttgcagtgctaacttgtctactgtgtattatgaaaattactgttgtccccccacccttttttccttaaataaagtaaaaatgacaccta

SEQ ID NO: 317849 - DNA, 3820 bp, Homo sapiens
catgcctcagcctcctgagtagctgggattacaggtgtgtgccaccacatggtatttttagtagagatgggttttgtcatgttggccagactggtctggaactcctggcctcccaaagtgctgggattacaggtgtgagccactgcacctggcctcagagtttcttttgaaaaggctctttgggagtctaagcttctcgtacttgacagtgttgaggatgatggtggcttagattccctggctggaagtgcttcatgaccatggtaaccattccctctcttttcttgcttttgcaggtgttctttgcctctgttcggtctggtggcagcagtcaggtttatttcatgaccttaggcaggacttctcttctgagctggtagaagcagtgtgatccagggattactggcctccagagtcttcaagatcctgagaacttggaattccttgtaactggagctcggagctgcaccgagggcaaccaggacagctgtgtgtgcagacctcatgtgttgggttctctcccctccttcctgttcctcttatataccagtttatccccattctttttttttttcttactccaaaataaatcaaggctgcaatgcagctggtgctgttcagattctaccatcaggtgctataagtgtttgggattgagcatcatactggaaagcaaacacctttcctccagctccagaattccttgtctctgaatgactctgtcttgtgggtgtctgacagtggcgacgatgaacatgccgttggttttattggcagtgggcacaaggaggtgagaagtggtggtaaaaggagcggagtgctgaagcagagagcagatttaatatagtaacattaacagtgtatttaattgacatttcttttttgtaatgtgacgatatgtggacaaagaagaagatgcaggtttaagaagttaatatttataaaatgtgaaagacacagttactaggataacttttttgtgggtggggcttgggagatggggtggggtgggttaaggggtcccattttgtttctttggatttggggtgggggtcctggccaagaactcagtcatttttctgtgtaccaggttgcctaaatcatgtgcagatggttctaaaaaaaaaaaaaaaaaaaaaaaaaaaggaaaaaaaaaaagaaaaagaaaacgtgtgcattttgtataatggccagaactttgtcgtgtgacagtattagcactgcctcagttaaaggtttaatttttgtttaaacctagacgtgcaacaaaagttttaccacagtctgcacttgcagaagaaagaaaaaaattcaaaccacatgtttattttttttttgcctacctcattgttcttaatgcattgagaggtgatttagtttatatgtttttggaagaaaccattaatgtttaatttaatcttaataccaaaacgaccagattgaagtttgacttttattgtcacaaatcagcaggcacaagaactgtccatgaagatgggaaatagccttaaggctgatgcagtttacttacaagtttagaaaccagaatgctttgtttttaccagattcaccattagaggttgatggggcaactgcagcccatgacacaagatctcattgttctcgatgtagaggggttggtagcagacaggtggttacattagaatagtcacacaaactgttcagtgttgcaggaaccttttcttgggggtgggggagtttcccttttctaaaaatgcaatgcactaaaactattttaagaatgtagttaattctgcttattcataaagtgggcatcttctgtgttttaggtgtaatatcgaagtcctggcttttctcgttttctcacttgctctcttgttctctgtttttttaaaccaattttactttatgaatatattcatgacatttgtaataaatgtcttgagaaagaatttgtttcatggcttcatggtcatcactcaagctcccgtaaggatattaccgtctcaggaaaggatcaggactccatgtcacagtcctgccatcttactttcctcttgtcgagttctgagtggaaataactgcattatggctgctttaacctcagtcatcaaaagaaacttgctgttttttaggcttgatctttttcctttgtggttaattttcctgtatattgtgaaaatgggggattttccctctgctcccacccacctaaacacagcagccatttgtacctgtttgcttcccatcccacttggcacccactctgacctcttgtcagtttcctgttcctggttccatctttttgaaaaaggccctcctttgagctacaaacatctggtaagacaagtacatccactcatgaatgcagacacagcagctggtggttttgtgtatacctgtaaagacaagctgagaagcttactttttggggaagtaaaagaagatggaaatggatgtttcatttgtatgagtttggagcagtgctgaaggccaaagccgcctactggtttgtagttaacctagagaaggttgaaaaattaatcctacctttaaagggatttgaggtaggctggattccatcgccacaggactttagttagaattaaattcctgcttgtaatttatatccatgtttaggcttttcataagatgaaacatgccacagtgaacacactcgtgtacatatcaagagaagaaggaaaggcacaggtggagaacagtaaaaggtgggcagatgtctttgaagaaatgctcaatgtctgatgctaagtgggagaaggcagagaacaaaggatgtggcataatggtcttaacattatccaaagacttgaagctccatgtctgtaagtcaaatgttacacaaaaaaaaatgcaaatggtgtttcattggaattaccaagtgcttagaacttgctggctttcccataggtggtaaaggggtctgagctcacaccgagttgtgcttggcttgcttgtgcagctccaggcacccggtgggcactctggtggtgtttgtggtgaactgaattgaatccattgttgggcttaagttactgaaattggaacaccctttgtccttctcggcgggggcttcctggtctgtgctttacttggcttttttccttcccgtcttagcctcacccccttgtcaaccagattgagttgctatagcttgatgcagggacccagtgaagtttctccgttaaagattgggagtcgtcgaaatgtttagattcttttaggaaaggaattattttccccccttttacagggtagtaacttctccacagaagtgccaatatggcaaaattacacaagaaaacagtattgcaatgacaccattacataaggaacattgaactgttagaggagtgctcttccaaacaaaacaaaaatgtctctaggtttagtcagagctttcacaagtaataacctttctgtattaaaatcagagtaaccctttctgtattgagtgcagtgttttttactcttttctcatgcacatgttacgttggagaaaatgtttacaaaaatggttttgttacactaatgcgcaccacatatttatggtttattttaagtgactttttatgggttatttaggttttcgtcttagttgtagcacacttaccctaattttgccaattattaatttgctaaatagtaatacaaatgacaaactgcattaaatttactaattataaaagctgcaaagcagactggtggcaagtacacagcccttttttttgcagtgctaacttgtctactgtgtattatgaaaattactgttgtccccccacccttttttccttaaataaagtaaaaatgacaccta

SEQ ID NO: 317850 - DNA, 4776 bp, Homo sapiens
caaacttttagatactgtaaatattgcattaaaaattgtataactgcttaaaaataccattttttattcacattagacccagttaatataaaatataatagtttgaggatcataatgtgaaaagtagaatgtttttgaggtaaaatgaaaaagaatgttagggaatatttgagtcagatatttgataattgggtagtgatgaagagcaaagtggtcctcctgtgcccatgtgcttctgagagagaatgagcacttcagaattgctgcacttgggtgtgccgtagaataccagacactgtcagtcttctggaccaaatatatggagcgaatacactggactatgaaatgagctttcagttatttaggtgcctccaaattattatgaattattgaggagcatcacgtttctaggtctttagaaaagagagggcatggcggttaaactggttttcccaatttctccaagatatgttgctcaccttgtgtcttgtctgccctatagcttgttatggagttctgtggggctgggtccattacagaccttgtgaagaacaccaaagggaacacactcaaagaagactggatcgcttacatctccagagaaatcctgaggggactggcacatcttcacattcatcatgtgattcaccgggatatcaagggccagaatgtgttgctgactgagaatgcagaggtgaaacttgttgactttggtgtgagtgctcagctggacaggactgtggggcggagaaatacgttcataggcactccctactggatggctcctgaggtcatcgcctgtgatgagaacccagatgccacctatgattacagaagtgatctttggtcttgtggcattacagccattgagatggcagaaggtgctccccctctctgtgacatgcatccaatgagagcactgtttctcattcccagaaaccctcctccccggctgaagtcaaaaaaatggtcgaagaagttttttagttttatagaagggtgcctggtgaagaattacatgcagcggccctctacagagcagcttttgaaacatccttttataagggatcagccaaatgaaaggcaagttagaatccagcttaaggatcatatagatcgtaccaggaagaagagaggcgagaaagatgaaactgagtatgagtacagtgggagtgaggaagaagaggaggaagtgcctgaacaggaaggagagccaagttccattgtgaacgtgcctggtgagtctactcttcgccgagatttcctgagactgcagcaggagaacaaggaacgttccgaggctcttcggagacaacagttactacaggagcaacagctccgggagcaggaagaatataaaaggcaactgctggcagagagacagaagcggattgagcagcagaaagaacagaggcgacggctagaagagcaacaaaggagagagcgggaagctagaaggcagcaggaacgtgaacagcgaaggagagaacaagaagaaaagaggcgtctagaggagttggagagaaggcgcaaagaagaagaggagaggagacgggcagaagaagaaaagaggagagttgaaagagaacaggagtatatcaggcgacagctagaagaggagcagcggcacttggaagtccttcagcagcagctgctccaggagcaggccatgttactgcatgaccataggaggccgcacccgcagcactcgcagcagccgccaccaccgcagcaggaaaggagcaagccaagcttccatgctcccgagcccaaagcccactacgagcctgctgaccgagcgcgagaggttcctgtgagaacaacatctcgctcccctgttctgtcccgtcgagattccccactgcagggcagtgggcagcagaatagccaggcaggacagagaaactccaccagcagtattgagcccaggcttctgtgggagagagtggagaagctggtgcccagacctggcagtggcagctcctcagggtccagcaactcaggatcccagcccgggtctcaccctgggtctcagagtggctccggggaacgcttcagagtgagatcatcatccaagtctgaaggctctccatctcagcgcctggaaaatgcagtgaaaaaacctgaagataaaaaggaagttttcagacccctcaagcctgctgcaagtggattgtgcaggatcagttttacttatttcagacttgaatgagatctttctattaaaaatatgtggttgagaggcctgcagtcttttctgcgagggcccctcacagagttgaggaattataaggaatgacctaaaccccagacatacttgttcccttccattggtatcgtctgctttccctgtataaagtctcaagtgagtaaaaccttttttctgttgttccagccatacacttggtgtacagtcagccttacaaaattatgcagaacaaagtatagttcttatttaatgaaatttccttctaaggaaactgatgctttaaaaaaaatacaaaagaaagaaaagcctttttatctctttcttggcattaacctttacttattcttcgtgagttcagcatttacaatactggcttttagactaagtttttaggtgatagttgtgactgcttctcacccttctcttttaatccctctgatgttacctgaccatgtaattgtgcacgctttgtggaattttaagcctgtcagagttttcatttcctgcttgaactgatttctgtacttctccctctccccttctttctcccgcgcttccttgtactgtgcattcctcatcaacgatggcttctcggactccacgaaactgcgctgtactgaagggcgaagtggatctgaccgcactggccaaagagcttcgagcagtggaagatgtacggccacctcacaaagtaacggactactcctcatccagtgaggagtcggggacgacggatgaggaggacgacgatgtggagcaggaaggggctgacgagtccacctcaggaccagaggacaccagagcagcgtcatctctgaatttgagcaatggtgaaacggaatctgtgaaaaccatgattgtccatgatgatgtagaaagtgagccggccatgaccccatccaaggagggcactctaatcgtccgccagagtacagttgaccaaaagcgtgccagccatcatgagagcaatggctttgccggtcgcattcacctcttgccagatctcttacagcaaagccattcctcctccacttcctccacctcctcctccccatcctccagccagccgacacccaccatgtccccacagacaccccaggacaagctcactgctaatgagactcagtccgctagtagcacactccagaaacacaaatcttcctcctcctttacaccttttatagaccccagattactacagatttctccatctagcggaacaacagtgacatctgtggtgggattttcctgtgatgggatgagaccagaagccataaggcaagatcctacccggaaaggctcagtggtcaatgtgaatcctaccaacactaggccacagagtgacaccccggagattcgtaaatacaagaagaggtttaactctgagattctgtgtgctgccttatggggagtgaatttgctagtgggtacagagagtggcctgatgctgctggacagaagtggccaagggaaggtctatcctcttatcaaccgaagacgatttcaacaaatggacgtacttgagggcttgaatgtcttggtgacaatatctggcaaaaaggataagttacgtgtctactatttgtcctggttaagaaataaaatacttcacaatgatccagaagttgagaagaagcagggatggacaaccgtaggggatttggaaggatgtgtacattataaagttgtaaaatatgaaagaatcaaatttctggtgattgctttgaagagttctgtggaagtctatgcgtgggcaccaaagccatatcacaaatttatggcctttaagtcatttggagaattggtacataagccattactggtggatctcactgttgaggaaggccagaggttgaaagtgatctatggatcctgtgctggattccatgctgttgatgtggattcaggatcagtctatgacatttatctaccaacacatatccagtgtagcatcaaaccccatgcaatcatcatcctccccaatacagatggaatggagcttctggtgtgctatgaagatgagggggtttatgtaaacacatatggaaggatcaccaaggatgtagttctacagtggggagagatgcctacatcagtagcatatattcgatccaatcagacaatgggctggggagagaaggccatagagatccgatctgtggaaactggtcacttggatggtgtgttcatgcacaaaagggctcaaagactaaaattcttgtgtgaacgcaatgacaaggtgttctttgcctctgttcggtctggtggcagcagtcaggtttatttcatgaccttaggcaggacttctcttctgagctggtagaagcagtgtgatccagggattactggcctccagagtcttcaagatcctgagaacttggaattccttgtaactggagctcggagctgcaccgagggcaaccaggacagctgtgtgtgcagacctcatgtgttgggttctctcccctccttcctgttcctcttatataccagtttatccccattctttttttttttcttactccaaaataaatcaaggctgcaatgcagctggtgctgttcagatt

SEQ ID NO: 317851 - DNA, 3165 bp, Homo sapiens
caaacttttagatactgtaaatattgcattaaaaattgtataactgcttaaaaataccattttttattcacattagacccagttaatataaaatataatagtttgaggatcataatgtgaaaagtagaatgtttttgaggtaaaatgaaaaagaatgttagggaatatttgagtcagatatttgataattgggtagtgatgaagagcaaagtggtcctcctgtgcccatgtgcttctgagagagaatgagcacttcagaattgctgcacttgggtgtgccgtagaataccagacactgtcagtcttctggaccaaatatatggagcgaatacactggactatgaaatgagctttcagttatttaggtgcctccaaattattatgaattattgaggagcatcacgtttctaggtctttagaaaagagagggcatggcggttaaactggttttcccaatttctccaagatatgttgctcaccttgtgtcttgtctgccctatagcttgttatggagttctgtggggctgggtccattacagaccttgtgaagaacaccaaagggaacacactcaaagaagactggatcgcttacatctccagagaaatcctgaggggactggcacatcttcacattcatcatgtgattcaccgggatatcaagggccagaatgtgttgctgactgagaatgcagaggtgaaacttgttgactttggtgtgagtgctcagctggacaggactgtggggcggagaaatacgttcataggcactccctactggatggctcctgaggtcatcgcctgtgatgagaacccagatgccacctatgattacagaagtgatctttggtcttgtggcattacagccattgagatggcagaaggtgctccccctctctgtgacatgcatccaatgagagcactgtttctcattcccagaaaccctcctccccggctgaagtcaaaaaaatggtcgaagaagttttttagttttatagaagggtgcctggtgaagaattacatgcagcggccctctacagagcagcttttgaaacatccttttataagggatcagccaaatgaaaggcaagttagaatccagcttaaggatcatatagatcgtaccaggaagaagagaggcgagaaagatgaaactgagtatgagtacagtgggagtgaggaagaagaggaggaagtgcctgaacaggaaggagagccaagttccattgtgaacgtgcctggtgagtctactcttcgccgagatttcctgagactgcagcaggagaacaaggaacgttccgaggctcttcggagacaacagttactacaggagcaacagctccgggagcaggaagaatataaaaggcaactgctggcagagagacagaagcggattgagcagcagaaagaacagaggcgacggctagaagagcaacaaaggagagagcgggaagctagaaggcagcaggaacgtgaacagcgaaggagagaacaagaagaaaagaggcgtctagaggagttggagagaaggcgcaaagaagaagaggagaggagacgggcagaagaagaaaagaggagagttgaaagagaacaggagtatatcaggcgacagctagaagaggagcagcggcacttggaagtccttcagcagcagctgctccaggagcaggccatgttactgcatgaccataggaggccgcacccgcagcactcgcagcagccgccaccaccgcagcaggaaaggagcaagccaagcttccatgctcccgagcccaaagcccactacgagcctgctgaccgagcgcgagaggttcctgtgagaacaacatctcgctcccctgttctgtcccgtcgagattccccactgcagggcagtgggcagcagaatagccaggcaggacagagaaactccaccagcagtattgagcccaggcttctgtgggagagagtggagaagctggtgcccagacctggcagtggcagctcctcagggtccagcaactcaggatcccagcccgggtctcaccctgggtctcagagtggctccggggaacgcttcagagtgagatcatcatccaagtctgaaggctctccatctcagcgcctggaaaatgcagtgaaaaaacctgaagataaaaaggaagttttcagacccctcaagcctgctgcaagtggattgtgcaggatcagttttacttatttcagacttgaatgagatctttctattaaaaatatgtggttgagaggcctgcagtcttttctgcgagggcccctcacagagttgaggaattataaggaatgacctaaaccccagacatacttgttcccttccattggtatcgtctgctttccctgtataaagtctcaagtgagtaaaaccttttttctgttgttccagccatacacttggtgtacagtcagccttacaaaattatgcagaacaaagtatagttcttatttaatgaaatttccttctaaggaaactgatgctttaaaaaaaatacaaaagaaagaaaagcctttttatctctttcttggcattaacctttacttattcttcgtgagttcagcatttacaatactggcttttagactaagtttttaggtgatagttgtgactgcttctcacccttctcttttaatccctctgatgttacctgaccatgtaattgtgcacgctttgtggaattttaagcctgtcagagttttcatttcctgcttgaactgatttctgtacttctccctctccccttctttctcccgcgcttccttgtactgtgcattcctcatcaacgatggcttctcggactccacgaaactgcgctgtactgaagggcgaagtggatctgaccgcactggccaaagagcttcgagcagtggaagatgtacggccacctcacaaagtaacggactactcctcatccagtgaggagtcggggacgacggatgaggaggacgacgatgtggagcaggaaggggctgacgagtccacctcaggaccagaggacaccagagcagcgtcatctctgaatttgagcaatggtgaaacggaatctgtgaaaaccatgattgtccatgatgatgtagaaagtgagccggccatgaccccatccaaggagggcactctaatcgtccgccaggtacccgtgtcttctctgttgtcagagg

SEQ ID NO: 317852 - DNA, 1772 bp, Homo sapiens
caaacttttagatactgtaaatattgcattaaaaattgtataactgcttaaaaataccattttttattcacattagacccagttaatataaaatataatagtttgaggatcataatgtgaaaagtagaatgtttttgaggtaaaatgaaaaagaatgttagggaatatttgagtcagatatttgataattgggtagtgatgaagagcaaagtggtcctcctgtgcccatgtgcttctgagagagaatgagcacttcagaattgctgcacttgggtgtgccgtagaataccagacactgtcagtcttctggaccaaatatatggagcgaatacactggactatgaaatgagctttcagttatttaggtgcctccaaattattatgaattattgaggagcatcacgtttctaggtctttagaaaagagagggcatggcggttaaactggttttcccaatttctccaagatatgttgctcaccttgtgtcttgtctgccctatagcttgttatggagttctgtggggctgggtccattacagaccttgtgaagaacaccaaagggaacacactcaaagaagactggatcgcttacatctccagagaaatcctgaggggactggcacatcttcacattcatcatgtgattcaccgggatatcaagggccagaatgtgttgctgactgagaatgcagaggtgaaacttgttgactttggtgtgagtgctcagctggacaggactgtggggcggagaaatacgttcataggcactccctactggatggctcctgaggtcatcgcctgtgatgagaacccagatgccacctatgattacagaagtgatctttggtcttgtggcattacagccattgagatggcagaaggtgctccccctctctgtgacatgcatccaatgagagcactgtttctcattcccagaaaccctcctccccggctgaagtcaaaaaaatggtcgaagaagttttttagttttatagaagggtgcctggtgaagaattacatgcagcggccctctacagagcagcttttgaaacatccttttataagggatcagccaaatgaaaggcaagttagaatccagcttaaggatcatatagatcgtaccaggaagaagagaggcgagaaagatgaaactgagtatgagtacagtgggagtgaggaagaagaggaggaagtgcctgaacaggaaggagagccaagttccattgtgaacgtgcctggtgagtctactcttcgccgagatttcctgagactgcagcaggagaacaaggaacgttccgaggctcttcggagacaacagttactacaggagcaacagctccgggagcaggaagaatataaaaggcaactgctggcagagagacagaagcggattgagcagcagaaagaacagaggcgacggctagaagagcaacaaaggagagagcgggaagctagaaggcagcaggaacgtgaacagaggagtcctcctcctgctgctccgttatgagaaatgcatcacccaagcaattacagcattcatttggtcaaacgcgcccttctacattctcctccgtatcagcagaactgaaagcctgtacactacatttcccagactcctttgccagctggcttccacagttaggttttcaaaggctggagattggttggcaagtggaaggataacaccacttttttcctgttactgctctgtcttggggagcagcagcagcaggagcagtgaacaactatggaagaatgcaggcaactacaca

SEQ ID NO: 317853 - DNA, 1381 bp, Homo sapiens
caaacttttagatactgtaaatattgcattaaaaattgtataactgcttaaaaataccattttttattcacattagacccagttaatataaaatataatagtttgaggatcataatgtgaaaagtagaatgtttttgaggtaaaatgaaaaagaatgttagggaatatttgagtcagatatttgataattgggtagtgatgaagagcaaagtggtcctcctgtgcccatgtgcttctgagagagaatgagcacttcagaattgctgcacttgggtgtgccgtagaataccagacactgtcagtcttctggaccaaatatatggagcgaatacactggactatgaaatgagctttcagttatttaggtgcctccaaattattatgaattattgaggagcatcacgtttctaggtctttagaaaagagagggcatggcggttaaactggttttcccaatttctccaagatatgttgctcaccttgtgtcttgtctgccctatagcttgttatggagttctgtggggctgggtccattacagaccttgtgaagaacaccaaagggaacacactcaaagaagactggatcgcttacatctccagagaaatcctgaggggactggcacatcttcacattcatcatgtgattcaccgggatatcaagggccagaatgtgttgctgactgagaatgcagaggtgaaacttgttgactttggtgtgagtgctcagctggacaggactgtggggcggagaaatacgttcataggcactccctactggatggctcctgaggtcatcgcctgtgatgagaacccagatgccacctatgattacagaagtgatctttggtcttgtggcattacagccattgagatggcagaaggtgctccccctctctgtgacatgcatccaatgagagcactgtttctcattcccagaaaccctcctccccggctgaagtcaaaaaaatggtcgaagaagttttttagttttatagaagggtgcctggtgaagaattacatgcagcggccctctacagagcagcttttgaaacatccttttataagggatcagccaaatgaaaggcaagttagaatccagcttaaggatcatatagatcgtaccaggaagaagagaggcgagaaagatgaaactgagtatgagtacagtgggagtgaggaagaagaggaggaagtgcctgaacaggaaggagagccaagttccattgtgaacgtgcctggtgagtctactcttcgccgagatttcctgagactgcagcaggagaacaaggaacgttccgaggctcttcggagacaaccgtggactagtagccaaccgtggactagtagccaaccgtggactagtagcccacgtggactagta

SEQ ID NO: 317854 - DNA, 1226 bp, Homo sapiens
caaacttttagatactgtaaatattgcattaaaaattgtataactgcttaaaaataccattttttattcacattagacccagttaatataaaatataatagtttgaggatcataatgtgaaaagtagaatgtttttgaggtaaaatgaaaaagaatgttagggaatatttgagtcagatatttgataattgggtagtgatgaagagcaaagtggtcctcctgtgcccatgtgcttctgagagagaatgagcacttcagaattgctgcacttgggtgtgccgtagaataccagacactgtcagtcttctggaccaaatatatggagcgaatacactggactatgaaatgagctttcagttatttaggtgcctccaaattattatgaattattgaggagcatcacgtttctaggtctttagaaaagagagggcatggcggttaaactggttttcccaatttctccaagatatgttgctcaccttgtgtcttgtctgccctatagcttgttatggagttctgtggggctgggtccattacagaccttgtgaagaacaccaaagggaacacactcaaagaagactggatcgcttacatctccagagaaatcctgaggggactggcacatcttcacattcatcatgtgattcaccgggatatcaagggccagaatgtgttgctgactgagaatgcagaggtgaaacttgttgactttggtgtgagtgctcagctggacaggactgtggggcggagaaatacgttcataggcactccctactggatggctcctgaggtcatcgcctgtgatgagaacccagatgccacctatgattacagaagtgatctttggtcttgtggcattacagccattgagatggcagaaggtgctccccctctctgtgacatgcatccaatgagagcactgtttctcattcccagaaaccctcctccccggctgaagtcaaaaaaatggtcgaagaagttttttagttttatagaagggtgcctggtgaagaattacatgcagcggccctctacagagcagcttttgaaacatccttttataagggatcagccaaatgaaaggcaagttagaatccagcttaaggatcatatagatcgtaccaggaagaagagaggcgagaaagatgaaactgagtatgagtacagccggggaggagggtttctgggaatgagaaacagtgctctcattggatgcatgtcacaga

SEQ ID NO: 317855 - DNA, 228 bp, Homo sapiens
taaggaaactgatgctttaaaaaaaatacaaaagaaagaaaagcctttttatctctttcttggcattaacctttacttattcttcgtgagttcagcatttacaatactggcttttagactaagtttttaaaaatcaccttcttaaactcactggttgcctaccttctgctttttggtacctggggtgatagttgtgactgcttctcacccttctcttttaatccctct

SEQ ID NO: 317856 - DNA, 469 bp, Homo sapiens
ccatgaacctcacctcattagtgtccacctggcactgactgatcagcacactataacatcatgagaaagatggcgggaagatccctggtaattatacatttttacttacgtagcaacaaaggagagagcgggaagctagaaggcagcaggaacgtgaacagcgaaggagagaacaagaagaaaagaggcgtctagaggagttggagagaaggcgcaaagaagaagaggagaggagacgggcagaagaagaaaagaggagagttgaaagagaacaggttagttcacagataacatagcaggcatacacttgtgaagtttgttactttgcagagctgggggatttttagaaagtatacacacatgtgatgcatacacacatgtacacacatacacatatacttagaacttcagatgtatgaacgtggtgaaacacagttggaatgacaccaataaattcagtctcttgtct

SEQ ID NO: 317857 - DNA, 434 bp, Homo sapiens
ggattatgactcccttgtcagctgtttctgtggtacacatctccaacttgtgacttgcctttcactaggtttaagtgctggccttaagtgattgatttcttttggttactattgttattaatgatgagacctacttctggatatgcatgtaaaatatttatatttattttgctaggcaaaaaggataagttacgtgtctactatttgtcctggttaagaaataaaatacttcacaatgatccagaagttgagaagaagcagggatggacaaccgtaggggatttggaaggatgtgtacattataaagttggtaagttctagaagcgtcatattttgtttttccagagtttgattagagtttgaattttaaactttaaattttcacaggttttttgaagtttgtaataataaacttgtttctgaaacacgtggat

SEQ ID NO: 317858 - DNA, 412 bp, Homo sapiens
ccttttctctccaactgccttgcttgatttattcatttttttggcttcttttaaatgataacccctcccctccttcctctccaggatcctgctgggatttttgagctggtggaagtggttggaaatggcacctatggacaagtctataaggtcggtgtgggcgccttctttgtttcccgtggcatgtggaaacttcttattgggggacgaggagagggtgataaacatgctgctgactggaggccacgccgcttggccaaagttgggagaggggtttctttcgccttgcagtccctctgtttttgcacaccgagtttatattcagactggccttaaaagacctcatttcctggctttgagataaggaaataagctacactcttaggcatgcactttacttcgataaaatgga

SEQ ID NO: 317859 - DNA, 584 bp, Homo sapiens
aggatcccgtggatgttatcgccaacacatatccagtgtagcatcaaaccccatgcaatcatcatcctccccaatacagatggaatggagcttctggtgtgctatgaagatgagggggtttatgtaaacacatatggaaggatcaccaaggatgtagttctacagtggggagagatgcctacatcagtagcatatattcgatccaatcagacaatgggctggggagagaaggccatagagatccgatctgtggaaactggtcacttggatggtgtgttcatgcacaaaagggctcaaagactaaaattcttgtgtgaacgcaatgacaaggtgttctttgcctctgttcggtctggtggcagcagtcaggtttatttcatgaccttaggcaggacttctcttctgagctggtagaagcagtgtgatccagggattactggcctccagagtcttcaagatcctgagaacttggaattccttgtaactggagctcggagctgcaccgagggcaaccaggacagctgtgtgtgcagacctcatgtgttggggtgttggggataacatcacgtaatcctctagggtca

SEQ ID NO: 317860 - DNA, 7596 bp, Homo sapiens
caaacttttagatactgtaaatattgcattaaaaattgtataactgcttaaaaataccattttttattcacattagacccagttaatataaaatataatagtttgaggatcataatgtgaaaagtagaatgtttttgaggtaaaatgaaaaagaatgttagggaatatttgagtcagatatttgataattgggtagtgatgaagagcaaagtggtcctcctgtgcccatgtgcttctgagagagaatgagcacttcagaattgctgcacttgggtgtgccgtagaataccagacactgtcagtcttctggaccaaatatatggagcgaatacactggactatgaaatgagctttcagttatttaggtgcctccaaattattatgaattattgaggagcatcacgtttctaggtctttagaaaagagagggcatggcggttaaactggttttcccaatttctccaagatatgttgctcaccttgtgtcttgtctgccctatagcttgttatggagttctgtggggctgggtccattacagaccttgtgaagaacaccaaagggaacacactcaaagaagactggatcgcttacatctccagagaaatcctgaggggactggcacatcttcacattcatcatgtgattcaccgggatatcaagggccagaatgtgttgctgactgagaatgcagaggtgaaacttgttgactttggtgtgagtgctcagctggacaggactgtggggcggagaaatacgttcataggcactccctactggatggctcctgaggtcatcgcctgtgatgagaacccagatgccacctatgattacagaagtgatctttggtcttgtggcattacagccattgagatggcagaaggtgctccccctctctgtgacatgcatccaatgagagcactgtttctcattcccagaaaccctcctccccggctgaagtcaaaaaaatggtcgaagaagttttttagttttatagaagggtgcctggtgaagaattacatgcagcggccctctacagagcagcttttgaaacatccttttataagggatcagccaaatgaaaggcaagttagaatccagcttaaggatcatatagatcgtaccaggaagaagagaggcgagaaagatgaaactgagtatgagtacagtgggagtgaggaagaagaggaggaagtgcctgaacaggaaggagagccaagttccattgtgaacgtgcctggtgagtctactcttcgccgagatttcctgagactgcagcaggagaacaaggaacgttccgaggctcttcggagacaacagttactacaggagcaacagctccgggagcaggaagaatataaaaggcaactgctggcagagagacagaagcggattgagcagcagaaagaacagaggcgacggctagaagagcaacaaaggagagagcgggaagctagaaggcagcaggaacgtgaacagcgaaggagagaacaagaagaaaagaggcgtctagaggagttggagagaaggcgcaaagaagaagaggagaggagacgggcagaagaagaaaagaggagagttgaaagagaacaggagtatatcaggcgacagctagaagaggagcagcggcacttggaagtccttcagcagcagctgctccaggagcaggccatgttactggagtgccgatggcgggagatggaggagcaccggcaggcagagaggctccagaggcagttgcaacaagaacaagcatatctcctgtctctacagcatgaccataggaggccgcacccgcagcactcgcagcagccgccaccaccgcagcaggaaaggagcaagccaagcttccatgctcccgagcccaaagcccactacgagcctgctgaccgagcgcgagaggtggaagatagatttaggaaaactaaccacagctcccctgaagcccagtctaagcagacaggcagagtattggagccaccagtgccttcccgatcagagtctttttccaatggcaactccgagtctgtgcatcccgccctgcagagaccagcggagccacaggtacagtggtcccacctggcatctctcaagaacaatgtttcccctgtctcgcgatcccattccttcagtgacccttctcccaaatttgcacaccaccatcttcgttctcaggacccatgtccaccttcccgcagtgaggtgctcagtcagagctctgactctaagtcagaggcgcctgaccctacccaaaaggcttggtctagatcagacagtgacgaggtgcctccaagggttcctgtgagaacaacatctcgctcccctgttctgtcccgtcgagattccccactgcagggcagtgggcagcagaatagccaggcaggacagagaaactccaccagcagtattgagcccaggcttctgtgggagagagtggagaagctggtgcccagacctggcagtggcagctcctcagggtccagcaactcaggatcccagcccgggtctcaccctgggtctcagagtggctccggggaacgcttcagagtgagatcatcatccaagtctgaaggctctccatctcagcgcctggaaaatgcagtgaaaaaacctgaagataaaaaggaagttttcagacccctcaagcctgctgcaagtgatctgaccgcactggccaaagagcttcgagcagtggaagatgtacggccacctcacaaagtaacggactactcctcatccagtgaggagtcggggacgacggatgaggaggacgacgatgtggagcaggaaggggctgacgagtccacctcaggaccagaggacaccagagcagcgtcatctctgaatttgagcaatggtgaaacggaatctgtgaaaaccatgattgtccatgatgatgtagaaagtgagccggccatgaccccatccaaggagggcactctaatcgtccgccagactcagtccgctagtagcacactccagaaacacaaatcttcctcctcctttacaccttttatagaccccagattactacagatttctccatctagcggaacaacagtgacatctgtggtgggattttcctgtgatgggatgagaccagaagccataaggcaagatcctacccggaaaggctcagtggtcaatgtgaatcctaccaacactaggccacagagtgacaccccggagattcgtaaatacaagaagaggtttaactctgagattctgtgtgctgccttatggggagtgaatttgctagtgggtacagagagtggcctgatgctgctggacagaagtggccaagggaaggtctatcctcttatcaaccgaagacgatttcaacaaatggacgtacttgagggcttgaatgtcttggtgacaatatctggcaaaaaggataagttacgtgtctactatttgtcctggttaagaaataaaatacttcacaatgatccagaagttgagaagaagcagggatggacaaccgtaggggatttggaaggatgtgtacattataaagttgtaaaatatgaaagaatcaaatttctggtgattgctttgaagagttctgtggaagtctatgcgtgggcaccaaagccatatcacaaatttatggcctttaagtcatttggagaattggtacataagccattactggtggatctcactgttgaggaaggccagaggttgaaagtgatctatggatcctgtgctggattccatgctgttgatgtggattcaggatcagtctatgacatttatctaccaacacatatccagtgtagcatcaaaccccatgcaatcatcatcctccccaatacagatggaatggagcttctggtgtgctatgaagatgagggggtttatgtaaacacatatggaaggatcaccaaggatgtagttctacagtggggagagatgcctacatcagtagcatatattcgatccaatcagacaatgggctggggagagaaggccatagagatccgatctgtggaaactggtcacttggatggtgtgttcatgcacaaaagggctcaaagactaaaattcttgtgtgaacgcaatgacaaggtgttctttgcctctgttcggtctggtggcagcagtcaggtttatttcatgaccttaggcaggacttctcttctgagctggtagaagcagtgtgatccagggattactggcctccagagtcttcaagatcctgagaacttggaattccttgtaactggagctcggagctgcaccgagggcaaccaggacagctgtgtgtgcagacctcatgtgttgggttctctcccctccttcctgttcctcttatataccagtttatccccattctttttttttttcttactccaaaataaatcaaggctgcaatgcagctggtgctgttcagattctaccatcaggtgctataagtgtttgggattgagcatcatactggaaagcaaacacctttcctccagctccagaattccttgtctctgaatgactctgtcttgtgggtgtctgacagtggcgacgatgaacatgccgttggttttattggcagtgggcacaaggaggtgagaagtggtggtaaaaggagcggagtgctgaagcagagagcagatttaatatagtaacattaacagtgtatttaattgacatttcttttttgtaatgtgacgatatgtggacaaagaagaagatgcaggtttaagaagttaatatttataaaatgtgaaagacacagttactaggataacttttttgtgggtggggcttgggagatggggtggggtgggttaaggggtcccattttgtttctttggatttggggtgggggtcctggccaagaactcagtcatttttctgtgtaccaggttgcctaaatcatgtgcagatggttctaaaaaaaaaaaaaaaaaaaaaaaaaaaggaaaaaaaaaaagaaaaagaaaacgtgtgcattttgtataatggccagaactttgtcgtgtgacagtattagcactgcctcagttaaaggtttaatttttgtttaaacctagacgtgcaacaaaagttttaccacagtctgcacttgcagaagaaagaaaaaaattcaaaccacatgtttattttttttttgcctacctcattgttcttaatgcattgagaggtgatttagtttatatgtttttggaagaaaccattaatgtttaatttaatcttaataccaaaacgaccagattgaagtttgacttttattgtcacaaatcagcaggcacaagaactgtccatgaagatgggaaatagccttaaggctgatgcagtttacttacaagtttagaaaccagaatgctttgtttttaccagattcaccattagaggttgatggggcaactgcagcccatgacacaagatctcattgttctcgatgtagaggggttggtagcagacaggtggttacattagaatagtcacacaaactgttcagtgttgcaggaaccttttcttgggggtgggggagtttcccttttctaaaaatgcaatgcactaaaactattttaagaatgtagttaattctgcttattcataaagtgggcatcttctgtgttttaggtgtaatatcgaagtcctggcttttctcgttttctcacttgctctcttgttctctgtttttttaaaccaattttactttatgaatatattcatgacatttgtaataaatgtcttgagaaagaatttgtttcatggcttcatggtcatcactcaagctcccgtaaggatattaccgtctcaggaaaggatcaggactccatgtcacagtcctgccatcttactttcctcttgtcgagttctgagtggaaataactgcattatggctgctttaacctcagtcatcaaaagaaacttgctgttttttaggcttgatctttttcctttgtggttaattttcctgtatattgtgaaaatgggggattttccctctgctcccacccacctaaacacagcagccatttgtacctgtttgcttcccatcccacttggcacccactctgacctcttgtcagtttcctgttcctggttccatctttttgaaaaaggccctcctttgagctacaaacatctggtaagacaagtacatccactcatgaatgcagacacagcagctggtggttttgtgtatacctgtaaagacaagctgagaagcttactttttggggaagtaaaagaagatggaaatggatgtttcatttgtatgagtttggagcagtgctgaaggccaaagccgcctactggtttgtagttaacctagagaaggttgaaaaattaatcctacctttaaagggatttgaggtaggctggattccatcgccacaggactttagttagaattaaattcctgcttgtaatttatatccatgtttaggcttttcataagatgaaacatgccacagtgaacacactcgtgtacatatcaagagaagaaggaaaggcacaggtggagaacagtaaaaggtgggcagatgtctttgaagaaatgctcaatgtctgatgctaagtgggagaaggcagagaacaaaggatgtggcataatggtcttaacattatccaaagacttgaagctccatgtctgtaagtcaaatgttacacaaaaaaaaatgcaaatggtgtttcattggaattaccaagtgcttagaacttgctggctttcccataggtggtaaaggggtctgagctcacaccgagttgtgcttggcttgcttgtgcagctccaggcacccggtgggcactctggtggtgtttgtggtgaactgaattgaatccattgttgggcttaagttactgaaattggaacaccctttgtccttctcggcgggggcttcctggtctgtgctttacttggcttttttccttcccgtcttagcctcacccccttgtcaaccagattgagttgctatagcttgatgcagggacccagtgaagtttctccgttaaagattgggagtcgtcgaaatgtttagattcttttaggaaaggaattattttccccccttttacagggtagtaacttctccacagaagtgccaatatggcaaaattacacaagaaaacagtattgcaatgacaccattacataaggaacattgaactgttagaggagtgctcttccaaacaaaacaaaaatgtctctaggtttagtcagagctttcacaagtaataacctttctgtattaaaatcagagtaaccctttctgtattgagtgcagtgttttttactcttttctcatgcacatgttacgttggagaaaatgtttacaaaaatggttttgttacactaatgcgcaccacatatttatggtttattttaagtgactttttatgggttatttaggttttcgtcttagttgtagcacacttaccctaattttgccaattattaatttgctaaatagtaatacaaatgacaaactgcattaaatttactaattataaaagctgcaaagcagactggtggcaagtacacagcccttttttttgcagtgctaacttgtctactgtgtattatgaaaattactgttgtccccccacccttttttccttaaataaagtaaaaatgacaccta

SEQ ID NO: 317861 - DNA, 6241 bp, Homo sapiens
ccgggtgcttcatagctttcgcgtctacttactggtccggattgcctcgtacttactgccggcttgcctctacagagcagcttttgaaacatccttttataagggatcagccaaatgaaaggcaagttagaatccagcttaaggatcatatagatcgtaccaggaagaagagaggcgagaaagatgaaactgagtatgagtacagtgggagtgaggaagaagaggaggaagtgcctgaacaggaaggagagccaagttccattgtgaacgtgcctggtgagtctactcttcgccgagatttcctgagactgcagcaggagaacaaggaacgttccgaggctcttcggagacaacagttactacaggagcaacagctccgggagcaggaagaatataaaaggcaactgctggcagagagacagaagcggattgagcagcagaaagaacagaggcgacggctagaagagcaacaaaggagagagcgggaagctagaaggcagcaggaacgtgaacagcgaaggagagaacaagaagaaaagaggcgtctagaggagttggagagaaggcgcaaagaagaagaggagaggagacgggcagaagaagaaaagaggagagttgaaagagaacaggagtatatcaggcgacagctagaagaggagcagcggcacttggaagtccttcagcagcagctgctccaggagcaggccatgttactggagtgccgatggcgggagatggaggagcaccggcaggcagagaggctccagaggcagttgcaacaagaacaagcatatctcctgtctctacagcatgaccataggaggccgcacccgcagcactcgcagcagccgccaccaccgcagcaggaaaggagcaagccaagcttccatgctcccgagcccaaagcccactacgagcctgctgaccgagcgcgagaggttcctgtgagaacaacatctcgctcccctgttctgtcccgtcgagattccccactgcagggcagtgggcagcagaatagccaggcaggacagagaaactccaccagcagtattgagcccaggcttctgtgggagagagtggagaagctggtgcccagacctggcagtggcagctcctcagggtccagcaactcaggatcccagcccgggtctcaccctgggtctcagagtggctccggggaacgcttcagagtgagatcatcatccaagtctgaaggctctccatctcagcgcctggaaaatgcagtgaaaaaacctgaagataaaaaggaagttttcagacccctcaagcctgctgcaagtgatctgaccgcactggccaaagagcttcgagcagtggaagatgtacggccacctcacaaagtaacggactactcctcatccagtgaggagtcggggacgacggatgaggaggacgacgatgtggagcaggaaggggctgacgagtccacctcaggaccagaggacaccagagcagcgtcatctctgaatttgagcaatggtgaaacggaatctgtgaaaaccatgattgtccatgatgatgtagaaagtgagccggccatgaccccatccaaggagggcactctaatcgtccgccagactcagtccgctagtagcacactccagaaacacaaatcttcctcctcctttacaccttttatagaccccagattactacagatttctccatctagcggaacaacagtgacatctgtggtgggattttcctgtgatgggatgagaccagaagccataaggcaagatcctacccggaaaggctcagtggtcaatgtgaatcctaccaacactaggccacagagtgacaccccggagattcgtaaatacaagaagaggtttaactctgagattctgtgtgctgccttatggggagtgaatttgctagtgggtacagagagtggcctgatgctgctggacagaagtggccaagggaaggtctatcctcttatcaaccgaagacgatttcaacaaatggacgtacttgagggcttgaatgtcttggtgacaatatctggcaaaaaggataagttacgtgtctactatttgtcctggttaagaaataaaatacttcacaatgatccagaagttgagaagaagcagggatggacaaccgtaggggatttggaaggatgtgtacattataaagttgtaaaatatgaaagaatcaaatttctggtgattgctttgaagagttctgtggaagtctatgcgtgggcaccaaagccatatcacaaatttatggcctttaagtcatttggagaattggtacataagccattactggtggatctcactgttgaggaaggccagaggttgaaagtgatctatggatcctgtgctggattccatgctgttgatgtggattcaggatcagtctatgacatttatctaccaacacatatccagtgtagcatcaaaccccatgcaatcatcatcctccccaatacagatggaatggagcttctggtgtgctatgaagatgagggggtttatgtaaacacatatggaaggatcaccaaggatgtagttctacagtggggagagatgcctacatcagtagcatatattcgatccaatcagacaatgggctggggagagaaggccatagagatccgatctgtggaaactggtcacttggatggtgtgttcatgcacaaaagggctcaaagactaaaattcttgtgtgaacgcaatgacaaggtgttctttgcctctgttcggtctggtggcagcagtcaggtttatttcatgaccttaggcaggacttctcttctgagctggtagaagcagtgtgatccagggattactggcctccagagtcttcaagatcctgagaacttggaattccttgtaactggagctcggagctgcaccgagggcaaccaggacagctgtgtgtgcagacctcatgtgttgggttctctcccctccttcctgttcctcttatataccagtttatccccattctttttttttttcttactccaaaataaatcaaggctgcaatgcagctggtgctgttcagattctaccatcaggtgctataagtgtttgggattgagcatcatactggaaagcaaacacctttcctccagctccagaattccttgtctctgaatgactctgtcttgtgggtgtctgacagtggcgacgatgaacatgccgttggttttattggcagtgggcacaaggaggtgagaagtggtggtaaaaggagcggagtgctgaagcagagagcagatttaatatagtaacattaacagtgtatttaattgacatttcttttttgtaatgtgacgatatgtggacaaagaagaagatgcaggtttaagaagttaatatttataaaatgtgaaagacacagttactaggataacttttttgtgggtggggcttgggagatggggtggggtgggttaaggggtcccattttgtttctttggatttggggtgggggtcctggccaagaactcagtcatttttctgtgtaccaggttgcctaaatcatgtgcagatggttctaaaaaaaaaaaaaaaaaaaaaaaaaaaggaaaaaaaaaaagaaaaagaaaacgtgtgcattttgtataatggccagaactttgtcgtgtgacagtattagcactgcctcagttaaaggtttaatttttgtttaaacctagacgtgcaacaaaagttttaccacagtctgcacttgcagaagaaagaaaaaaattcaaaccacatgtttattttttttttgcctacctcattgttcttaatgcattgagaggtgatttagtttatatgtttttggaagaaaccattaatgtttaatttaatcttaataccaaaacgaccagattgaagtttgacttttattgtcacaaatcagcaggcacaagaactgtccatgaagatgggaaatagccttaaggctgatgcagtttacttacaagtttagaaaccagaatgctttgtttttaccagattcaccattagaggttgatggggcaactgcagcccatgacacaagatctcattgttctcgatgtagaggggttggtagcagacaggtggttacattagaatagtcacacaaactgttcagtgttgcaggaaccttttcttgggggtgggggagtttcccttttctaaaaatgcaatgcactaaaactattttaagaatgtagttaattctgcttattcataaagtgggcatcttctgtgttttaggtgtaatatcgaagtcctggcttttctcgttttctcacttgctctcttgttctctgtttttttaaaccaattttactttatgaatatattcatgacatttgtaataaatgtcttgagaaagaatttgtttcatggcttcatggtcatcactcaagctcccgtaaggatattaccgtctcaggaaaggatcaggactccatgtcacagtcctgccatcttactttcctcttgtcgagttctgagtggaaataactgcattatggctgctttaacctcagtcatcaaaagaaacttgctgttttttaggcttgatctttttcctttgtggttaattttcctgtatattgtgaaaatgggggattttccctctgctcccacccacctaaacacagcagccatttgtacctgtttgcttcccatcccacttggcacccactctgacctcttgtcagtttcctgttcctggttccatctttttgaaaaaggccctcctttgagctacaaacatctggtaagacaagtacatccactcatgaatgcagacacagcagctggtggttttgtgtatacctgtaaagacaagctgagaagcttactttttggggaagtaaaagaagatggaaatggatgtttcatttgtatgagtttggagcagtgctgaaggccaaagccgcctactggtttgtagttaacctagagaaggttgaaaaattaatcctacctttaaagggatttgaggtaggctggattccatcgccacaggactttagttagaattaaattcctgcttgtaatttatatccatgtttaggcttttcataagatgaaacatgccacagtgaacacactcgtgtacatatcaagagaagaaggaaaggcacaggtggagaacagtaaaaggtgggcagatgtctttgaagaaatgctcaatgtctgatgctaagtgggagaaggcagagaacaaaggatgtggcataatggtcttaacattatccaaagacttgaagctccatgtctgtaagtcaaatgttacacaaaaaaaaatgcaaatggtgtttcattggaattaccaagtgcttagaacttgctggctttcccataggtggtaaaggggtctgagctcacaccgagttgtgcttggcttgcttgtgcagctccaggcacccggtgggcactctggtggtgtttgtggtgaactgaattgaatccattgttgggcttaagttactgaaattggaacaccctttgtccttctcggcgggggcttcctggtctgtgctttacttggcttttttccttcccgtcttagcctcacccccttgtcaaccagattgagttgctatagcttgatgcagggacccagtgaagtttctccgttaaagattgggagtcgtcgaaatgtttagattcttttaggaaaggaattattttccccccttttacagggtagtaacttctccacagaagtgccaatatggcaaaattacacaagaaaacagtattgcaatgacaccattacataaggaacattgaactgttagaggagtgctcttccaaacaaaacaaaaatgtctctaggtttagtcagagctttcacaagtaataacctttctgtattaaaatcagagtaaccctttctgtattgagtgcagtgttttttactcttttctcatgcacatgttacgttggagaaaatgtttacaaaaatggttttgttacactaatgcgcaccacatatttatggtttattttaagtgactttttatgggttatttaggttttcgtcttagttgtagcacacttaccctaattttgccaattattaatttgctaaatagtaatacaaatgacaaactgcattaaatttactaattataaaagctgcaaagcagactggtggcaagtacacagcccttttttttgcagtgctaacttgtctactgtgtattatgaaaattactgttgtccccccacccttttttccttaaataaagtaaaaatgacaccta

SEQ ID NO: 317862 - DNA, 6840 bp, Homo sapiens
aattcgaggatccgggtaccatggcacagagcgacagagacatttattgttatttgttttttggtggcaaaaagggaaaatggcgaacgactcccctgcaaaaagtctggtggacatcgacctctcctccctgcgggatcctgctgggatttttgagctggtggaagtggttggaaatggcacctatggacaagtctataagggtcgacatgttaaaacgggtcagttggcagccatcaaagttatggatgtcactgaggatgaagaggaagaaatcaaactggagataaatatgctaaagaaatactctcatcacagaaacattgcaacatattatggtgctttcatcaaaaagagccctccaggacatgatgaccaactctggcttgttatggagttctgtggggctgggtccattacagaccttgtgaagaacaccaaagggaacacactcaaagaagactggatcgcttacatctccagagaaatcctgaggggactggcacatcttcacattcatcatgtgattcaccgggatatcaagggccagaatgtgttgctgactgagaatgcagaggtgaaacttgttgactttggtgtgagtgctcagctggacaggactgtggggcggagaaatacgttcataggcactccctactggatggctcctgaggtcatcgcctgtgatgagaacccagatgccacctatgattacagaagtgatctttggtcttgtggcattacagccattgagatggcagaaggtgctccccctctctgtgacatgcatccaatgagagcactgtttctcattcccagaaaccctcctccccggctgaagtcaaaaaaatggtcgaagaagttttttagttttatagaagggtgcctggtgaagaattacatgcagcggccctctacagagcagcttttgaaacatccttttataagggatcagccaaatgaaaggcaagttagaatccagcttaaggatcatatagatcgtaccaggaagaagagaggcgagaaagatgaaactgagtatgagtacagtgggagtgaggaagaagaggaggaagtgcctgaacaggaaggagagccaagttccattgtgaacgtgcctggtgagtctactcttcgccgagatttcctgagactgcagcaggagaacaaggaacgttccgaggctcttcggagacaacagttactacaggagcaacagctccgggagcaggaagaatataaaaggcaactgctggcagagagacagaagcggattgagcagcagaaagaacagaggcgacggctagaagagcaacaaaggagagagcgggaagctagaaggcagcaggaacgtgaacagcgaaggagagaacaagaagaaaagaggcgtctagaggagttggagagaaggcgcaaagaagaagaggagaggagacgggcagaagaagaaaagaggagagttgaaagagaacaggagtatatcaggcgacagctagaagaggagcagcggcacttggaagtccttcagcagcagctgctccaggagcaggccatgttactgcatgaccataggaggccgcacccgcagcactcgcagcagccgccaccaccgcagcaggaaaggagcaagccaagcttccatgctcccgagcccaaagcccactacgagcctgctgaccgagcgcgagaggtggaagatagatttaggaaaactaaccacagctcccctgaagcccagtctaagcagacaggcagagtattggagccaccagtgccttcccgatcagagtctttttccaatggcaactccgagtctgtgcatcccgccctgcagagaccagcggagccacaggttcctgtgagaacaacatctcgctcccctgttctgtcccgtcgagattccccactgcagggcagtgggcagcagaatagccaggcaggacagagaaactccaccagcagtattgagcccaggcttctgtgggagagagtggagaagctggtgcccagacctggcagtggcagctcctcagggtccagcaactcaggatcccagcccgggtctcaccctgggtctcagagtggctccggggaacgcttcagagtgagatcatcatccaagtctgaaggctctccatctcagcgcctggaaaatgcagtgaaaaaacctgaagataaaaaggaagttttcagacccctcaagcctgctgcaagtgatctgaccgcactggccaaagagcttcgagcagtggaagatgtacggccacctcacaaagtaacggactactcctcatccagtgaggagtcggggacgacggatgaggaggacgacgatgtggagcaggaaggggctgacgagtccacctcaggaccagaggacaccagagcagcgtcatctctgaatttgagcaatggtgaaacggaatctgtgaaaaccatgattgtccatgatgatgtagaaagtgagccggccatgaccccatccaaggagggcactctaatcgtccgccagactcagtccgctagtagcacactccagaaacacaaatcttcctcctcctttacaccttttatagaccccagattactacagatttctccatctagcggaacaacagtgacatctgtggtgggattttcctgtgatgggatgagaccagaagccataaggcaagatcctacccggaaaggctcagtggtcaatgtgaatcctaccaacactaggccacagagtgacaccccggagattcgtaaatacaagaagaggtttaactctgagattctgtgtgctgccttatggggagtgaatttgctagtgggtacagagagtggcctgatgctgctggacagaagtggccaagggaaggtctatcctcttatcaaccgaagacgatttcaacaaatggacgtacttgagggcttgaatgtcttggtgacaatatctggcaaaaaggataagttacgtgtctactatttgtcctggttaagaaataaaatacttcacaatgatccagaagttgagaagaagcagggatggacaaccgtaggggatttggaaggatgtgtacattataaagttgtaaaatatgaaagaatcaaatttctggtgattgctttgaagagttctgtggaagtctatgcgtgggcaccaaagccatatcacaaatttatggcctttaagtcatttggagaattggtacataagccattactggtggatctcactgttgaggaaggccagaggttgaaagtgatctatggatcctgtgctggattccatgctgttgatgtggattcaggatcagtctatgacatttatctaccaacacatatccagtgtagcatcaaaccccatgcaatcatcatcctccccaatacagatggaatggagcttctggtgtgctatgaagatgagggggtttatgtaaacacatatggaaggatcaccaaggatgtagttctacagtggggagagatgcctacatcagtagcatatattcgatccaatcagacaatgggctggggagagaaggccatagagatccgatctgtggaaactggtcacttggatggtgtgttcatgcacaaaagggctcaaagactaaaattcttgtgtgaacgcaatgacaaggtgttctttgcctctgttcggtctggtggcagcagtcaggtttatttcatgaccttaggcaggacttctcttctgagctggtagaagcagtgtgatccagggattactggcctccagagtcttcaagatcctgagaacttggaattccttgtaactggagctcggagctgcaccgagggcaaccaggacagctgtgtgtgcagacctcatgtgttgggttctctcccctccttcctgttcctcttatataccagtttatccccattctttttttttttcttactccaaaataaatcaaggctgcaatgcagctggtgctgttcagattctaccatcaggtgctataagtgtttgggattgagcatcatactggaaagcaaacacctttcctccagctccagaattccttgtctctgaatgactctgtcttgtgggtgtctgacagtggcgacgatgaacatgccgttggttttattggcagtgggcacaaggaggtgagaagtggtggtaaaaggagcggagtgctgaagcagagagcagatttaatatagtaacattaacagtgtatttaattgacatttcttttttgtaatgtgacgatatgtggacaaagaagaagatgcaggtttaagaagttaatatttataaaatgtgaaagacacagttactaggataacttttttgtgggtggggcttgggagatggggtggggtgggttaaggggtcccattttgtttctttggatttggggtgggggtcctggccaagaactcagtcatttttctgtgtaccaggttgcctaaatcatgtgcagatggttctaaaaaaaaaaaaaaaaaaaaaaaaaaaggaaaaaaaaaaagaaaaagaaaacgtgtgcattttgtataatggccagaactttgtcgtgtgacagtattagcactgcctcagttaaaggtttaatttttgtttaaacctagacgtgcaacaaaagttttaccacagtctgcacttgcagaagaaagaaaaaaattcaaaccacatgtttattttttttttgcctacctcattgttcttaatgcattgagaggtgatttagtttatatgtttttggaagaaaccattaatgtttaatttaatcttaataccaaaacgaccagattgaagtttgacttttattgtcacaaatcagcaggcacaagaactgtccatgaagatgggaaatagccttaaggctgatgcagtttacttacaagtttagaaaccagaatgctttgtttttaccagattcaccattagaggttgatggggcaactgcagcccatgacacaagatctcattgttctcgatgtagaggggttggtagcagacaggtggttacattagaatagtcacacaaactgttcagtgttgcaggaaccttttcttgggggtgggggagtttcccttttctaaaaatgcaatgcactaaaactattttaagaatgtagttaattctgcttattcataaagtgggcatcttctgtgttttaggtgtaatatcgaagtcctggcttttctcgttttctcacttgctctcttgttctctgtttttttaaaccaattttactttatgaatatattcatgacatttgtaataaatgtcttgagaaagaatttgtttcatggcttcatggtcatcactcaagctcccgtaaggatattaccgtctcaggaaaggatcaggactccatgtcacagtcctgccatcttactttcctcttgtcgagttctgagtggaaataactgcattatggctgctttaacctcagtcatcaaaagaaacttgctgttttttaggcttgatctttttcctttgtggttaattttcctgtatattgtgaaaatgggggattttccctctgctcccacccacctaaacacagcagccatttgtacctgtttgcttcccatcccacttggcacccactctgacctcttgtcagtttcctgttcctggttccatctttttgaaaaaggccctcctttgagctacaaacatctggtaagacaagtacatccactcatgaatgcagacacagcagctggtggttttgtgtatacctgtaaagacaagctgagaagcttactttttggggaagtaaaagaagatggaaatggatgtttcatttgtatgagtttggagcagtgctgaaggccaaagccgcctactggtttgtagttaacctagagaaggttgaaaaattaatcctacctttaaagggatttgaggtaggctggattccatcgccacaggactttagttagaattaaattcctgcttgtaatttatatccatgtttaggcttttcataagatgaaacatgccacagtgaacacactcgtgtacatatcaagagaagaaggaaaggcacaggtggagaacagtaaaaggtgggcagatgtctttgaagaaatgctcaatgtctgatgctaagtgggagaaggcagagaacaaaggatttggcttttttccttcccgtcttagcctcacccccttgtcaaccagattgagttgctatagcttgatgcagggacccagtgaagtttctccgttaaagattgggagtcgtcgaaatgtttagattcttttaggaaaggaattattttccccccttttacagggtagtaacttctccacagaagtgccaatatggcaaaattacacaagaaaacagtattgcaatgacaccattacataaggaacattgaactgttagaggagtgctcttccaaacaaaacaaaaatgtctctaggtttagtcagagctttcacaagtaataacctttctgtattaaaatcagagtaaccctttctgtattgagtgcagtgttttttactcttttctcatgcacatgttacgttggagaaaatgtttacaaaaatggttttgttacactaatgcgcaccacatatttatggtttattttaagtgactttttatgggttatttaggttttcgtcttagttgtagcacacttaccctaattttgccaattattaatttgctaaatagtaatacaaatgacaaactgcattaaatttactaattataaaagctgcaaagcagactggtggcaagtacacagcccttttttttgcagtgctaacttgtctactgtgtattatgaaaattactgttgtccccccacccttttttccttaaataaagtaaaaatgacaccta

SEQ ID NO: 317863 - DNA, 7302 bp, Homo sapiens
caaacttttagatactgtaaatattgcattaaaaattgtataactgcttaaaaataccattttttattcacattagacccagttaatataaaatataatagtttgaggatcataatgtgaaaagtagaatgtttttgaggtaaaatgaaaaagaatgttagggaatatttgagtcagatatttgataattgggtagtgatgaagagcaaagtggtcctcctgtgcccatgtgcttctgagagagaatgagcacttcagaattgctgcacttgggtgtgccgtagaataccagacactgtcagtcttctggaccaaatatatggagcgaatacactggactatgaaatgagctttcagttatttaggtgcctccaaattattatgaattattgaggagcatcacgtttctaggtctttagaaaagagagggcatggcggttaaactggttttcccaatttctccaagatatgttgctcaccttgtgtcttgtctgccctatagcttgttatggagttctgtggggctgggtccattacagaccttgtgaagaacaccaaagggaacacactcaaagaagactggatcgcttacatctccagagaaatcctgaggggactggcacatcttcacattcatcatgtgattcaccgggatatcaagggccagaatgtgttgctgactgagaatgcagaggtgaaacttgttgactttggtgtgagtgctcagctggacaggactgtggggcggagaaatacgttcataggcactccctactggatggctcctgaggtcatcgcctgtgatgagaacccagatgccacctatgattacagaagtgatctttggtcttgtggcattacagccattgagatggcagaaggtgctccccctctctgtgacatgcatccaatgagagcactgtttctcattcccagaaaccctcctccccggctgaagtcaaaaaaatggtcgaagaagttttttagttttatagaagggtgcctggtgaagaattacatgcagcggccctctacagagcagcttttgaaacatccttttataagggatcagccaaatgaaaggcaagttagaatccagcttaaggatcatatagatcgtaccaggaagaagagaggcgagaaagatgaaactgagtatgagtacagtgggagtgaggaagaagaggaggaagtgcctgaacaggaaggagagccaagttccattgtgaacgtgcctggtgagtctactcttcgccgagatttcctgagactgcagcaggagaacaaggaacgttccgaggctcttcggagacaacagttactacaggagcaacagctccgggagcaggaagaatataaaaggcaactgctggcagagagacagaagcggattgagcagcagaaagaacagaggcgacggctagaagagcaacaaaggagagagcgggaagctagaaggcagcaggaacgtgaacagcgaaggagagaacaagaagaaaagaggcgtctagaggagttggagagaaggcgcaaagaagaagaggagaggagacgggcagaagaagaaaagaggagagttgaaagagaacaggagtatatcaggcgacagctagaagaggagcagcggcacttggaagtccttcagcagcagctgctccaggagcaggccatgttactgcatgaccataggaggccgcacccgcagcactcgcagcagccgccaccaccgcagcaggaaaggagcaagccaagcttccatgctcccgagcccaaagcccactacgagcctgctgaccgagcgcgagaggttcctgtgagaacaacatctcgctcccctgttctgtcccgtcgagattccccactgcagggcagtgggcagcagaatagccaggcaggacagagaaactccaccagcagtattgagcccaggcttctgtgggagagagtggagaagctggtgcccagacctggcagtggcagctcctcagggtccagcaactcaggatcccagcccgggtctcaccctgggtctcagagtggctccggggaacgcttcagagtgagatcatcatccaagtctgaaggctctccatctcagcgcctggaaaatgcagtgaaaaaacctgaagataaaaaggaagttttcagacccctcaagcctgctgcaagtgatctgaccgcactggccaaagagcttcgagcagtggaagatgtacggccacctcacaaagtaacggactactcctcatccagtgaggagtcggggacgacggatgaggaggacgacgatgtggagcaggaaggggctgacgagtccacctcaggaccagaggacaccagagcagcgtcatctctgaatttgagcaatggtgaaacggaatctgtgaaaaccatgattgtccatgatgatgtagaaagtgagccggccatgaccccatccaaggagggcactctaatcgtccgccagagtacagttgaccaaaagcgtgccagccatcatgagagcaatggctttgccggtcgcattcacctcttgccagatctcttacagcaaagccattcctcctccacttcctccacctcctcctccccatcctccagccagccgacacccaccatgtccccacagacaccccaggacaagctcactgctaatgagactcagtccgctagtagcacactccagaaacacaaatcttcctcctcctttacaccttttatagaccccagattactacagatttctccatctagcggaacaacagtgacatctgtggtgggattttcctgtgatgggatgagaccagaagccataaggcaagatcctacccggaaaggctcagtggtcaatgtgaatcctaccaacactaggccacagagtgacaccccggagattcgtaaatacaagaagaggtttaactctgagattctgtgtgctgccttatggggagtgaatttgctagtgggtacagagagtggcctgatgctgctggacagaagtggccaagggaaggtctatcctcttatcaaccgaagacgatttcaacaaatggacgtacttgagggcttgaatgtcttggtgacaatatctggcaaaaaggataagttacgtgtctactatttgtcctggttaagaaataaaatacttcacaatgatccagaagttgagaagaagcagggatggacaaccgtaggggatttggaaggatgtgtacattataaagttgtaaaatatgaaagaatcaaatttctggtgattgctttgaagagttctgtggaagtctatgcgtgggcaccaaagccatatcacaaatttatggcctttaagtcatttggagaattggtacataagccattactggtggatctcactgttgaggaaggccagaggttgaaagtgatctatggatcctgtgctggattccatgctgttgatgtggattcaggatcagtctatgacatttatctaccaacacatatccagtgtagcatcaaaccccatgcaatcatcatcctccccaatacagatggaatggagcttctggtgtgctatgaagatgagggggtttatgtaaacacatatggaaggatcaccaaggatgtagttctacagtggggagagatgcctacatcagtagcatatattcgatccaatcagacaatgggctggggagagaaggccatagagatccgatctgtggaaactggtcacttggatggtgtgttcatgcacaaaagggctcaaagactaaaattcttgtgtgaacgcaatgacaaggtgttctttgcctctgttcggtctggtggcagcagtcaggtttatttcatgaccttaggcaggacttctcttctgagctggtagaagcagtgtgatccagggattactggcctccagagtcttcaagatcctgagaacttggaattccttgtaactggagctcggagctgcaccgagggcaaccaggacagctgtgtgtgcagacctcatgtgttgggttctctcccctccttcctgttcctcttatataccagtttatccccattctttttttttttcttactccaaaataaatcaaggctgcaatgcagctggtgctgttcagattctaccatcaggtgctataagtgtttgggattgagcatcatactggaaagcaaacacctttcctccagctccagaattccttgtctctgaatgactctgtcttgtgggtgtctgacagtggcgacgatgaacatgccgttggttttattggcagtgggcacaaggaggtgagaagtggtggtaaaaggagcggagtgctgaagcagagagcagatttaatatagtaacattaacagtgtatttaattgacatttcttttttgtaatgtgacgatatgtggacaaagaagaagatgcaggtttaagaagttaatatttataaaatgtgaaagacacagttactaggataacttttttgtgggtggggcttgggagatggggtggggtgggttaaggggtcccattttgtttctttggatttggggtgggggtcctggccaagaactcagtcatttttctgtgtaccaggttgcctaaatcatgtgcagatggttctaaaaaaaaaaaaaaaaaaaaaaaaaaaggaaaaaaaaaaagaaaaagaaaacgtgtgcattttgtataatggccagaactttgtcgtgtgacagtattagcactgcctcagttaaaggtttaatttttgtttaaacctagacgtgcaacaaaagttttaccacagtctgcacttgcagaagaaagaaaaaaattcaaaccacatgtttattttttttttgcctacctcattgttcttaatgcattgagaggtgatttagtttatatgtttttggaagaaaccattaatgtttaatttaatcttaataccaaaacgaccagattgaagtttgacttttattgtcacaaatcagcaggcacaagaactgtccatgaagatgggaaatagccttaaggctgatgcagtttacttacaagtttagaaaccagaatgctttgtttttaccagattcaccattagaggttgatggggcaactgcagcccatgacacaagatctcattgttctcgatgtagaggggttggtagcagacaggtggttacattagaatagtcacacaaactgttcagtgttgcaggaaccttttcttgggggtgggggagtttcccttttctaaaaatgcaatgcactaaaactattttaagaatgtagttaattctgcttattcataaagtgggcatcttctgtgttttaggtgtaatatcgaagtcctggcttttctcgttttctcacttgctctcttgttctctgtttttttaaaccaattttactttatgaatatattcatgacatttgtaataaatgtcttgagaaagaatttgtttcatggcttcatggtcatcactcaagctcccgtaaggatattaccgtctcaggaaaggatcaggactccatgtcacagtcctgccatcttactttcctcttgtcgagttctgagtggaaataactgcattatggctgctttaacctcagtcatcaaaagaaacttgctgttttttaggcttgatctttttcctttgtggttaattttcctgtatattgtgaaaatgggggattttccctctgctcccacccacctaaacacagcagccatttgtacctgtttgcttcccatcccacttggcacccactctgacctcttgtcagtttcctgttcctggttccatctttttgaaaaaggccctcctttgagctacaaacatctggtaagacaagtacatccactcatgaatgcagacacagcagctggtggttttgtgtatacctgtaaagacaagctgagaagcttactttttggggaagtaaaagaagatggaaatggatgtttcatttgtatgagtttggagcagtgctgaaggccaaagccgcctactggtttgtagttaacctagagaaggttgaaaaattaatcctacctttaaagggatttgaggtaggctggattccatcgccacaggactttagttagaattaaattcctgcttgtaatttatatccatgtttaggcttttcataagatgaaacatgccacagtgaacacactcgtgtacatatcaagagaagaaggaaaggcacaggtggagaacagtaaaaggtgggcagatgtctttgaagaaatgctcaatgtctgatgctaagtgggagaaggcagagaacaaaggatgtggcataatggtcttaacattatccaaagacttgaagctccatgtctgtaagtcaaatgttacacaaaaaaaaatgcaaatggtgtttcattggaattaccaagtgcttagaacttgctggctttcccataggtggtaaaggggtctgagctcacaccgagttgtgcttggcttgcttgtgcagctccaggcacccggtgggcactctggtggtgtttgtggtgaactgaattgaatccattgttgggcttaagttactgaaattggaacaccctttgtccttctcggcgggggcttcctggtctgtgctttacttggcttttttccttcccgtcttagcctcacccccttgtcaaccagattgagttgctatagcttgatgcagggacccagtgaagtttctccgttaaagattgggagtcgtcgaaatgtttagattcttttaggaaaggaattattttccccccttttacagggtagtaacttctccacagaagtgccaatatggcaaaattacacaagaaaacagtattgcaatgacaccattacataaggaacattgaactgttagaggagtgctcttccaaacaaaacaaaaatgtctctaggtttagtcagagctttcacaagtaataacctttctgtattaaaatcagagtaaccctttctgtattgagtgcagtgttttttactcttttctcatgcacatgttacgttggagaaaatgtttacaaaaatggttttgttacactaatgcgcaccacatatttatggtttattttaagtgactttttatgggttatttaggttttcgtcttagttgtagcacacttaccctaattttgccaattattaatttgctaaatagtaatacaaatgacaaactgcattaaatttactaattataaaagctgcaaagcagactggtggcaagtacacagcccttttttttgcagtgctaacttgtctactgtgtattatgaaaattactgttgtccccccacccttttttccttaaataaagtaaaaatgacaccta

SEQ ID NO: 317864 - DNA, 5268 bp, Homo sapiens
aattcgaggatccgggtaccatggcacagagcgacagagacatttattgttatttgttttttggtggcaaaaagggaaaatggcgaacgactcccctgcaaaaagtctggtggacatcgacctctcctccctgcgggatcctgctgggatttttgagctggtggaagtggttggaaatggcacctatggacaagtctataagggtcgacatgttaaaacgggtcagttggcagccatcaaagttatggatgtcactgaggatgaagaggaagaaatcaaactggagataaatatgctaaagaaatactctcatcacagaaacattgcaacatattatggtgctttcatcaaaaagagccctccaggacatgatgaccaactctggcttgttatggagttctgtggggctgggtccattacagaccttgtgaagaacaccaaagggaacacactcaaagaagactggatcgcttacatctccagagaaatcctgaggggactggcacatcttcacattcatcatgtgattcaccgggatatcaagggccagaatgtgttgctgactgagaatgcagaggtgaaacttgttgactttggtgtgagtgctcagctggacaggactgtggggcggagaaatacgttcataggcactccctactggatggctcctgaggtcatcgcctgtgatgagaacccagatgccacctatgattacagaagtgatctttggtcttgtggcattacagccattgagatggcagaaggtgctccccctctctgtgacatgcatccaatgagagcactgtttctcattcccagaaaccctcctccccggctgaagtcaaaaaaatggtcgaagaagttttttagttttatagaagggtgcctggtgaagaattacatgcagcggccctctacagagcagcttttgaaacatccttttataagggatcagccaaatgaaaggcaagttagaatccagcttaaggatcatatagatcgtaccaggaagaagagaggcgagaaagatgaaactgagtatgagtacagtgggagtgaggaagaagaggaggaagtgcctgaacaggaaggagagccaagttccattgtgaacgtgcctggtgagtctactcttcgccgagatttcctgagactgcagcaggagaacaaggaacgttccgaggctcttcggagacaacagttactacaggagcaacagctccgggagcaggaagaatataaaaggcaactgctggcagagagacagaagcggattgagcagcagaaagaacagaggcgacggctagaagagcaacaaaggagagagcgggaagctagaaggcagcaggaacgtgaacagcgaaggagagaacaagaagaaaagaggcgtctagaggagttggagagaaggcgcaaagaagaagaggagaggagacgggcagaagaagaaaagaggagagttgaaagagaacaggagtatatcaggcgacagctagaagaggagcagcggcacttggaagtccttcagcagcagctgctccaggagcaggccatgttactgcatgaccataggaggccgcacccgcagcactcgcagcagccgccaccaccgcagcaggaaaggagcaagccaagcttccatgctcccgagcccaaagcccactacgagcctgctgaccgagcgcgagaggtggaagatagatttaggaaaactaaccacagctcccctgaagcccagtctaagcagacaggcagagtattggagccaccagtgccttcccgatcagagtctttttccaatggcaactccgagtctgtgcatcccgccctgcagagaccagcggagccacaggttcctgtgagaacaacatctcgctcccctgttctgtcccgtcgagattccccactgcagggcagtgggcagcagaatagccaggcaggacagagaaactccaccagcagtattgagcccaggcttctgtgggagagagtggagaagctggtgcccagacctggcagtggcagctcctcagggtccagcaactcaggatcccagcccgggtctcaccctgggtctcagagtggctccggggaacgcttcagagtgagatcatcatccaagtctgaaggctctccatctcagcgcctggaaaatgcagtgaaaaaacctgaagataaaaaggaagttttcagacccctcaagcctgctgcaagtgatctgaccgcactggccaaagagcttcgagcagtggaagatgtacggccacctcacaaagtaacggactactcctcatccagtgaggagtcggggacgacggatgaggaggacgacgatgtggagcaggaaggggctgacgagtccacctcaggaccagaggacaccagagcagcgtcatctctgaatttgagcaatggtgaaacggaatctgtgaaaaccatgattgtccatgatgatgtagaaagtgagccggccatgaccccatccaaggagggcactctaatcgtccgccagactcagtccgctagtagcacactccagaaacacaaatcttcctcctcctttacaccttttatagaccccagattactacagatttctccatctagcggaacaacagtgacatctgtggtgggattttcctgtgatgggatgagaccagaagccataaggcaagatcctacccggaaaggctcagtggtcaatgtgaatcctaccaacactaggccacagagtgacaccccggagattcgtaaatacaagaagaggtttaactctgagattctgtgtgctgccttatggggagtgaatttgctagtgggtacagagagtggcctgatgctgctggacagaagtggccaagggaaggtctatcctcttatcaaccgaagacgatttcaacaaatggacgtacttgagggcttgaatgtcttggtgacaatatctggcaaaaaggataagttacgtgtctactatttgtcctggttaagaaataaaatacttcacaatgatccagaagttgagaagaagcagggatggacaaccgtaggggatttggaaggatgtgtacattataaagttgtaaaatatgaaagaatcaaatttctggtgattgctttgaagagttctgtggaagtctatgcgtgggcaccaaagccatatcacaaatttatggcctttaagtcatttggagaattggtacataagccattactggtggatctcactgttgaggaaggccagaggttgaaagtgatctatggatcctgtgctggattccatgctgttgatgtggattcaggatcagtctatgacatttatctaccaacacatatccagtgtagcatcaaaccccatgcaatcatcatcctccccaatacagatggaatggagcttctggtgtgctatgaagatgagggggtttatgtaaacacatatggaaggatcaccaaggatgtagttctacagtggggagagatgcctacatcagtagcatatattcgatccaatcagacaatgggctggggagagaaggccatagagatccgatctgtggaaactggtcacttggatggtgtgttcatgcacaaaagggctcaaagactaaaattcttgtgtgaacgcaatgacaaggtgttctttgcctctgttcggtctggtggcagcagtcaggtttatttcatgaccttaggcaggacttctcttctgagctggtagaagcagtgtgatccagggattactggcctccagagtcttcaagatcctgagaacttggaattccttgtaactggagctcggagctgcaccgagggcaaccaggacagctgtgtgtgcagacctcatgtgttgggttctctcccctccttcctgttcctcttatataccagtttatccccattctttttttttttcttactccaaaataaatcaaggctgcaatgcagctggtgctgttcagattctaccatcaggtgctataagtgtttgggattgagcatcatactggaaagcaaacacctttcctccagctccagaattccttgtctctgaatgactctgtcttgtgggtgtctgacagtggcgacgatgaacatgccgttggttttattggcagtgggcacaaggaggtgagaagtggtggtaaaaggagcggagtgctgaagcagagagcagatttaatatagtaacattaacagtgtatttaattgacatttcttttttgtaatgtgacgatatgtggacaaagaagaagatgcaggtttaagaagttaatatttataaaatgtgaaagacacagttactaggataacttttttgtgggtggggcttgggagatggggtggggtgggttaaggggtcccattttgtttctttggatttggggtgggggtcctggccaagaactcagtcatttttctgtgtaccaggttgcctaaatcatgtgcagatggttctaaaaaaaaaaaaaaaaaaaaaaaaaaaggaaaaaaaaaaagaaaaagaaaacgtgtgcattttgtataatggccagaactttgtcgtgtgacagtattagcactgcctcagttaaaggtttaatttttgtttaaacctagacgtgcaacaaaagttttaccacagtctgcacttgcagaagaaagaaaaaaattcaaaccacatgtttattttttttttgcctacctcattgttcttaatgcattgagaggtgatttagtttatatgtttttggaagaaaccattaatgtttaatttaatcttaataccaaaacgaccagattgaagtttgacttttattgtcacaaatcagcaggcacaagaactgtccatgaagatgggaaatagccttaaggctgatgcagtttacttacaagtttagaaaccagaatgctttgtttttaccagattcaccattagaggttgatggggcaactgcagcccatgacacaagatctcattgttctcgatgtagaggggttggtagcagacaggtggttacattagaatagtcacacaaactgttcagtgttgcaggaaccttttcttgggggtgggggagtttcccttttctaaaaatgcaatgcactaaaactattttaagaatgtagttaattctgcttattcataaagtgggcatcttctgtgttttaggtgtaatatcgaagtcctggcttttctcgttttctcacttgctctcttgttctctgtttttttaaaccaattttactttatgaatatattcatgacatttgtaataaatgtcttgagaaaga

SEQ ID NO: 317865 - DNA, 5199 bp, Homo sapiens
ttcaatttctacacagtgaaaccatacctgtactaaaaaggaagttttcagacccctcaagcctgctgatctgaccgcactggccaaagagcttcgagcagtggaagatgtacggccacctcacaaagtaacggactactcctcatccagtgaggagtcggggacgacggatgaggaggacgacgatgtggagcaggaaggggctgacgagtccacctcaggaccagaggacaccagagcagcgtcatctctgaatttgagcaatggtgaaacggaatctgtgaaaaccatgattgtccatgatgatgtagaaagtgagccggccatgaccccatccaaggagggcactctaatcgtccgccagagtacagttgaccaaaagcgtgccagccatcatgagagcaatggctttgccggtcgcattcacctcttgccagatctcttacagcaaagccattcctcctccacttcctccacctcctcctccccatcctccagccagccgacacccaccatgtccccacagacaccccaggacaagctcactgctaatgagactcagtccgctagtagcacactccagaaacacaaatcttcctcctcctttacaccttttatagaccccagattactacagatttctccatctagcggaacaacagtgacatctgtggtgggattttcctgtgatgggatgagaccagaagccataaggcaagatcctacccggaaaggctcagtggtcaatgtgaatcctaccaacactaggccacagagtgacaccccggagattcgtaaatacaagaagaggtttaactctgagattctgtgtgctgccttatggggagtgaatttgctagtgggtacagagagtggcctgatgctgctggacagaagtggccaagggaaggtctatcctcttatcaaccgaagacgatttcaacaaatggacgtacttgagggcttgaatgtcttggtgacaatatctggcaaaaaggataagttacgtgtctactatttgtcctggttaagaaataaaatacttcacaatgatccagaagttgagaagaagcagggatggacaaccgtaggggatttggaaggatgtgtacattataaagttgtaaaatatgaaagaatcaaatttctggtgattgctttgaagagttctgtggaagtctatgcgtgggcaccaaagccatatcacaaatttatggcctttaagtcatttggagaattggtacataagccattactggtggatctcactgttgaggaaggccagaggttgaaagtgatctatggatcctgtgctggattccatgctgttgatgtggattcaggatcagtctatgacatttatctaccaacacatatccagtgtagcatcaaaccccatgcaatcatcatcctccccaatacagatggaatggagcttctggtgtgctatgaagatgagggggtttatgtaaacacatatggaaggatcaccaaggatgtagttctacagtggggagagatgcctacatcagtagcatatattcgatccaatcagacaatgggctggggagagaaggccatagagatccgatctgtggaaactggtcacttggatggtgtgttcatgcacaaaagggctcaaagactaaaattcttgtgtgaacgcaatgacaaggtgttctttgcctctgttcggtctggtggcagcagtcaggtttatttcatgaccttaggcaggacttctcttctgagctggtagaagcagtgtgatccagggattactggcctccagagtcttcaagatcctgagaacttggaattccttgtaactggagctcggagctgcaccgagggcaaccaggacagctgtgtgtgcagacctcatgtgttgggttctctcccctccttcctgttcctcttatataccagtttatccccattctttttttttttcttactccaaaataaatcaaggctgcaatgcagctggtgctgttcagattctaccatcaggtgctataagtgtttgggattgagcatcatactggaaagcaaacacctttcctccagctccagaattccttgtctctgaatgactctgtcttgtgggtgtctgacagtggcgacgatgaacatgccgttggttttattggcagtgggcacaaggaggtgagaagtggtggtaaaaggagcggagtgctgaagcagagagcagatttaatatagtaacattaacagtgtatttaattgacatttcttttttgtaatgtgacgatatgtggacaaagaagaagatgcaggtttaagaagttaatatttataaaatgtgaaagacacagttactaggataacttttttgtgggtggggcttgggagatggggtggggtgggttaaggggtcccattttgtttctttggatttggggtgggggtcctggccaagaactcagtcatttttctgtgtaccaggttgcctaaatcatgtgcagatggttctaaaaaaaaaaaaaaaaaaaaaaaaaaaggaaaaaaaaaaagaaaaagaaaacgtgtgcattttgtataatggccagaactttgtcgtgtgacagtattagcactgcctcagttaaaggtttaatttttgtttaaacctagacgtgcaacaaaagttttaccacagtctgcacttgcagaagaaagaaaaaaattcaaaccacatgtttattttttttttgcctacctcattgttcttaatgcattgagaggtgatttagtttatatgtttttggaagaaaccattaatgtttaatttaatcttaataccaaaacgaccagattgaagtttgacttttattgtcacaaatcagcaggcacaagaactgtccatgaagatgggaaatagccttaaggctgatgcagtttacttacaagtttagaaaccagaatgctttgtttttaccagattcaccattagaggttgatggggcaactgcagcccatgacacaagatctcattgttctcgatgtagaggggttggtagcagacaggtggttacattagaatagtcacacaaactgttcagtgttgcaggaaccttttcttgggggtgggggagtttcccttttctaaaaatgcaatgcactaaaactattttaagaatgtagttaattctgcttattcataaagtgggcatcttctgtgttttaggtgtaatatcgaagtcctggcttttctcgttttctcacttgctctcttgttctctgtttttttaaaccaattttactttatgaatatattcatgacatttgtaataaatgtcttgagaaagaatttgtttcatggcttcatggtcatcactcaagctcccgtaaggatattaccgtctcaggaaaggatcaggactccatgtcacagtcctgccatcttactttcctcttgtcgagttctgagtggaaataactgcattatggctgctttaacctcagtcatcaaaagaaacttgctgttttttaggcttgatctttttcctttgtggttaattttcctgtatattgtgaaaatgggggattttccctctgctcccacccacctaaacacagcagccatttgtacctgtttgcttcccatcccacttggcacccactctgacctcttgtcagtttcctgttcctggttccatctttttgaaaaaggccctcctttgagctacaaacatctggtaagacaagtacatccactcatgaatgcagacacagcagctggtggttttgtgtatacctgtaaagacaagctgagaagcttactttttggggaagtaaaagaagatggaaatggatgtttcatttgtatgagtttggagcagtgctgaaggccaaagccgcctactggtttgtagttaacctagagaaggttgaaaaattaatcctacctttaaagggatttgaggtaggctggattccatcgccacaggactttagttagaattaaattcctgcttgtaatttatatccatgtttaggcttttcataagatgaaacatgccacagtgaacacactcgtgtacatatcaagagaagaaggaaaggcacaggtggagaacagtaaaaggtgggcagatgtctttgaagaaatgctcaatgtctgatgctaagtgggagaaggcagagaacaaaggatgtggcataatggtcttaacattatccaaagacttgaagctccatgtctgtaagtcaaatgttacacaaaaaaaaatgcaaatggtgtttcattggaattaccaagtgcttagaacttgctggctttcccataggtggtaaaggggtctgagctcacaccgagttgtgcttggcttgcttgtgcagctccaggcacccggtgggcactctggtggtgtttgtggtgaactgaattgaatccattgttgggcttaagttactgaaattggaacaccctttgtccttctcggcgggggcttcctggtctgtgctttacttggcttttttccttcccgtcttagcctcacccccttgtcaaccagattgagttgctatagcttgatgcagggacccagtgaagtttctccgttaaagattgggagtcgtcgaaatgtttagattcttttaggaaaggaattattttccccccttttacagggtagtaacttctccacagaagtgccaatatggcaaaattacacaagaaaacagtattgcaatgacaccattacataaggaacattgaactgttagaggagtgctcttccaaacaaaacaaaaatgtctctaggtttagtcagagctttcacaagtaataacctttctgtattaaaatcagagtaaccctttctgtattgagtgcagtgttttttactcttttctcatgcacatgttacgttggagaaaatgtttacaaaaatggttttgttacactaatgcgcaccacatatttatggtttattttaagtgactttttatgggttatttaggttttcgtcttagttgtagcacacttaccctaattttgccaattattaatttgctaaatagtaatacaaatgacaaactgcattaaatttactaattataaaagctgcaaagcagactggtggcaagtacacagcccttttttttgcagtgctaacttgtctactgtgtattatgaaaattactgttgtccccccacccttttttccttaaataaagtaaaaatgacaccta

SEQ ID NO: 317866 - DNA, 3854 bp, Homo sapiens
aggatcccgtggatgttatcgccaacacatatccagtgtagcatcaaaccccatgcaatcatcatcctccccaatacagatggaatggagcttctggtgtgctatgaagatgagggggtttatgtaaacacatatggaaggatcaccaaggatgtagttctacagtggggagagatgcctacatcagtagcatatattcgatccaatcagacaatgggctggggagagaaggccatagagatccgatctgtggaaactggtcacttggatggtgtgttcatgcacaaaagggctcaaagactaaaattcttgtgtgaacgcaatgacaaggtgttctttgcctctgttcggtctggtggcagcagtcaggtttatttcatgaccttaggcaggacttctcttctgagctggtagaagcagtgtgatccagggattactggcctccagagtcttcaagatcctgagaacttggaattccttgtaactggagctcggagctgcaccgagggcaaccaggacagctgtgtgtgcagacctcatgtgttgggttctctcccctccttcctgttcctcttatataccagtttatccccattctttttttttttcttactccaaaataaatcaaggctgcaatgcagctggtgctgttcagattctaccatcaggtgctataagtgtttgggattgagcatcatactggaaagcaaacacctttcctccagctccagaattccttgtctctgaatgactctgtcttgtgggtgtctgacagtggcgacgatgaacatgccgttggttttattggcagtgggcacaaggaggtgagaagtggtggtaaaaggagcggagtgctgaagcagagagcagatttaatatagtaacattaacagtgtatttaattgacatttcttttttgtaatgtgacgatatgtggacaaagaagaagatgcaggtttaagaagttaatatttataaaatgtgaaagacacagttactaggataacttttttgtgggtggggcttgggagatggggtggggtgggttaaggggtcccattttgtttctttggatttggggtgggggtcctggccaagaactcagtcatttttctgtgtaccaggttgcctaaatcatgtgcagatggttctaaaaaaaaaaaaaaaaaaaaaaaaaaaggaaaaaaaaaaagaaaaagaaaacgtgtgcattttgtataatggccagaactttgtcgtgtgacagtattagcactgcctcagttaaaggtttaatttttgtttaaacctagacgtgcaacaaaagttttaccacagtctgcacttgcagaagaaagaaaaaaattcaaaccacatgtttattttttttttgcctacctcattgttcttaatgcattgagaggtgatttagtttatatgtttttggaagaaaccattaatgtttaatttaatcttaataccaaaacgaccagattgaagtttgacttttattgtcacaaatcagcaggcacaagaactgtccatgaagatgggaaatagccttaaggctgatgcagtttacttacaagtttagaaaccagaatgctttgtttttaccagattcaccattagaggttgatggggcaactgcagcccatgacacaagatctcattgttctcgatgtagaggggttggtagcagacaggtggttacattagaatagtcacacaaactgttcagtgttgcaggaaccttttcttgggggtgggggagtttcccttttctaaaaatgcaatgcactaaaactattttaagaatgtagttaattctgcttattcataaagtgggcatcttctgtgttttaggtgtaatatcgaagtcctggcttttctcgttttctcacttgctctcttgttctctgtttttttaaaccaattttactttatgaatatattcatgacatttgtaataaatgtcttgagaaagaatttgtttcatggcttcatggtcatcactcaagctcccgtaaggatattaccgtctcaggaaaggatcaggactccatgtcacagtcctgccatcttactttcctcttgtcgagttctgagtggaaataactgcattatggctgctttaacctcagtcatcaaaagaaacttgctgttttttaggcttgatctttttcctttgtggttaattttcctgtatattgtgaaaatgggggattttccctctgctcccacccacctaaacacagcagccatttgtacctgtttgcttcccatcccacttggcacccactctgacctcttgtcagtttcctgttcctggttccatctttttgaaaaaggccctcctttgagctacaaacatctggtaagacaagtacatccactcatgaatgcagacacagcagctggtggttttgtgtatacctgtaaagacaagctgagaagcttactttttggggaagtaaaagaagatggaaatggatgtttcatttgtatgagtttggagcagtgctgaaggccaaagccgcctactggtttgtagttaacctagagaaggttgaaaaattaatcctacctttaaagggatttgaggtaggctggattccatcgccacaggactttagttagaattaaattcctgcttgtaatttatatccatgtttaggcttttcataagatgaaacatgccacagtgaacacactcgtgtacatatcaagagaagaaggaaaggcacaggtggagaacagtaaaaggtgggcagatgtctttgaagaaatgctcaatgtctgatgctaagtgggagaaggcagagaacaaaggatgtggcataatggtcttaacattatccaaagacttgaagctccatgtctgtaagtcaaatgttacacaaaaaaaaatgcaaatggtgtttcattggaattaccaagtgcttagaacttgctggctttcccataggtggtaaaggggtctgagctcacaccgagttgtgcttggcttgcttgtgcagctccaggcacccggtgggcactctggtggtgtttgtggtgaactgaattgaatccattgttgggcttaagttactgaaattggaacaccctttgtccttctcggcgggggcttcctggtctgtgctttacttggcttttttccttcccgtcttagcctcacccccttgtcaaccagattgagttgctatagcttgatgcagggacccagtgaagtttctccgttaaagattgggagtcgtcgaaatgtttagattcttttaggaaaggaattattttccccccttttacagggtagtaacttctccacagaagtgccaatatggcaaaattacacaagaaaacagtattgcaatgacaccattacataaggaacattgaactgttagaggagtgctcttccaaacaaaacaaaaatgtctctaggtttagtcagagctttcacaagtaataacctttctgtattaaaatcagagtaaccctttctgtattgagtgcagtgttttttactcttttctcatgcacatgttacgttggagaaaatgtttacaaaaatggttttgttacactaatgcgcaccacatatttatggtttattttaagtgactttttatgggttatttaggttttcgtcttagttgtagcacacttaccctaattttgccaattattaatttgctaaatagtaatacaaatgacaaactgcattaaatttactaattataaaagctgcaaagcagactggtggcaagtacacagcccttttttttgcagtgctaacttgtctactgtgtattatgaaaattactgttgtccccccacccttttttccttaaataaagtaaaaatgacaccta

SEQ ID NO: 317867 - DNA, 4702 bp, Homo sapiens
caaacttttagatactgtaaatattgcattaaaaattgtataactgcttaaaaataccattttttattcacattagacccagttaatataaaatataatagtttgaggatcataatgtgaaaagtagaatgtttttgaggtaaaatgaaaaagaatgttagggaatatttgagtcagatatttgataattgggtagtgatgaagagcaaagtggtcctcctgtgcccatgtgcttctgagagagaatgagcacttcagaattgctgcacttgggtgtgccgtagaataccagacactgtcagtcttctggaccaaatatatggagcgaatacactggactatgaaatgagctttcagttatttaggtgcctccaaattattatgaattattgaggagcatcacgtttctaggtctttagaaaagagagggcatggcggttaaactggttttcccaatttctccaagatatgttgctcaccttgtgtcttgtctgccctatagcttgttatggagttctgtggggctgggtccattacagaccttgtgaagaacaccaaagggaacacactcaaagaagactggatcgcttacatctccagagaaatcctgaggggactggcacatcttcacattcatcatgtgattcaccgggatatcaagggccagaatgtgttgctgactgagaatgcagaggtgaaacttgttgactttggtgtgagtgctcagctggacaggactgtggggcggagaaatacgttcataggcactccctactggatggctcctgaggtcatcgcctgtgatgagaacccagatgccacctatgattacagaagtgatctttggtcttgtggcattacagccattgagatggcagaaggtgctccccctctctgtgacatgcatccaatgagagcactgtttctcattcccagaaaccctcctccccggctgaagtcaaaaaaatggtcgaagaagttttttagttttatagaagggtgcctggtgaagaattacatgcagcggccctctacagagcagcttttgaaacatccttttataagggatcagccaaatgaaaggcaagttagaatccagcttaaggatcatatagatcgtaccaggaagaagagaggcgagaaagatgaaactgagtatgagtacagtgggagtgaggaagaagaggaggaagtgcctgaacaggaaggagagccaagttccattgtgaacgtgcctggtgagtctactcttcgccgagatttcctgagactgcagcaggagaacaaggaacgttccgaggctcttcggagacaacagttactacaggagcaacagctccgggagcaggaagaatataaaaggcaactgctggcagagagacagaagcggattgagcagcagaaagaacagaggcgacggctagaagagcaacaaaggagagagcgggaagctagaaggcagcaggaacgtgaacagcgaaggagagaacaagaagaaaagaggcgtctagaggagttggagagaaggcgcaaagaagaagaggagaggagacgggcagaagaagaaaagaggagagttgaaagagaacaggagtatatcaggcgacagctagaagaggagcagcggcacttggaagtccttcagcagcagctgctccaggagcaggccatgttactgcatgaccataggaggccgcacccgcagcactcgcagcagccgccaccaccgcagcaggaaaggagcaagccaagcttccatgctcccgagcccaaagcccactacgagcctgctgaccgagcgcgagaggttcctgtgagaacaacatctcgctcccctgttctgtcccgtcgagattccccactgcagggcagtgggcagcagaatagccaggcaggacagagaaactccaccagcagtattgagcccaggcttctgtgggagagagtggagaagctggtgcccagacctggcagtggcagctcctcagggtccagcaactcaggatcccagcccgggtctcaccctgggtctcagagtggctccggggaacgcttcagagtgagatcatcatccaagtctgaaggctctccatctcagcgcctggaaaatgcagtgaaaaaacctgaagataaaaaggaagttttcagacccctcaagcctgctgcaagtggattgtgcaggatcagttttacttatttcagacttgaatgagatctttctattaaaaatatgtggttgagaggcctgcagtcttttctgcgagggcccctcacagagttgaggaattataaggaatgacctaaaccccagacatacttgttcccttccattggtatcgtctgctttccctgtataaagtctcaagtgagtaaaaccttttttctgttgttccagccatacacttggtgtacagtcagccttacaaaattatgcagaacaaagtatagttcttatttaatgaaatttccttctaaggaaactgatgctttaaaaaaaatacaaaagaaagaaaagcctttttatctctttcttggcattaacctttacttattcttcgtgagttcagcatttacaatactggcttttagactaagtttttaggtgatagttgtgactgcttctcacccttctcttttaatccctctgatgttacctgaccatgtaattgtgcacgctttgtggaattttaagcctgtcagagttttcatttcctgcttgaactgatttctgtacttctccctctccccttctttctcccgcgcttccttgtactgtgcattcctcatcaacgatggcttctcggactccacgaaactgcgctgtactgaagggcgaagtggatctgaccgcactggccaaagagcttcgagcagtggaagatgtacggccacctcacaaagtaacggactactcctcatccagtgaggagtcggggacgacggatgaggaggacgacgatgtggagcaggaaggggctgacgagtccacctcaggaccagaggacaccagagcagcgtcatctctgaatttgagcaatggtgaaacggaatctgtgaaaaccatgattgtccatgatgatgtagaaagtgagccggccatgaccccatccaaggagggcactctaatcgtccgccagagtacagttgaccaaaagcgtgccagccatcatgagagcaatggctttgccggtcgcattcacctcttgccagatctcttacagcaaagccattcctcctccacttcctccacctcctcctccccatcctccagccagccgacacccaccatgtccccacagacaccccaggacaagctcactgctaatgagactcagtccgctagtagcacactccagaaacacaaatcttcctcctcctttacaccttttatagaccccagattactacagatttctccatctagcggaacaacagtgacatctgtggtgggattttcctgtgatgggatgagaccagaagccataaggcaagatcctacccggaaaggctcagtggtcaatgtgaatcctaccaacactaggccacagagtgacaccccggagattcgtaaatacaagaagaggtttaactctgagattctgtgtgctgccttatggggagtgaatttgctagtgggtacagagagtggcctgatgctgctggacagaagtggccaagggaaggtctatcctcttatcaaccgaagacgatttcaacaaatggacgtacttgagggcttgaatgtcttggtgacaatatctggcaaaaaggataagttacgtgtctactatttgtcctggttaagaaataaaatacttcacaatgatccagaagttgagaagaagcagggatggacaaccgtaggggatttggaaggatgtgtacattataaagttgtaaaatatgaaagaatcaaatttctggtgattgctttgaagagttctgtggaagtctatgcgtgggcaccaaagccatatcacaaatttatggcctttaagtcatttggagaattggtacataagccattactggtggatctcactgttgaggaaggccagaggttgaaagtgatctatggatcctgtgctggattccatgctgttgatgtggattcaggatcagtctatgacatttatctaccaacacatatccagtgtagcatcaaaccccatgcaatcatcatcctccccaatacagatggaatggagcttctggtgtgctatgaagatgagggggtttatgtaaacacatatggaaggatcaccaaggatgtagttctacagtggggagagatgcctacatcagtagcatatattcgatccaatcagacaatgggctggggagagaaggccatagagatccgatctgtggaaactggtcacttggatggtgtgttcatgcacaaaagggctcaaagactaaaattcttgtgtgaacgcaatgacaaggtgttctttgcctctgttcggtctggtggcagcagtcaggtttatttcatgaccttaggcaggacttctcttctgagctggtagaagcagtgtgatccagggattactggcctccagagtcttcaagatcctgagaacttggaattccttgtaactggagctcggagctgcaccgagggcaaccaggacagctgtgtgtgcagacctcatgtgttggggtgttggggataacatcacgtaatcctctagggtca

SEQ ID NO: 317868 - DNA, 1562 bp, Homo sapiens
caaacttttagatactgtaaatattgcattaaaaattgtataactgcttaaaaataccattttttattcacattagacccagttaatataaaatataatagtttgaggatcataatgtgaaaagtagaatgtttttgaggtaaaatgaaaaagaatgttagggaatatttgagtcagatatttgataattgggtagtgatgaagagcaaagtggtcctcctgtgcccatgtgcttctgagagagaatgagcacttcagaattgctgcacttgggtgtgccgtagaataccagacactgtcagtcttctggaccaaatatatggagcgaatacactggactatgaaatgagctttcagttatttaggtgcctccaaattattatgaattattgaggagcatcacgtttctaggtctttagaaaagagagggcatggcggttaaactggttttcccaatttctccaagatatgttgctcaccttgtgtcttgtctgccctatagcttgttatggagttctgtggggctgggtccattacagaccttgtgaagaacaccaaagggaacacactcaaagaagactggatcgcttacatctccagagaaatcctgaggggactggcacatcttcacattcatcatgtgattcaccgggatatcaagggccagaatgtgttgctgactgagaatgcagaggtgaaacttgttgactttggtgtgagtgctcagctggacaggactgtggggcggagaaatacgttcataggcactccctactggatggctcctgaggtcatcgcctgtgatgagaacccagatgccacctatgattacagaagtgatctttggtcttgtggcattacagccattgagatggcagaaggtgctccccctctctgtgacatgcatccaatgagagcactgtttctcattcccagaaaccctcctccccggctgaagtcaaaaaaatggtcgaagaagttttttagttttatagaagggtgcctggtgaagaattacatgcagcggccctctacagagcagcttttgaaacatccttttataagggatcagccaaatgaaaggcaagttagaatccagcttaaggatcatatagatcgtaccaggaagaagagaggcgagaaagatgaaactgagtatgagtacagtgggagtgaggaagaagaggaggaagtgcctgaacaggaaggagagccaagttccattgtgaacgtgcctggtgagtctactcttcgccgagatttcctgagactgcagcaggagaacaaggaacgttccgaggctcttcggagacaacagttactacaggagcaacagctccgggagcaggaagaatataaaaggcaactgctggcagagagacagaagcggattgagcagcagaaagaacagaggcgacggctagaagagcaacaaaggagagagcgggaagctagaaggcagcaggaacgtgaacagttgaaggccaaggaagagtcggaggagtcggacgaggatatgggatttggtctctaatactactcaccaataaggaatcggcaaa

SEQ ID NO: 317869 - DNA, 1384 bp, Homo sapiens
caaacttttagatactgtaaatattgcattaaaaattgtataactgcttaaaaataccattttttattcacattagacccagttaatataaaatataatagtttgaggatcataatgtgaaaagtagaatgtttttgaggtaaaatgaaaaagaatgttagggaatatttgagtcagatatttgataattgggtagtgatgaagagcaaagtggtcctcctgtgcccatgtgcttctgagagagaatgagcacttcagaattgctgcacttgggtgtgccgtagaataccagacactgtcagtcttctggaccaaatatatggagcgaatacactggactatgaaatgagctttcagttatttaggtgcctccaaattattatgaattattgaggagcatcacgtttctaggtctttagaaaagagagggcatggcggttaaactggttttcccaatttctccaagatatgttgctcaccttgtgtcttgtctgccctatagcttgttatggagttctgtggggctgggtccattacagaccttgtgaagaacaccaaagggaacacactcaaagaagactggatcgcttacatctccagagaaatcctgaggggactggcacatcttcacattcatcatgtgattcaccgggatatcaagggccagaatgtgttgctgactgagaatgcagaggtgaaacttgttgactttggtgtgagtgctcagctggacaggactgtggggcggagaaatacgttcataggcactccctactggatggctcctgaggtcatcgcctgtgatgagaacccagatgccacctatgattacagaagtgatctttggtcttgtggcattacagccattgagatggcagaaggtgctccccctctctgtgacatgcatccaatgagagcactgtttctcattcccagaaaccctcctccccggctgaagtcaaaaaaatggtcgaagaagttttttagttttatagaagggtgcctggtgaagaattacatgcagcggccctctacagagcagcttttgaaacatccttttataagggatcagccaaatgaaaggcaagttagaatccagcttaaggatcatatagatcgtaccaggaagaagagaggcgagaaagatgaaactgagtatgagtacagtgggagtgaggaagaagaggaggaagtgcctgaacaggaaggagagccaagtgccattatgaacgtgcctgttgagtctactattccacgtagatctcagtggagcatggcagcaggaggactacgaacgtgcccacgagattcgaacaatgcacgacattcatgagcgaccgagcacggatctcaggaataatatcaagctgtgtgctgagtgaaa

SEQ ID NO: 317870 - DNA, 749 bp, Homo sapiens
aattcgaggatccgggtaccatggcacagagcgacagagacatttattgttatttgttttttggtggcaaaaagggaaaatggcgaacgactcccctgcaaaaagtctggtggacatcgacctctcctccctgcgggatcctgctgggatttttgagctggtggaagtggttggaaatggcacctatggacaagtctataagggtcgacatgttaaaacgggtcagttggcagccatcaaagttatggatgtcactgaggatgaagaggaagaaatcaaactggagataaatatgctaaagaaatactctcatcacagaaacattgcaacatattatggtgctttcatcaaaaagagccctccaggacatgatgaccaactctggcttgttatggagttctgtggggctgggtccattacagaccttgtgaagaacaccaaagggaacacactcaaagaagactggatcgcttacatctccagagaaatcctgaggggactggcacatcttcacattcatcatgtgattcaccgggatatcaagggccagaatgtgttgctgactgagaatgcagaggtgaaacttggtatgtaatggatgtgcggcgtgatctcataattgcacctggcacaagccagctgcactcccagttctgcttccatctagctaaaagttcagtcttacccatgttttctatttctgttcttcttaagaatgtgggaactgagcatattacttagcttggctc

SEQ ID NO: 317871 - DNA, 2594 bp, Homo sapiens
cagattttgtgccaatttgaagccacagaaatgatgtggattgttaattgtgttttagaacatccccggacactcagtgtcacagggggaaagaagtgggtaccacattctgtttatatttcacattttaactagatttgagtgtttttagcaagaaatcagtcttaaaatctaatgtctgggatccagaagaaaatgtctttaatctgtgagttattgtcacaatgtcatcttatttaaatgtaccaattagcattttgtaataggcaaatgtcatttagtgcttttcaccaatcccactcacccccggtgctccgccttgcctaagaaaaagaaattaaggagaagtaaactttatttcctaatataatgtcagctgatatttattgagcttttcctctttgcccagagactaggacccaaagaagttaagtaactattcccaggtttatttctctctcatatgatgtcccatgtggatgtttgtggtcagtggacagctttccacctagtctttctgcgacccaggctccttcctcttggggctctgcctttctctcagtccatagagccctctttgttgaaagagcacataggaaaagaaggaaaagtctgtgtggaaaatgtttctgggtcaggcctggaagtggtgcatatctcttccgcccatgttcctttggacagaactccgtcacatggcccacctagagagattttgggaaatgtgtccagctgtgtgcctgggaggaagggggcaccattttcttgagcagctagacagtttgccgtatttgtggtgttctcctcttgttgatgttgaaatggtgaatgagccataaagtatttcaggttatccacacactaatcatctcagtgtctttaattcttaactccaatatgaatgtttaaagcttcctctagattcttattcctatataactaatagagaagaaaggacagcttcctatggggaagacagaggcttcctcatagatgttaggaataatcaaacttgcccctgccctttcacccgtctcaaattctggtcttttaaagcagcgttatgttaagtagtcctaacattgtaatatacagtactgccacattctcctactttctattagaggaagtcagagaatatttatggaagtgaggacccaaattaccttctacagatgacttttatagttacaggacagaaagtgaaaatcaaggttacgttttctacttttgtggtagaaattgagaagtgggtggatatggttcgagaagacctttcagaaacacagagactgagtctttgtcttccatgctgtctctgcagtactgagtgaatttccttatacccttgtatcatgttttcctcccatcttctagaagctggggacagatttggaagagaattacacaagttcagttttttgatacatggattttacagtgcatgcaggttatttatgtagagaggaggtctgggagaaagatggaaactagggagatgactgagaacaaagatatttgggattaacacagatagaagaaaagtttgaaaccatgagattgtcacagcatgaaaaaagatattcaaagacactaaccaacttgaggggtgcagtggtctgaatgtgtcctccaaaattcaaatgtggaaatgtatttgccagtgagatagtatgtagaggtggggccttgaggaagtgattaagtcatgagggctctgggattaatgacttaaaaagaggtgtgaggcagctgttcagcccttctgtctcctgtcccttttttttttttttttttgagatggagtcttgctctgttgccccaggctggagtgcagtggcgtgatcttggttcactgcaagctccacctcccgggttcacgccattctcctgcctcagcctcccgagtagctgggactacaggtgcccgccaccaccacgcccggctaattttttatatttttagtagagatggggtttcaccgtgttagccaggatggtcttgatctcctgacctcatgatctgcctgcctcggcctcccaaagtgctgggattataggtgtgagccaccatgcccagccccttctgtcccttctaacgtgaggacccagcaacaaggtaccatcttgaaagcagcaactggggactcagcagacaccaaaccaactggtgcttaaccgtgacttcccagcctccagagctgtaagaaaataaatttctattatttatagattacccagttgaagatactttgttaaggcagtacaaatggactaagacaagggggaagaaatttgcattcctgatcttcccaacttcttcaaattcacaacacttgaatgacagtcttatttcagcacttactgctatcacctattacttttatgtgtgtcttacctatttgagatgccagattccttggaagtagagaccgtgtctgaatcatcattgtattaaaccgctcatccttaacaaatgcccaagccatggttaaagttcaataaatactttgttgaatttattaataaaatggcagaaatgtcattctcttccatatatgtttaataaatccctgataggtgctaagcactgc

SEQ ID NO: 317872 - DNA, 372 bp, Homo sapiens
agcataaactattacagcataaactattacagcataaactattaccagaataaatttcctctccgtttgcagtcattctccccagccctaggtcaccactgatccaccttctgttactggaaggttagttttcttccctgatttagaatttcatataaattaaatcagatagtatatactcttgtgtttagtttctttagcttaacatgtttagagatatttgctgttgcctgtgtctgtagctttttgttttcattgctgaatagtatttcattgtaatataccacagttggtttatgtatttgctgatgaatatttgtgttatttccagcgtgggattattatgaataaagttgctacaaacatttgtat

SEQ ID NO: 317873 - DNA, 4729 bp, Homo sapiens
cagattttgtgccaatttgaagccacagaaatgatgtggattgttaattgtgttttagaacatccccggacactcagtgtcacagggggaaagaagtgggtaccacattctgtttatatttcacattttaactagatttgagtgtttttagcaagaaatcagtcttaaaatctaatgtctgggatccagaagaaaatgtctttaatctgtgagttattgtcacaatgtcatcttatttaaatgtaccaattagcattttgtaataggcaaatgtcatttagtgcttttcaccaatcccactcacccccggtgctccgccttgcctaagaaaaagaaattaaggagaagtaaactttatttcctaatataatgtcagctgatatttattgagcttttcctctttgcccagagactaggacccaaagaagttaagtaactattcccaggtttatttctctctcatatgatgtcccatgtggatgtttgtggtcagtggacagctttccacctagtctttctgcgacccaggctccttcctcttggggctctgcctttctctcagtccatagagccctctttgttgaaagagcacataggaaaagaaggaaaagtctgtgtggaaaatgtttctgggtcaggcctggaagtggtgcatatctcttccgcccatgttcctttggacagaactccgtcacatggcccacctagagagattttgggaaatgtgtccagctgtgtgcctgggaggaagggggcaccattttcttgagcagctagacagtttgccgtatttgtggtgttctcctcttgttgatgttgaaatggtgaatgagccataaagtatttcaggttatccacacactaatcatctcagtgtctttaattcttaactccaatatgaatgtttaaagcttcctctagattcttattcctatataactaatagagaagaaaggacagcttcctatggggaagacagaggcttcctcatagatgttaggaataatcaaacttgcccctgccctttcacccgtctcaaattctggtcttttaaagcagcgttatgttaagtagtcctaacattgtaatatacagtactgccacattctcctactttctattagaggaagtcagagaatatttatggaagtgaggacccaaattaccttctacagatgacttttatagttacaggacagaaagtgaaaatcaaggttacgttttctacttttgtggtagaaattgagaagtgggtggatatggttcgagaagacctttcagaaacacagagactgagtctttgtcttccatgctgtctctgcagtactgagtgaatttccttatacccttgtatcatgttttcctcccatcttctagaagctggggacagatttggaagagaattacacaagttcagttttttgatacatggattttacagtgcatgcaggttatttatgtagagaggaggtctgggagaaagatggaaactagggagatgactgagaacaaagatatttgggattaacacagatagaagaaaagtttgaaaccatgagattgtcacagcatgaaaaaagatattcaaagacactaaccaacttgaggggtgcagtggtctgaatgtgtcctccaaaattcaaatgtggaaatgtatttgccagtgagatagtatgtagaggtggggccttgaggaagtgattaagtcatgagggctctgggattaatgacttaaaaagaggtgtgaggcagctgttcagcccttctgtctcctgtcccttttttttttttttttttgagatggagtcttgctctgttgccccaggctggagtgcagtggcgtgatcttggttcactgcaagctccacctcccgggttcacgccattctcctgcctcagcctcccgagtagctgggactacaggtgcccgccaccaccacgcccggctaattttttatatttttagtagagatggggtttcaccgtgttagccaggatggtcttgatctcctgacctcatgatctgcctgcctcggcctcccaaagtgctgggattataggtgtgagccaccatgcccagccccttctgtcccttctaacgtgaggacccagcaacaaggtaccatcttgaaagcagcaactggggactcagcagacaccaaaccaactggtgcttaaccgtgacttcccagcctccagagctgtaagaaaataaatttctattatttatagattacccagttgaagatactttgttaaggcagtacaaatggactaagacaagggggaagaaatttgcattcctgatcttcccaacttcttcaaattcacaacacttgaatgacagtcttatttcagcacttactgctatcacctattacttttatgtgtgtcttacctatttgagatgccagattccttggaagtagagaccgtgtctgaatcatcattgtattaaaccgctcatccttaacaaatgcccaagccatggttaaagttcaataaatactttgttgaatttattaataaaatggcagaaatgtcattctcttccatatatgtttaataaatccctgataggtgctaagcactgcactaggtaaaaattctcttctgatgctgtctttttggccaaccatttttttatcatttattcattagctgacatttgctaagtgctttggaggggtcaaaaggggaagtaatgagaaatcaaagatggtccctacatcaaggataaactatctttttttagtcactcaaagtcataaccctttggaaacaaaacccaccagtaccccagattttgaccacagatgaatcagtactacaaggactggttagagggttgaatgaatctgtatactcagcacttaacacagcactctgggtaaaagaaaaaagatcctcaaagatattagttggttacatcaagaaaggacaaacttaggttaatctataacttcatctcagaggaacaggaactttggagataaacagggctctgccacttgcaagttgcaccatccctggtttctccatctgtaaattgattaaaacactgcctatctaataagattaaataagttagaagcattcagttaaatgtcaactgaaactattgttcatgtaaattgtgcttgatgctttttctttctagattcaatgattattgtcattttacctccataggccctcaatagaaatcagttgcagagggcagaagcctagatattttcaccttaaaattggagggtgaaagacattgaggtgaagtagagatagagggtacacagaaaaatcgtataagtaaaactaacatcgttaacattatttactgtaagttatctttgtaagagtggtaaaatacattgtgttgttaaataatttcatttaaaaaatgcatcactttgtgtgtttttatattgctaaaaccataaggccagtctacaaggtttgtagataaaatagaaacataccttccttgaaaagcagaataaattttttaaaggcaggaaggaagtgtttgaaccatgtgtcaacaagctttactgtcaaagcaggcttttggtatgggaagaaaaatacttataaatacttgttttaatatttgctttattaaaatacatttaaaatacagcatttttaaatctctaagctcaacttgaagatataagaacagtaaatttgataaaaatgagaaattacattcccatttctttaacaatttgtaaattccaattatcctgaacatttaataccatttacatattttattaatcacattttcttaaacatttgataagagatttaatattttgatccaactaccaaaaaagcagacttgtgtacttgacagatttttctaaacacttcacaactcacgattcaaacaaagacaaaatagcatatcaaaagttaatcactcagttggaaagcactcataccataggcttttattcatttcttgaataattttgttatatcttcctcttttaggctgcaatgagctataattgcactactgcactccacgctgggtgacagagcaagaccctatctctaaaaataaaaaagtatatatatataaaaatatcttcctctattataatttaactcattaagccatttatttagatgtaaacttgcccccctgacatgtggtatgaaacaaatagaaacctagaaatttagtgcatattcaaatattaagacagacactggtgtggtgacttttgtctgtcgcttcattgggacgttttttctttctgatcaacttaatgaaattataatttactataattaagtgtagccatttttactgtagagttcaatgatctttgatgaacgtgtacacccatgtaaccaccacccccaatcaaagtaaagaacattttcttaccagaataaatttcctctccgtttgcagtcattctccccagccctaggtcaccactgatccaccttctgttactggaaggttagttttcttccctgatttagaatttcatataaattaaatcagatagtatatactcttgtgtttagtttctttagcttaacatgtttagagatatttgctgttgcctgtgtctgtagctttttgttttcattgctgaatagtatttcattgtaatataccacagttggtttatgtatttgctgatgaatatttgtgttatttccagcgtgggattattatgaataaagttgctacaaacatttgtat

SEQ ID NO: 317874 - DNA, 1100 bp, Homo sapiens
  misc_feature (53)..(53): n is a, c, g, or t
ctctctctctctctctctctctctctctctctctctctctctctctctctctntaaatttgataaaaatgagaaattacattcccatttctttaacaatttgtaaattccaattatcctgaacatttaataccatttacatattttattaatcacattttcttaaacatttgataagagatttaatattttgatccaactaccaaaaaagcagacttgtgtacttgacagatttttctaaacacttcacaactcacgattcaaacaaagacaaaatagcatatcaaaagttaatcactcagttggaaagcactcataccataggcttttattcatttcttgaataattttgttatatcttcctcttttaggctgcaatgagctataattgcactactgcactccacgctgggtgacagagcaagaccctatctctaaaaataaaaaagtatatatatataaaaatatcttcctctattataatttaactcattaagccatttatttagatgtaaacttgcccccctgacatgtggtatgaaacaaatagaaacctagaaatttagtgcatattcaaatattaagacagacactggtgtggtgacttttgtctgtcgcttcattgggacgttttttctttctgatcaacttaatgaaattataatttactataattaagtgtagccatttttactgtagagttcaatgatctttgatgaacgtgtacacccatgtaaccaccacccccaatcaaagtaaagaacattttcttaccagaataaatttcctctccgtttgcagtcattctccccagccctaggtcaccactgatccaccttctgttactggaaggttagttttcttccctgatttagaatttcatataaattaaatcagatagtatatactcttgtgtttagtttctttagcttaacatgtttagagatatttgctgttgcctgtgtctgtagctttttgttttcattgctgaatagtatttcattgtaatataccacagttggtttatgtatttgctgatgaatatttgtgttatttccagcgtgggattattatgaataaagttgctacaaacatttgtat

SEQ ID NO: 317875 - DNA, 4514 bp, Homo sapiens
agccgggcggaacgctagcggtgttggcgcggagtggaccccggctgcggcccctggcaatggcgccaccatcggtcccggagtcccagtgatgctctgtgccatagagcccccataacttcactactacgtgatagtaaatccccggcaaaaacccgcagcgccttgcaaccccacgccaccccaagcatcccaggactcttctgaaacagggcagtgacccgggaggaagtcaccaggtgcagaggaccgtgccctgtggggacctgcctgcaggctgctgacagactccgggctaccagatcggccgtccagctggaatcaaccgatggaggctccgctgcaaactggaatggtgcttggcgtgatgatcggggccggagtggcggtggtggtcacggccgtgctcatcctcctggtggtgcggaggctgcgagtgccaaaaaccccagccccggatggcccccggtatcggttccggaagagggacaaagtgctcttctatggccggaagattatgcggaaggtgtcacaatccacctcctccctcgtggatacctctgtctccgccacctcccggccacgcatgaggaagaaactgaagatgctcaacattgccaagaagatcctgcgcatccagaaagagacgcccacgctgcagcggaaggagcccccgcccgcagtgctagaagctgacctgaccgagggcgacctggctaactcccatctgccctctgaagtgctttatatgctcaagaacgtccgggtgctgggccacttcgagaagccactcttcctggagctctgccgccacatggtcttccagcggctgggccagggtgactacgtcttccggccgggccagccagatgccagcatctacgtggtgcaggacgggctgctggagctctgtctgccagggcctgacgggaaggagtgtgtggtgaaggaagtggttcctggggacagcgtcaacagccttctcagcatcctggatgtcatcaccggtcaccagcatccccagcggaccgtgtctgcccgggcggcccgggactccacggtgctgcgcctgccggtggaagcattctccgcggtcttcaccaagtacccggagagcttggtgcgggtcgtgcagatcatcatggtgcggctgcagcgagtcaccttcctggcactgcacaactacctgggtctgaccaatgagctcttcagccacgagatccagcccctgcgtctgttccccagccccggcctcccaactcgcaccagccctgtgcggggctccaagagaatggtcagcacctcagctacagacgagcccagggagaccccagggcggccacccgatcccaccggggccccgctgcctggacctacaggggaccctgtgaagcccacatccctggaaaccccctcggcccctctgctgagccgctgcgtctccatgccaggggacatctcaggcttgcagggtggcccccgctccgacttcgacatggcctatgagcgtggccggatctccgtgtccctgcaggaagaggcctccggggggtccctggcagcccccgctcggacccccactcaggagcctcgtgagcagccggcaggcgcctgtgaatacagctactgtgaggatgagtcggccactggtggctgccctttcgggccctaccagggccgccagaccagcagcatcttcgaggcagcaaagcaggagctggccaagctgatgcggattgaggacccctccctcctgaacagcagagtcttgctgcaccacgccaaagctggcaccatcattgcccgccagggagaccaggacgtgagcctgcacttcgtgctctggggctgcctgcacgtgtaccagcgcatgatcgacaaggcggaggacgtgtgcctgttcgtagcgcagcccggggaactggtggggcagctggcggtgctcactggcgaacctctcatcttcacactgcgagcccaacgcgactgcaccttcctgcggatctccaagtccgacttctatgagatcatgcgcgcacagcccagtgtggtgctgagtgcggcgcacacggtggcagccaggatgtcgcccttcgtgcgccagatggacttcgccatcgactggactgcagtggaggcgggacgcgcgctgtacaggcagggcgaccgctccgactgcacttacatcgtgctcaatgggcggctgcgtagcgtgatccagcgaggcagtggcaagaaggagctggtgggcgagtacggccgcggcgacctcatcggcgtggtggaggcactgacccggcagccgcgagccacgacggtgcacgcggtgcgcgacacggagctggccaagcttcccgagggcaccttgggtcacatcaaacgccggtacccgcaggtcgtgacccgccttatccacctactgagccagaaaattctagggaatttgcagcagctgcaaggacccttcccagcaggctctgggttgggtgtgcccccacactcggaactcaccaacccagccagcaacctggcaactgtggcaatcctgcctgtgtgtgctgaggtccccatggtggccttcacgctggagctgcagcacgccctgcaggccatcggtccgacgctactccttaacagtgacatcatccgggcacgcctgggggcctccgcactggatagcatccaagagttccggctgtcagggtggctggcccagcaggaggatgcacaccgtatcgtactctaccagacggacgcctcgctgacgccctggaccgtgcgctgcctgcgacaggccgactgcatcctcattgtgggcctgggggaccaggagcctaccctcggccagctggagcagatgctggagaacacggctgtgcgcgcccttaagcagctagtcctgctccaccgagaggagggcgcgggccccacgcgcaccgtggagtggctaaatatgcgcagctggtgctcggggcacctgcacctgcgctgtccgcgccgcctcttttcgcgccgcagccctgccaagctgcatgagctctacgagaaggttttctccaggcgcgcggaccggcacagcgacttctcccgcttggcgagggtgctcacggggaacaccattgcccttgtgctaggcgggggcggggccaggggctgctcgcacatcggagtactaaaggcattagaggaggcgggggtccccgtggacctggtgggcggcacgtccattggctctttcatcggagcgttgtacgcggaggagcgcagcgccagccgcacgaagcagcgggcccgggagtgggccaagagcatgacttcggtgctggaacctgtgttggacctcacgtacccagtcacctccatgttcactgggtctgcctttaaccgcagcatccatcgggtcttccaggataagcagattgaggacctgtggctgccttacttcaacgtgaccacagatatcaccgcctcagccatgcgagtccacaaagatggctccctgtggcggtacgtgcgcgccagcatgacgctgtcgggctacctgcccccgctgtgcgaccccaaggacgggcacctactcatggatggcggctacatcaacaatctgccagcggacatcgcccgcagcatgggtgccaaaacggtcatcgccattgacgtggggagccaggatgagacggacctcagcacctacggggacagcctgtccggctggtggctgctgtggaagcggctgaatccctgggctgacaaggtaaaggttccagacatggctgaaatccagtcccgcctggcctacgtgtcctgtgtgcggcagctagaggttgtcaagtccagctcctactgcgagtacctgcgcccgcccatcgactgcttcaagaccatggactttgggaagttcgaccagatctatgatgtgggctaccagtacgggaaggcggtgtttggaggctggagccgtggcaacgtcattgagaaaatgctcacagaccggcggtctacagaccttaatgagagccgccgtgcagacgtgcttgccttcccaagctctggcttcactgacttggcagagattgtgtcccggattgagccccccacgagctatgtctctgatggctgtgctgacggagaggagtcagattgtctgacagagtatgaggaggacgccggacccgactgctcgagggatgaaggggggtcccccgagggcgcaagccccagcactgcctccgagatggaggaggagaagtcgattctccggcaacgacgctgtctgccccaggagccgcccggctcagccacagatgcctgaggacctcgacaggggtcaccccctccctcccacccctggactgggctgggggtggccccgtgggggtagctcactccccctcctgctgctatgcctgtgacccccgcggcccacacactggactgacctgccctgagcggggatgcagtgttgcactgatgacttgaccagcccctcccccaataaactcgcctcttggaaa

SEQ ID NO: 317876 - DNA, 4438 bp, Homo sapiens
agccgggcggaacgctagcggtgttggcgcggagtggaccccggctgcggcccctggcaatggcgccaccatcggtcccggagtcccagtgatgctctgtgccatagagcccccataacttcactactacgtgatagtaaatccccggcaaaaacccgcagcgccttgcaaccccacgccaccccaagcatcccaggactcttctgaaacgactccgggctaccagatcggccgtccagctggaatcaaccgatggaggctccgctgcaaactggaatggtgcttggcgtgatgatcggggccggagtggcggtggtggtcacggccgtgctcatcctcctggtggtgcggaggctgcgagtgccaaaaaccccagccccggatggcccccggtatcggttccggaagagggacaaagtgctcttctatggccggaagattatgcggaaggtgtcacaatccacctcctccctcgtggatacctctgtctccgccacctcccggccacgcatgaggaagaaactgaagatgctcaacattgccaagaagatcctgcgcatccagaaagagacgcccacgctgcagcggaaggagcccccgcccgcagtgctagaagctgacctgaccgagggcgacctggctaactcccatctgccctctgaagtgctttatatgctcaagaacgtccgggtgctgggccacttcgagaagccactcttcctggagctctgccgccacatggtcttccagcggctgggccagggtgactacgtcttccggccgggccagccagatgccagcatctacgtggtgcaggacgggctgctggagctctgtctgccagggcctgacgggaaggagtgtgtggtgaaggaagtggttcctggggacagcgtcaacagccttctcagcatcctggatgtcatcaccggtcaccagcatccccagcggaccgtgtctgcccgggcggcccgggactccacggtgctgcgcctgccggtggaagcattctccgcggtcttcaccaagtacccggagagcttggtgcgggtcgtgcagatcatcatggtgcggctgcagcgagtcaccttcctggcactgcacaactacctgggtctgaccaatgagctcttcagccacgagatccagcccctgcgtctgttccccagccccggcctcccaactcgcaccagccctgtgcggggctccaagagaatggtcagcacctcagctacagacgagcccagggagaccccagggcggccacccgatcccaccggggccccgctgcctggacctacaggggaccctgtgaagcccacatccctggaaaccccctcggcccctctgctgagccgctgcgtctccatgccaggggacatctcaggcttgcagggtggcccccgctccgacttcgacatggcctatgagcgtggccggatctccgtgtccctgcaggaagaggcctccggggggtccctggcagcccccgctcggacccccactcaggagcctcgtgagcagccggcaggcgcctgtgaatacagctactgtgaggatgagtcggccactggtggctgccctttcgggccctaccagggccgccagaccagcagcatcttcgaggcagcaaagcaggagctggccaagctgatgcggattgaggacccctccctcctgaacagcagagtcttgctgcaccacgccaaagctggcaccatcattgcccgccagggagaccaggacgtgagcctgcacttcgtgctctggggctgcctgcacgtgtaccagcgcatgatcgacaaggcggaggacgtgtgcctgttcgtagcgcagcccggggaactggtggggcagctggcggtgctcactggcgaacctctcatcttcacactgcgagcccaacgcgactgcaccttcctgcggatctccaagtccgacttctatgagatcatgcgcgcacagcccagtgtggtgctgagtgcggcgcacacggtggcagccaggatgtcgcccttcgtgcgccagatggacttcgccatcgactggactgcagtggaggcgggacgcgcgctgtacaggcagggcgaccgctccgactgcacttacatcgtgctcaatgggcggctgcgtagcgtgatccagcgaggcagtggcaagaaggagctggtgggcgagtacggccgcggcgacctcatcggcgtggtggaggcactgacccggcagccgcgagccacgacggtgcacgcggtgcgcgacacggagctggccaagcttcccgagggcaccttgggtcacatcaaacgccggtacccgcaggtcgtgacccgccttatccacctactgagccagaaaattctagggaatttgcagcagctgcaaggacccttcccagcaggctctgggttgggtgtgcccccacactcggaactcaccaacccagccagcaacctggcaactgtggcaatcctgcctgtgtgtgctgaggtccccatggtggccttcacgctggagctgcagcacgccctgcaggccatcggtccgacgctactccttaacagtgacatcatccgggcacgcctgggggcctccgcactggatagcatccaagagttccggctgtcagggtggctggcccagcaggaggatgcacaccgtatcgtactctaccagacggacgcctcgctgacgccctggaccgtgcgctgcctgcgacaggccgactgcatcctcattgtgggcctgggggaccaggagcctaccctcggccagctggagcagatgctggagaacacggctgtgcgcgcccttaagcagctagtcctgctccaccgagaggagggcgcgggccccacgcgcaccgtggagtggctaaatatgcgcagctggtgctcggggcacctgcacctgcgctgtccgcgccgcctcttttcgcgccgcagccctgccaagctgcatgagctctacgagaaggttttctccaggcgcgcggaccggcacagcgacttctcccgcttggcgagggtgctcacggggaacaccattgcccttgtgctaggcgggggcggggccaggggctgctcgcacatcggagtactaaaggcattagaggaggcgggggtccccgtggacctggtgggcggcacgtccattggctctttcatcggagcgttgtacgcggaggagcgcagcgccagccgcacgaagcagcgggcccgggagtgggccaagagcatgacttcggtgctggaacctgtgttggacctcacgtacccagtcacctccatgttcactgggtctgcctttaaccgcagcatccatcgggtcttccaggataagcagattgaggacctgtggctgccttacttcaacgtgaccacagatatcaccgcctcagccatgcgagtccacaaagatggctccctgtggcggtacgtgcgcgccagcatgacgctgtcgggctacctgcccccgctgtgcgaccccaaggacgggcacctactcatggatggcggctacatcaacaatctgccagcggacatcgcccgcagcatgggtgccaaaacggtcatcgccattgacgtggggagccaggatgagacggacctcagcacctacggggacagcctgtccggctggtggctgctgtggaagcggctgaatccctgggctgacaaggtaaaggttccagacatggctgaaatccagtcccgcctggcctacgtgtcctgtgtgcggcagctagaggttgtcaagtccagctcctactgcgagtacctgcgcccgcccatcgactgcttcaagaccatggactttgggaagttcgaccagatctatgatgtgggctaccagtacgggaaggcggtgtttggaggctggagccgtggcaacgtcattgagaaaatgctcacagaccggcggtctacagaccttaatgagagccgccgtgcagacgtgcttgccttcccaagctctggcttcactgacttggcagagattgtgtcccggattgagccccccacgagctatgtctctgatggctgtgctgacggagaggagtcagattgtctgacagagtatgaggaggacgccggacccgactgctcgagggatgaaggggggtcccccgagggcgcaagccccagcactgcctccgagatggaggaggagaagtcgattctccggcaacgacgctgtctgccccaggagccgcccggctcagccacagatgcctgaggacctcgacaggggtcaccccctccctcccacccctggactgggctgggggtggccccgtgggggtagctcactccccctcctgctgctatgcctgtgacccccgcggcccacacactggactgacctgccctgagcggggatgcagtgttgcactgatgacttgaccagcccctcccccaataaactcgcctcttggaaa

SEQ ID NO: 317877 - DNA, 2402 bp, Homo sapiens
ctgtcctctccctctccccagagctctaatgggtagcgagcgaggcttgcttccctacacccccattgcaggggagccctagatggggcagtacagccccctttccacccatcttcggctctcctcattccccacccaagcagccccaatcatgcacgcggccccccaggtggaggcactgacccggcagccgcgagccacgacggtgcacgcggtgcgcgacacggagctggccaagcttcccgagggcaccttgggtcacatcaaacgccggtacccgcaggtcgtgacccgccttatccacctactgagccagaaaattctagggaatttgcagcagctgcaaggacccttcccagcaggctctgggttgggtgtgcccccacactcggaactcaccaacccagccagcaacctggcaactgtggcaatcctgcctgtgtgtgctgaggtccccatggtggccttcacgctggagctgcagcacgccctgcaggccatcggtccgacgctactccttaacagtgacatcatccgggcacgcctgggggcctccgcactggatagcatccaagagttccggctgtcagggtggctggcccagcaggaggatgcacaccgtatcgtactctaccagacggacgcctcgctgacgccctggaccgtgcgctgcctgcgacaggccgactgcatcctcattgtgggcctgggggaccaggagcctaccctcggccagctggagcagatgctggagaacacggctgtgcgcgcccttaagcagctagtcctgctccaccgagaggagggcgcgggccccacgcgcaccgtggagtggctaaatatgcgcagctggtgctcggggcacctgcacctgcgctgtccgcgccgcctcttttcgcgccgcagccctgccaagctgcatgagctctacgagaaggttttctccaggcgcgcggaccggcacagcgacttctcccgcttggcgagggtgctcacggggaacaccattgcccttgtgctaggcgggggcggggccaggggctgctcgcacatcggagtactaaaggcattagaggaggcgggggtccccgtggacctggtgggcggcacgtccattggctctttcatcggagcgttgtacgcggaggagcgcagcgccagccgcacgaagcagcgggcccgggagtgggccaagagcatgacttcggtgctggaacctgtgttggacctcacgtacccagtcacctccatgttcactgggtctgcctttaaccgcagcatccatcgggtcttccaggataagcagattgaggacctgtggctgccttacttcaacgtgaccacagatatcaccgcctcagccatgcgagtccacaaagatggctccctgtggcggtacgtgcgcgccagcatgacgctgtcgggctacctgcccccgctgtgcgaccccaaggacgggcacctactcatggatggcggctacatcaacaatctgccagcggacatcgcccgcagcatgggtgccaaaacggtcatcgccattgacgtggggagccaggatgagacggacctcagcacctacggggacagcctgtccggctggtggctgctgtggaagcggctgaatccctgggctgacaaggtaaaggttccagacatggctgaaatccagtcccgcctggcctacgtgtcctgtgtgcggcagctagaggttgtcaagtccagctcctactgcgagtacctgcgcccgcccatcgactgcttcaagaccatggactttgggaagttcgaccagatctatgatgtgggctaccagtacgggaaggcggtgtttggaggctggagccgtggcaacgtcattgagaaaatgctcacagaccggcggtctacagaccttaatgagagccgccgtgcagacgtgcttgccttcccaagctctggcttcactgacttggcagagattgtgtcccggattgagccccccacgagctatgtctctgatggctgtgctgacggagaggagtcagattgtctgacagagtatgaggaggacgccggacccgactgctcgagggatgaaggggggtcccccgagggcgcaagccccagcactgcctccgagatggaggaggagaagtcgattctccggcaacgacgctgtctgccccaggagccgcccggctcagccacagatgcctgaggacctcgacaggggtcaccccctccctcccacccctggactgggctgggggtggccccgtgggggtagctcactccccctcctgctgctatgcctgtgacccccgcggcccacacactggactgacctgccctgagcggggatgcagtgttgcactgatgacttgaccagcccctcccccaataaactcgcctcttggaaa

SEQ ID NO: 317878 - DNA, 4324 bp, Homo sapiens
agggaagagtcgcgcccccggggagggagcagcactggcccattctgcagatggggacatcgagtcacgggctggctacgaactcctcgggggcgaaggtggcggagagggatgggttccaggacgtcctggcgcccggggaaggctcggcgggacggatttgcggtgcgcagccagtgccgttcgtccctcaggtgcttggcgtgatgatcggggccggagtggcggtggtggtcacggccgtgctcatcctcctggtggtgcggaggctgcgagtgccaaaaaccccagccccggatggcccccggtatcggttccggaagagggacaaagtgctcttctatggccggaagattatgcggaaggtgtcacaatccacctcctccctcgtggatacctctgtctccgccacctcccggccacgcatgaggaagaaactgaagatgctcaacattgccaagaagatcctgcgcatccagaaagagacgcccacgctgcagcggaaggagcccccgcccgcagtgctagaagctgacctgaccgagggcgacctggctaactcccatctgccctctgaagtgctttatatgctcaagaacgtccgggtgctgggccacttcgagaagccactcttcctggagctctgccgccacatggtcttccagcggctgggccagggtgactacgtcttccggccgggccagccagatgccagcatctacgtggtgcaggacgggctgctggagctctgtctgccagggcctgacgggaaggagtgtgtggtgaaggaagtggttcctggggacagcgtcaacagccttctcagcatcctggatgtcatcaccggtcaccagcatccccagcggaccgtgtctgcccgggcggcccgggactccacggtgctgcgcctgccggtggaagcattctccgcggtcttcaccaagtacccggagagcttggtgcgggtcgtgcagatcatcatggtgcggctgcagcgagtcaccttcctggcactgcacaactacctgggtctgaccaatgagctcttcagccacgagatccagcccctgcgtctgttccccagccccggcctcccaactcgcaccagccctgtgcggggctccaagagaatggtcagcacctcagctacagacgagcccagggagaccccagggcggccacccgatcccaccggggccccgctgcctggacctacaggggaccctgtgaagcccacatccctggaaaccccctcggcccctctgctgagccgctgcgtctccatgccaggggacatctcaggcttgcagggtggcccccgctccgacttcgacatggcctatgagcgtggccggatctccgtgtccctgcaggaagaggcctccggggggtccctggcagcccccgctcggacccccactcaggagcctcgtgagcagccggcaggcgcctgtgaatacagctactgtgaggatgagtcggccactggtggctgccctttcgggccctaccagggccgccagaccagcagcatcttcgaggcagcaaagcaggagctggccaagctgatgcggattgaggacccctccctcctgaacagcagagtcttgctgcaccacgccaaagctggcaccatcattgcccgccagggagaccaggacgtgagcctgcacttcgtgctctggggctgcctgcacgtgtaccagcgcatgatcgacaaggcggaggacgtgtgcctgttcgtagcgcagcccggggaactggtggggcagctggcggtgctcactggcgaacctctcatcttcacactgcgagcccaacgcgactgcaccttcctgcggatctccaagtccgacttctatgagatcatgcgcgcacagcccagtgtggtgctgagtgcggcgcacacggtggcagccaggatgtcgcccttcgtgcgccagatggacttcgccatcgactggactgcagtggaggcgggacgcgcgctgtacaggcagggcgaccgctccgactgcacttacatcgtgctcaatgggcggctgcgtagcgtgatccagcgaggcagtggcaagaaggagctggtgggcgagtacggccgcggcgacctcatcggcgtggtggaggcactgacccggcagccgcgagccacgacggtgcacgcggtgcgcgacacggagctggccaagcttcccgagggcaccttgggtcacatcaaacgccggtacccgcaggtcgtgacccgccttatccacctactgagccagaaaattctagggaatttgcagcagctgcaaggacccttcccagcaggctctgggttgggtgtgcccccacactcggaactcaccaacccagccagcaacctggcaactgtggcaatcctgcctgtgtgtgctgaggtccccatggtggccttcacgctggagctgcagcacgccctgcaggccatcggtccgacgctactccttaacagtgacatcatccgggcacgcctgggggcctccgcactggatagcatccaagagttccggctgtcagggtggctggcccagcaggaggatgcacaccgtatcgtactctaccagacggacgcctcgctgacgccctggaccgtgcgctgcctgcgacaggccgactgcatcctcattgtgggcctgggggaccaggagcctaccctcggccagctggagcagatgctggagaacacggctgtgcgcgcccttaagcagctagtcctgctccaccgagaggagggcgcgggccccacgcgcaccgtggagtggctaaatatgcgcagctggtgctcggggcacctgcacctgcgctgtccgcgccgcctcttttcgcgccgcagccctgccaagctggcgcgcggaccggcacagcgacttctcccgcttggcgagggtgctcacggggaacaccattgcccttgtgctaggcgggggcggggccaggggctgctcgcacatcggagtactaaaggcattagaggaggcgggggtccccgtggacctggtgggcggcacgtccattggctctttcatcggagcgttgtacgcggaggagcgcagcgccagccgcacgaagcagcgggcccgggagtgggccaagagcatgacttcggtgctggaacctgtgttggacctcacgtacccagtcacctccatgttcactgggtctgcctttaaccgcagcatccatcgggtcttccaggataagcagattgaggacctgtggctgccttacttcaacgtgaccacagatatcaccgcctcagccatgcgagtccacaaagatggctccctgtggcggtacgtgcgcgccagcatgacgctgtcgggctacctgcccccgctgtgcgaccccaaggacgggcacctactcatggatggcggctacatcaacaatctgccagcggacatcgcccgcagcatgggtgccaaaacggtcatcgccattgacgtggggagccaggatgagacggacctcagcacctacggggacagcctgtccggctggtggctgctgtggaagcggctgaatccctgggctgacaaggtaaaggttccagacatggctgaaatccagtcccgcctggcctacgtgtcctgtgtgcggcagctagaggttgtcaagtccagctcctactgcgagtacctgcgcccgcccatcgactgcttcaagaccatggactttgggaagttcgaccagatctatgatgtgggctaccagtacgggaaggcggtgtttggaggctggagccgtggcaacgtcattgagaaaatgctcacagaccggcggtctacagaccttaatgagagccgccgtgcagacgtgcttgccttcccaagctctggcttcactgacttggcagagattgtgtcccggattgagccccccacgagctatgtctctgatggctgtgctgacggagaggagtcagattgtctgacagagtatgaggaggacgccggacccgactgctcgagggatgaaggggggtcccccgagggcgcaagccccagcactgcctccgagatggaggaggagaagtcgattctccggcaacgacgctgtctgccccaggagccgcccggctcagccacagatgcctgaggacctcgacaggggtcaccccctccctcccacccctggactgggctgggggtggccccgtgggggtagctcactccccctcctgctgctatgcctgtgacccccgcggcccacacactggactgacctgccctgagcggggatgcagtgttgcactgatgacttgaccagcccctcccccaataaactcgcctcttggaaa

SEQ ID NO: 317879 - DNA, 4376 bp, Homo sapiens
agggaagagtcgcgcccccggggagggagcagcactggcccattctgcagatggggacatcgagtcacgggctggctacgaactcctcgggggcgaaggtggcggagagggatgggttccaggacgtcctggcgcccggggaaggctcggcgggacggatttgcggtgcgcagccagtgccgttcgtccctcaggtgcttggcgtgatgatcggggccggagtggcggtggtggtcacggccgtgctcatcctcctggtggtgcggaggctgcgagtgccaaaaaccccagccccggatggcccccggtatcggttccggaagagggacaaagtgctcttctatggccggaagattatgcggaaggtgtcacaatccacctcctccctcgtggatacctctgtctccgccacctcccggccacgcatgaggaagaaactgaagatgctcaacattgccaagaagatcctgcgcatccagaaagagacgcccacgctgcagcggaaggagcccccgcccgcagtgctagaagctgacctgaccgagggcgacctggctaactcccatctgccctctgaagtgctttatatgctcaagaacgtccgggtgctgggccacttcgagaagccactcttcctggagctctgccgccacatggtcttccagcggctgggccagggtgactacgtcttccggccgggccagccagatgccagcatctacgtggtgcaggacgggctgctggagctctgtctgccagggcctgacgggaaggagtgtgtggtgaaggaagtggttcctggggacagcgtcaacagccttctcagcatcctggatgtcatcaccggtcaccagcatccccagcggaccgtgtctgcccgggcggcccgggactccacggtgctgcgcctgccggtggaagcattctccgcggtcttcaccaagtacccggagagcttggtgcgggtcgtgcagatcatcatggtgcggctgcagcgagtcaccttcctggcactgcacaactacctgggtctgaccaatgagctcttcagccacgagatccagcccctgcgtctgttccccagccccggcctcccaactcgcaccagccctgtgcggggctccaagagaatggtcagcacctcagctacagacgagcccagggagaccccagggcggccacccgatcccaccggggccccgctgcctggacctacaggggaccctgtgaagcccacatccctggaaaccccctcggcccctctgctgagccgctgcgtctccatgccaggggacatctcaggcttgcagggtggcccccgctccgacttcgacatggcctatgagcgtggccggatctccgtgtccctgcaggaagaggcctccggggggtccctggcagcccccgctcggacccccactcaggagcctcgtgagcagccggcaggcgcctgtgaatacagctactgtgaggatgagtcggccactggtggctgccctttcgggccctaccagggccgccagaccagcagcatcttcgaggcagcaaagcaggagctggccaagctgatgcggattgaggacccctccctcctgaacagcagagtcttgctgcaccacgccaaagctggcaccatcattgcccgccagggagaccaggacgtgagcctgcacttcgtgctctggggctgcctgcacgtgtaccagcgcatgatcgacaaggcggaggacgtgtgcctgttcgtagcgcagcccggggaactggtggggcagctggcggtgctcactggcgaacctctcatcttcacactgcgagcccaacgcgactgcaccttcctgcggatctccaagtccgacttctatgagatcatgcgcgcacagcccagtgtggtgctgagtgcggcgcacacggtggcagccaggatgtcgcccttcgtgcgccagatggacttcgccatcgactggactgcagtggaggcgggacgcgcgctgtacaggcagggcgaccgctccgactgcacttacatcgtgctcaatgggcggctgcgtagcgtgatccagcgaggcagtggcaagaaggagctggtgggcgagtacggccgcggcgacctcatcggcgtggtggaggcactgacccggcagccgcgagccacgacggtgcacgcggtgcgcgacacggagctggccaagcttcccgagggcaccttgggtcacatcaaacgccggtacccgcaggtcgtgacccgccttatccacctactgagccagaaaattctagggaatttgcagcagctgcaaggacccttcccagcaggctctgggttgggtgtgcccccacactcggaactcaccaacccagccagcaacctggcaactgtggcaatcctgcctgtgtgtgctgaggtccccatggtggccttcacgctggagctgcagcacgccctgcaggccatcggtccgacgctactccttaacagtgacatcatccgggcacgcctgggggcctccgcactggatagcatccaagagttccggctgtcagggtggctggcccagcaggaggatgcacaccgtatcgtactctaccagacggacgcctcgctgacgccctggaccgtgcgctgcctgcgacaggccgactgcatcctcattgtgggcctgggggaccaggagcctaccctcggccagctggagcagatgctggagaacacggctgtgcgcgcccttaagcagctagtcctgctccaccgagaggagggcgcgggccccacgcgcaccgtggagtggctaaatatgcgcagctggtgctcggggcacctgcacctgcgctgtccgcgccgcctcttttcgcgccgcagccctgccaagctgcatgagctctacgagaaggttttctccaggcgcgcggaccggcacagcgacttctcccgcttggcgagggtgctcacggggaacaccattgcccttgtgctaggcgggggcggggccaggggctgctcgcacatcggagtactaaaggcattagaggaggcgggggtccccgtggacctggtgggcggcacgtccattggctctttcatcggagcgttgtacgcggaggagcgcagcgccagccgcacgaagcagcgggcccgggagtgggccaagagcatgacttcggtgctggaacctgtgttggacctcacgtacccagtcacctccatgttcactgggtctgcctttaaccgcagcatccatcgggtcttccaggataagcagattgaggacctgtggctgccttacttcaacgtgaccacagatatcaccgcctcagccatgcgagtccacaaagatggctccctgtggcggtacgtgcgcgccagcatgacgctgtcgggctacctgcccccgctgtgcgaccccaaggacgggcacctactcatggatggcggctacatcaacaatctgccagtgtgccacacgtggaatatacgcgcggaaatgtgtgtcgacaaagactaccgatcagtcgacatacgatgtgagacagccaggatgagacggacctcagcacctacggggacagcctgtccggctggtggctgctgtggaagcggctgaatccctgggctgacaaggtaaaggttccagacatggctgaaatccagtcccgcctggcctacgtgtcctgtgtgcggcagctagaggttgtcaagtccagctcctactgcgagtacctgcgcccgcccatcgactgcttcaagaccatggactttgggaagttcgaccagatctatgatgtgggctaccagtacgggaaggcggtgtttggaggctggagccgtggcaacgtcattgagaaaatgctcacagaccggcggtctacagaccttaatgagagccgccgtgcagacgtgcttgccttcccaagctctggcttcactgacttggcagagattgtgtcccggattgagccccccacgagctatgtctctgatggctgtgctgacggagaggagtcagattgtctgacagagtatgaggaggacgccggacccgactgctcgagggatgaaggggggtcccccgagggcgcaagccccagcactgcctccgagatggaggaggagaagtcgattctccggcaacgacgctgtctgccccaggagccgcccggctcagccacagatgcctgaggacctcgacaggggtcaccccctccctcccacccctggactgggctgggggtggccccgtgggggtagctcactccccctcctgctgctatgcctgtgacccccgcggcccacacactggactgacctgccctgagcggggatgcagtgttgcactgatgacttgaccagcccctcccccaataaactcgcctcttggaaa

SEQ ID NO: 317880 - DNA, 3139 bp, Homo sapiens
  misc_feature (3123)..(3123): n is a, c, g, or t
agggaagagtcgcgcccccggggagggagcagcactggcccattctgcagatggggacatcgagtcacgggctggctacgaactcctcgggggcgaaggtggcggagagggatgggttccaggacgtcctggcgcccggggaaggctcggcgggacggatttgcggtgcgcagccagtgccgttcgtccctcaggtgcttggcgtgatgatcggggccggagtggcggtggtggtcacggccgtgctcatcctcctggtggtgcggaggctgcgagtgccaaaaaccccagccccggatggcccccggtatcggttccggaagagggacaaagtgctcttctatggccggaagattatgcggaaggtgtcacaatccacctcctccctcgtggatacctctgtctccgccacctcccggccacgcatgaggaagaaactgaagatgctcaacattgccaagaagatcctgcgcatccagaaagagacgcccacgctgcagcggaaggagcccccgcccgcagtgctagaagctgacctgaccgagggcgacctggctaactcccatctgccctctgaagtgctttatatgctcaagaacgtccgggtgctgggccacttcgagaagccactcttcctggagctctgccgccacatggtcttccagcggctgggccagggtgactacgtcttccggccgggccagccagatgccagcatctacgtggtgcaggacgggctgctggagctctgtctgccagggcctgacgggaaggagtgtgtggtgaaggaagtggttcctggggacagcgtcaacagccttctcagcatcctggatgtcatcaccggtcaccagcatccccagcggaccgtgtctgcccgggcggcccgggactccacggtgctgcgcctgccggtggaagcattctccgcggtcttcaccaagtacccggagagcttggtgcgggtcgtgcagatcatcatggtgcggctgcagcgagtcaccttcctggcactgcacaactacctgggtctgaccaatgagctcttcagccacgagatccagcccctgcgtctgttccccagccccggcctcccaactcgcaccagccctgtgcggggctccaagagaatggtcagcacctcagctacagacgagcccagggagaccccagggcggccacccgatcccaccggggccccgctgcctggacctacaggggaccctgtgaagcccacatccctggaaaccccctcggcccctctgctgagccgctgcgtctccatgccaggggacatctcaggcttgcagggtggcccccgctccgacttcgacatggcctatgagcgtggccggatctccgtgtccctgcaggaagaggcctccggggggtccctggcagcccccgctcggacccccactcaggagcctcgtgagcagccggcaggcgcctgtgaatacagctactgtgaggatgagtcggccactggtggctgccctttcgggccctaccagggccgccagaccagcagcatcttcgaggcagcaaagcaggagctggccaagctgatgcggattgaggacccctccctcctgaacagcagagtcttgctgcaccacgccaaagctggcaccatcattgcccgccagggagaccaggacgtgagcctgcacttcgtgctctggggctgcctgcacgtgtaccagcgcatgatcgacaaggcggaggacgtgtgcctgttcgtagcgcagcccggggaactggtggggcagctggcggtgctcactggcgaacctctcatcttcacactgcgagcccaacgcgactgcaccttcctgcggatctccaagtccgacttctatgagatcatgcgcgcacagcccagtgtggtgctgagtgcggcgcacacggtggcagccaggatgtcgcccttcgtgcgccagatggacttcgccatcgactggactgcagtggaggcgggacgcgcgctgtacaggcagggcgaccgctccgactgcacttacatcgtgctcaatgggcggctgcgtagcgtgatccagcgaggcagtggcaagaaggagctggtgggcgagtacggccgcggcgacctcatcggcgtggtggaggcactgacccggcagccgcgagccacgacggtgcacgcggtgcgcgacacggagctggccaagcttcccgagggcaccttgggtcacatcaaacgccggtacccgcaggtcgtgacccgccttatccacctactgagccagaaaattctagggaatttgcagcagctgcaaggacccttcccagcaggctctgggttgggtgtgcccccacactcggaactcaccaacccagccagcaacctggcaactgtggcaatcctgcctgtgtgtgctgaggtccccatggtggccttcacgctggagctgcagcacgccctgcaggccatcggtccgacgctactccttaacagtgacatcatccgggcacgcctgggggcctccgcactggatagcatccaagagttccggctgtcagggtggctggcccagcaggaggatgcacaccgtatcgtactctaccagacggacgcctcgctgacgccctggaccgtgcgctgcctgcgacaggccgactgcatcctcattgtgggcctgggggaccaggagcctaccctcggccagctggagcagatgctggagaacacggctgtgcgcgcccttaagcagctagtcctgctccaccgagaggagggcgcgggccccacgcgcaccgtggagtggctaaatatgcgcagctggtgctcggggcacctgcacctgcgctgtccgcgccgcctcttttcgcgccgcagccctgccaagctggtgcttgccttcccaagctctggcttcactgacttggcagagattgtgtcccggattgagccccccacgagctatgtctctgatggctgtgctgacggagaggagtcagattgtctgacagagtatgaggaggacgccggacccgactgctcgagggatgaaggggggtcccccgagggcgcaagccccagcactgcctccgagatggacggaggcagaagtcgaagttctccggggcaacagaacgcgtggntctggggccccaaagg

SEQ ID NO: 317881 - DNA, 593 bp, Homo sapiens
attggtaatgtctgtcaagggcaggacaggggatgtgtaggcgagtgtgctatgtgcagctgactctgaaataggtttagtctcaaatgcaactcccccagagaatcaggcttttgaggggccagagaatgggcagacagagtggggacaagcaaagcagggttgcagacatggacccagcccctcatttcccacaggatgtgggctaccagtacgggaaggcggtgtttggaggctggagccgtggcaacgtcattgagaaaatgctcacagaccggcggtctacagaccttaatgagagccgccgtgcagacgtaagcctgtgatgcccccagggccactctgactccactgattacagaacccaagcccccttaaagtctccccgaaacctcagatgaccccacatgtccctgggttttgctgagctctcagacctctgctgacttcagagagttcccaccctaggatctcctctgagcccccaatgcaccactgggccccccaggggccccaagactctgtgggccccccctaagagcctcaccagtgtcaccccacaggtgtgcttgccttcccaagctctggcttca

SEQ ID NO: 317882 - DNA, 4353 bp, Homo sapiens
agggaagagtcgcgcccccggggagggagcagcactggcccattctgcagatggggacatcgagtcacgggctggctacgaactcctcgggggcgaaggtggcggagagggatgggttccaggacgtcctggcgcccggggaaggctcggcgggacggatttgcggtgcgcagccagtgccgttcgtccctcaggtgcttggcgtgatgatcggggccggagtggcggtggtggtcacggccgtgctcatcctcctggtggtgcggaggctgcgagtgccaaaaaccccagccccggatggcccccggtatcggttccggaagagggacaaagtgctcttctatggccggaagattatgcggaaggtgtcacaatccacctcctccctcgtggatacctctgtctccgccacctcccggccacgcatgaggaagaaactgaagatgctcaacattgccaagaagatcctgcgcatccagaaagagacgcccacgctgcagcggaaggagcccccgcccgcagtgctagaagctgacctgaccgagggcgacctggctaactcccatctgccctctgaagtgctttatatgctcaagaacgtccgggtgctgggccacttcgagaagccactcttcctggagctctgccgccacatggtcttccagcggctgggccagggtgactacgtcttccggccgggccagccagatgccagcatctacgtggtgcaggacgggctgctggagctctgtctgccagggcctgacgggaaggagtgtgtggtgaaggaagtggttcctggggacagcgtcaacagccttctcagcatcctggatgtcatcaccggtcaccagcatccccagcggaccgtgtctgcccgggcggcccgggactccacggtgctgcgcctgccggtggaagcattctccgcggtcttcaccaagtacccggagagcttggtgcgggtcgtgcagatcatcatggtgcggctgcagcgagtcaccttcctggcactgcacaactacctgggtctgaccaatgagctcttcagccacgagatccagcccctgcgtctgttccccagccccggcctcccaactcgcaccagccctgtgcggggctccaagagaatggtcagcacctcagctacagacgagcccagggagaccccagggcggccacccgatcccaccggggccccgctgcctggacctacaggggaccctgtgaagcccacatccctggaaaccccctcggcccctctgctgagccgctgcgtctccatgccaggggacatctcaggcttgcagggtggcccccgctccgacttcgacatggcctatgagcgtggccggatctccgtgtccctgcaggaagaggcctccggggggtccctggcagcccccgctcggacccccactcaggagcctcgtgagcagccggcaggcgcctgtgaatacagctactgtgaggatgagtcggccactggtggctgccctttcgggccctaccagggccgccagaccagcagcatcttcgaggcagcaaagcaggagctggccaagctgatgcggattgaggacccctccctcctgaacagcagagtcttgctgcaccacgccaaagctggcaccatcattgcccgccagggagaccaggacgtgagcctgcacttcgtgctctggggctgcctgcacgtgtaccagcgcatgatcgacaaggcggaggacgtgtgcctgttcgtagcgcagcccggggaactggtggggcagctggcggtgctcactggcgaacctctcatcttcacactgcgagcccaacgcgactgcaccttcctgcggatctccaagtccgacttctatgagatcatgcgcgcacagcccagtgtggtgctgagtgcggcgcacacggtggcagccaggatgtcgcccttcgtgcgccagatggacttcgccatcgactggactgcagtggaggcgggacgcgcgctgtacaggcagggcgaccgctccgactgcacttacatcgtgctcaatgggcggctgcgtagcgtgatccagcgaggcagtggcaagaaggagctggtgggcgagtacggccgcggcgacctcatcggcgtggtggaggcactgacccggcagccgcgagccacgacggtgcacgcggtgcgcgacacggagctggccaagcttcccgagggcaccttgggtcacatcaaacgccggtacccgcaggtcgtgacccgccttatccacctactgagccagaaaattctagggaatttgcagcagctgcaaggacccttcccagcaggctctgggttgggtgtgcccccacactcggaactcaccaacccagccagcaacctggcaactgtggcaatcctgcctgtgtgtgctgaggtccccatggtggccttcacgctggagctgcagcacgccctgcaggccatcggtccgacgctactccttaacagtgacatcatccgggcacgcctgggggcctccgcactggatagcatccaagagttccggctgtcagggtggctggcccagcaggaggatgcacaccgtatcgtactctaccagacggacgcctcgctgacgccctggaccgtgcgctgcctgcgacaggccgactgcatcctcattgtgggcctgggggaccaggagcctaccctcggccagctggagcagatgctggagaacacggctgtgcgcgcccttaagcagctagtcctgctccaccgagaggagggcgcgggccccacgcgcaccgtggagtggctaaatatgcgcagctggtgctcggggcacctgcacctgcgctgtccgcgccgcctcttttcgcgccgcagccctgccaagctgcatgagctctacgagaaggttttctccaggcgcgcggaccggcacagcgacttctcccgcttggcgagggtgctcacggggaacaccattgcccttgtgctaggcgggggcggggccaggggctgctcgcacatcggagtactaaaggcattagaggaggcgggggtccccgtggacctggtgggcggcacgtccattggctctttcatcggagcgttgtacgcggaggagcgcagcgccagccgcacgaagcagcgggcccgggagtgggccaagagcatgacttcggtgctggaacctgtgttggacctcacgtacccagtcacctccatgttcactgggtctgcctttaaccgcagcatccatcgggtcttccaggataagcagattgaggacctgtggctgccttacttcaacgtgaccacagatatcaccgcctcagccatgcgagtccacaaagatggctccctgtggcggtacgtgcgcgccagcatgacgctgtcgggctacctgcccccgctgtgcgaccccaaggacgggcacctactcatggatggcggctacatcaacaatctgccagcggacatcgcccgcagcatgggtgccaaaacggtcatcgccattgacgtggggagccaggatgagacggacctcagcacctacggggacagcctgtccggctggtggctgctgtggaagcggctgaatccctgggctgacaaggtaaaggttccagacatggctgaaatccagtcccgcctggcctacgtgtcctgtgtgcggcagctagaggttgtcaagtccagctcctactgcgagtacctgcgcccgcccatcgactgcttcaagaccatggactttgggaagttcgaccagatctatgatgtgggctaccagtacgggaaggcggtgtttggaggctggagccgtggcaacgtcattgagaaaatgctcacagaccggcggtctacagaccttaatgagagccgccgtgcagacgtgcttgccttcccaagctctggcttcactgacttggcagagattgtgtcccggattgagccccccacgagctatgtctctgatggctgtgctgacggagaggagtcagattgtctgacagagtatgaggaggacgccggacccgactgctcgagggatgaaggggggtcccccgagggcgcaagccccagcactgcctccgagatggaggaggagaagtcgattctccggcaacgacgctgtctgccccaggagccgcccggctcagccacagatgcctgaggacctcgacaggggtcaccccctccctcccacccctggactgggctgggggtggccccgtgggggtagctcactccccctcctgctgctatgcctgtgacccccgcggcccacacactggactgacctgccctgagcggggatgcagtgttgcactgatgacttgaccagcccctcccccaataaactcgcctcttggaaa

SEQ ID NO: 317883 - DNA, 4431 bp, Homo sapiens
agggaagagtcgcgcccccggggagggagcagcactggcccattctgcagatggggacatcgagtcacgggctggctacgaactcctcgggggcgaaggtggcggagagggatgggttccaggacgtcctggcgcccggggaaggctcggcgggacggatttgcggtgcgcagccagtgccgttcgtccctcaggtgcttggcgtgatgatcggggccggagtggcggtggtggtcacggccgtgctcatcctcctggtggtgcggaggctgcgagtgccaaaaaccccagccccggatggcccccggtatcggttccggaagagggacaaagtgctcttctatggccggaagattatgcggaaggtgtcacaatccacctcctccctcgtggatacctctgtctccgccacctcccggccacgcatgaggaagaaactgaagatgctcaacattgccaagaagatcctgcgcatccagaaagagacgcccacgctgcagcggaaggagcccccgcccgcagtgctagaagctgacctgaccgagggcgacctggctaactcccatctgccctctgaagtgctttatatgctcaagaacgtccgggtgctgggccacttcgagaagccactcttcctggagctctgccgccacatggtcttccagcggctgggccagggtgactacgtcttccggccgggccagccagatgccagcatctacgtggtgcaggacgggctgctggagctctgtctgccagggcctgacgggaaggagtgtgtggtgaaggaagtggttcctggggacagcgtcaacagccttctcagcatcctggatgtcatcaccggtcaccagcatccccagcggaccgtgtctgcccgggcggcccgggactccacggtgctgcgcctgccggtggaagcattctccgcggtcttcaccaagtacccggagagcttggtgcgggtcgtgcagatcatcatggtgcggctgcagcgagtcaccttcctggcactgcacaactacctgggtctgaccaatgagctcttcagccacgagatccagcccctgcgtctgttccccagccccggcctcccaactcgcaccagccctgtgcggggctccaagagaatggtcagcacctcagctacagacgagcccagggagaccccagggcggccacccgatcccaccggggccccgctgcctggacctacaggggaccctgtgaagcccacatccctggaaaccccctcggcccctctgctgagccgctgcgtctccatgccaggggacatctcaggcttgcagggtggcccccgctccgacttcgacatggcctatgagcgtggccggatctccgtgtccctgcaggaagaggcctccggggggtccctggcagcccccgctcggacccccactcaggagcctcgtgagcagccggcaggcgcctgtgaatacagctactgtgaggatgagtcggccactggtggctgccctttcgggccctaccagggccgccagaccagcagcatcttcgaggcagcaaagcaggagctggccaagctgatgcggattgaggtgggcagccgaggggagctgggcacagggcgcaagggaggcctggctgcgcccatctcaacccccctacctccccaggacccctccctcctgaacagcagagtcttgctgcaccacgccaaagctggcaccatcattgcccgccagggagaccaggacgtgagcctgcacttcgtgctctggggctgcctgcacgtgtaccagcgcatgatcgacaaggcggaggacgtgtgcctgttcgtagcgcagcccggggaactggtggggcagctggcggtgctcactggcgaacctctcatcttcacactgcgagcccaacgcgactgcaccttcctgcggatctccaagtccgacttctatgagatcatgcgcgcacagcccagtgtggtgctgagtgcggcgcacacggtggcagccaggatgtcgcccttcgtgcgccagatggacttcgccatcgactggactgcagtggaggcgggacgcgcgctgtacaggcagggcgaccgctccgactgcacttacatcgtgctcaatgggcggctgcgtagcgtgatccagcgaggcagtggcaagaaggagctggtgggcgagtacggccgcggcgacctcatcggcgtggtggaggcactgacccggcagccgcgagccacgacggtgcacgcggtgcgcgacacggagctggccaagcttcccgagggcaccttgggtcacatcaaacgccggtacccgcaggtcgtgacccgccttatccacctactgagccagaaaattctagggaatttgcagcagctgcaaggacccttcccagcaggctctgggttgggtgtgcccccacactcggaactcaccaacccagccagcaacctggcaactgtggcaatcctgcctgtgtgtgctgaggtccccatggtggccttcacgctggagctgcagcacgccctgcaggccatcggtccgacgctactccttaacagtgacatcatccgggcacgcctgggggcctccgcactggatagcatccaagagttccggctgtcagggtggctggcccagcaggaggatgcacaccgtatcgtactctaccagacggacgcctcgctgacgccctggaccgtgcgctgcctgcgacaggccgactgcatcctcattgtgggcctgggggaccaggagcctaccctcggccagctggagcagatgctggagaacacggctgtgcgcgcccttaagcagctagtcctgctccaccgagaggagggcgcgggccccacgcgcaccgtggagtggctaaatatgcgcagctggtgctcggggcacctgcacctgcgctgtccgcgccgcctcttttcgcgccgcagccctgccaagctgcatgagctctacgagaaggttttctccaggcgcgcggaccggcacagcgacttctcccgcttggcgagggtgctcacggggaacaccattgcccttgtgctaggcgggggcggggccaggggctgctcgcacatcggagtactaaaggcattagaggaggcgggggtccccgtggacctggtgggcggcacgtccattggctctttcatcggagcgttgtacgcggaggagcgcagcgccagccgcacgaagcagcgggcccgggagtgggccaagagcatgacttcggtgctggaacctgtgttggacctcacgtacccagtcacctccatgttcactgggtctgcctttaaccgcagcatccatcgggtcttccaggataagcagattgaggacctgtggctgccttacttcaacgtgaccacagatatcaccgcctcagccatgcgagtccacaaagatggctccctgtggcggtacgtgcgcgccagcatgacgctgtcgggctacctgcccccgctgtgcgaccccaaggacgggcacctactcatggatggcggctacatcaacaatctgccagcggacatcgcccgcagcatgggtgccaaaacggtcatcgccattgacgtggggagccaggatgagacggacctcagcacctacggggacagcctgtccggctggtggctgctgtggaagcggctgaatccctgggctgacaaggtaaaggttccagacatggctgaaatccagtcccgcctggcctacgtgtcctgtgtgcggcagctagaggttgtcaagtccagctcctactgcgagtacctgcgcccgcccatcgactgcttcaagaccatggactttgggaagttcgaccagatctatgatgtgggctaccagtacgggaaggcggtgtttggaggctggagccgtggcaacgtcattgagaaaatgctcacagaccggcggtctacagaccttaatgagagccgccgtgcagacgtgcttgccttcccaagctctggcttcactgacttggcagagattgtgtcccggattgagccccccacgagctatgtctctgatggctgtgctgacggagaggagtcagattgtctgacagagtatgaggaggacgccggacccgactgctcgagggatgaaggggggtcccccgagggcgcaagccccagcactgcctccgagatggaggaggagaagtcgattctccggcaacgacgctgtctgccccaggagccgcccggctcagccacagatgcctgaggacctcgacaggggtcaccccctccctcccacccctggactgggctgggggtggccccgtgggggtagctcactccccctcctgctgctatgcctgtgacccccgcggcccacacactggactgacctgccctgagcggggatgcagtgttgcactgatgacttgaccagcccctcccccaataaactcgcctcttggaaa

SEQ ID NO: 317884 - DNA, 4242 bp, Homo sapiens
agggaagagtcgcgcccccggggagggagcagcactggcccattctgcagatggggacatcgagtcacgggctggctacgaactcctcgggggcgaaggtggcggagagggatgggttccaggacgtcctggcgcccggggaaggctcggcgggacggatttgcggtgcgcagccagtgccgttcgtccctcaggtgcttggcgtgatgatcggggccggagtggcggtggtggtcacggccgtgctcatcctcctggtggtgcggaggctgcgagtgccaaaaaccccagccccggatggcccccggtatcggttccggaagagggacaaagtgctcttctatggccggaagattatgcggaaggtgtcacaatccacctcctccctcgtggatacctctgtctccgccacctcccggccacgcatgaggaagaaactgaagatgctcaacattgccaagaagatcctgcgcatccagaaagagacgcccacgctgcagcggaaggagcccccgcccgcagtgctagaagctgacctgaccgagggcgacctggctaactcccatctgccctctgaagtgctttatatgctcaagaacgtccgggtgctgggccacttcgagaagccactcttcctggagctctgccgccacatggtcttccagcggctgggccagggtgactacgtcttccggccgggccagccagatgccagcatctacgtggtgcaggacgggctgctggagctctgtctgccagggcctgacgggaaggagtgtgtggtgaaggaagtggttcctggggacagcgtcaacagccttctcagcatcctggatgtcatcaccggtcaccagcatccccagcggaccgtgtctgcccgggcggcccgggactccacggtgctgcgcctgccggtggaagcattctccgcggtcttcaccaagtacccggagagcttggtgcgggtcgtgcagatcatcatggtgcggctgcagcgagtcaccttcctggcactgcacaactacctgggtctgaccaatgagctcttcagccacgagatccagcccctgcgtctgttccccagccccggcctcccaactcgcaccagccctgtgcggggctccaagagaatggtcagcacctcagctacagacgagcccagggagaccccagggcggccacccgatcccaccggggccccgctgcctggacctacaggggaccctgtgaagcccacatccctggaaaccccctcggcccctctgctgagccgctgcgtctccatgccaggggacatctcaggcttgcagggtggcccccgctccgacttcgacatggcctatgagcgtggccggatctccgtgtccctgcaggaagaggcctccggggggtccctggcagcccccgctcggacccccactcaggagcctcgtgagcagccggcaggcgcctgtgaatacagctactgtgaggatgagtcggccactggtggctgccctttcgggccctaccagggccgccagaccagcagcatcttcgaggcagcaaagcaggagctggccaagctgatgcggattgaggacccctccctcctgaacagcagagtcttgctgcaccacgccaaagctggcaccatcattgcccgccagggagaccaggacgtgagcctgcacttcgtgctctggggctgcctgcacgtgtaccagcgcatgatcgacaaggcggaggacgtgtgcctgttcgtagcgcagcccggggaactggtggggcagctggcggtgctcactggcgaacctctcatcttcacactgcgagcccaacgcgactgcaccttcctgcggatctccaagtccgacttctatgagatcatgcgcgcacagcccagtgtggtgctgagtgcggcgcacacggtggcagccaggatgtcgcccttcgtgcgccagatggacttcgccatcgactggactgcagtggaggcgggacgcgcgctgtacaggcagggcgaccgctccgactgcacttacatcgtgctcaatgggcggctgcgtagcgtgatccagcgaggcagtggcaagaaggagctggtgggcgagtacggccgcggcgacctcatcggcgtggtggaggcactgacccggcagccgcgagccacgacggtgcacgcggtgcgcgacacggagctggccaagcttcccgagggcaccttgggtcacatcaaacgccggtacccgcaggtcgtgacccgccttatccacctactgagccagaaaattctagggaatttgcagcagctgcaaggacccttcccagcaggctctgggttgggtgtgcccccacactcggaactcaccaacccagccagcaacctggcaactgtggcaatcctgcctgtgtgtgctgaggtccccatggtggccttcacgctggagctgcagcacgccctgcaggccatcggtccgacgctactccttaacagtgacatcatccgggcacgcctgggggcctccgcactggatagcatccaagagttccggctgtcagggtggctggcccagcaggaggatgcacaccgtatcgtactctaccagacggacgcctcgctgacgccctggaccgtgcgctgcctgcgacaggccgactgcatcctcattgtgggcctgggggaccaggagcctaccctcggccagagctggtgctcggggcacctgcacctgcgctgtccgcgccgcctcttttcgcgccgcagccctgccaagctgcatgagctctacgagaaggttttctccaggcgcgcggaccggcacagcgacttctcccgcttggcgagggtgctcacggggaacaccattgcccttgtgctaggcgggggcggggccaggggctgctcgcacatcggagtactaaaggcattagaggaggcgggggtccccgtggacctggtgggcggcacgtccattggctctttcatcggagcgttgtacgcggaggagcgcagcgccagccgcacgaagcagcgggcccgggagtgggccaagagcatgacttcggtgctggaacctgtgttggacctcacgtacccagtcacctccatgttcactgggtctgcctttaaccgcagcatccatcgggtcttccaggataagcagattgaggacctgtggctgccttacttcaacgtgaccacagatatcaccgcctcagccatgcgagtccacaaagatggctccctgtggcggtacgtgcgcgccagcatgacgctgtcgggctacctgcccccgctgtgcgaccccaaggacgggcacctactcatggatggcggctacatcaacaatctgccagcggacatcgcccgcagcatgggtgccaaaacggtcatcgccattgacgtggggagccaggatgagacggacctcagcacctacggggacagcctgtccggctggtggctgctgtggaagcggctgaatccctgggctgacaaggtaaaggttccagacatggctgaaatccagtcccgcctggcctacgtgtcctgtgtgcggcagctagaggttgtcaagtccagctcctactgcgagtacctgcgcccgcccatcgactgcttcaagaccatggactttgggaagttcgaccagatctatgatgtgggctaccagtacgggaaggcggtgtttggaggctggagccgtggcaacgtcattgagaaaatgctcacagaccggcggtctacagaccttaatgagagccgccgtgcagacgtgcttgccttcccaagctctggcttcactgacttggcagagattgtgtcccggattgagccccccacgagctatgtctctgatggctgtgctgacggagaggagtcagattgtctgacagagtatgaggaggacgccggacccgactgctcgagggatgaaggggggtcccccgagggcgcaagccccagcactgcctccgagatggaggaggagaagtcgattctccggcaacgacgctgtctgccccaggagccgcccggctcagccacagatgcctgaggacctcgacaggggtcaccccctccctcccacccctggactgggctgggggtggccccgtgggggtagctcactccccctcctgctgctatgcctgtgacccccgcggcccacacactggactgacctgccctgagcggggatgcagtgttgcactgatgacttgaccagcccctcccccaataaactcgcctcttggaaa

SEQ ID NO: 317885 - DNA, 1126 bp, Homo sapiens
cagaaaataaaacaaaacctcccaacacctgacccccctcctcaacttcagttgcatcatttgcacgcctgtgcatgacagcatggtgtttgcatgtgtgggtattctctctctcttttttttttgcgtgatcatttgcatgatggcatctgtgggactgggttgaacatctctgccccgggcccccgaaggggagcagcccgctgacccccctggccccacacggacatcgcccgcagcatgggtgccaaaacggtcatcgccattgacgtggggagccaggatgagacggacctcagcacctacggggacagcctgtccggctggtggctgctgtggaagcggctgaatccctgggctgacaaggtaaaggttccagacatggctgaaatccagtcccgcctggcctacgtgtcctgtgtgcggcagctagaggttgtcaagtccagctcctactgcgagtacctgcgcccgcccatcgactgcttcaagaccatggactttgggaagttcgaccagatctatgatgtgggctaccagtacgggaaggcggtgtttggaggctggagccgtggcaacgtcattgagaaaatgctcacagaccggcggtctacagaccttaatgagagccgccgtgcagacgtgcttgccttcccaagctctggcttcactgacttggcagagattgtgtcccggattgagccccccacgagctatgtctctgatggctgtgctgacggagaggagtcagattgtctgacagagtatgaggaggacgccggacccgactgctcgagggatgaaggggggtcccccgagggcgcaagccccagcactgcctccgagatggaggaggagaagtcgattctccggcaacgacgctgtctgccccaggagccgcccggctcagccacagatgcctgaggacctcgacaggggtcaccccctccctcccacccctggactgggctgggggtggccccgtgggggtagctcactccccctcctgctgctatgcctgtgacccccgcggcccacacactggactgacctgccctgagcggggatgcagtgttgcactgatgacttgaccagcccctcccccaataaactcgcctcttggaaa

SEQ ID NO: 317886 - DNA, 1052 bp, Homo sapiens
ggtcaggaaagctcaggcaagcccaccctcaggcattacagctagactccgagcttactgggcagtcatctgattcgaccaacatcagttcgcagggcttaagcccagtcccttacggcggctggggagggaccaggcccaagtatataaagctccctgagggtccgcgttggctttgcgcctgtgagtgtgattcaagaacgtcccagtgcccttggctcctttcggagtgtgaccccgtgcttgcacgggacacgttacccagctcgggtgagaagggtatcttccgggaacctcgcctttaatagcacaacgagcgcagagtccactggatctgcgagaagaaaccgcgctaactagtttgtccctacggccgcctcgtagtcactgccgcggcgccttgagtctccgggccgccttgccatggctgcccgtggtgtcatcgctccagttggcgagagtttgcgctacgctgagtacttgcagccctcggccaaacggccagacgccgacgtcgaccagcagagactggtaagaagtttgatagctgtaggactgggtgttgcagctcttgcatttgcaggtcgctacgcatttcggatctggaaacctctagaacaagttatcacagaaactgcaaagaagatttcaactcctagcttttcatcctactataaaggaggatttgaacagaaaatgagtaggcgagaagctggtcttattttaggtgtaagcccatctgctggcaaggctaagattagaacagctcataggagagtcatgattttgaatcacccagataaaggtggatctccttacgtagcagccaaaataaatgaagcaaaagacttgctagaaacaaccaccaaacattgatgcttaaggaccacactgaaggaaaaaaaaagaggggacttcgaaaaaaaaaaaagccctgcaaaatattctaaaacatggtcttcttaattttctatatggattgaccacagtcttatcttccaccattaagctgtataacaataaaatgttaatagtcttgctttttattatct

SEQ ID NO: 317887 - DNA, 593 bp, Homo sapiens
cccacgcgtcgcccacgcgtccggacccacgcgtccgaacggccagacgccgacgtcgaccagcagagactggtaagaagtttgatagctgtaggactgggtgttgcagctcttgcatttgcaggtcgctacgcatttcggatctggaaacctctagaacaagttatcacagaaactgcaaagaagatttcaactcctagcttttcatcctactataaaggaggatttgaacagaaaatgagtaggcgagaagctggtcttattttaggtgtaagcccatctgctggcaaggctaagattagaacagctcataggagagtcatgattttgaatcacccagataaaggtggatctccttacgtagcagccaaaataaatgaagcaaaagacttgctagaaacaaccaccaaacattgatgcttaaggaccacactgaaggaaaaaaaaagaggggacttcgaaaaaaaaaaaagccctgcaaaatattctaaaacatggtcttcttaattttctatatggattgaccacagtcttatcttccaccattaagctgtataacaataaaatgttaatagtcttgctttttattatct

SEQ ID NO: 317888 - DNA, 1038 bp, Homo sapiens
ggtcaggaaagctcaggcaagcccaccctcaggcattacagctagactccgagcttactgggcagtcatctgattcgaccaacatcagttcgcagggcttaagcccagtcccttacggcggctggggagggaccaggcccaagtatataaagctccctgagggtccgcgttggctttgcgcctgtgagtgtgattcaagaacgtcccagtgcccttggctcctttcggagtgtgaccccgtgcttgcacgggacacgttacccagctcgggtgagaagggtatcttccgggaacctcgcctttaatagcacaacgagcgcagagtccactggatctgcgagaagaaaccgcgctaactagtttgtccctacggccgcctcgtagtcactgccgcggcgccttgagtctccgggccgccttgccatggctgcccgtggtgtcatcgctccagttggcgagagtttgcgctacgctgagtacttgcagccctcggccaaacggccagacgccgacgtcgaccagcagagactggtaagaagtttgatagctgtaggactgggtgttgcagctcttgcatttgcaggtcgctacgcatttcggatctggaaacctctagaacaagttatcacagaaactgcaaagaagatttcaactcctagcttttcatcctactataaaggaggatttgaacagaaaatgagtaggcgagaagctggtcttattttaggtgtaagcccatctgctggcaaggctaagattagaacagctcataggagagtcatgattttgaatcacccagataaaggtggatctccttacgtagcagccaaaataaatgaagcaaaagacttgctagaaacaaccaccaaacattgatgcttaaggaccacactgaaggaaaaaaaaagaggggacttcgaaaaaaaaaaatccactggccgtcgcttaccaccgtcgtgactgggcctggcgtaaccaagtaatcgcctggagtaattcccctttcgcagttgggtaataggggccgcgatgccttac

SEQ ID NO: 317889 - DNA, 2806 bp, Homo sapiens
ggtcaggaaagctcaggcaagcccaccctcaggcattacagctagactccgagcttactgggcagtcatctgattcgaccaacatcagttcgcagggcttaagcccagtcccttacggcggctggggagggaccaggcccaagtatataaagctccctgagggtccgcgttggctttgcgcctgtgagtgtgattcaagaacgtcccagtgcccttggctcctttcggagtgtgaccccgtgcttgcacgggacacgttacccagctcgggtgagaagggtatcttccgggaacctcgcctttaatagcacaacgagcgcagagtccactggatctgcgagaagaaaccgcgctaactagtttgtccctacggccgcctcgtagtcactgccgcggcgccttgagtctccgggccgccttgccatggctgcccgtggtgtcatcgctccagttggcgagagtttgcgctacgctgagtacttgcagccctcggccaaacggccagacgccgacgtcgaccagcagagactggtaagaagtttgatagctgtaggactgggtgttgcagctcttgcatttgcaggtcgctacgcatttcggatctggaaacctctagaacaagttatcacagaaactgcaaagaagatttcaactcctagcttttcatcctactataaaggaggatttgaacagaaaatgagtaggcgagaagctggtcttattttaggtgtaagcccatctgctggcaaggctaagattagaacagctcataggagagtcatgattttgaatcacccagataaaggtggatctccttacgtagcagccaaaataaatgaagcaaaagacttgctagaaacaaccaccaaacattgatgcttaaggaccacactgaaggaaaaaaaaagaggggacttcgaaaaaaaaaaaagccctgcaaaatattctaaaacatggtcttcttaattttctatatggattgaccacagtcttatcttccaccattaagctgtataacaataaaatgttaatagtcttgctttttattatcttttaaagatctccttaaattctataactgatcttttttcttattttgtttgtgacattcatacatttttaagatttttgttatgttctgaattcccccctacacacacacacacacacacacacacacacacacacacacacacgtgcaaaaaatatgatcaagaatgcaattgggatttgtgagccatgagtagacctcttattgtttatatttgtaccctcattgtcaatttttttttagggaatttgggactctgcctatataaggtgttttaaatgtcttgagaacaagcactggctgatacctcttggagatatgatctgaaatgtaatggaatttattaaatggtgtttagtaaagtaggggttaaggacttgttaaagaaccccactatctctgagaccctatagccaaagcatgaggacttggagagctactaaaatgattcaggtttacaaaatgagccctgtgaggaaaggttgagagaagtctgaggagtttgtatttaattatagtcttccagtactgtatattcattcattactcattctacaaatatttattgaccccttttgatgtgcaaggcactatcgtgcgtcccctgagagttgcaagtatgaagcagtcatggatcatgaaccaaaggaacttatatgtagaggaaggataaatcacaaatagtgaatactgttagatacagatgatatattttaaaagttcaaaggaagaaaagaatgtgttaaacactgcatgagaggaggaataagtggcatagagctaggctttagaaaagaaaaatattccgataccatatgattggtgaggtaagtgttattctgagatgagaattagcagaaatagatatatcaatcggagtgattagagtgcagggtttctggaaagcaaggtttggacagagtggtcatcaaaggccagccctgtgacttacactgcattaaattaatttcttagaacatagtccctgatcattatcactttactattccaaaggtgagagaacagattcagatagagtgccagcattgtttcccagtattcctttacaaatcttgggttcattccaggtaaactgaactactgcattgtttctatcttaaaatactttttagatatcctagatgcatctttcaacttctaacattctgtagtttaggagttctcaaccttggcattattgacatgttaggccaaataattttttttgtgggaggtctcttgtgcgttttagatgattagcaataatccctgacctgttatctactaaagactagtcgtttctcatcagttgtgacaacaaaaatggttccagatattgccaaatgccctttagaggacagtaatcgcccccagttgagaaccatttcagtaaaactttaattactattttttcttttggtttataaaataatgatcctgaattaaattgatggaaccttgaagtcgataaaatatatttcttgctttaaagtccccatacgtgtcctactaattttctcatgctttagtgttttcacttttctcctgttatccttgtacctaagaatgccatcccaatccccagatgtccacctgcccaaagtctaggcatagctgaaggccaagctaaaatgtatccctctttttctggtacatgcagcaaaagtaatatgaattatcagctttctgagagcaggcattgtatctgtcttgtttggtgttacattggcacccaataaatatttgttgagtgaa

SEQ ID NO: 317890 - DNA, 3516 bp, Homo sapiens
ggtcaggaaagctcaggcaagcccaccctcaggcattacagctagactccgagcttactgggcagtcatctgattcgaccaacatcagttcgcagggcttaagcccagtcccttacggcggctggggagggaccaggcccaagtatataaagctccctgagggtccgcgttggctttgcgcctgtgagtgtgattcaagaacgtcccagtgcccttggctcctttcggagtgtgaccccgtgcttgcacgggacacgttacccagctcgggtgagaagggtatcttccgggaacctcgcctttaatagcacaacgagcgcagagtccactggatctgcgagaagaaaccgcgctaactagtttgtccctacggccgcctcgtagtcactgccgcggcgccttgagtctccgggccgccttgccatggctgcccgtggtgtcatcgctccagttggcgagagtttgcgctacgctgagtacttgcagccctcggccaaacggccagacgccgacgtcgaccagcagagactggtaagaagtttgatagctgtaggactgggtgttgcagctcttgcatttgcaggtcgctacgcatttcggatctggaaacctctagaacaagttatcacagaaactgcaaagaagatttcaactcctagcttttcatcctactataaaggaggatttgaacagaaaatgagtaggcgagaagctggtcttattttaggtgtaagcccatctgctggcaaggctaagattagaacagctcataggagagtcatgattttgaatcacccagataaaggtggatctccttacgtagcagccaaaataaatgaagcaaaagacttgctagaaacaaccaccaaacattgatgcttaaggaccacactgaaggaaaaaaaaagaggggacttcgaaaaaaaaaaaagccctgcaaaatattctaaaacatggtcttcttaattttctatatggattgaccacagtcttatcttccaccattaagctgtataacaataaaatgttaatagtcttgctttttattatcttttaaagatctccttaaattctataactgatcttttttcttattttgtttgtgacattcatacatttttaagatttttgttatgttctgaattcccccctacacacacacacacacacacacacacacacacacacacacacacgtgcaaaaaatatgatcaagaatgcaattgggatttgtgagccatgagtagacctcttattgtttatatttgtaccctcattgtcaatttttttttagggaatttgggactctgcctatataaggtgttttaaatgtcttgagaacaagcactggctgatacctcttggagatatgatctgaaatgtaatggaatttattaaatggtgtttagtaaagtaggggttaaggacttgttaaagaaccccactatctctgagaccctatagccaaagcatgaggacttggagagctactaaaatgattcaggtttacaaaatgagccctgtgaggaaaggttgagagaagtctgaggagtttgtatttaattatagtcttccagtactgtatattcattcattactcattctacaaatatttattgaccccttttgatgtgcaaggcactatcgtgcgtcccctgagagttgcaagtatgaagcagtcatggatcatgaaccaaaggaacttatatgtagaggaaggataaatcacaaatagtgaatactgttagatacagatgatatattttaaaagttcaaaggaagaaaagaatgtgttaaacactgcatgagaggaggaataagtggcatagagctaggctttagaaaagaaaaatattccgataccatatgattggtgaggtaagtgttattctgagatgagaattagcagaaatagatatatcaatcggagtgattagagtgcagggtttctggaaagcaaggtttggacagagtggtcatcaaaggccagccctgtgacttacactgcattaaattaatttcttagaacatagtccctgatcattatcactttactattccaaaggtgagagaacagattcagatagagtgccagcattgtttcccagtattcctttacaaatcttgggttcattccaggtaaactgaactactgcattgtttctatcttaaaatactttttagatatcctagatgcatctttcaacttctaacattctgtagtttaggagttctcaaccttggcattattgacatgttaggccaaataattttttttgtgggaggtctcttgtgcgttttagatgattagcaataatccctgacctgttatctactaaagactagtcgtttctcatcagttgtgacaacaaaaatggttccagatattgccaaatgccctttagaggacagtaatcgcccccagttgagaaccatttcagtaaaactttaattactattttttcttttggtttataaaataatgatcctgaattaaattgatggaaccttgaagtcgataaaatatatttcttgctttaaagtccccatacgtgtcctactaattttctcatgctttagtgttttcacttttctcctgttatccttgtacctaagaatgccatcccaatccccagatgtccacctgcccaaagtctaggcatagctgaaggccaagctaaaatgtatccctctttttctggtacatgcagcaaaagtaatatgaattatcagctttctgagagcaggcattgtatctgtcttgtttggtgttacattggcacccaataaatatttgttgagtgaatgaataaattcccatagcactttattcttcacatggtacataactataggggctatagcttggtaccttgtgaagcaactcttggtgtaacataccttatttctcatactaaaatgcaagaacctttagagcaaggatcttgccattcatctttgtaacctctttactctggagcacttgcatttagcaggcatcataaagttttacgtaccaagaaaatgttgctgttttctgaatactatgcatcaaaaaatgttaccactaatttttaaagctctgctaaggaatattggggcaccctcagatgcaccttttaattgatgtcatattttcctaatccatactttattcatgagaatttgagtcaccccagcattagcttggaatttccttatttcccatttgctttgcaggtgccttggagtcagatctggttttgaatactatcttcctgttatgtgatcttgggcagttacttaattttctagtcaataacccgtatctataaaatagagaaaataattctacacaccggggcctgttgtggggcggggagaggggggagggatcgcatttggagatatactaatgtaaatgacaagttaattggtgcagcacaccaacatggctcatgtctacatatgtaacaaacctgcacgttgtgcacatgtgccctagaacttaaagtataataaaaagaaattttaaaa

SEQ ID NO: 317891 - DNA, 2545 bp, Homo sapiens
ggtcaggaaagctcaggcaagcccaccctcaggcattacagctagactccgagcttactgggcagtcatctgattcgaccaacatcagttcgcagggcttaagcccagtcccttacggcggctggggagggaccaggcccaagtatataaagctccctgagggtccgcgttggctttgcgcctgtgagtgtgattcaagaacgtcccagtgcccttggctcctttcggagtgtgaccccgtgcttgcacgggacacgttacccagctcgggtgagaagggtatcttccgggaacctcgcctttaatagcacaacgagcgcagagtccactggatctgcgagaagaaaccgcgctaactagtttgtccctacggccgcctcgtagtcactgccgcggcgccttgagtctccgggccgccttgccatggctgcccgtggtgtcatcgctccagttggcgagagtttgcgctacgctgagtacttgcagccctcggccaaacggccagacgccgacgtcgaccagcagagactggtaagaagtttgatagctgtaggactgggtgttgcagctcttgcatttgcaggtcgctacgcatttcggatctggaaacctctagaacaagttatcacagaaactgcaaagaagatttcaactcctagcttttcatcctactataaaggaggatttgaacagaaaatgagtaggcgagaagctggtcttattttaggtgtaagcccatctgctggcaaggctaagattagaacagctcataggagagtcatgattttgaatcacccagataaaggtggatctccttacgtagcagccaaaataaatgaagcaaaagacttgctagaaacaaccaccaaacattgatgcttaaggaccacactgaaggaaaaaaaaagaggggacttcgaaaaaaaaaaaagccctgcaaaatattctaaaacatggtcttcttaattttctatatggattgaccacagtcttatcttccaccattaagctgtataacaataaaatgttaatagtcttgctttttattatcttttaaagatctccttaaattctataactgatcttttttcttattttgtttgtgacattcatacatttttaagatttttgttatgttctgaattcccccctacacacacacacacacacacacacacacacacacacacacacacgtgcaaaaaatatgatcaagaatgcaattgggatttgtgagccatgagtagacctcttattgtttatatttgtaccctcattgtcaatttttttttagggaatttgggactctgcctatataaggtgttttaaatgtcttgagaacaagcactggctgatacctcttggagatatgatctgaaatgtaatggaatttattaaatggtgtttagtaaagtaggggttaaggacttgttaaagaaccccactatctctgagaccctatagccaaagcatgaggacttggagagctactaaaatgattcaggtttacaaaatgagccctgtgaggaaaggttgagagaagtctgaggagtttgtatttaattatagtcttccagtactgtatattcattcattactcattctacaaatatttattgaccccttttgatgtgcaaggcactatcgtgcgtcccctgagagttgcaagtatgaagcagtcatggatcatgaaccaaaggaacttatatgtagaggaaggataaatcacaaatagtgaatactgttagatacagatgatatattttaaaagttcaaaggaagaaaagaatgtgttaaacactgcatgagaggaggaataagtggcatagagctaggctttagaaaagaaaaatattccgataccatatgattggtgaggtaagtgttattctgagatgagaattagcagaaatagatatatcaatcggagtgattagagtgcagggtttctggaaagcaaggtttggacagagtggtcatcaaaggccagccctgtgacttacactgcattaaattaatttcttagaacatagtccctgatcattatcactttactattccaaaggtgagagaacagattcagatagagtgccagcattgtttcccagtattcctttacaaatcttgggttcattccaggtaaactgaactactgcattgtttctatcttaaaatactttttagatatcctagatgcatctttcaacttctaacattctgtagtttaggagttctcaaccttggcattattgacatgttaggccaaataattttttttgtgggaggtctcttgtgcgttttagatgattagcaataatccctgacctgttatctactaaagactagtcgtttctcatcagttgtgacaacaaaaatggttccagatattgccaaatgccctttagaggacagtaatcgcccccagttgagaaccatttcagtaaaactttaattactattttttcttttggtttataaaataatgatcctgaattaaattgatggaaccttgaagtcgataaaatatatttcttgctttaaagtc

SEQ ID NO: 317892 - DNA, 1407 bp, Homo sapiens
cagcataagcgttgtcctgagcgatgggatctgatgccttttgatggtctttgcagtgaatgactccagcttcctttggaagtaaagcagctttgagaagagtttttattaaagaggcattgatgatggaggacccttgcatagtgaggaaacctctttctgcccatataacatcatggtggtacaggatatgtgaagtgggagcaggcatttcaaatggcggaaagcagtacaagagagggagagtgtggtgggaggtgccacatacttttcaatgaccaaatctcatttgtattcagagcgagaactcacttatcaccaagggaatggcccaagccgttcattagggatttgcccccatgatctacgcagctcctgccaagccccacctcattacatttccacatgagatgtgagtgtggacaaatgtttaaactataaggataaaaagcaagatctttaggagataagcatagagatttaggagattagcctacctgtcatgttcaagtttctatgtaggactcatatgatatagacccttgggccaactttaccctgttgcatgccccgtctctcacatgcaatacagtgactggtatgtagtgatgattttatcagtgaggatcctggtagtaataggtggattttttttttcttttctgaagatagtttattgaagggactgttttcagaggtgtgaccatggtttaagataaccaagaaaggatgatgaatcacttagggactagcagcacttggaaactgttattcatccaggtgacagggcaagggtagaaatcatgttccagaactcagtgagagttgtaggcatgaaagaggagccttctcaacaggagctgtggccaaaaaagaaacaaggcaggtaagaagtttgatagctgtaggactgggtgttgcagctcttgcatttgcaggtcgctacgcatttcggatctggaaacctctagaacaagttatcacagaaactgcaaagaagatttcaactcctagcttttcatcctactataaaggaggatttgaacagaaaatgagtaggcgagaagctggtcttattttaggtgtaagcccatctgctggcaaggctaagattagaacagctcataggagagtcatgattttgaatcacccagataaaggtggatctccttacgtagcagccaaaataaatgaagcaaaagacttgctagaaacaaccaccaaacattgatgcttaaggaccacactgaaggaaaaaaaaagaggggacttcgaaaaaaaaaaaagccctgcaaaatattctaaaacatggtcttcttaattttctatatggattgaccacagtcttatcttccaccattaagctgtataacaataaaatgttaatagtcttgctttttattatct

SEQ ID NO: 317893 - DNA, 2480 bp, Homo sapiens
tcttggggggtggggggggaaagtccagcagtatgcctctggaatccaaatacttgtctgctacaccgtatataccgccttccccccaaataacttagaagcataagttttcaaacttacagtattgtctgcagaagctgactcccctaacctatatgttgttttgttttttaaattgattgagaataaggattggcattacaaaggactgaagaaaaacacatgtaacattgaatcaatgatttattttgatggttagtggaattaagtggaaagctgtagtttcatatttgtccacaagatggtgaaattctcattaggtataattttttgaaacccatataaacccttaatttataatctgcatttgatgctatttattataagcactgtaatttctttttacagcccatctgctggcaaggctaagattagaacagctcataggagagtcatgattttgaatcacccagataaaggtggatctccttacgtagcagccaaaataaatgaagcaaaagacttgctagaaacaaccaccaaacattgatgcttaaggaccacactgaaggaaaaaaaaagaggggacttcgaaaaaaaaaaaagccctgcaaaatattctaaaacatggtcttcttaattttctatatggattgaccacagtcttatcttccaccattaagctgtataacaataaaatgttaatagtcttgctttttattatcttttaaagatctccttaaattctataactgatcttttttcttattttgtttgtgacattcatacatttttaagatttttgttatgttctgaattcccccctacacacacacacacacacacacacacacacacacacacacacacgtgcaaaaaatatgatcaagaatgcaattgggatttgtgagccatgagtagacctcttattgtttatatttgtaccctcattgtcaatttttttttagggaatttgggactctgcctatataaggtgttttaaatgtcttgagaacaagcactggctgatacctcttggagatatgatctgaaatgtaatggaatttattaaatggtgtttagtaaagtaggggttaaggacttgttaaagaaccccactatctctgagaccctatagccaaagcatgaggacttggagagctactaaaatgattcaggtttacaaaatgagccctgtgaggaaaggttgagagaagtctgaggagtttgtatttaattatagtcttccagtactgtatattcattcattactcattctacaaatatttattgaccccttttgatgtgcaaggcactatcgtgcgtcccctgagagttgcaagtatgaagcagtcatggatcatgaaccaaaggaacttatatgtagaggaaggataaatcacaaatagtgaatactgttagatacagatgatatattttaaaagttcaaaggaagaaaagaatgtgttaaacactgcatgagaggaggaataagtggcatagagctaggctttagaaaagaaaaatattccgataccatatgattggtgaggtaagtgttattctgagatgagaattagcagaaatagatatatcaatcggagtgattagagtgcagggtttctggaaagcaaggtttggacagagtggtcatcaaaggccagccctgtgacttacactgcattaaattaatttcttagaacatagtccctgatcattatcactttactattccaaaggtgagagaacagattcagatagagtgccagcattgtttcccagtattcctttacaaatcttgggttcattccaggtaaactgaactactgcattgtttctatcttaaaatactttttagatatcctagatgcatctttcaacttctaacattctgtagtttaggagttctcaaccttggcattattgacatgttaggccaaataattttttttgtgggaggtctcttgtgcgttttagatgattagcaataatccctgacctgttatctactaaagactagtcgtttctcatcagttgtgacaacaaaaatggttccagatattgccaaatgccctttagaggacagtaatcgcccccagttgagaaccatttcagtaaaactttaattactattttttcttttggtttataaaataatgatcctgaattaaattgatggaaccttgaagtcgataaaatatatttcttgctttaaagtccccatacgtgtcctactaattttctcatgctttagtgttttcacttttctcctgttatccttgtacctaagaatgccatcccaatccccagatgtccacctgcccaaagtctaggcatagctgaaggccaagctaaaatgtatccctctttttctggtacatgcagcaaaagtaatatgaattatcagctttctgagagcaggcattgtatctgtcttgtttggtgttacattggcacccaataaatatttgttgagtgaa

SEQ ID NO: 317894 - DNA, 925 bp, Homo sapiens
ggtcaggaaagctcaggcaagcccaccctcaggcattacagctagactccgagcttactgggcagtcatctgattcgaccaacatcagttcgcagggcttaagcccagtcccttacggcggctggggagggaccaggcccaagtatataaagctccctgagggtccgcgttggctttgcgcctgtgagtgtgattcaagaacgtcccagtgcccttggctcctttcggagtgtgaccccgtgcttgcacgggacacgttacccagctcgggtgagaagggtatcttccgggaacctcgcctttaatagcacaacgagcgcagagtccactggatctgcgagaagaaaccgcgctaactagtttgtccctacggccgcctcgtagtcactgccgcggcgccttgagtctccgggccgccttgccatggctgcccgtggtgtcatcgctccagttggcgagagtttgcgctacgctgagtacttgcagccctcggccaaacggccagacgccgacgtcgaccagcagagactggtaagaagtttgatagctgtaggactgggtgttgcagctcttgcatttgcaggtcgctacgcatttcggatctggaaacctctagaacaagttatcacagaaactgcaaagaagatttcaactcctagcttttcatcctactataaaggaggatttgaacagaaaatgagtaggcgagaagctggtcttattttaggtgtaaggtaggtgtgcagcataagtattgttttgttgtgtggccaagcttgtctttaaaaaagagaaaacgttacaataaggttatacttagacttaaaattatgagtaggtggcagaggagaaaatatcaaatttttatattttaaagcctcaaatctaaaagtatcccactcccctaaaaaaacaaaacaaaaca

SEQ ID NO: 317895 - DNA, 196 bp, Homo sapiens
tgatgtgccagggggatgtgggtggggtggccagagccaagagcagagtgtgaataggagcgtggttggggccctgggcaaagtgtggggcagcacatgaaagggctgtgggtggcctacggtgggttgtgggtgaggcatgggtgaggccttgggtagagtgcggtcaggctgtggtcaggcagtggttgggcag

SEQ ID NO: 317896 - DNA, 5883 bp, Homo sapiens
gtgaggagggccggcggcggggcggacccctggcggtcctcctggctggggtccgcgcgctcgcggcagctccccgtggaggtcactgtccgtgccagtccctcccgctgtcccgccctctcccgctgccgccgccgccgccgccgcgcccgcctcagcgcccccactccgcgcttgggagcgaggagccgccagcgcccccgccccgccgccgccgcagcgccctcaggccgccattcgccaccgaaactttccagcgcccgcgctctctccgggactcggcggcggcggggcgggggcggcccgggggcggcgcgcggctgctccggggcgccgggccctcttcggccgccgcacggccgggactcggaggctgccggctggagggaggttcggagcgcggccgggcgcgcggcgccgccacaagttgcgctgctcgcgacgagatttccgtgagggtggaagaaaatcataccatatcagatgcctcgcagagcaccaggcccaccgtgaaaggctggtccctgcagacggcttcccatttttatgaccggatgctgggaagcctgctggtccacaggtccatacatgaagtcaccataaggagccctggcctccttgcagaaacatcgaggtgacatgtagcatgaccgagctcgctggcgcctcttcatcgtgctgccaccgccctgcaggaagaggggccatgcagtcagtcttgcaccactttcaacgtttgcgagggagagagggtggttcccacttcatcaacacctcatcgccgcgaggtgaggctaagatgagcataaccagtgacgaggtgaactttctggtgtatcggtatctccaggagtcaggtttttcccactcggctttcacgtttgggattgagagccacatcagccagtccaacatcaatgggacgctagtgccaccggccgccctcatctccattctccagaagggcctgcagtatgtagaggccgagatcagtatcaacgaggatggcacagtgttcgacggccgccccatagagtccctgtcactgatagacgccgtgatgcccgacgtggtgcagacgcggcagcaggcattccgagagaagctcgctcagcagcaagccagtgcggcggcggcggcggctgcggccacggcagcagcgacagcagccaccacgacctcagccggcgtttcccaccaaaatccatcgaagaacagagaggccacggtgaatggggaagagaacagagcacattcagtcaataatcacgcgaagccaatggaaatagatggagaggttgagattccatccagcaaagccacagtccttcggggccatgagtctgaggtgttcatttgtgcctggaatcctgtcagtgatttgctagcctccggatctggagactcaactgcaaggatatggaacctgaatgagaatagcaacgggggctccacccagctcgtgttgaggcactgtatacgagaggggggccatgacgtcccgagtaacaaagacgtcacctcactggactggaataccaatggaacactcttggctacgggttcatatgacggttttgcaagaatatggacggaagatggtaacctggccagcaccttaggccaacataaaggccccatctttgccttgaaatggaaccgaaaggggaattacattttgagtgctggtgtagacaaaacaacaataatttgggatgcccacacaggagaagccaaacagcagtttccttttcattcagcccctgcccttgatgtggactggcagaacaacacgacctttgcctcctgtagcacagacatgtgtatccatgtgtgcaggctcggctgtgaccgcccagtcaaaaccttccagggacacacaaacgaggtcaacgccatcaaatgggatccgtctggaatgttgctggcatcctgctcggatgacatgacattgaagatctggagcatgaaacaggaggtgtgcatccatgatcttcaggctcacaataaagagatctacaccatcaagtggagccccactgggcccgccaccagcaacccaaactccaacatcatgttggcaagtgcttcgtttgattctacggtgcgactgtgggacatagaacgaggcgtctgcacccacacgctcacgaagcatcaggagcctgtctatagcgtagctttcagccctgatgggaagtacttggccagtggatccttcgacaagtgcgtccatatctggaatactcagagtggaaatcttgtccacagctaccgaggcactggcggcatcttcgaggtgtgctggaacgcccgaggagacaaagtgggtgccagcgcgtccgacggctctgtgtgtgttttggatctgcggaagtaaccacaaaatattatcgaaaaaagaaaagaattctaatgaccagccgtgaatgtgtagggttgcagctctattctccaaaactgtaggaacttgacttgcgttagagtgtactctgaaaccaactcgtctctggccgcaggagtctatatgttttcgtaatcttcatcaagaagtttttaaaaggcaagcaaaaacagaagcaaatcatatcaaacggggatagaatggtttccactgaggacattcagcctgggaaggaggaagtcaccagctcgaggcgtgtggattggtttccacccggaacaggctctgtgatggctgaatggaaagaaacgtaaaaagctgtgccaaaaaaaaagcaaaatgctgtgataaaccaaacagggaagggggaaaaaccctcctccttgggatttttttttttttgttttccctaacaatttggacactacaattgctctcacaaaggaggttcaaagaccagtttgtaccgatgaaacgcgcaactttgtaatcccaacactttctattttctagaatcttctttgttcattgggtggtttttcagtcggctggaattctatcttctgggggccttccgtctgagatggaagctgtcttgggcttgttgtctcttccttctgttgctccctgcccctccccctgcctttccactctgtctggtgagctctgctttttcagtgcaccatcaagagatgcagccccgtggacatgaagacacaatctcccacggacagctttcccccttccgccctctcccaccctctcctccccttgcgctcgcgctcgcgctcgctttctcactggcgtgctctctttctctctctctctccctctgtacctttctcatagttgcttcagatcttaggtctcaagggcactttggcgcgtagtaagtgctttatgtaagaaggcagggcaggggggctttttacaggagaaaaaaaaatgacttataagagaaagagcctggagtatttttggaaaaaaaaataatatttttatgttaaaacaattttaaaatcttaaaatggccatcagacatagagagctttgtgtgattcatgttttaaaaagaaccgaagaagccacaggcagggcctgagggagcccctggctttcccctcagcctcaggaaaggtggtcaggaaaactctggctggacaagggtcagtcttcggggtcagcagcgagattgctctgcagccagtgagggaggtccccgccatgccggctggaagaagaacctcgcatcttttggtgtgtatgcaccttggcagccagcaggaaagcagcgaagagccgcgcgccctctggcctcaagggagcattggcagaaccataaggtactgcagaagccgtcgaaaccgactgctcggctggattaggcgtgttggctacatctttcccacaaccgtataacgaccgatggtcatttctccaagagcaggcttggcgagtccttgcagagctgacatagaggcgcccgcatgtcacttagtctaacgctgacagaaatgaatgcagaaggaagattttcagtcctgaacgtgaattatagaggtagaacgtcgctaataatttctgccatctttataatttctttgtctcacagaagactaggagaaagatcttttttaaataatctttttgctgtttttaaaaaattaaacaaggctttgtgttcctagaagagcttcatttcagtgaatctggtgacctccatctgcttgctgtcataacccgacacggacttatttttgtcattagcaagggggaaaaggccaaaggacaagggcctcttctcccattggttttcctgtgggcagaagggctgaggaagatggcccagcccgtgggggctgctgggtcaccagcagtgggtagggtgcaatctggtgtgtgttccagcagtgagacggtgttattgtgaaggtggcattcatctgcggagccaaaacccagccatcggggaagggtcagggcttctgtggaacttggaacgtgccaggaccacctgcaaaagccagggtgcgttgatcattctcagatcattgattggcctccacttgggtatgtgaattattcatgtcccagaagaccaaaaagtgctctggttctgagatgagtattttattcgtgttctgtttccgaaacacttagcaaagaaggtcacagtgatgtggagtcgccgcacccatctttgaagatagccagtgtccctggatgaggtgatgatttcccgtcccaaggactctgtgaagtttagagtacagtttgttggggtccaaaagacaccatctctaccccacccaaataaaaatgcactcatctctgtagaacatctgctgtcaaaggccagcctgtcgttagggcatggcttatgcttgacaaaccagtaacaactgtgggatggcgatggtgggatgtgtcgcaagcaattcactagacaatcttcacatgaatgtcggtagccagggtctctcccgagggatggctttagtcttgatgaatgtgaaccatgtcggaattgttaggtagaaacctgggctgggaggcctcggaccccaggctccatccctggcttccccagcctgcggccgcaagcaaaaccaagcgcgagatgcagctagcacccttcatatccatccccgttctcagcgggacaacaccatggacagccgttttcagagcctccagcatttgcacaccactactcaccctctctgctgctggcatgttggtagagtcatccctgtaatcaagaaatggcctgtggaatgttattgttcaacgttgtttacagctcttaaaacatggtgaggaatgcctaagtcttagtgaccaaacgtgaccttgaaagcagacatagcatgacagaccttcctagagtgtttggtcgggttcacagtgaccgagagtcaggtccagcacacacctgggaaagggatgctgccccaagggggaccaaaagggccggacgttacagggtgaaaccctctgacccctcgcgacaccgtaggacttgacttttgtttagtctttctaagaaatagatcatggagccaagtgaagtgcactttgtcaaatgtaagggtctgctttgttcttgttgcttttctgttttttaaccttttgttccgccatttaaaaaaagaaaaaaaaaaagcttatgtttcttgtcaaatgcagaaatgttccttccgccactcactgaagttttgcattctggcttgtgcagtttttattgtctgtgtcagacgtacagccagacatgttctctattggcatttttccgattctgttcagatgacagcgaccgccttttcattccccccgccacctgtactcaccctcacgctctttgaagaaaaaaaaaaaatcaccttgtgtgttgtagctcatttgtttcaagagagaatcaacagatcatattcagtgtcttgaataaattgctctattttgatattaaaaaaaaaaaa

SEQ ID NO: 317897 - DNA, 937 bp, Homo sapiens
aagggtctgcttgttcttgtagcttttctgttttttaacctttgttccgccatttaaaaaaacaaaaccaagcgcgagatgcagctagcacccttcatatccatccccgttctcagcgggacaacaccatggacagccgttttcagagcctccagcatttgcacaccactactcaccctctctgctgctggcatgttggtagagtcatccctgtaatcaagaaatggcctgtggaatgttattgttcaacgttgtttacagctcttaaaacatggtgaggaatgcctaagtcttagtgaccaaacgtgaccttgaaagcagacatagcatgacagaccttcctagagtgtttggtcgggttcacagtgaccgagagtcaggtccagcacacacctgggaaagggatgctgccccaagggggaccaaaagggccggacgttacagggtgaaaccctctgacccctcgcgacaccgtaggacttgacttttgtttagtctttctaagaaatagatcatggagccaagtgaagtgcactttgtcaaatgtaagggtctgctttgttcttgttgcttttctgttttttaaccttttgttccgccatttaaaaaaagaaaaaaaaaaagcttatgtttcttgtcaaatgcagaaatgttccttccgccactcactgaagttttgcattctggcttgtgcagtttttattgtctgtgtcagacgtacagccagacatgttctctattggcatttttccgattctgttcagatgacagcgaccgccttttcattccccccgccacctgtactcaccctcacgctctttgaagaaaaaaaaaaaatcaccttgtgtgttgtagctcatttgtttcaagagagaatcaacagatcatattcagtgtcttgaataaattgctctattttgatattaaaaaaaaaaaa

SEQ ID NO: 317898 - DNA, 960 bp, Homo sapiens
gggatggagcctggggtccgaggcctcccagcccaggtttctacctaacaattccgacatggttcacattcatcaagactaaagccatccctcgggagagaccctggctaccgaccttcatatccatccccgttctcagcgggacaacaccatggacagccgttttcagagcctccagcatttgcacaccactactcaccctctctgctgctggcatgttggtagagtcatccctgtaatcaagaaatggcctgtggaatgttattgttcaacgttgtttacagctcttaaaacatggtgaggaatgcctaagtcttagtgaccaaacgtgaccttgaaagcagacatagcatgacagaccttcctagagtgtttggtcgggttcacagtgaccgagagtcaggtccagcacacacctgggaaagggatgctgccccaagggggaccaaaagggccggacgttacagggtgaaaccctctgacccctcgcgacaccgtaggacttgacttttgtttagtctttctaagaaatagatcatggagccaagtgaagtgcactttgtcaaatgtaagggtctgctttgttcttgttgcttttctgttttttaaccttttgttccgccatttaaaaaaagaaaaaaaaaaagcttatgtttcttgtcaaatgcagaaatgttccttccgccactcactgaagttttgcattctggcttgtgcagtttttattgtctgtgtcagacgtacagccagacatgttctctattggcatttttccgattctgttcagatgacagcgaccgccttttcattccccccgccacctgtactcaccctcacgctctttgaagaaaaaaaaaaaatcaccttgtgtgttgtagctcatttgtttcaagagagaatcaacagatcatattcagtgtcttgaataaattgctctattttgatattaaaaaaaaaaaa

SEQ ID NO: 317899 - DNA, 620 bp, Homo sapiens
tagctaaagcgtgttgtcttctcccgagggtgtgcacaggttcatgtatcagctgaataaggccctgttccaaaaactgatatttcaagggaaccttaatttatctttaaatttaatgctggtccctgcagacggcttcccatttttatgaccggatgctgggaagcctgctggtccacaggtccatacatgaagtcaccataagatggaggctcgctctgtcatcctggctgcagtgcagtggcacaatcttgggtcgctgcaacctccatttcccaggttcaagtgattctcctgcttcagcctcctgagtagctgggattacaggcgtgcgccacaacgcccagttaatttttttgtatttttagtagacatggggttttgctatgttggccagtctggtctcaaactcctggcctcaagtaatcagcccgcctcagcctcccaaagtgctgggattaacaggcgtgagccaccatgtcccgtcagggatgattttattctgtgaaaagcggcattccttttctaacacaaaacctctcctctgctctgccctcccaaccctgtagcctcatttcctatatagttgttttcatactgattatctctgaagacattgc

SEQ ID NO: 317900 - DNA, 5424 bp, Homo sapiens
ccagggagcccaggagcaacgaagggcaggctcaagggaaggccccaccatgtccttctggggggccttgaatggcaactgatacataataagacacaatctattctgctgattcacaattatggagactgtatttccgtgagggtggaagaaaatcataccatatcagatgcctcgcagagcaccaggcccaccgtgaaaggctggtccctgcagacggcttcccatttttatgaccggatgctgggaagcctgctggtccacaggtccatacatgaagtcaccataagagggtggttcccacttcatcaacacctcatcgccgcgaggtgaggctaagatgagcataaccagtgacgaggtgaactttctggtgtatcggtatctccaggagtcaggtttttcccactcggctttcacgtttgggattgagagccacatcagccagtccaacatcaatgggacgctagtgccaccggccgccctcatctccattctccagaagggcctgcagtatgtagaggccgagatcagtatcaacgaggatggcacagtgttcgacggccgccccatagagtccctgtcactgatagacgccgtgatgcccgacgtggtgcagacgcggcagcaggcattccgagagaagctcgctcagcagcaagccagtgcggcggcggcggcggctgcggccacggcagcagcgacagcagccaccacgacctcagccggcgtttcccaccaaaatccatcgaagaacagagaggccacggtgaatggggaagagaacagagcacattcagtcaataatcacgcgaagccaatggaaatagatggagaggttgagattccatccagcaaagccacagtccttcggggccatgagtctgaggtgttcatttgtgcctggaatcctgtcagtgatttgctagcctccggatctggagactcaactgcaaggatatggaacctgaatgagaatagcaacgggggctccacccagctcgtgttgaggcactgtatacgagaggggggccatgacgtcccgagtaacaaagacgtcacctcactggactggaataccaatggaacactcttggctacgggttcatatgacggttttgcaagaatatggacggaagatggtaacctggccagcaccttaggccaacataaaggccccatctttgccttgaaatggaaccgaaaggggaattacattttgagtgctggtgtagacaaaacaacaataatttgggatgcccacacaggagaagccaaacagcagtttccttttcattcagcccctgcccttgatgtggactggcagaacaacacgacctttgcctcctgtagcacagacatgtgtatccatgtgtgcaggctcggctgtgaccgcccagtcaaaaccttccagggacacacaaacgaggtcaacgccatcaaatgggatccgtctggaatgttgctggcatcctgctcggatgacatgacattgaagatctggagcatgaaacaggaggtgtgcatccatgatcttcaggctcacaataaagagatctacaccatcaagtggagccccactgggcccgccaccagcaacccaaactccaacatcatgttggcaagtgcttcgtttgattctacggtgcgactgtgggacatagaacgaggcgtctgcacccacacgctcacgaagcatcaggagcctgtctatagcgtagctttcagccctgatgggaagtacttggccagtggatccttcgacaagtgcgtccatatctggaatactcagagtggaaatcttgtccacagctaccgaggcactggcggcatcttcgaggtgtgctggaacgcccgaggagacaaagtgggtgccagcgcgtccgacggctctgtgtgtgttttggatctgcggaagtaaccacaaaatattatcgaaaaaagaaaagaattctaatgaccagccgtgaatgtgtagggttgcagctctattctccaaaactgtaggaacttgacttgcgttagagtgtactctgaaaccaactcgtctctggccgcaggagtctatatgttttcgtaatcttcatcaagaagtttttaaaaggcaagcaaaaacagaagcaaatcatatcaaacggggatagaatggtttccactgaggacattcagcctgggaaggaggaagtcaccagctcgaggcgtgtggattggtttccacccggaacaggctctgtgatggctgaatggaaagaaacgtaaaaagctgtgccaaaaaaaaagcaaaatgctgtgataaaccaaacagggaagggggaaaaaccctcctccttgggatttttttttttttgttttccctaacaatttggacactacaattgctctcacaaaggaggttcaaagaccagtttgtaccgatgaaacgcgcaactttgtaatcccaacactttctattttctagaatcttctttgttcattgggtggtttttcagtcggctggaattctatcttctgggggccttccgtctgagatggaagctgtcttgggcttgttgtctcttccttctgttgctccctgcccctccccctgcctttccactctgtctggtgagctctgctttttcagtgcaccatcaagagatgcagccccgtggacatgaagacacaatctcccacggacagctttcccccttccgccctctcccaccctctcctccccttgcgctcgcgctcgcgctcgctttctcactggcgtgctctctttctctctctctctccctctgtacctttctcatagttgcttcagatcttaggtctcaagggcactttggcgcgtagtaagtgctttatgtaagaaggcagggcaggggggctttttacaggagaaaaaaaaatgacttataagagaaagagcctggagtatttttggaaaaaaaaataatatttttatgttaaaacaattttaaaatcttaaaatggccatcagacatagagagctttgtgtgattcatgttttaaaaagaaccgaagaagccacaggcagggcctgagggagcccctggctttcccctcagcctcaggaaaggtggtcaggaaaactctggctggacaagggtcagtcttcggggtcagcagcgagattgctctgcagccagtgagggaggtccccgccatgccggctggaagaagaacctcgcatcttttggtgtgtatgcaccttggcagccagcaggaaagcagcgaagagccgcgcgccctctggcctcaagggagcattggcagaaccataaggtactgcagaagccgtcgaaaccgactgctcggctggattaggcgtgttggctacatctttcccacaaccgtataacgaccgatggtcatttctccaagagcaggcttggcgagtccttgcagagctgacatagaggcgcccgcatgtcacttagtctaacgctgacagaaatgaatgcagaaggaagattttcagtcctgaacgtgaattatagaggtagaacgtcgctaataatttctgccatctttataatttctttgtctcacagaagactaggagaaagatcttttttaaataatctttttgctgtttttaaaaaattaaacaaggctttgtgttcctagaagagcttcatttcagtgaatctggtgacctccatctgcttgctgtcataacccgacacggacttatttttgtcattagcaagggggaaaaggccaaaggacaagggcctcttctcccattggttttcctgtgggcagaagggctgaggaagatggcccagcccgtgggggctgctgggtcaccagcagtgggtagggtgcaatctggtgtgtgttccagcagtgagacggtgttattgtgaaggtggcattcatctgcggagccaaaacccagccatcggggaagggtcagggcttctgtggaacttggaacgtgccaggaccacctgcaaaagccagggtgcgttgatcattctcagatcattgattggcctccacttgggtatgtgaattattcatgtcccagaagaccaaaaagtgctctggttctgagatgagtattttattcgtgttctgtttccgaaacacttagcaaagaaggtcacagtgatgtggagtcgccgcacccatctttgaagatagccagtgtccctggatgaggtgatgatttcccgtcccaaggactctgtgaagtttagagtacagtttgttggggtccaaaagacaccatctctaccccacccaaataaaaatgcactcatctctgtagaacatctgctgtcaaaggccagcctgtcgttagggcatggcttatgcttgacaaaccagtaacaactgtgggatggcgatggtgggatgtgtcgcaagcaattcactagacaatcttcacatgaatgtcggtagccagggtctctcccgagggatggctttagtcttgatgaatgtgaaccatgtcggaattgttaggtagaaacctgggctgggaggcctcggaccccaggctccatccctggcttccccagcctgcggccgcaagcaaaaccaagcgcgagatgcagctagcacccttcatatccatccccgttctcagcgggacaacaccatggacagccgttttcagagcctccagcatttgcacaccactactcaccctctctgctgctggcatgttggtagagtcatccctgtaatcaagaaatggcctgtggaatgttattgttcaacgttgtttacagctcttaaaacatggtgaggaatgcctaagtcttagtgaccaaacgtgaccttgaaagcagacatagcatgacagaccttcctagagtgtttggtcgggttcacagtgaccgagagtcaggtccagcacacacctgggaaagggatgctgccccaagggggaccaaaagggccggacgttacagggtgaaaccctctgacccctcgcgacaccgtaggacttgacttttgtttagtctttctaagaaatagatcatggagccaagtgaagtgcactttgtcaaatgtaagggtctgctttgttcttgttgcttttctgttttttaaccttttgttccgccatttaaaaaaagaaaaaaaaaaagcttatgtttcttgtcaaatgcagaaatgttccttccgccactcactgaagttttgcattctggcttgtgcagtttttattgtctgtgtcagacgtacagccagacatgttctctattggcatttttccgattctgttcagatgacagcgaccgccttttcattccccccgccacctgtactcaccctcacgctctttgaagaaaaaaaaaaaatcaccttgtgtgttgtagctcatttgtttcaagagagaatcaacagatcatattcagtgtcttgaataaattgctctattttgatattaaaaaaaaaaaa

SEQ ID NO: 317901 - DNA, 5146 bp, Homo sapiens
tgcattcaaatataaacagactgctttaaggaatcaaagttgacttacagagccaacaaaagcccctcaggaaaacgcctcataccttgtgcggtttctgtacagggttcctgacttgtggtttttcccactcggctttcacgtttgggattgagagccacatcagccagtccaacatcaatgggacgctagtgccaccggccgccctcatctccattctccagaagggcctgcagtatgtagaggccgagatcagtatcaacgaggatggcacagtgttcgacggccgccccatagagtccctgtcactgatagacgccgtgatgcccgacgtggtgcagacgcggcagcaggcattccgagagaagctcgctcagcagcaagccagtgcggcggcggcggcggctgcggccacggcagcagcgacagcagccaccacgacctcagccggcgtttcccaccaaaatccatcgaagaacagagaggccacggtgaatggggaagagaacagagcacattcagtcaataatcacgcgaagccaatggaaatagatggagaggttgagattccatccagcaaagccacagtccttcggggccatgagtctgaggtgttcatttgtgcctggaatcctgtcagtgatttgctagcctccggatctggagactcaactgcaaggatatggaacctgaatgagaatagcaacgggggctccacccagctcgtgttgaggcactgtatacgagaggggggccatgacgtcccgagtaacaaagacgtcacctcactggactggaataccaatggaacactcttggctacgggttcatatgacggttttgcaagaatatggacggaagatggtaacctggccagcaccttaggccaacataaaggccccatctttgccttgaaatggaaccgaaaggggaattacattttgagtgctggtgtagacaaaacaacaataatttgggatgcccacacaggagaagccaaacagcagtttccttttcattcagcccctgcccttgatgtggactggcagaacaacacgacctttgcctcctgtagcacagacatgtgtatccatgtgtgcaggctcggctgtgaccgcccagtcaaaaccttccagggacacacaaacgaggtcaacgccatcaaatgggatccgtctggaatgttgctggcatcctgctcggatgacatgacattgaagatctggagcatgaaacaggaggtgtgcatccatgatcttcaggctcacaataaagagatctacaccatcaagtggagccccactgggcccgccaccagcaacccaaactccaacatcatgttggcaagtgcttcgtttgattctacggtgcgactgtgggacatagaacgaggcgtctgcacccacacgctcacgaagcatcaggagcctgtctatagcgtagctttcagccctgatgggaagtacttggccagtggatccttcgacaagtgcgtccatatctggaatactcagagtggaaatcttgtccacagctaccgaggcactggcggcatcttcgaggtgtgctggaacgcccgaggagacaaagtgggtgccagcgcgtccgacggctctgtgtgtgttttggatctgcggaagtaaccacaaaatattatcgaaaaaagaaaagaattctaatgaccagccgtgaatgtgtagggttgcagctctattctccaaaactgtaggaacttgacttgcgttagagtgtactctgaaaccaactcgtctctggccgcaggagtctatatgttttcgtaatcttcatcaagaagtttttaaaaggcaagcaaaaacagaagcaaatcatatcaaacggggatagaatggtttccactgaggacattcagcctgggaaggaggaagtcaccagctcgaggcgtgtggattggtttccacccggaacaggctctgtgatggctgaatggaaagaaacgtaaaaagctgtgccaaaaaaaaagcaaaatgctgtgataaaccaaacagggaagggggaaaaaccctcctccttgggatttttttttttttgttttccctaacaatttggacactacaattgctctcacaaaggaggttcaaagaccagtttgtaccgatgaaacgcgcaactttgtaatcccaacactttctattttctagaatcttctttgttcattgggtggtttttcagtcggctggaattctatcttctgggggccttccgtctgagatggaagctgtcttgggcttgttgtctcttccttctgttgctccctgcccctccccctgcctttccactctgtctggtgagctctgctttttcagtgcaccatcaagagatgcagccccgtggacatgaagacacaatctcccacggacagctttcccccttccgccctctcccaccctctcctccccttgcgctcgcgctcgcgctcgctttctcactggcgtgctctctttctctctctctctccctctgtacctttctcatagttgcttcagatcttaggtctcaagggcactttggcgcgtagtaagtgctttatgtaagaaggcagggcaggggggctttttacaggagaaaaaaaaatgacttataagagaaagagcctggagtatttttggaaaaaaaaataatatttttatgttaaaacaattttaaaatcttaaaatggccatcagacatagagagctttgtgtgattcatgttttaaaaagaaccgaagaagccacaggcagggcctgagggagcccctggctttcccctcagcctcaggaaaggtggtcaggaaaactctggctggacaagggtcagtcttcggggtcagcagcgagattgctctgcagccagtgagggaggtccccgccatgccggctggaagaagaacctcgcatcttttggtgtgtatgcaccttggcagccagcaggaaagcagcgaagagccgcgcgccctctggcctcaagggagcattggcagaaccataaggtactgcagaagccgtcgaaaccgactgctcggctggattaggcgtgttggctacatctttcccacaaccgtataacgaccgatggtcatttctccaagagcaggcttggcgagtccttgcagagctgacatagaggcgcccgcatgtcacttagtctaacgctgacagaaatgaatgcagaaggaagattttcagtcctgaacgtgaattatagaggtagaacgtcgctaataatttctgccatctttataatttctttgtctcacagaagactaggagaaagatcttttttaaataatctttttgctgtttttaaaaaattaaacaaggctttgtgttcctagaagagcttcatttcagtgaatctggtgacctccatctgcttgctgtcataacccgacacggacttatttttgtcattagcaagggggaaaaggccaaaggacaagggcctcttctcccattggttttcctgtgggcagaagggctgaggaagatggcccagcccgtgggggctgctgggtcaccagcagtgggtagggtgcaatctggtgtgtgttccagcagtgagacggtgttattgtgaaggtggcattcatctgcggagccaaaacccagccatcggggaagggtcagggcttctgtggaacttggaacgtgccaggaccacctgcaaaagccagggtgcgttgatcattctcagatcattgattggcctccacttgggtatgtgaattattcatgtcccagaagaccaaaaagtgctctggttctgagatgagtattttattcgtgttctgtttccgaaacacttagcaaagaaggtcacagtgatgtggagtcgccgcacccatctttgaagatagccagtgtccctggatgaggtgatgatttcccgtcccaaggactctgtgaagtttagagtacagtttgttggggtccaaaagacaccatctctaccccacccaaataaaaatgcactcatctctgtagaacatctgctgtcaaaggccagcctgtcgttagggcatggcttatgcttgacaaaccagtaacaactgtgggatggcgatggtgggatgtgtcgcaagcaattcactagacaatcttcacatgaatgtcggtagccagggtctctcccgagggatggctttagtcttgatgaatgtgaaccatgtcggaattgttaggtagaaacctgggctgggaggcctcggaccccaggctccatccctggcttccccagcctgcggccgcaagcaaaaccaagcgcgagatgcagctagcacccttcatatccatccccgttctcagcgggacaacaccatggacagccgttttcagagcctccagcatttgcacaccactactcaccctctctgctgctggcatgttggtagagtcatccctgtaatcaagaaatggcctgtggaatgttattgttcaacgttgtttacagctcttaaaacatggtgaggaatgcctaagtcttagtgaccaaacgtgaccttgaaagcagacatagcatgacagaccttcctagagtgtttggtcgggttcacagtgaccgagagtcaggtccagcacacacctgggaaagggatgctgccccaagggggaccaaaagggccggacgttacagggtgaaaccctctgacccctcgcgacaccgtaggacttgacttttgtttagtctttctaagaaatagatcatggagccaagtgaagtgcactttgtcaaatgtaagggtctgctttgttcttgttgcttttctgttttttaaccttttgttccgccatttaaaaaaagaaaaaaaaaaagcttatgtttcttgtcaaatgcagaaatgttccttccgccactcactgaagttttgcattctggcttgtgcagtttttattgtctgtgtcagacgtacagccagacatgttctctattggcatttttccgattctgttcagatgacagcgaccgccttttcattccccccgccacctgtactcaccctcacgctctttgaagaaaaaaaaaaaatcaccttgtgtgttgtagctcatttgtttcaagagagaatcaacagatcatattcagtgtcttgaataaattgctctattttgatattaaaaaaaaaaaa

SEQ ID NO: 317902 - DNA, 4759 bp, Homo sapiens
ccagggagcccaggagcaacgaagggcaggctcaagggaaggccccaccatgtccttctggggggccttgaatggcaactgatacataataagacacaatctattctgctgattcacaattatggagactgtatttccgtgagggtggaagaaaatcataccatatcagatgcctcgcagagcaccaggcccaccgtgaaaggctggtccctgcagacggcttcccatttttatgaccggatgctgggaagcctgctggtccacaggtccatacatgaagtcaccataagagggtggttcccacttcatcaacacctcatcgccgcgaggtgaggctaagatgagcataaccagtgacgaggtgaactttctggtgtatcggtatctccaggagtcaggtttttcccactcggctttcacgtttgggattgagagccacatcagccagtccaacatcaatgggacgctagtgccaccggccgccctcatctccattctccagaagggcctgcagtatgtagaggccgagatcagtatcaacgaggatggcacagtgttcgacggccgccccatagagtccctgtcactgatagacgccgtgatgcccgacgtggtgcagacgcggcagcaggcattccgagagaagctcgctcagcagcaagccagtgcggcggcggcggcggctgcggccacggcagcagcgacagcagccaccacgacctcagccggcgtttcccaccaaaatccatcgaagaacagagaggccacggtgaatggggaagagaacagagcacattcagtcaataatcacgcgaagccaatggaaatagatggagaggttgagattccatccagcaaagccacagtccttcggggccatgagtctgaggtgttcatttgtgcctggaatcctgtcagtgatttgctagcctccggatctggagactcaactgcaaggatatggaacctgaatgagaatagcaacgggggctccacccagctcgtgttgaggcactgtatacgagaggggggccatgacgtcccgagtaacaaagacgtcacctcactggactggaataccaatggaacactcttggctacgggttcatatgacggttttgcaagaatatggacggaagatggtaacctggccagcaccttaggccaacataaaggccccatctttgccttgaaatggaaccgaaaggggaattacattttgagtgctggtgtagacaaaacaacaataatttgggatgcccacacaggagaagccaaacagcagtttccttttcattcagcccctgcccttgatgtggactggcagaacaacacgacctttgcctcctgtagcacagacatgtgtatccatgtgtgcaggctcggctgtgaccgcccagtcaaaaccttccagggacacacaaacgaggtcaacgccatcaaatgggatccgtctggaatgttgctggcatcctgctcggatgacatgacattgaagatctggagcatgaaacaggaggtgtgcatccatgatcttcaggctcacaataaagagatctacaccatcaagtggagccccactgggcccgccaccagcaacccaaactccaacatcatgttggcaagtgcttcgtttgattctacggtgcgactgtgggacatagaacgaggcgtctgcacccacacgctcacgaagcatcaggagcctgtctatagcgtagctttcagccctgatgggaagtacttggccagtggatccttcgacaagtgcgtccatatctggaatactcagagtggaaatcttgtccacagctaccgaggcactggcggcatcttcgaggtgtgctggaacgcccgaggagacaaagtgggtgccagcgcgtccgacggctctgtgtgtgttttggatctgcggaagtaaccacaaaatattatcgaaaaaagaaaagaattctaatgaccagccgtgaatgtgtagggttgcagctctattctccaaaactgtaggaacttgacttgcgttagagtgtactctgaaaccaactcgtctctggccgcaggagtctatatgttttcgtaatcttcatcaagaagtttttaaaaggcaagcaaaaacagaagcaaatcatatcaaacggggatagaatggtttccactgaggacattcagcctgggaaggaggaagtcaccagctcgaggcgtgtggattggtttccacccggaacaggctctgtgatggctgaatggaaagaaacgtaaaaagctgtgccaaaaaaaaagcaaaatgctgtgataaaccaaacagggaagggggaaaaaccctcctccttgggatttttttttttttgttttccctaacaatttggacactacaattgctctcacaaaggaggttcaaagaccagtttgtaccgatgaaacgcgcaactttgtaatcccaacactttctattttctagaatcttctttgttcattgggtggtttttcagtcggctggaattctatcttctgggggccttccgtctgagatggaagctgtcttgggcttgttgtctcttccttctgttgctccctgcccctccccctgcctttccactctgtctggtgagctctgctttttcagtgcaccatcaagagatgcagccccgtggacatgaagacacaatctcccacggacagctttcccccttccgccctctcccaccctctcctccccttgcgctcgcgctcgcgctcgctttctcactggcgtgctctctttctctctctctctccctctgtacctttctcatagttgcttcagatcttaggtctcaagggcactttggcgcgtagtaagtgctttatgtaagaaggcagggcaggggggctttttacaggagaaaaaaaaatgacttataagagaaagagcctggagtatttttggaaaaaaaaataatatttttatgttaaaacaattttaaaatcttaaaatggccatcagacatagagagctttgtgtgattcatgttttaaaaagaaccgaagaagccacaggcagggcctgagggagcccctggctttcccctcagcctcaggaaaggtggtcaggaaaactctggctggacaagggtcagtcttcggggtcagcagcgagattgctctgcagccagtgagggaggtccccgccatgccggctggaagaagaacctcgcatcttttggtgtgtatgcaccttggcagccagcaggaaagcagcgaagagccgcgcgccctctggcctcaagggagcattggcagaaccataaggtactgcagaagccgtcgaaaccgactgctcggctggattaggcgtgttggctacatctttcccacaaccgtataacgaccgatggtcatttctccaagagcaggcttggcgagtccttgcagagctgacatagaggcgcccgcatgtcacttagtctaacgctgacagaaatgaatgcagaaggaagattttcagtcctgaacgtgaattatagaggtagaacgtcgctaataatttctgccatctttataatttctttgtctcacagaagactaggagaaagatcttttttaaataatctttttgctgtttttaaaaaattaaacaaggctttgtgttcctagaagagcttcatttcagtgaatctggtgacctccatctgcttgctgtcataacccgacacggacttatttttgtcattagcaagggggaaaaggccaaaggacaagggcctcttctcccattggttttcctgtgggcagaagggctgaggaagatggcccagcccgtgggggctgctgggtcaccagcagtgggtagggtgcaatctggtgtgtgttccagcagtgagacggtgttattgtgaaggtggcattcatctgcggagccaaaacccagccatcggggaagggtcagggcttctgtggaacttggaacgtgccaggaccacctgcaaaagccagggtgcgttgatcattctcagatcattgattggcctccacttgggtatgtgaattattcatgtcccagaagaccaaaaagtgctctggttctgagatgagtattttattcgtgttctgtttccgaaacacttagcaaagaaggtcacagtgatgtggagtcgccgcacccatctttgaagatagccagtgtccctggatgaggtgatgatttcccgtcccaaggactctgtgaagtttagagtacagtttgttggggtccaaaagacaccatctctaccccacccaaataaaaatgcactcatctctgtagaacatctgctgtcaaaggccagcctgtcgttagggcatggcttatgcttgacaaaccagtaacaactgtgggatggcgatggtgggatgtgtcgcaagcaattcactagacaatcttcacatgaatgtcggtagccagggtctctcccgagggatggctttagtcttgatgaatgtgaaccatgtcggaattgttaggtagaaacctgggctgggaggcctcggaccccaggctccatccctggcttccccagcctgcggccgcaagcaaaaccaagcgcgagatgcagctagcacccttcatatccatccccgttctcagcgggacaacaccatggacagccgttttcagagcctccagcatttgcacaccactactcaccctctctgctgctggcatgttggtagagtcatccctgcacaaaacaatttttctttttttttgggggggtgggacaacccccggccaaccaggggg

SEQ ID NO: 317903 - DNA, 4344 bp, Homo sapiens
ccagggagcccaggagcaacgaagggcaggctcaagggaaggccccaccatgtccttctggggggccttgaatggcaactgatacataataagacacaatctattctgctgattcacaattatggagactgtatttccgtgagggtggaagaaaatcataccatatcagatgcctcgcagagcaccaggcccaccgtgaaaggctggtccctgcagacggcttcccatttttatgaccggatgctgggaagcctgctggtccacaggtccatacatgaagtcaccataagagggtggttcccacttcatcaacacctcatcgccgcgaggtgaggctaagatgagcataaccagtgacgaggtgaactttctggtgtatcggtatctccaggagtcaggtttttcccactcggctttcacgtttgggattgagagccacatcagccagtccaacatcaatgggacgctagtgccaccggccgccctcatctccattctccagaagggcctgcagtatgtagaggccgagatcagtatcaacgaggatggcacagtgttcgacggccgccccatagagtccctgtcactgatagacgccgtgatgcccgacgtggtgcagacgcggcagcaggcattccgagagaagctcgctcagcagcaagccagtgcggcggcggcggcggctgcggccacggcagcagcgacagcagccaccacgacctcagccggcgtttcccaccaaaatccatcgaagaacagagaggccacggtgaatggggaagagaacagagcacattcagtcaataatcacgcgaagccaatggaaatagatggagaggttgagattccatccagcaaagccacagtccttcggggccatgagtctgaggtgttcatttgtgcctggaatcctgtcagtgatttgctagcctccggatctggagactcaactgcaaggatatggaacctgaatgagaatagcaacgggggctccacccagctcgtgttgaggcactgtatacgagaggggggccatgacgtcccgagtaacaaagacgtcacctcactggactggaataccaatggaacactcttggctacgggttcatatgacggttttgcaagaatatggacggaagatggtaacctggccagcaccttaggccaacataaaggccccatctttgccttgaaatggaaccgaaaggggaattacattttgagtgctggtgtagacaaaacaacaataatttgggatgcccacacaggagaagccaaacagcagtttccttttcattcagcccctgcccttgatgtggactggcagaacaacacgacctttgcctcctgtagcacagacatgtgtatccatgtgtgcaggctcggctgtgaccgcccagtcaaaaccttccagggacacacaaacgaggtcaacgccatcaaatgggatccgtctggaatgttgctggcatcctgctcggatgacatgacattgaagatctggagcatgaaacaggaggtgtgcatccatgatcttcaggctcacaataaagagatctacaccatcaagtggagccccactgggcccgccaccagcaacccaaactccaacatcatgttggcaagtgcttcgtttgattctacggtgcgactgtgggacatagaacgaggcgtctgcacccacacgctcacgaagcatcaggagcctgtctatagcgtagctttcagccctgatgggaagtacttggccagtggatccttcgacaagtgcgtccatatctggaatactcagagtggaaatcttgtccacagctaccgaggcactggcggcatcttcgaggtgtgctggaacgcccgaggagacaaagtgggtgccagcgcgtccgacggctctgtgtgtgttttggatctgcggaagtaaccacaaaatattatcgaaaaaagaaaagaattctaatgaccagccgtgaatgtgtagggttgcagctctattctccaaaactgtaggaacttgacttgcgttagagtgtactctgaaaccaactcgtctctggccgcaggagtctatatgttttcgtaatcttcatcaagaagtttttaaaaggcaagcaaaaacagaagcaaatcatatcaaacggggatagaatggtttccactgaggacattcagcctgggaaggaggaagtcaccagctcgaggcgtgtggattggtttccacccggaacaggctctgtgatggctgaatggaaagaaacgtaaaaagctgtgccaaaaaaaaagcaaaatgctgtgataaaccaaacagggaagggggaaaaaccctcctccttgggatttttttttttttgttttccctaacaatttggacactacaattgctctcacaaaggaggttcaaagaccagtttgtaccgatgaaacgcgcaactttgtaatcccaacactttctattttctagaatcttctttgttcattgggtggtttttcagtcggctggaattctatcttctgggggccttccgtctgagatggaagctgtcttgggcttgttgtctcttccttctgttgctccctgcccctccccctgcctttccactctgtctggtgagctctgctttttcagtgcaccatcaagagatgcagccccgtggacatgaagacacaatctcccacggacagctttcccccttccgccctctcccaccctctcctccccttgcgctcgcgctcgcgctcgctttctcactggcgtgctctctttctctctctctctccctctgtacctttctcatagttgcttcagatcttaggtctcaagggcactttggcgcgtagtaagtgctttatgtaagaaggcagggcaggggggctttttacaggagaaaaaaaaatgacttataagagaaagagcctggagtatttttggaaaaaaaaataatatttttatgttaaaacaattttaaaatcttaaaatggccatcagacatagagagctttgtgtgattcatgttttaaaaagaaccgaagaagccacaggcagggcctgagggagcccctggctttcccctcagcctcaggaaaggtggtcaggaaaactctggctggacaagggtcagtcttcggggtcagcagcgagattgctctgcagccagtgagggaggtccccgccatgccggctggaagaagaacctcgcatcttttggtgtgtatgcaccttggcagccagcaggaaagcagcgaagagccgcgcgccctctggcctcaagggagcattggcagaaccataaggtactgcagaagccgtcgaaaccgactgctcggctggattaggcgtgttggctacatctttcccacaaccgtataacgaccgatggtcatttctccaagagcaggcttggcgagtccttgcagagctgacatagaggcgcccgcatgtcacttagtctaacgctgacagaaatgaatgcagaaggaagattttcagtcctgaacgtgaattatagaggtagaacgtcgctaataatttctgccatctttataatttctttgtctcacagaagactaggagaaagatcttttttaaataatctttttgctgtttttaaaaaattaaacaaggctttgtgttcctagaagagcttcatttcagtgaatctggtgacctccatctgcttgctgtcataacccgacacggacttatttttgtcattagcaagggggaaaaggccaaaggacatgacagaccttcctagagtgtttggtcgggttcacagtgaccgagagtcaggtccagcacacacctgggaaagggatgctgccccaagggggaccaaaagggccggacgttacagggtgaaaccctctgacccctcgcgacaccgtaggacttgacttttgtttagtctttctaagaaatagatcatggagccaagtgaagtgcactttgtcaaatgtaagggtctgctttgttcttgttgcttttctgttttttaaccttttgttccgccatttaaaaaaagaaaaaaaaaaagcttatgtttcttgtcaaatgcagaaatgttccttccgccactcactgaagttttgcattctggcttgtgcagtttttattgtctgtgtcagacgtacagccagacatgttctctattggcatttttccgattctgttcagatgacagcgaccgccttttcattccccccgccacctgtactcaccctcacgctctttgaagaaaaaaaaaaaatcaccttgtgtgttgtagctcatttgtttcaagagagaatcaacagatcatattcagtgtcttgaataaattgctctattttgatattaaaaaaaaaaaa

SEQ ID NO: 317904 - DNA, 2091 bp, Homo sapiens
ccagggagcccaggagcaacgaagggcaggctcaagggaaggccccaccatgtccttctggggggccttgaatggcaactgatacataataagacacaatctattctgctgattcacaattatggagactgtatttccgtgagggtggaagaaaatcataccatatcagatgcctcgcagagcaccaggcccaccgtgaaaggctggtccctgcagacggcttcccatttttatgaccggatgctgggaagcctgctggtccacaggtccatacatgaagtcaccataagagggtggttcccacttcatcaacacctcatcgccgcgaggtgaggctaagatgagcataaccagtgacgaggtgaactttctggtgtatcggtatctccaggagtcaggtttttcccactcggctttcacgtttgggattgagagccacatcagccagtccaacatcaatgggacgctagtgccaccggccgccctcatctccattctccagaagggcctgcagtatgtagaggccgagatcagtatcaacgaggatggcacagtgttcgacggccgccccatagagtccctgtcactgatagacgccgtgatgcccgacgtggtgcagacgcggcagcaggcattccgagagaagctcgctcagcagcaagccagtgcggcggcggcggcggctgcggccacggcagcagcgacagcagccaccacgacctcagccggcgtttcccaccaaaatccatcgaagaacagagaggccacggtgaatggggaagagaacagagcacattcagtcaataatcacgcgaagccaatggaaatagatggagaggttgagattccatccagcaaagccacagtccttcggggccatgagtctgaggtgttcatttgtgcctggaatcctgtcagtgatttgctagcctccggatctggagactcaactgcaaggatatggaacctgaatgagaatagcaacgggggctccacccagctcgtgttgaggcactgtatacgagaggggggccatgacgtcccgagtaacaaagacgtcacctcactggactggaataccaatggaacactcttggctacgggttcatatgacggttttgcaagaatatggacggaagatggtaacctggccagcaccttaggccaacataaaggccccatctttgccttgaaatggaaccgaaaggggaattacattttgagtgctggtgtagacaaaacaacaataatttgggatgcccacacaggagaagccaaacagcagtttccttttcattcagcccctgcccttgatgtggactggcagaacaacacgacctttgcctcctgtagcacagacatgtgtatccatgtgtgcaggctcggctgtgaccgcccagtcaaaaccttccagggacacacaaacgaggtcaacgccatcaaatgggatccgtctggaatgttgctggcatcctgctcggatgacatgacattgaagatctggagcatgaaacaggaggtgtgcatccatgatcttcaggctcacaataaagagatctacaccatcaagtggagccccactgggcccgccaccagcaacccaaactccaacatcatgttggcaaggtaagggcaggcaacacagctggcacagctcggtgttacacaaagacaacaggaaattctgctaaagcgcgtccatgcacgtgtgttgaagcccttcagaggaagcaaagcggtagctcactttgaaggggccaggatagaattaccgagtaacacctgcctttgaggtaaggatggttttgagtcaggcacagtggcttacgcctataatctcagcaccctgggaggccaaggcaggacgatggcttgagcccaagagttcaacatcagcctgggcaacatggtgaaaccccatctctacaaaaacttagccaggcgtggtgacgtgtgcctgtagtcccagctactcaggaggctgaggcaggaggatggcttgagcccaggagattgaggctgcagtgcgcggtgatcacaccactgcactccagcctgggtgacagagcaagaccatgtctcaaaaaaaaa

SEQ ID NO: 317905 - DNA, 1067 bp, Homo sapiens
gtgaggagggccggcggcggggcggacccctggcggtcctcctggctggggtccgcgcgctcgcggcagctccccgtggaggtcactgtccgtgccagtccctcccgctgtcccgccctctcccgctgccgccgccgccgccgccgcgcccgcctcagcgcccccactccgcgcttgggagcgaggagccgccagcgcccccgccccgccgccgccgcagcgccctcaggccgccattcgccaccgaaactttccagcgcccgcgctctctccgggactcggcggcggcggggcgggggcggcccgggggcggcgcgcggctgctccggggcgccgggccctcttcggccgccgcacggccgggactcggaggctgccggctggagggaggttcggagcgcggccgggcgcgcggcgccgccacaagttgcgctgctcgcgacgagatttccgtgagggtggaagaaaatcataccatatcagatgcctcgcagagcaccaggcccaccgtgaaaggctggtccctgcagacggcttcccatttttatgaccggatgctgggaagcctgctggtccacaggtccatacatgaagtcaccataaggagccctggcctccttgcagaaacatcgaggtgacatgtagcatgaccgagctcgctggcgcctcttcatcgtgctgccaccgccctgcaggaagaggggccatgcagtcagtcttgcaccactttcaacgtttgcgagggagagagggtggttcccacttcatcaacacctcatcgccgcgaggtgaggctaagatgagcataaccagtgacgaggtgaactttctggtgtatcggtatctccaggagtcaggtaagaggcttggttttctgtcggtaggaaattcatctacagcatcttacaagcagaaggatcaacgcttaattcaaaaccaggctgtagaagaagaagaagaagagctaagaaggttcttagtgctgatggggagaagagaaggttctggagctgtgccatccccgggtggaaagagggaatgtgttctttcttcccttgacacttctg

SEQ ID NO: 317906 - DNA, 199 bp, Homo sapiens
tttgctcggtccgatgtccagatgccagtctgttatgagagcttctctgacccttcatgacgatgttccaataaactttactgacaaacatcggtggagggctagattgggcgtgggggccgtagcttgccgacttctcactctaaaggcatctttgtattgtctctcaagatgacaggtgctttatctttccttccag

SEQ ID NO: 317907 - DNA, 5318 bp, Homo sapiens
ccagggagcccaggagcaacgaagggcaggctcaagggaaggccccaccatgtccttctggggggccttgaatggcaactgatacataataagacacaatctattctgctgattcacaattatggagactgtatttccgtgagggtggaagaaaatcataccatatcagatgcctcgcagagcaccaggcccaccgtgaaaggctggtccctgcagacggcttcccatttttatgaccggatgctgggaagcctgctggtccacaggtccatacatgaagtcaccataagagggtggttcccacttcatcaacacctcatcgccgcgaggtgaggctaagatgagcataaccagtgacgaggtgaactttctggtgtatcggtatctccaggagtcaggtttttcccactcggctttcacgtttgggattgagagccacatcagccagtccaacatcaatgggacgctagtgccaccggccgccctcatctccattctccagaagggcctgcagtatgtagaggccgagatcagtatcaacgaggatggcacagtgttcgacggccgccccatagagtccctgtcactgatagacgccgtgatgcccgacgtggtgcagacgcggcagcaggcattccgagagaagctcgctcagcagcaagccagtgcggcggcggcggcggctgcggccacggcagcagcgacagcagccaccacgacctcagccggcgtttcccaccaaaatccatcgaagaacagagaggccacggtgaatggggaagagaacagagcacattcagtcaataatcacgcgaagccaatggaaatagatggagaggttgagattccatccagcaaagccacagtccttcggggccatgagtctgaggtgttcatttgtgcctggaatcctgtcagtgatttgctagcctccggatctggagactcaactgcaaggatatggaacctgaatgagaatagcaacgggggctccacccagctcgtgttgaggcactgtatacgagaggggggccatgacgtcccgagtaacaaagacgtcacctcactggactggaataccaatggaacactcttggctacgggttcatatgacggttttgcaagaatatggacggaagatggtaacctggccagcaccttaggccaacataaaggccccatctttgccttgaaatggaaccgaaaggggaattacattttgagtgctggtgtagacaaaacaacaataatttgggatgcccacacaggagaagccaaacagcagtttccttttcattcagcccctgcccttgatgtggactggcagaacaacacgacctttgcctcctgtagcacagacatgtgtatccatgtgtgcaggctcggctgtgaccgcccagtcaaaaccttccagggacacacaaacgaggtcaacgccatcaaatgggatccgtctggaatgttgctggcatcctgctcggatgacatgacattgaagatctggagcatgaaacaggaggtgtgcatccatgatcttcaggctcacaataaagagatctacaccatcaagtggagccccactgggcccgccaccagcaacccaaactccaacatcatgttggcaagtgcttcgtttgattctacggtgcgactgtgggacatagaacgaggcgtctgcacccacacgctcacgaagcatcaggagcctgtctatagcgtagctttcagccctgatgggaagtacttggccagtggatccttcgacaagtgcgtccatatctggaatactcagagtggaaatcttgtccacagctaccgaggcactggcggcatcttcgaggtgtgctggaacgcccgaggagacaaagtgggtgccagcgcgtccgacggctctgtgtgtgttttggatctgcggaagtaaccacaaaatattatcgaaaaaagaaaagaattctaatgaccagccgtgaatgtgtagggttgcagctctattctccaaaactgtaggaacttgacttgcgttagagtgtactctgaaaccaactcgtctctggccgcaggagtctatatgttttcgtaatcttcatcaagaagtttttaaaaggcaagcaaaaacagaagcaaatcatatcaaacggggatagaatggtttccactgaggacattcagcctgggaaggaggaagtcaccagctcgaggcgtgtggattggtttccacccggaacaggctctgtgatggctgaatggaaagaaacgtaaaaagctgtgccaaaaaaaaagcaaaatgctgtgataaaccaaacagggaagggggaaaaaccctcctccttgggatttttttttttttgttttccctaacaatttggacactacaattgctctcacaaaggaggttcaaagaccagtttgtaccgatgaaacgcgcaactttgtaatcccaacactttctattttctagaatcttctttgttcattgggtggtttttcagtcggctggaattctatcttctgggggccttccgtctgagatggaagctgtcttgggcttgttgtctcttccttctgttgctccctgcccctccccctgcctttccactctgtctggtgagctctgctttttcagtgcaccatcaagagatgcagccccgtggacatgaagacacaatctcccacggacagctttcccccttccgccctctcccaccctctcctccccttgcgctcgcgctcgcgctcgctttctcactggcgtgctctctttctctctctctctccctctgtacctttctcatagttgcttcagatcttaggtctcaagggcactttggcgcgtagtaagtgctttatgtaagaaggcagggcaggggggctttttacaggagaaaaaaaaatgacttataagagaaagagcctggagtatttttggaaaaaaaaataatatttttatgttaaaacaattttaaaatcttaaaatggccatcagacatagagagctttgtgtgattcatgttttaaaaagaaccgaagaagccacaggcagggcctgagggagcccctggctttcccctcagcctcaggaaaggtggtcaggaaaactctggctggacaagggtcagtcttcggggtcagcagcgagattgctctgcagccagtgagggaggtccccgccatgccggctggaagaagaacctcgcatcttttggtgtgtatgcaccttggcagccagcaggaaagcagcgaagagccgcgcgccctctggcctcaagggagcattggcagaaccataaggtactgcagaagccgtcgaaaccgactgctcggctggattaggcgtgttggctacatctttcccacaaccgtataacgaccgatggtcatttctccaagagcaggcttggcgagtccttgcagagctgacatagaggcgcccgcatgtcacttagtctaacgctgacagaaatgaatgcagaaggaagattttcagtcctgaacgtgaattatagaggtagaacgtcgctaataatttctgccatctttataatttctttgtctcacagaagactaggagaaagatcttttttaaataatctttttgctgtttttaaaaaattaaacaaggctttgtgttcctagaagagcttcatttcagtgaatctggtgacctccatctgcttgctgtcataacccgacacggacttatttttgtcattagcaagggggaaaaggccaaaggacaagggcctcttctcccattggttttcctgtgggcagaagggctgaggaagatggcccagcccgtgggggctgctgggtcaccagcagtgggtagggtgcaatctggtgtgtgttccacctgcaaaagccagggtgcgttgatcattctcagatcattgattggcctccacttgggtatgtgaattattcatgtcccagaagaccaaaaagtgctctggttctgagatgagtattttattcgtgttctgtttccgaaacacttagcaaagaaggtcacagtgatgtggagtcgccgcacccatctttgaagatagccagtgtccctggatgaggtgatgatttcccgtcccaaggactctgtgaagtttagagtacagtttgttggggtccaaaagacaccatctctaccccacccaaataaaaatgcactcatctctgtagaacatctgctgtcaaaggccagcctgtcgttagggcatggcttatgcttgacaaaccagtaacaactgtgggatggcgatggtgggatgtgtcgcaagcaattcactagacaatcttcacatgaatgtcggtagccagggtctctcccgagggatggctttagtcttgatgaatgtgaaccatgtcggaattgttaggtagaaacctgggctgggaggcctcggaccccaggctccatccctggcttccccagcctgcggccgcaagcaaaaccaagcgcgagatgcagctagcacccttcatatccatccccgttctcagcgggacaacaccatggacagccgttttcagagcctccagcatttgcacaccactactcaccctctctgctgctggcatgttggtagagtcatccctgtaatcaagaaatggcctgtggaatgttattgttcaacgttgtttacagctcttaaaacatggtgaggaatgcctaagtcttagtgaccaaacgtgaccttgaaagcagacatagcatgacagaccttcctagagtgtttggtcgggttcacagtgaccgagagtcaggtccagcacacacctgggaaagggatgctgccccaagggggaccaaaagggccggacgttacagggtgaaaccctctgacccctcgcgacaccgtaggacttgacttttgtttagtctttctaagaaatagatcatggagccaagtgaagtgcactttgtcaaatgtaagggtctgctttgttcttgttgcttttctgttttttaaccttttgttccgccatttaaaaaaagaaaaaaaaaaagcttatgtttcttgtcaaatgcagaaatgttccttccgccactcactgaagttttgcattctggcttgtgcagtttttattgtctgtgtcagacgtacagccagacatgttctctattggcatttttccgattctgttcagatgacagcgaccgccttttcattccccccgccacctgtactcaccctcacgctctttgaagaaaaaaaaaaaatcaccttgtgtgttgtagctcatttgtttcaagagagaatcaacagatcatattcagtgtcttgaataaattgctctattttgatattaaaaaaaaaaaa

SEQ ID NO: 317908 - DNA, 4300 bp, Homo sapiens
ccagggagcccaggagcaacgaagggcaggctcaagggaaggccccaccatgtccttctggggggccttgaatggcaactgatacataataagacacaatctattctgctgattcacaattatggagactgtatttccgtgagggtggaagaaaatcataccatatcagatgcctcgcagagcaccaggcccaccgtgaaaggctggtccctgcagacggcttcccatttttatgaccggatgctgggaagcctgctggtccacaggtccatacatgaagtcaccataagagggtggttcccacttcatcaacacctcatcgccgcgaggtgaggctaagatgagcataaccagtgacgaggtgaactttctggtgtatcggtatctccaggagtcaggtttttcccactcggctttcacgtttgggattgagagccacatcagccagtccaacatcaatgggacgctagtgccaccggccgccctcatctccattctccagaagggcctgcagtatgtagaggccgagatcagtatcaacgaggatggcacagtgttcgacggccgccccatagagtccctgtcactgatagacgccgtgatgcccgacgtggtgcagacgcggcagcaggcattccgagagaagctcgctcagcagcaagccagtgcggcggcggcggcggctgcggccacggcagcagcgacagcagccaccacgacctcagccggcgtttcccaccaaaatccatcgaagaacagagaggccacggtgaatggggaagagaacagagcacattcagtcaataatcacgcgaagccaatggaaatagatggagaggttgagattccatccagcaaagccacagtccttcggggccatgagtctgaggtgttcatttgtgcctggaatcctgtcagtgatttgctagcctccggatctggagactcaactgcaaggatatggaacctgaatgagaatagcaacgggggctccacccagctcgtgttgaggcactgtatacgagaggggggccatgacgtcccgagtaacaaagacgtcacctcactggactggaataccaatggaacactcttggctacgggttcatatgacggttttgcaagaatatggacggaagatggtaacctggccagcaccttaggccaacataaaggccccatctttgccttgaaatggaaccgaaaggggaattacattttgagtgctggtgtagacaaaacaacaataatttgggatgcccacacaggagaagccaaacagcagtttccttttcattcagcccctgcccttgatgtggactggcagaacaacacgacctttgcctcctgtagcacagacatgtgtatccatgtgtgcaggctcggctgtgaccgcccagtcaaaaccttccagggacacacaaacgaggtcaacgccatcaaatgggatccgtctggaatgttgctggcatcctgctcggatgacatgacattgaagatctggagcatgaaacaggaggtgtgcatccatgatcttcaggctcacaataaagagatctacaccatcaagtggagccccactgggcccgccaccagcaacccaaactccaacatcatgttggcaagtgcttcgtttgattctacggtgcgactgtgggacatagaacgaggcgtctgcacccacacgctcacgaagcatcaggagcctgtctatagcgtagctttcagccctgatgggaagtacttggccagtggatccttcgacaagtgcgtccatatctggaatactcagagtggaaatcttgtccacagctaccgaggcactggcggcatcttcgaggtgtgctggaacgcccgaggagacaaagtgggtgccagcgcgtccgacggctctgtgtgtgttttggatctgcggaagtaaccacaaaatattatcgaaaaaagaaaagaattctaatgaccagccgtgaatgtgtagggttgcagctctattctccaaaactgtaggaacttgacttgcgttagagtgtactctgaaaccaactcgtctctggccgcaggagtctatatgttttcgtaatcttcatcaagaagtttttaaaaggcaagcaaaaacagaagcaaatcatatcaaacggggatagaatggtttccactgaggacattcagcctgggaaggaggaagtcaccagctcgaggcgtgtggattggtttccacccggaacaggctctgtgatggctgaatggaaagaaacgtaaaaagctgtgccaaaaaaaaagcaaaatgctgtgataaaccaaacagggaagggggaaaaaccctcctccttgggatttttttttttttgttttccctaacaatttggacactacaattgctctcacaaaggaggttcaaagaccagtttgtaccgatgaaacgcgcaactttgtaatcccaacactttctattttctagaatcttctttgttcattgggtggtttttcagtcggctggaattctatcttctgggggccttccgtctgagatggaagctgtcttgggcttgttgtctcttccttctgttgctccctgcccctccccctgcctttccactctgtctggtgagctctgctttttcagtgcaccatcaagagatgcagccccgtggacatgaagacacaatctcccacggacagctttcccccttccgccctctcccaccctctcctccccttgcgctcgcgctcgcgctcgctttctcactggcgtgctctctttctctctctctctccctctgtacctttctcatagttgcttcagatcttaggtctcaagggcactttggcgcgtagtaagtgctttatgtaagaaggcagggcaggggggctttttacaggagaaaaaaaaatgacttataagagaaagagcctggagtatttttggaaaaaaaaataatatttttatgttaaaacaattttaaaatcttaaaatggccatcagacatagagagctttgtgtgattcatgttttaaaaagaaccgaagaagccacaggcagggcctgagggagcccctggctttcccctcagcctcaggaaaggtggtcaggaaaactctggctggacaagggtcagtcttcggggtcagcagcgagattgctctgcagccagtgagggaggtccccgccatgccggctggaagaagaacctcgcatcttttggtgtgtatgcaccttggcagccagcaggaaagcagcgaagagccgcgcgccctctggcctcaagggagcattggcagaaccataaggtactgcagaagccgtcgaaaccgactgctcggctggattaggcgtgttggctacatctttcccacaaccgtataacgaccgatggtcatttctccaagagcaggcttggcgagtccttgcagagctgacatagaggcgcccgcatgtcacttagtctaacgctgacagaaatgaatgcagaaggaagattttcagtcctgaacgtgaattatagaggtagaacgtcgctaataatttctgccatctttataatttctttgtctcacagaagactaggagaaagatcttttttaaataatctttttgctgtttttaaaaaattaaacaaggctttgtgttcctagaagagcttcatttcagtgaatctggtgacctccatctgcttgctgtcataacccgacacggacttatttttgtcattagcaagggggaaaaggccaaaggacaagggcctcttctcccattggttttcctgtgggcagaagggctgaggaagatggcccagcccgtgggggctgctgggtcaccagcagtgggtagggtgcaatctggtgtgtgttccagcagtgagacggtgttattgtgaaggtggcattcatctgcggagccaaaacccagccatcggggaagggtcagggcttctgtggaacttggaacgtgccaggaccacctgcaaaagccagggtgcgttgatcattctcagatcattgattggcctccacttgggtatgtgaattattcatgtcccagaagaccaaaaagtgctctggttctgagatgagtattttattcgtgttctgtttccgaaacacttagcaaagaaggtcacagtgatgtggagtcgccgcacccatctttgaagatagccagtgtccctggatgaggtgatgatttcccgtcccaaggactctgtgaagtttagagtacagtttgttggggtccaaaagacaccatctcttctccctccccttcttgttctgtcggctttgtgagcaaccttaccatcgaacg

SEQ ID NO: 317909 - DNA, 565 bp, Homo sapiens
ccagggagcccaggagcaacgaagggcaggctcaagggaaggccccaccatgtccttctggggggccttgaatggcaactgatacataataagacacaatctattctgctgattcacaattatggagactgtatttccgtgagggtggaagaaaatcataccatatcagatgcctcgcagagcaccaggcccaccgtgaaaggctggtccctgcagacggcttcccatttttatgaccggatgctgggaagcctgctggtccacaggtccatacatgaagtcaccataagagggtggttcccacttcatcaacacctcatcgccgcgaggtgaggctaagatgagcataaccagtgacgaggtgaactttctggtgtatcggtatctccaggagtcaggtttttcccactcggctttcacgtttgggattgagagccacatcagccagtccaacatcaatgggacgctagtgccaccggccgccctcatctccattctccagaagggcctgcagtatgtagaggccgagatcagtatcaacgaggtacgtagctgctgggcccgg

SEQ ID NO: 317910 - DNA, 1588 bp, Homo sapiens
gagtcaatcacctcagatctctcaagcagtccagcctacgcaacagtactccacctctgcgcctgtgcggggagggtaaggcggggccagcaacttcctcagctggagggagagcgcacggtggagccgccagttgagaaggactctgatccggctcagctttccaatcagctgcggaaggagccacgctttcgggggttgcaagatggcggccaccagtggaactgatgagccggtttccggggagttggtgtctgtggcacatgcgctttctctcccagcagagtcgtatggcaacgatcctgacattgagatggcttgggccatgagagcaatgcagcatgctgaagtctattacaagctgatttcatcagttgacccacagttcctgaaactcaccaaagtagatgaccaaatttactctgagttccggaaaaattttgagacccttaggatagatgtgttggacccagaagaactcaagtcagaatcagccaaagagaagtggaggccattctgcttgaagtttaatgggattgttgaagacttcaactatggtactttgctgcgactagattgttctcagggctacactgaggaaaacaccatctttgcccccaggatacaattctttgccattgaaattgctcggaaccgggaaggctataacaaagctgtttatatcagtgttcaggacaaagaaggagagaaaggagtcaacaatggaggagaaaaaagagctgacagtggagaagaagagaacaccaagaatggaggagagaaaggagctgatagtggagaagaaaaagaggaaggaatcaacagagaagacaaaactgacaaaggaggagaaaaagggaaagaagctgacaaagaaatcaacaaaagtggtgaaaaagctatgtaaggtatacagggaacagcactctagaagctatgactcaattgagactacaagtaccacggtgctacttgcacagacccctttggttaaatgtaaattcttgtacaattgaaggatacgcagaaggacatctttctagtctaacagtcaggagctgctctggtcattcccttgtatgaactggtctaaagactgttagtggggtgttagttgatttttcctggtatactgtttcttggctgacactactggtcaagtaagaaatttgtaaataaatttcttttggttcttattatctatatctgtgactgactttaaaaaggtatttgacacttgaaatttttttcaaatatgtaatctcatcaccatgtcttatataagataatttactcctgtttcttactgcttctcactgtttcctgtagtgaagttctctaaacttgttaagttatacctggtgttgggattagaagtccttacataagaattgactcttaatctctgagtgactataactccctgatttctttgctatatatgacaaaatatttgataaatagcagcaacctgaacctgtcaaactagtgaatgcagcccagttcatattagaagagcaagagactggacatgcttcagtatttgcttttcttttggtagccagaatgttacctgaaagctagcaaa

SEQ ID NO: 317911 - DNA, 1035 bp, Homo sapiens
gagtcaatcacctcagatctctcaagcagtccagcctacgcaacagtactccacctctgcgcctgtgcggggagggtaaggcggggccagcaacttcctcagctggagggagagcgcacggtggagccgccagttgagaaggactctgatccggctcagctttccaatcagctgcggaaggagccacgctttcgggggttgcaagatggcggccaccagtggaactgatgagccggtttccggggagttggtgtctgtggcacatgcgctttctctcccagcagagtcgtatggcaacgatcctgacattgagatggcttgggccatgagagcaatgcagcatgctgaagtctattacaagctgatttcatcagttgacccacagttcctgaaactcaccaaagtagatgaccaaatttactctgagttccggaaaaattttgagacccttaggatagatgtgttggacccagaagaactcaagtcagaatcagccaaagagaagtggaggccattctgcttgaagtttaatgggattgttgaagacttcaactatggtactttgctgcgactagattgttctcagggctacactgaggaaaacaccatctttgcccccaggatacaattctttgccattgaaattgctcggaaccgggaaggctataacaaagctgtttatatcagtgttcaggacaaagaaggagagaaaggagtcaacaatggaggagaaaaaagagctgacagtggagaagaagagaacaccaagaatggaggagagaaaggagctgatagtggagaagaaaaagaggaaggaatcaacagagaagacaaatgacaagggggaaagggaagaggtgacaagaatcacaagtgtgaaaagttgtagttacagggacagctctagagttgatcattgagatccagtcccgtgtttgccgacctggtattattgttatgagttggagactttagtaaaggaggctggtcgttacagcaagagggggaacgtagtgggcggcaaaggttgtttta

SEQ ID NO: 317912 - DNA, 1476 bp, Homo sapiens
gagtcaatcacctcagatctctcaagcagtccagcctacgcaacagtactccacctctgcgcctgtgcggggagggtaaggcggggccagcaacttcctcagctggagggagagcgcacggtggagccgccagttgagaaggactctgatccggctcagctttccaatcagctgcggaaggagccacgctttcgggggttgcaagatggcggccaccagtggaactgatgagccggtttccggggagttggtgtctgtggcacatgcgctttctctcccagcagagtcgtatggcaacgatcctgacattgagatggcttgggccatgagagcaatgcagcatgctgaagtctattacaagctgatttcatcagttgacccacagttcctgaaactcaccaaagtagatgaccaaatttactctgagttccggaaaaattttgagacccttaggatagatgtgttggacccagaagaactcaagtcagaatcagccaaagagcccccaggatacaattctttgccattgaaattgctcggaaccgggaaggctataacaaagctgtttatatcagtgttcaggacaaagaaggagagaaaggagtcaacaatggaggagaaaaaagagctgacagtggagaagaagagaacaccaagaatggaggagagaaaggagctgatagtggagaagaaaaagaggaaggaatcaacagagaagacaaaactgacaaaggaggagaaaaagggaaagaagctgacaaagaaatcaacaaaagtggtgaaaaagctatgtaaggtatacagggaacagcactctagaagctatgactcaattgagactacaagtaccacggtgctacttgcacagacccctttggttaaatgtaaattcttgtacaattgaaggatacgcagaaggacatctttctagtctaacagtcaggagctgctctggtcattcccttgtatgaactggtctaaagactgttagtggggtgttagttgatttttcctggtatactgtttcttggctgacactactggtcaagtaagaaatttgtaaataaatttcttttggttcttattatctatatctgtgactgactttaaaaaggtatttgacacttgaaatttttttcaaatatgtaatctcatcaccatgtcttatataagataatttactcctgtttcttactgcttctcactgtttcctgtagtgaagttctctaaacttgttaagttatacctggtgttgggattagaagtccttacataagaattgactcttaatctctgagtgactataactccctgatttctttgctatatatgacaaaatatttgataaatagcagcaacctgaacctgtcaaactagtgaatgcagcccagttcatattagaagagcaagagactggacatgcttcagtatttgcttttcttttggtagccagaatgttacctgaaagctagcaaa

SEQ ID NO: 317913 - DNA, 1547 bp, Homo sapiens
gagtcaatcacctcagatctctcaagcagtccagcctacgcaacagtactccacctctgcgcctgtgcggggagggtaaggcggggccagcaacttcctcagctggagggagagcgcacggtggagccgccagttgagaaggactctgatccggctcagctttccaatcagctgcggaaggagccacgctttcgggggttgcaagatggcggccaccagtggaactgatgagccggtttccggggagttggtgtctgtggcacatgcgctttctctcccagcagagtcgtatggcaacgatcctgacattgagatggcttgggccatgagagcaatgcagcatgctgaagtctattacaagctgatttcatcagttgacccacagttcctgaaactcaccaaagtagatgaccaaatttactctgagttccggaaaaattttgagacccttaggatagatgtgttggacccagaagaactcaagtcagaatcagccaaagagaagtggaggccattctgcttgaagtttaatgggattgttgaagacttcaactatggtactttgctgcgactagattgttctcagggctacactgaggaaaacaccatctttgcgggaaggctataacaaagctgtttatatcagtgttcaggacaaagaaggagagaaaggagtcaacaatggaggagaaaaaagagctgacagtggagaagaagagaacaccaagaatggaggagagaaaggagctgatagtggagaagaaaaagaggaaggaatcaacagagaagacaaaactgacaaaggaggagaaaaagggaaagaagctgacaaagaaatcaacaaaagtggtgaaaaagctatgtaaggtatacagggaacagcactctagaagctatgactcaattgagactacaagtaccacggtgctacttgcacagacccctttggttaaatgtaaattcttgtacaattgaaggatacgcagaaggacatctttctagtctaacagtcaggagctgctctggtcattcccttgtatgaactggtctaaagactgttagtggggtgttagttgatttttcctggtatactgtttcttggctgacactactggtcaagtaagaaatttgtaaataaatttcttttggttcttattatctatatctgtgactgactttaaaaaggtatttgacacttgaaatttttttcaaatatgtaatctcatcaccatgtcttatataagataatttactcctgtttcttactgcttctcactgtttcctgtagtgaagttctctaaacttgttaagttatacctggtgttgggattagaagtccttacataagaattgactcttaatctctgagtgactataactccctgatttctttgctatatatgacaaaatatttgataaatagcagcaacctgaacctgtcaaactagtgaatgcagcccagttcatattagaagagcaagagactggacatgcttcagtatttgcttttcttttggtagccagaatgttacctgaaagctagcaaa

SEQ ID NO: 317914 - DNA, 773 bp, Homo sapiens
  misc_feature (730)..(730): n is a, c, g, or t
  misc_feature (744)..(745): n is a, c, g, or t
  misc_feature (752)..(752): n is a, c, g, or t
  misc_feature (754)..(754): n is a, c, g, or t
  misc_feature (759)..(759): n is a, c, g, or t
  misc_feature (761)..(761): n is a, c, g, or t
  misc_feature (765)..(765): n is a, c, g, or t
gagtcaatcacctcagatctctcaagcagtccagcctacgcaacagtactccacctctgcgcctgtgcggggagggtaaggcggggccagcaacttcctcagctggagggagagcgcacggtggagccgccagttgagaaggactctgatccggctcagctttccaatcagctgcggaaggagccacgctttcgggggttgcaagatggcggccaccagtggaactgatgagccggtttccggggagttggtgtctgtggcacatgcgctttctctcccagcagagtcgtatggcaacgatcctgacattgagatggcttgggccatgagagcaatgcagcatgctgaagtctattacaagctgatttcatcagttgacccacagttcctgaaactcaccaaagtagatgaccaaatttactctgagttccggaaaaattttgagacccttaggatagatgtgttggacccagaagaactcaagtcagaatcagccaaagagaagtggaggccattctgcttgaagtttaatgggattgttgaagacttcaactatggtactttgctgcgactagattgttctcagggctacactgaggaaaacaccatctttgcccccaggatacaattctttgccattgaaattgctcggaaccgggaaggctataacaaagctgtttatatcagtgttcaggacaaagaaggagagaaaggagtcaacaacagagcnagactccatctcannaaaaaanangaagnanaagnaaaaaaaa

SEQ ID NO: 317915 - DNA, 607 bp, Homo sapiens
gagtcaatcacctcagatctctcaagcagtccagcctacgcaacagtactccacctctgcgcctgtgcggggagggtaaggcggggccagcaacttcctcagctggagggagagcgcacggtggagccgccagttgagaaggactctgatccggctcagctttccaatcagctgcggaaggagccacgctttcgggggttgcaagatggcggccaccagtggaactgatgagccggtttccggggagttggtgtctgtggcacatgcgctttctctcccagcagagtcgtatggcaacgatcctgacattgagatggcttgggccatgagagcaatgcagcatgctgaagtctattacaagctgatttcatcagttgacccacagttcctgaaactcaccaaagtagatgaccaaatttactctgagttccggaaaaattttgagacccttaggatagatgtgttggacccagaagaactcaagtcagaatcagccaaagagaagtggaggccattctgcttgaagtttaatgggattgttgaagacttcaactatggtactttgctgcgactagattgaaagtcagccctcgacacaagggtttgt

SEQ ID NO: 317916 - DNA, 1195 bp, Homo sapiens
gagtcaatcacctcagatctctcaagcagtccagcctacgcaacagtactccacctctgcgcctgtgcggggagggtaaggcggggccagcaacttcctcagctggagggagagcgcacggtggagccgccagttgagaaggactctgatccggctcagctttccaatcagctgcggaaggagccacgctttcgggggttgcaagatggcggccaccagtggaactgatgagccggtttccggggagttggtgtctgtggcacatgcgctttctctcccagcagagtcgtatggcaacgatcctgacattgagatggcttgggccatgagagcaatgcagcatgctgaagtctattacaagctgatttcatcagttgacccacagttcctgaaactcaccaaagtagatgaccaaatttactctgagttccggaaaaattttgagacccttaggatagatgtgttggacccagaagaactcaagtcagaatcagccaaagagaagtggaggccattctgcttgaagtttaatgggattgttgaagacttcaactatggtactttgctgcgactagattgttctcagggctacactgaggaaaacaccatctttgcccccaggatacaattctttgccattgaaattgctcggaaccgggaaggctataacaaagctgtttatatcagtgttcaggacaaagaaggagagaaaggagtcaacaatggaggagaaaaaagagctgacagtggagaagaagagaacaccaagaatggaggagagaaaggagctgatagtggagaagaaaaagaggaaggaatcaacagagaagacaaaactgacaaaggaggagaaaaagggaaagaagctgacaaagaaatcaacaaaagtggtgaaaaagctatgtaaggtatacagggaacagcactctagaagctatgactcaattgagactacaagtaccacggtgctacttgcacagacccctttggttaaatgtaaattcttgtacaattgaaggatacgcagaaggacatctttctagtctaacagtcaggagctgctctggtcattcccttgtatgaactggtctaaagactgttagtggggtgttagttgatttttcctggtatactgtttcttggctgacactactggtcaagtaagaaatttgtaaataaatttcttttggttctt

SEQ ID NO: 317917 - DNA, 1339 bp, Homo sapiens
  misc_feature (1197)..(1198): n is a, c, g, or t
gagtcaatcacctcagatctctcaagcagtccagcctacgcaacagtactccacctctgcgcctgtgcggggagggtaaggcggggccagcaacttcctcagctggagggagagcgcacggtggagccgccagttgagaaggactctgatccggctcagctttccaatcagctgcggaaggagccacgctttcgggggttgcaagatggcggccaccagtggaactgatgagccggtttccggggagttggtgtctgtggcacatgcgctttctctcccagcagagtcgtatggcaacgatcctgacattgagatggcttgggccatgagagcaatgcagcatgctgaagtctattacaagctgatttcatcagttgacccacagttcctgaaactcaccaaagtagatgaccaaatttactctgagttccggaaaaattttgagacccttaggatagatgtgttggacccagaagaactcaagtcagaatcagccaaagagaagtggaggccattctgcttgaagtttaatgggattgttgaagacttcaactatggtactttgctgcgactagattgttctcagggctacactgaggaaaacaccatctttgcccccaggatacaattctttgccattgaaattgctcggaaccgggaaggctataacaaagctgtttatatcagtgttcaggacaaagaaggagagaaaggagtcaacaatggaggagaaaaaagagctgacagtggagaagaagagaacaccaagaatggaggagagaaaggagctgatagtggagaagaaaaagaggaaggaatcaacagagaagacaaaactgacaaaggaggagaaaaagggaaagaagctgacaaagaaatcaacaaaagtggtgaaaaagctatgtaaggtatacagggaacagcactctagaagctatgactcaattgagactacaagtaccacggtgctacttgcacagacccctttggttaaatgtaaattcttgtacaattgaaggatacgcagaaggacatctttctagtctaacagtcaggagctgctctggtcattcccttgtatgaactggtctaaagactgttagtggggtgttagttgatttttcctggtatactgtttcttggctgacactactggtcaagtaagaaatttgtaaataaatttcttttggttctttnntaaaaagttattctgttgttgtaaatgttataaaactctgggggggggcccggtaccccaattaccctttagtgaggttgttttccaattaattggcggtggtttacaaaacgtgtggaatggtaaaaccctgcgttaccc

SEQ ID NO: 317918 - DNA, 1235 bp, Homo sapiens
atttgggaagttctctgttattatccctttgaataaactttctactctgatctctctctctacctcctctttaaggccagtcattcttagatttgcccttctgaggctattttctacatcttgtaggcatgcttcattctttttccttttgtcacctctcattgtgcattttcaaatagcttgtcttcaggctcactaattcttctgcttaagtctgctgttaagagactctgatgataatcaattctgttcacttttcagcccccaggatacaattctttgccattgaaattgctcggaaccgggaaggctataacaaagctgtttatatcagtgttcaggacaaagaaggagagaaaggagtcaacaatggaggagaaaaaagagctgacagtggagaagaagagaacaccaagaatggaggagagaaaggagctgatagtggagaagaaaaagaggaaggaatcaacagagaagacaaaactgacaaaggaggagaaaaagggaaagaagctgacaaagaaatcaacaaaagtggtgaaaaagctatgtaaggtatacagggaacagcactctagaagctatgactcaattgagactacaagtaccacggtgctacttgcacagacccctttggttaaatgtaaattcttgtacaattgaaggatacgcagaaggacatctttctagtctaacagtcaggagctgctctggtcattcccttgtatgaactggtctaaagactgttagtggggtgttagttgatttttcctggtatactgtttcttggctgacactactggtcaagtaagaaatttgtaaataaatttcttttggttcttattatctatatctgtgactgactttaaaaaggtatttgacacttgaaatttttttcaaatatgtaatctcatcaccatgtcttatataagataatttactcctgtttcttactgcttctcactgtttcctgtagtgaagttctctaaacttgttaagttatacctggtgttgggattagaagtccttacataagaattgactcttaatctctgagtgactataactccctgatttctttgctatatatgacaaaatatttgataaatagcagcaacctgaacctgtcaaactagtgaatgcagcccagttcatattagaagagcaagagactggacatgcttcagtatttgcttttcttttggtagccagaatgttacctgaaagctagcaaa

SEQ ID NO: 317919 - DNA, 1083 bp, Homo sapiens
gagtcaatcacctcagatctctcaagcagtccagcctacgcaacagtactccacctctgcgcctgtgcggggagggtaaggcggggccagcaacttcctcagctggagggagagcgcacggtggagccgccagttgagaaggactctgatccggctcagctttccaatcagctgcggaaggagccacgctttcgggggttgcaagatggcggccaccagtggaactgatgagccggtttccggggagttggtgtctgtggcacatgcgctttctctcccagcagagtcgtatggcaacgatcctgacattgagatggcttgggccatgagagcaatgcagcatgctgaagtctattacaagctgatttcatcagttgacccacagttcctgaaactcaccaaagtagatgaccaaatttactctgagttccggaaaaattttgagacccttaggatagatgtgttggacccagaagaactcaagtcagaatcagccaaagagcccccaggatacaattctttgccattgaaattgctcggaaccgggaaggctataacaaagctgtttatatcagtgttcaggacaaagaaggagagaaaggagtcaacaatggaggagaaaaaagagctgacagtggagaagaagagaacaccaagaatggaggagagaaaggagctgatagtggagaagaaaaagaggaaggaatcaacagagaagacaaaactgacaaaggaggagaaaaagggaaagaagctgacaaagaaatcaacaaaagtggtgaaaaagctatgtaaggtatacagggaacagcactctagaagctatgactcaattgagactacaagtaccacggtgctacttgcacagacccctttggttaaatgtaaattcttgtacaattgaaggatacgcagaaggacatctttctagtctaacagtcaggagctgctctggtcattcccttgtatgaactggtctaaagactgttagtggggtgttagttgatttttcctggtatactgtttcttggctgacactactggtcaagtaagaaatttgtaaataaatttcttttggttctt

SEQ ID NO: 317920 - DNA, 478 bp, Homo sapiens
gacatgtggggtgaggactagatatgctgtccagctagggtagagggccagtgtatgtaatggcacagagttgtaaaattgcatggaaggaaggtacatgagcacataggttgtcagtatgactagagtcaagatgggtagagaatctataggaaaggaagttggagagaaagccagggtctctagacaatggatgatttcgtatcatgggaaagactggtttttatctcgtagatggaagagagccactgaaccacagtcagggaaataatataattgtgttttccatttggaatcactttggtagatagaaccattattatctttgttacgatattcccttttgtcattctcatgaaaggctttatcccaacctatgtatttgataaggcatggtgggggaggcaaacagttaaatgcattaacttttctggattgttcggtggtggaaaattcattgtagtcactgtaggtggcc

SEQ ID NO: 317921 - DNA, 280 bp, Homo sapiens
aaatggctccctcactatggacttagccactttgagggctgaacagtagctcatccactctctggttttcctttggaattcagtaatgaactcattaaatcaccaacttgttgtgacaggaagtcattcagatgctgatgctattgccatggaaaccatccctctgcgaggagctctgtctgtctttgtcgaggagcactccagctccataattactgtcacccccaaataacacagagccatcacgactgtgagcaagtccagaagcaggggcacacag

SEQ ID NO: 317922 - DNA, 482 bp, Homo sapiens
tggattggcgaccacggccgtcgcggacgcgtgggctcagcttgagacactccagccaagggtcctccggacccgatcctgcagctctttctggaccttcaggcacccccaagcgtgcagctctgtcccagccttcactgtgtgtgagaggtctcctgggttggggcccagcccctctagagtagctggtggccagggatgaaccttgcccagccgtggtggcccccaggcctggtccccaagagctttggaggcttggattcctgggcctggcccaggtggctgtttccctgaggaccagaactgctcattttagcttgagtgatggcttcaggggttggaagttcagcccaaactgaagggggccatgccttgtccagcactgttctgtcagtctcccccaggggtggggggtatggggaccattcattccctggcattaatcccttagagggaataataaagctttttatttctctgtg

SEQ ID NO: 317923 - DNA, 3073 bp, Homo sapiens
atctccaacaagacagaattactcataattggtttttaagacacattagggaagctgcaatcctgtgttcatgcgattgatccccggaaagatgtcagctcctcagattgtgtttcttcagcaagttggttacttagaccttttacatgggtgggagtttaaggcttggcaccccatctcaactaggcttactcttcaccttccaggtgtgactctatctctcagaaaatttcttcattttctttctgcataatgtgtgatctgccgcagtatgttgagcaccccttggctgaccacgtatcccacttggagaatgtgtcagaggatgagataaaccgactgctggggatggtggtggatgtggagaatctcttcatgtctgttcacaaggaagaggacacagacaccaagcaggtctatttctacctcttcaagctactgcggaaatgcatcctgcagatgacccggcctgtggtggaggggtccctgggcagccctccatttgagaaacctaatattgagcagggtgtgctgaactttgtgcagtacaagtttagtcacctggctccccgggagcggcagacgatgttcgagctctcaaagatgttcttgctctgccttaactactggaagcttgagacacctgcccagtttcggcagaggtctcaggctgaggacgtggctacctacaaggtcaattacaccagatggctctgttactgccacgtgccccagagctgtgatagcctcccccgctacgaaaccactcatgtctttgggcgaagccttctccggtccattttcaccgttacccgccggcagctgctggaaaagttccgagtggagaaggacaaattggtgcccgagaagaggaccctcatcctcactcacttccccacccaagtaaggctccttctggcctaccaggatttggccccaagttcacatcctccctgttgtccccttttttccaggaaggcttcctggattggtccctcctctccctccatgggccttttgggatctgggcgtctacctggcagacttgcccatggcccagaagcaacttgctagtactagtctggggatggcagattcctgtccatgctggaggaggagatctatggggcaaactctccaatctgggagtcaggcttcaccatgccaccctcagaggggacacagctggttccccggccagcttcagtcagtgcagcggttgttcccagcacccccatcttcagccccagcatgggtgggggcagcaacagctccctgagtctggattctgcaggggccgagcctatgccaggcgagaagaggacgctcccagagaacctgaccctggaggatgccaagcggctccgtgtgatgggtgacatccccatggagctggtcaatgaggtcatgctgaccatcactgaccctgctgccatgctggggcctgagacgagcctgctttcggccaatgcggcccgggatgagacagcccgcctggaggagcgccgcggcatcatcgagttccatgtcatcggcaactcactgacgcccaaggccaaccggcgggtgttgctgtggctcgtggggctgcagaatgtcttttcccaccagctgccgcgcatgcctaaggagtatatcgcccgcctcgtctttgacccgaagcacaagactctggccttgatcaaggatgggcgggtcatcggtggcatctgcttccgcatgtttcccacccagggcttcacggagattgtcttctgtgctgtcacctcgaatgagcaggtcaagggttatgggacccacctgatgaaccacctgaaggagtatcacatcaagcacaacattctctacttcctcacctacgccgacgagtacgccatcggctacttcaaaaagcagggtttctccaaggacatcaaggtgcccaagagccgctacctgggctacatcaaggactacgagggagcgacgctgatggagtgtgagctgaatccccgcatcccctacacggagctgtcccacatcatcaagaagcagaaagagatcatcaagaagctgattgagcgcaaacaggcccagatccgcaaggtctacccggggctcagctgcttcaaggagggcgtgaggcagatccctgtggagagcgttcctggcattcgagagacaggctggaagccattggggaaggagaaggggaaggagctgaaggaccccgaccagctctacacaaccctcaaaaacctgctggcccaaatcaagtctcaccccagtgcctggcccttcatggagcctgtgaagaagtcggaggcccctgactactacgaggtcatccgcttccccattgacctgaagaccatgactgagcggctgcgaagccgctactacgtgacccggaagctctttgtggccgacctgcagcgggtcatcgccaactgtcgcgagtacaaccccccggacagcgagtactgccgctgtgccagcgccctggagaagttcttctacttcaagctcaaggagggaggcctcattgacaagtaggcccatctttgggccgcagccctgacctggaatgtctccacctcggattctgatctgatccttagggggtgccctggccccacggacccgactcagcttgagacactccagccaagggtcctccggacccgatcctgcagctctttctggaccttcaggcacccccaagcgtgcagctctgtcccagccttcactgtgtgtgagaggtctcctgggttggggcccagcccctctagagtagctggtggccagggatgaaccttgcccagccgtggtggcccccaggcctggtccccaagagctttggaggcttggattcctgggcctggcccaggtggctgtttccctgaggaccagaactgctcattttagcttgagtgatggcttcaggggttggaagttcagcccaaactgaagggggccatgccttgtccagcactgttctgtcagtctcccccaggggtggggggtatggggaccattcattccctggcattaatcccttagagggaataataaagctttttatttctctgtg

SEQ ID NO: 317924 - DNA, 2666 bp, Homo sapiens
  misc_feature (11)..(11): n is a, c, g, or t
tagaggatccnccgacccgaagacccagctactgcggaaatgcatcctgcagatgacccggcctgtggtggaggggtccctgggcagccctccatttgagaaacctaatattgagcagggtgtgctgaactttgtgcagtacaagtttagtcacctggctccccgggagcggcagacgatgttcgagctctcaaagatgttcttgctctgccttaactactggaagcttgagacacctgcccagtttcggcagaggtctcaggctgaggacgtggctacctacaaggtcaattacaccagatggctctgttactgccacgtgccccagagctgtgatagcctcccccgctacgaaaccactcatgtctttgggcgaagccttctccggtccattttcaccgttacccgccggcagctgctggaaaagttccgagtggagaaggacaaattggtgcccgagaagaggaccctcatcctcactcacttccccacccaagtaaggctccttctggcctaccaggatttggccccaagttcacatcctccctgttgtccccttttttccaggaaggcttcctggattggtccctcctctccctccatgggccttttgggatctgggcgtctacctggcagacttgcccatggcccagaagcaacttgctagtactagtctggggatggcagattcctgtccatgctggaggaggagatctatggggcaaactctccaatctgggagtcaggcttcaccatgccaccctcagaggggacacagctggttccccggccagcttcagtcagtgcagcggttgttcccagcacccccatcttcagccccagcatgggtgggggcagcaacagctccctgagtctggattctgcaggggccgagcctatgccaggcgagaagaggacgctcccagagaacctgaccctggaggatgccaagcggctccgtgtgatgggtgacatccccatggagctggtcaatgaggtcatgctgaccatcactgaccctgctgccatgctggggcctgagacgagcctgctttcggccaatgcggcccgggatgagacagcccgcctggaggagcgccgcggcatcatcgagttccatgtcatcggcaactcactgacgcccaaggccaaccggcgggtgttgctgtggctcgtggggctgcagaatgtcttttcccaccagctgccgcgcatgcctaaggagtatatcgcccgcctcgtctttgacccgaagcacaagactctggccttgatcaaggatgggcgggtcatcggtggcatctgcttccgcatgtttcccacccagggcttcacggagattgtcttctgtgctgtcacctcgaatgagcaggtcaagggttatgggacccacctgatgaaccacctgaaggagtatcacatcaagcacaacattctctacttcctcacctacgccgacgagtacgccatcggctacttcaaaaagcagggtttctccaaggacatcaaggtgcccaagagccgctacctgggctacatcaaggactacgagggagcgacgctgatggagtgtgagctgaatccccgcatcccctacacggagctgtcccacatcatcaagaagcagaaagagatcatcaagaagctgattgagcgcaaacaggcccagatccgcaaggtctacccggggctcagctgcttcaaggagggcgtgaggcagatccctgtggagagcgttcctggcattcgagagacaggctggaagccattggggaaggagaaggggaaggagctgaaggaccccgaccagctctacacaaccctcaaaaacctgctggcccaaatcaagtctcaccccagtgcctggcccttcatggagcctgtgaagaagtcggaggcccctgactactacgaggtcatccgcttccccattgacctgaagaccatgactgagcggctgcgaagccgctactacgtgacccggaagctctttgtggccgacctgcagcgggtcatcgccaactgtcgcgagtacaaccccccggacagcgagtactgccgctgtgccagcgccctggagaagttcttctacttcaagctcaaggagggaggcctcattgacaagtaggcccatctttgggccgcagccctgacctggaatgtctccacctcggattctgatctgatccttagggggtgccctggccccacggacccgactcagcttgagacactccagccaagggtcctccggacccgatcctgcagctctttctggaccttcaggcacccccaagcgtgcagctctgtcccagccttcactgtgtgtgagaggtctcctgggttggggcccagcccctctagagtagctggtggccagggatgaaccttgcccagccgtggtggcccccaggcctggtccccaagagctttggaggcttggattcctgggcctggcccaggtggctgtttccctgaggaccagaactgctcattttagcttgagtgatggcttcaggggttggaagttcagcccaaactgaagggggccatgccttgtccagcactgttctgtcagtctcccccaggggtggggggtatggggaccattcattccctggcattaatcccttagagggaataataaagctttttatttctctgtg

SEQ ID NO: 317925 - DNA, 1980 bp, Homo sapiens
tgctagtacgaggctgggtgttaatcggccgaggggcaaactctccaatctgggagtcaggcttcaccatgccaccctcagaggggacacagctggttccccggccagcttcagtcagtgcagcggttgttcccagcacccccatcttcagccccagcatgggtgggggcagcaacagctccctgagtctggattctgcaggggccgagcctatgccaggcgagaagaggacgctcccagagaacctgaccctggaggatgccaagcggctccgtgtgatgggtgacatccccatggagctggtcaatgaggtcatgctgaccatcactgaccctgctgccatgctggggcctgagacgagcctgctttcggccaatgcggcccgggatgagacagcccgcctggaggagcgccgcggcatcatcgagttccatgtcatcggcaactcactgacgcccaaggccaaccggcgggtgttgctgtggctcgtggggctgcagaatgtcttttcccaccagctgccgcgcatgcctaaggagtatatcgcccgcctcgtctttgacccgaagcacaagactctggccttgatcaaggatgggcgggtcatcggtggcatctgcttccgcatgtttcccacccagggcttcacggagattgtcttctgtgctgtcacctcgaatgagcaggtcaagggttatgggacccacctgatgaaccacctgaaggagtatcacatcaagcacaacattctctacttcctcacctacgccgacgagtacgccatcggctacttcaaaaagcagggtttctccaaggacatcaaggtgcccaagagccgctacctgggctacatcaaggactacgagggagcgacgctgatggagtgtgagctgaatccccgcatcccctacacggagctgtcccacatcatcaagaagcagaaagagatcatcaagaagctgattgagcgcaaacaggcccagatccgcaaggtctacccggggctcagctgcttcaaggagggcgtgaggcagatccctgtggagagcgttcctggcattcgagagacaggctggaagccattggggaaggagaaggggaaggagctgaaggaccccgaccagctctacacaaccctcaaaaacctgctggcccaaatcaagtctcaccccagtgcctggcccttcatggagcctgtgaagaagtcggaggcccctgactactacgaggtcatccgcttccccattgacctgaagaccatgactgagcggctgcgaagccgctactacgtgacccggaagctctttgtggccgacctgcagcgggtcatcgccaactgtcgcgagtacaaccccccggacagcgagtactgccgctgtgccagcgccctggagaagttcttctacttcaagctcaaggagggaggcctcattgacaagtaggcccatctttgggccgcagccctgacctggaatgtctccacctcggattctgatctgatccttagggggtgccctggccccacggacccgactcagcttgagacactccagccaagggtcctccggacccgatcctgcagctctttctggaccttcaggcacccccaagcgtgcagctctgtcccagccttcactgtgtgtgagaggtctcctgggttggggcccagcccctctagagtagctggtggccagggatgaaccttgcccagccgtggtggcccccaggcctggtccccaagagctttggaggcttggattcctgggcctggcccaggtggctgtttccctgaggaccagaactgctcattttagcttgagtgatggcttcaggggttggaagttcagcccaaactgaagggggccatgccttgtccagcactgttctgtcagtctcccccaggggtggggggtatggggaccattcattccctggcattaatcccttagagggaataataaagctttttatttctctgtg

SEQ ID NO: 317926 - DNA, 3381 bp, Homo sapiens
agcgctggttgcccatgcggccctagggctgggagcgcggcgccgctctccgctgcgggggaggccatggcggaaccttcccaggccccgaccccggccccggctgcgcagccccggccccttcagtccccagcccctgccccaactccgactcctgcacccagcccggcttcagccccgattccgactcccaccccggcaccagcccctgccccagctgcagccccagccggcagcacagggactggggggcccggggtaggaagtgggggggccgggagcgggggggatccggctcgacctggcctgagccagcagcagcgcgccagtcagaggaaggcgcaagtccgggggctgccgcgcgccaagaagcttgagaagctaggggtcttctcggcttgcaaggccaatgaaacctgtaagtgtaatggctggaaaaaccccaagccccccactgcaccccgcatggatctgcagcagccagctgccaacctgagtgagctgtgccgcagttgtgagcaccccttggctgaccacgtatcccacttggagaatgtgtcagaggatgagataaaccgactgctggggatggtggtggatgtggagaatctcttcatgtctgttcacaaggaagaggacacagacaccaagcaggtctatttctacctcttcaagctactgcggaaatgcatcctgcagatgacccggcctgtggtggaggggtccctgggcagccctccatttgagaaacctaatattgagcagggtgtgctgaactttgtgcagtacaagtttagtcacctggctccccgggagcggcagacgatgttcgagctctcaaagatgttcttgctctgccttaactactggaagcttgagacacctgcccagtttcggcagaggtctcaggctgaggacgtggctacctacaaggtcaattacaccagatggctctgttactgccacgtgccccagagctgtgatagcctcccccgctacgaaaccactcatgtctttgggcgaagccttctccggtccattttcaccgttacccgccggcagctgctggaaaagttccgagtggagaaggacaaattggtgcccgagaagaggaccctcatcctcactcacttccccacccaagtaaggctccttctggcctaccaggatttggccccaagttcacatcctccctgttgtccccttttttccaggaaggcttcctggattggtccctcctctccctccatgggccttttgggatctgggcgtctacctggcagacttgcccatggcccagaagcaacttgctagtactagtctggggatggcagattcctgtccatgctggaggaggagatctatggggcaaactctccaatctgggagtcaggcttcaccatgccaccctcagaggggacacagctggttccccggccagcttcagtcagtgcagcggttgttcccagcacccccatcttcagccccagcatgggtgggggcagcaacagctccctgagtctggattctgcaggggccgagcctatgccaggcgagaagaggacgctcccagagaacctgaccctggaggatgccaagcggctccgtgtgatgggtgacatccccatggagctggtcaatgaggtcatgctgaccatcactgaccctgctgccatgctggggcctgagacgagcctgctttcggccaatgcggcccgggatgagacagcccgcctggaggagcgccgcggcatcatcgagttccatgtcatcggcaactcactgacgcccaaggccaaccggcgggtgttgctgtggctcgtggggctgcagaatgtcttttcccaccagctgccgcgcatgcctaaggagtatatcgcccgcctcgtctttgacccgaagcacaagactctggccttgatcaaggatgggcgggtcatcggtggcatctgcttccgcatgtttcccacccagggcttcacggagattgtcttctgtgctgtcacctcgaatgagcaggtcaagggttatgggacccacctgatgaaccacctgaaggagtatcacatcaagcacaacattctctacttcctcacctacgccgacgagtacgccatcggctacttcaaaaagcagggtttctccaaggacatcaaggtgcccaagagccgctacctgggctacatcaaggactacgagggagcgacgctgatggagtgtgagctgaatccccgcatcccctacacggagctgtcccacatcatcaagaagcagaaagagatcatcaagaagctgattgagcgcaaacaggcccagatccgcaaggtctacccggggctcagctgcttcaaggagggcgtgaggcagatccctgtggagagcgttcctggcattcgagagacaggctggaagccattggggaaggagaaggggaaggagctgaaggaccccgaccagctctacacaaccctcaaaaacctgctggcccaaatcaagtctcaccccagtgcctggcccttcatggagcctgtgaagaagtcggaggcccctgactactacgaggtcatccgcttccccattgacctgaagaccatgactgagcggctgcgaagccgctactacgtgacccggaagctctttgtggccgacctgcagcgggtcatcgccaactgtcgcgagtacaaccccccggacagcgagtactgccgctgtgccagcgccctggagaagttcttctacttcaagctcaaggagggaggcctcattgacaagtaggcccatctttgggccgcagccctgacctggaatgtctccacctcggattctgatctgatccttagggggtgccctggccccacggacccgactcagcttgagacactccagccaagggtcctccggacccgatcctgcagctctttctggaccttcaggcacccccaagcgtgcagctctgtcccagccttcactgtgtgtgagaggtctcctgggttggggcccagcccctctagagtagctggtggccagggatgaaccttgcccagccgtggtggcccccaggcctggtccccaagagctttggaggcttggattcctgggcctggcccaggtggctgtttccctgaggaccagaactgctcattttagcttgagtgatggcttcaggggttggaagttcagcccaaactgaagggggccatgccttgtccagcactgttctgtcagtctcccccaggggtggggggtatggggaccattcattccctggcattaatcccttagagggaataataaagctttttatttctctgtgaaaaaaacaacacaaggcaaacaccacacaagccacaaccacaaaaggggggcgcacaaaaaaatacc

SEQ ID NO: 317927 - DNA, 1286 bp, Homo sapiens
ggaaacggctttaacgagatggcgttcttgctagcgtcgactcgaatgagacaggtcaagggttatgggacccacctgatgaaccacctgaaggagtatcacatcaagcacaacattctctacttcctcacctacgccgacgagtacgccatcggctacttcaaaaagcagggtttctccaaggacatcaaggtgcccaagagccgctacctgggctacatcaaggactacgagggagcgacgctgatggagtatcatcaagaagctgattgagcgcaaacaggcccagatccgcaaggtctacccggggctcagctgcttcaaggagggcgtgaggcagatccctgtggagagcgttcctggcattcgagagacaggctggaagccattggggaaggagaaggggaaggagctgaaggaccccgaccagctctacacaaccctcaaaaacctgctggcccaaatcaagtctcaccccagtgcctggcccttcatggagcctgtgaagaagtcggaggcccctgactactacgaggtcatccgcttccccattgacctgaagaccatgactgagcggctgcgaagccgctactacgtgacccggaagctctttgtggccgacctgcagcgggtcatcgccaactgtcgcgagtacaaccccccggacagcgagtactgccgctgtgccagcgccctggagaagttcttctacttcaagctcaaggagggaggcctcattgacaagtaggcccatctttgggccgcagccctgacctggaatgtctccacctcggattctgatctgatccttagggggtgccctggccccacggacccgactcagcttgagacactccagccaagggtcctccggacccgatcctgcagctctttctggaccttcaggcacccccaagcgtgcagctctgtcccagccttcactgtgtgtgagaggtctcctgggttggggcccagcccctctagagtagctggtggccagggatgaaccttgcccagccgtggtggcccccaggcctggtccccaagagctttggaggcttggattcctgggcctggcccaggtggctgtttccctgaggaccagaactgctcattttagcttgagtgatggcttcaggggttggaagttcagcccaaactgaagggggccatgccttgtccagcactgttctgtcagtctcccccaggggtggggggtatggggaccattcattccctggcattaatcccttagagggaataataaagctttttatttctctgtg

SEQ ID NO: 317928 - DNA, 1090 bp, Homo sapiens
tcgctacccatacactggaagtcggacctgtcccacatcatcaagaagcagaaagagatcatcaagaagctgattgagcgcaaacaggcccagatccgcaaggtctacccggggctcagctgcttcaaggagggcgtgaggcagatccctgtggagagcgttcctggcattcgagagacaggctggaagccattggggaaggagaaggggaaggagctgaaggaccccgaccagctctacacaaccctcaaaaacctgctggcccaaatcaagtctcaccccagtgcctggcccttcatggagcctgtgaagaagtcggaggcccctgactactacgaggtcatccgcttccccattgacctgaagaccatgactgagcggctgcgaagccgctactacgtgacccggaagctctttgtggccgacctgcagcgggtcatcgccaactgtcgcgagtacaaccccccggacagcgagtactgccgctgtgccagcgccctggagaagttcttctacttcaagctcaaggagggaggcctcattgacaagtaggcccatctttgggccgcagccctgacctggaatgtctccacctcggattctgatctgatccttagggggtgccctggccccacggacccgactcagcttgagacactccagccaagggtcctccggacccgatcctgcagctctttctggaccttcaggcacccccaagcgtgcagctctgtcccagccttcactgtgtgtgagaggtctcctgggttggggcccagcccctctagagtagctggtggccagggatgaaccttgcccagccgtggtggcccccaggcctggtccccaagagctttggaggcttggattcctgggcctggcccaggtggctgtttccctgaggaccagaactgctcattttagcttgagtgatggcttcaggggttggaagttcagcccaaactgaagggggccatgccttgtccagcactgttctgtcagtctcccccaggggtggggggtatggggaccattcattccctggcattaatcccttagagggaataataaagctttttatttctctgtg

SEQ ID NO: 317929 - DNA, 3161 bp, Homo sapiens
agcgctggttgcccatgcggccctagggctgggagcgcggcgccgctctccgctgcgggggaggccatggcggaaccttcccaggccccgaccccggccccggctgcgcagccccggccccttcagtccccagcccctgccccaactccgactcctgcacccagcccggcttcagccccgattccgactcccaccccggcaccagcccctgccccagctgcagccccagccggcagcacagggactggggggcccggggtaggaagtgggggggccgggagcgggggggatccggctcgacctggcctgagccagcagcagcgcgccagtcagaggaaggcgcaagtccgggggctgccgcgcgccaagaagcttgagaagctaggggtcttctcggcttgcaaggccaatgaaacctgtaagtgtaatggctggaaaaaccccaagccccccactgcaccccgcatggatctgcagcagccagctgccaacctgagtgagctgtgccgcagttgtgagcaccccttggctgaccacgtatcccacttggagaatgtgtcagaggatgagataaaccgactgctggggatggtggtggatgtggagaatctcttcatgtctgttcacaaggaagaggacacagacaccaagcaggtctatttctacctcttcaagctactgcggaaatgcatcctgcagatgacccggcctgtggtggaggggtccctgggcagccctccatttgagaaacctaatattgagcagggtgtgctgaactttgtgcagtacaagtttagtcacctggctccccgggagcggcagacgatgttcgagctctcaaagatgttcttgctctgccttaactactggaagcttgagacacctgcccagtttcggcagaggtctcaggctgaggacgtggctacctacaaggtcaattacaccagatggctctgttactgccacgtgccccagagctgtgatagcctcccccgctacgaaaccactcatgtctttgggcgaagccttctccggtccattttcaccgttacccgccggcagctgctggaaaagttccgagtggagaaggacaaattggtgcccgagaagaggaccctcatcctcactcacttccccacccaagtaaggctccttctggcctaccaggatttggccccaagttcacatcctccctgttgtccccttttttccaggaaggcttcctggattggtccctcctctccctccatgggccttttgggatctgggcgtctacctggcagacttgcccatggcccagaagcaacttgctagtactagtctggggatggcagattcctgtccatgctggaggaggagatctatggggcaaactctccaatctgggagtcaggcttcaccatgccaccctcagaggggacacagctggttccccggccagcttcagtcagtgcagcggttgttcccagcacccccatcttcagccccagcatgggtgggggcagcaacagctccctgagtctggattctgcaggggccgagcctatgccaggcgagaagaggacgctcccagagaacctgaccctggaggatgccaagcggctccgtgtgatgggtgacatccccatggagctggtcaatgaggtcatgctgaccatcactgaccctgctgccatgctggggcctgagacgagcctgctttcggccaatgcggcccgggatgagacagcccgcctggaggagcgccgcggcatcatcgagttccatgtcatcggcaactcactgacgcccaaggccaaccggcgggtgttgctgtggctcgtggggctgcagaatgtcttttcccaccagctgccgcgcatgcctaaggagtatatcgcccgcctcgtctttgacccgaagcacaagactctggccttgatcaaggatgggcgggtcatcggtggcatctgcttccgcatgtttcccacccagggcttcacggagattgtcttctgtgctgtcacctcgaatgagcaggtcaagggttatgggacccacctgatgaaccacctgaaggagtatcacatcaagcacaacattctctacttcctcacctacgccgacgagtacgccatcggctacttcaaaaagcagggtttctccaaggacatcaaggtgcccaagagccgctacctgggctacatcaaggactacgagggagcgacgctgatggagtgtgagctgaatccccgcatcccctacacggagctgtcccacatcatcaagaagcagaaagagatcatcaagaagctgattgagcgcaaacaggcccagatccgcaaggtctacccggggctcagctgcttcaaggagggcgtgaggcagatccctgtggagagcgttcctggcattcgagagacaggctggaagccattggggaaggagaaggggaaggagctgaaggaccccgaccagctctacacaaccctcaaaaacctgctggcccaaatcaagtctcaccccagtgcctggcccttcatggagcctgtgaagaagtcggaggcccctgactactacgaggtcatccgcttccccattgacctgaagaccatgactgagcggctgcgaagccgctactacgtgacccggaagctctttgtggccgacctgcagcgggtcatcgccaactgtcgcgagtacaaccccccggacagcgagtactgccgctgtgccagcgccctggagaagttcttctacttcaagctcaaggagggaggcctcattgacaagtaggcccatctttgggccgcagccctgacctggaatgtctccacctcggattctgatctgatccttagggggtgccctggccccacggacccgactcagcttgagacactccagccaagggtcctccggacccgatcctgcagctctttctggaccttcaggcacccccaagcgtgcagctctgtcccagccttcactgtgtgtgagaggtctcctgggttggggcccagcccctctagagtagctggtggccagggatgaaccttgcccagccatgccttgtccagcactgttctgtcagtctcccccaggggtggggggtatggggaccattcattccctggcattaatcccttagagggaataataaagctttttatttctctgtg

SEQ ID NO: 317930 - DNA, 3501 bp, Homo sapiens
  misc_feature (3284)..(3284): n is a, c, g, or t
  misc_feature (3437)..(3437): n is a, c, g, or t
agcgctggttgcccatgcggccctagggctgggagcgcggcgccgctctccgctgcgggggaggccatggcggaaccttcccaggccccgaccccggccccggctgcgcagccccggccccttcagtccccagcccctgccccaactccgactcctgcacccagcccggcttcagccccgattccgactcccaccccggcaccagcccctgccccagctgcagccccagccggcagcacagggactggggggcccggggtaggaagtgggggggccgggagcgggggggatccggctcgacctggcctgagccagcagcagcgcgccagtcagaggaaggcgcaagtccgggggctgccgcgcgccaagaagcttgagaagctaggggtcttctcggcttgcaaggccaatgaaacctgtaagtgtaatggctggaaaaaccccaagccccccactgcaccccgcatggatctgcagcagccagctgccaacctgagtgagctgtgccgcagttgtgagcaccccttggctgaccacgtatcccacttggagaatgtgtcagaggatgagataaaccgactgctggggatggtggtggatgtggagaatctcttcatgtctgttcacaaggaagaggacacagacaccaagcaggtctatttctacctcttcaagctactgcggaaatgcatcctgcagatgacccggcctgtggtggaggggtccctgggcagccctccatttgagaaacctaatattgagcagggtgtgctgaactttgtgcagtacaagtttagtcacctggctccccgggagcggcagacgatgttcgagctctcaaagatgttcttgctctgccttaactactggaagcttgagacacctgcccagtttcggcagaggtctcaggctgaggacgtggctacctacaaggtcaattacaccagatggctctgttactgccacgtgccccagagctgtgatagcctcccccgctacgaaaccactcatgtctttgggcgaagccttctccggtccattttcaccgttacccgccggcagctgctggaaaagttccgagtggagaaggacaaattggtgcccgagaagaggaccctcatcctcactcacttccccacccaagtaaggctccttctggcctaccaggatttggccccaagttcacatcctccctgttgtccccttttttccaggaaggcttcctggattggtccctcctctccctccatgggccttttgggatctgggcgtctacctggcagacttgcccatggcccagaagcaacttgctagtactagtctggggatggcagattcctgtccatgctggaggaggagatctatggggcaaactctccaatctgggagtcaggcttcaccatgccaccctcagaggggacacagctggttccccggccagcttcagtcagtgcagcggttgttcccagcacccccatcttcagccccagcatgggtgggggcagcaacagctccctgagtctggattctgcaggggccgagcctatgccaggcgagaagaggacgctcccagagaacctgaccctggaggatgccaagcggctccgtgtgatgggtgacatccccatggagctggtcaatgaggtcatgctgaccatcactgaccctgctgccatgctggggcctgagacgagcctgctttcggccaatgcggcccgggatgagacagcccgcctggaggagcgccgcggcatcatcgagttccatgtcatcggcaactcactgacgcccaaggccaaccggcgggtgttgctgtggctcgtggggctgcagaatgtcttttcccaccagctgccgcgcatgcctaaggagtatatcgcccgcctcgtctttgacccgaagcacaagactctggccttgatcaaggatgggcgggtcatcggtggcatctgcttccgcatgtttcccacccagggcttcacggagattgtcttctgtgctgtcacctcgaatgagcaggtcaagggttatgggacccacctgatgaaccacctgaaggagtatcacatcaagcacaacattctctacttcctcacctacgccgacgagtacgccatcggctacttcaaaaagcagggtttctccaaggacatcaaggtgcccaagagccgctacctgggctacatcaaggactacgagggagcgacgctgatggagtgtgagctgaatccccgcatcccctacacggagctgtcccacatcatcaagaagcagaaagagatcatcaagaagctgattgagcgcaaacaggcccagatccgcaaggtctacccggggctcagctgcttcaaggagggcgtgaggcagatccctgtggagagcgttcctggcattcgagagacaggctggaagccattggggaaggagaaggggaaggagctgaaggaccccgaccagctctacacaaccctcaaaaacctgctggcccaaatcaagtctcaccccagtgcctggcccttcatggagcctgtgaagaagtcggaggcccctgactactacgaggtcatccgcttccccattgacctgaagaccatgactgagcggctgcgaagccgctactacgtgacccggaagctctttgtggccgacctgcagcgggtcatcgccaactgtcgcgagtacaaccccccggacagcgagtactgccgctgtgccagcgccctggagaagttcttctacttcaagctcaaggagggaggcctcattgacaagtaggcccatctttgggccgcagccctgacctgggttggggcccagcccctctagagtagctggtggccagggatgaaccttgcccagccgtggtggcccccaggcctggtccccaagagctttggaggcttggattcctgggcctggcccaggtggctgtttccctgaggaccagaactgctcattttagcttgagtgatggcttcaggggttggaagttcagcccaaactgaagggggccatgccttgtccagcactgttctgtcagtctcccccaggggtggggggtatggggaccattcattccctggcattaatcccttagagggaataataaagctttttatttctctgtgaaaaaaaaaaaaaaaaaactcgagaagtttcatagcaaatgtttaaaaaatagagattttgcagatgcatgttctgtattgtgaaaacaaatggtaaaattctttgaacaatgagaggaaaaaatctcctttacatggaggcactttgaattcatnccatcttctaagagaaagaggtgagattttctgcacaaacagagtaccatctgtggaaaagacaacattctgatttagaagaaagggctgaggaaattacacaaaagtgtatcgacacagaaagcttgaatactaatctaaatatgcatcatncacacggcatgaaaaaataaggtcagcttattctctttttttttgcatatttctaaaattaaag

SEQ ID NO: 317931 - DNA, 2402 bp, Homo sapiens
agcgctggttgcccatgcggccctagggctgggagcgcggcgccgctctccgctgcgggggaggccatggcggaaccttcccaggccccgaccccggccccggctgcgcagccccggccccttcagtccccagcccctgccccaactccgactcctgcacccagcccggcttcagccccgattccgactcccaccccggcaccagcccctgccccagctgcagccccagccggcagcacagggactggggggcccggggtaggaagtgggggggccgggagcgggggggatccggctcgacctggcctgagccagcagcagcgcgccagtcagaggaaggcgcaagtccgggggctgccgcgcgccaagaagcttgagaagctaggggtcttctcggcttgcaaggccaatgaaacctgtaagtgtaatggctggaaaaaccccaagccccccactgcaccccgcatggatctgcagcagccagctgccaacctgagtgagctgtgccgcagttgtgagcaccccttggctgaccacgtatcccacttggagaatgtgtcagaggatgagataaaccgactgctggggatggtggtggatgtggagaatctcttcatgtctgttcacaaggaagaggacacagacaccaagcaggtctatttctacctcttcaagctactgcggaaatgcatcctgcagatgacccggcctgtggtggaggggtccctgggcagccctccatttgagaaacctaatattgagcagggtgtgctgaactttgtgcagtacaagtttagtcacctggctccccgggagcggcagacgatgttcgagctctcaaagatgttcttgctctgccttaactactggaagcttgagacacctgcccagtttcggcagaggtctcaggctgaggacgtggctacctacaaggtcaattacaccagatggctctgttactgccacgtgccccagagctgtgatagcctcccccgctacgaaaccactcatgtctttgggcgaagccttctccggtccattttcaccgttacccgccggcagctgctggaaaagttccgagtggagaaggacaaattggtgcccgagaagaggaccctcatcctcactcacttccccacccaagtaaggctccttctggcctaccaggatttggccccaagttcacatcctccctgttgtccccttttttccaggaaggcttcctggattggtccctcctctccctccatgggccttttgggatctgggcgtctacctggcagacttgcccatggcccagaagcaacttgctagtactagtctggggatggcagattcctgtccatgctggaggaggagatctatggggcaaactctccaatctgggagtcaggcttcaccatgccaccctcagaggggacacagctggttccccggccagcttcagtcagtgcagcggttgttcccagcacccccatcttcagccccagcatgggtgggggcagcaacagctccctgagtctggattctgcaggggccgagcctatgccaggcgagaagaggacgctcccagagaacctgaccctggaggatgccaagcggctccgtgtgatgggtgacatccccatggagctggtcaatgaggtcatgctgaccatcactgaccctgctgccatgctggggcctgagacgagcctgctttcggccaatgcggcccgggatgagacagcccgcctggaggagcgccgcggcatcatcgagttccatgtcatcggcaactcactgacgcccaaggccaaccggcgggtgttgctgtggctcgtggggctgcagaatgtcttttcccaccagctgccgcgcatgcctaaggagtatatcgcccgcctcgtctttgacccgtgcgtcccccagagagcccctcccccagggcagcacacccagttcccttcctcctcggcctcttcactcctcaaaattggggatcccctgctccccacttctgaggttcatcctttgagcattcttacttctcactgcccaaccctgactacagctcagacttccagggctctggggacctgaaggggacagtcaggggctatgacatgcccccctctctcttaggaagcacaagactctggccttgatcaaggatgggcgggtcatcggtggcatctgcttccgcatgtttcccacccagggcttcacggagattgtcttctgtgctgtcacctcgaatgagcaggtcaagggttatgggacccacctgatgaaccacctgaaggagtatcacatcaagcacaacattctctacttcctcacctacgccgacgagtacgccatcggctacttcaaaaagcaggtgacccgtagcctcgtcccacaccggtcctttgcctgga

SEQ ID NO: 317932 - DNA, 957 bp, Homo sapiens
agcgctggttgcccatgcggccctagggctgggagcgcggcgccgctctccgctgcgggggaggccatggcggaaccttcccaggccccgaccccggccccggctgcgcagccccggccccttcagtccccagcccctgccccaactccgactcctgcacccagcccggcttcagccccgattccgactcccaccccggcaccagcccctgccccagctgcagccccagccggcagcacagggactggggggcccggggtaggaagtgggggggccgggagcgggggggatccggctcgacctggcctgagccagcagcagcgcgccagtcagaggaaggcgcaagtccgggggctgccgcgcgccaagaagcttgagaagctaggggtcttctcggcttgcaaggccaatgaaacctgtaagtgtaatggctggaaaaaccccaagccccccactgcaccccgcatggatctgcagcagccagctgccaacctgagtgagctgtgccgcagttgtgagcaccccttggctgaccacgtatcccacttggagaatgtgtcagaggatgagataaaccgactgctggggatggtggtggatgtggagaatctcttcatgtctgttcacaaggaagaggacacagacaccaagcaggtctatttctacctcttcaagctactgcggaaatgcatcctgcagatgacccggcctgtggtggaggggtccctgggcagccctccatttgagaaacctaatattgagcagggtgtgctgaactttgtgcagtacaagtttagtcacctggctccccgggcttacatcctcattactattttttaaccaaatcaacaacaacctatttagctgttccccaaccttttcctccgaccccctaacaacccccctcctaatactaactacctcagctccttcacccagctaggttcacgctcggtt

SEQ ID NO: 317933 - DNA, 3117 bp, Homo sapiens
agcgctggttgcccatgcggccctagggctgggagcgcggcgccgctctccgctgcgggggaggccatggcggaaccttcccaggccccgaccccggccccggctgcgcagccccggccccttcagtccccagcccctgccccaactccgactcctgcacccagcccggcttcagccccgattccgactcccaccccggcaccagcccctgccccagctgcagccccagccggcagcacagggactggggggcccggggtaggaagtgggggggccgggagcgggggggatccggctcgacctggcctgagccagcagcagcgcgccagtcagaggaaggcgcaagtccgggggctgccgcgcgccaagaagcttgagaagctaggggtcttctcggcttgcaaggccaatgaaacctgtaagtgtaatggctggaaaaaccccaagccccccactgcaccccgcatggatctgcagcagccagctgccaacctgagtgagctgtgccgcagttgtgagcaccccttggctgaccacgtatcccacttggagaatgtgtcagaggatgagataaaccgactgctggggatggtggtggatgtggagaatctcttcatgtctgttcacaaggaagaggacacagacaccaagcaggtctatttctacctcttcaagctactgcggaaatgcatcctgcagatgacccggcctgtggtggaggggtccctgggcagccctccatttgagaaacctaatattgagcagggtgtgctgaactttgtgcagtacaagtttagtcacctggctccccgggagcggcagacgatgttcgagctctcaaagatgttcttgctctgccttaactactggaagcttgagacacctgcccagtttcggcagaggtctcaggctgaggacgtggctacctacaaggtcaattacaccagatggctctgttactgccacgtgccccagagctgtgatagcctcccccgctacgaaaccactcatgtctttgggcgaagccttctccggtccattttcaccgttacccgccggcagctgctggaaaagttccgagtggagaaggacaaattggtgcccgagaagaggaccctcatcctcactcacttccccaattcctgtccatgctggaggaggagatctatggggcaaactctccaatctgggagtcaggcttcaccatgccaccctcagaggggacacagctggttccccggccagcttcagtcagtgcagcggttgttcccagcacccccatcttcagccccagcatgggtgggggcagcaacagctccctgagtctggattctgcaggggccgagcctatgccaggcgagaagaggacgctcccagagaacctgaccctggaggatgccaagcggctccgtgtgatgggtgacatccccatggagctggtcaatgaggtcatgctgaccatcactgaccctgctgccatgctggggcctgagacgagcctgctttcggccaatgcggcccgggatgagacagcccgcctggaggagcgccgcggcatcatcgagttccatgtcatcggcaactcactgacgcccaaggccaaccggcgggtgttgctgtggctcgtggggctgcagaatgtcttttcccaccagctgccgcgcatgcctaaggagtatatcgcccgcctcgtctttgacccgaagcacaagactctggccttgatcaaggatgggcgggtcatcggtggcatctgcttccgcatgtttcccacccagggcttcacggagattgtcttctgtgctgtcacctcgaatgagcaggtcaagggttatgggacccacctgatgaaccacctgaaggagtatcacatcaagcacaacattctctacttcctcacctacgccgacgagtacgccatcggctacttcaaaaagcagggtttctccaaggacatcaaggtgcccaagagccgctacctgggctacatcaaggactacgagggagcgacgctgatggagtgtgagctgaatccccgcatcccctacacggagctgtcccacatcatcaagaagcagaaagagatcatcaagaagctgattgagcgcaaacaggcccagatccgcaaggtctacccggggctcagctgcttcaaggagggcgtgaggcagatccctgtggagagcgttcctggcattcgagagacaggctggaagccattggggaaggagaaggggaaggagctgaaggaccccgaccagctctacacaaccctcaaaaacctgctggcccaaatcaagtctcaccccagtgcctggcccttcatggagcctgtgaagaagtcggaggcccctgactactacgaggtcatccgcttccccattgacctgaagaccatgactgagcggctgcgaagccgctactacgtgacccggaagctctttgtggccgacctgcagcgggtcatcgccaactgtcgcgagtacaaccccccggacagcgagtactgccgctgtgccagcgccctggagaagttcttctacttcaagctcaaggagggaggcctcattgacaagtaggcccatctttgggccgcagccctgacctggaatgtctccacctcggattctgatctgatccttagggggtgccctggccccacggacccgactcagcttgagacactccagccaagggtcctccggacccgatcctgcagctctttctggaccttcaggcacccccaagcgtgcagctctgtcccagccttcactgtgtgtgagaggtctcctgggttggggcccagcccctctagagtagctggtggccagggatgaaccttgcccagccgtggtggcccccaggcctggtccccaagagctttggaggcttggattcctgggcctggcccaggtggctgtttccctgaggaccagaactgctcattttagcttgagtgatggcttcaggggttggaagttcagcccaaactgaagggggccatgccttgtccagcactgttctgtcagtctcccccaggggtggggggtatggggaccattcattccctggcattaatcccttagagggaataataaagctttttatttctctgtg

SEQ ID NO: 317934 - DNA, 3313 bp, Homo sapiens
agcgctggttgcccatgcggccctagggctgggagcgcggcgccgctctccgctgcgggggaggccatggcggaaccttcccaggccccgaccccggccccggctgcgcagccccggccccttcagtccccagcccctgccccaactccgactcctgcacccagcccggcttcagccccgattccgactcccaccccggcaccagcccctgccccagctgcagccccagccggcagcacagggactggggggcccggggtaggaagtgggggggccgggagcgggggggatccggctcgacctggcctgagccagcagcagcgcgccagtcagaggaaggcgcaagtccgggggctgccgcgcgccaagaagcttgagaagctaggggtcttctcggcttgcaaggccaatgaaacctgtaagtgtaatggctggaaaaaccccaagccccccactgcaccccgcatggatctgcagcagccagctgccaacctgagtgagctgtgccgcagttgtgagcaccccttggctgaccacgtatcccacttggagaatgtgtcagaggatgagataaaccgactgctggggatggtggtggatgtggagaatctcttcatgtctgttcacaaggaagaggacacagacaccaagcaggtctatttctacctcttcaagctactgcggaaatgcatcctgcagatgacccggcctgtggtggaggggtccctgggcagccctccatttgagaaacctaatattgagcagggtgtgctgaactttgtgcagtacaagtttagtcacctggctccccgggagcggcagacgatgttcgagctctcaaagatgttcttgctctgccttaactactggaagcttgagacacctgcccagtttcggcagaggtctcaggctgaggacgtggctacctacaaggtcaattacaccagatggctctgttactgccacgtgccccagagctgtgatagcctcccccgctacgaaaccactcatgtctttgggcgaagccttctccggtccattttcaccgttacccgccggcagctgctggaaaagttccgagtggagaaggacaaattggtgcccgagaagaggaccctcatcctcactcacttccccacccaagtaaggctccttctggcctaccaggatttggccccaagttcacatcctccctgttgtccccttttttccaggaaggcttcctggattggtccctcctctccctccatgggccttttgggatctgggcgtctacctggcagacttgcccatggcccagaagcaacttgctagtactagtctggggatggcagattcctgtccatgctggaggaggagatctatggggcaaactctccaatctgggagtcaggcttcaccatgccaccctcagaggggacacagctggttccccggccagcttcagtcagtgcagcggttgttcccagcacccccatcttcagccccagcatgggtgggggcagcaacagctccctgagtctggattctgcaggggccgagcctatgccaggcgagaagaggacgctcccagagaacctgaccctggaggatgccaagcggctccgtgtgatgggtgacatccccatggagctggtcaatgaggtcatgctgaccatcactgaccctgctgccatgctggggcctgagacgagcctgctttcggccaatgcggcccgggatgagacagcccgcctggaggagcgccgcggcatcatcgagttccatgtcatcggcaactcactgacgcccaaggccaaccggcgggtgttgctgtggctcgtggggctgcagaatgtcttttcccaccagctgccgcgcatgcctaaggagtatatcgcccgcctcgtctttgacccgaagcacaagactctggccttgatcaaggatgggcgggtcatcggtggcatctgcttccgcatgtttcccacccagggcttcacggagattgtcttctgtgctgtcacctcgaatgagcaggtcaagggttatgggacccacctgatgaaccacctgaaggagtatcacatcaagcacaacattctctacttcctcacctacgccgacgagtacgccatcggctacttcaaaaagcagggtttctccaaggacatcaaggtgcccaagagccgctacctgggctacatcaaggactacgagggagcgacgctgatggagtgtgagctgaatccccgcatcccctacacggagctgtcccacatcatcaagaagcagaaagagatcatcaagaagctgattgagcgcaaacaggcccagatccgcaaggtctacccggggctcagctgcttcaaggagggcgtgaggcagatccctgtggagagcgttcctggcattcgagagacaggctggaagccattggggaaggagaaggggaaggagctgaaggaccccgaccagctctacacaaccctcaaaaacctgctggcccaaatcaagtctcaccccagtgcctggcccttcatggagcctgtgaagaagtcggaggcccctgactactacgaggtcatccgcttccccattgacctgaagaccatgactgagcggctgcgaagccgctactacgtgacccggaagctctttgtggccgacctgcagcgggtcatcgccaactgtcgcgagtacaaccccccggacagcgagtactgccgctgtgccagcgccctggagaagttcttctacttcaagctcaaggagggaggcctcattgacaagtaggcccatctttgggccgcagccctgacctggaatgtctccacctcggattctgatctgatccttagggggtgccctggccccacggacccgactcagcttgagacactccagccaagggtcctccggacccgatcctgcagctctttctggaccttcaggcacccccaagcgtgcagctctgtcccagccttcactgtgtgtgagaggtctcctgggttggggcccagcccctctagagtagctggtggccagggatgaaccttgcccagccgtggtggcccccaggcctggtccccaagagctttggaggcttggattcctgggcctggcccaggtggctgtttccctgaggaccagaactgctcattttagcttgagtgatggcttcaggggttggaagttcagcccaaactgaagggggccatgccttgtccagcactgttctgtcagtctcccccaggggtggggggtatggggaccattcattccctggcattaatcccttagagggaataataaagctttttatttctctgtg

SEQ ID NO: 317935 - DNA, 3539 bp, Homo sapiens
agcgctggttgcccatgcggccctagggctgggagcgcggcgccgctctccgctgcgggggaggccatggcggaaccttcccaggccccgaccccggccccggctgcgcagccccggccccttcagtccccagcccctgccccaactccgactcctgcacccagcccggcttcagccccgattccgactcccaccccggcaccagcccctgccccagctgcagccccagccggcagcacagggactggggggcccggggtaggaagtgggggggccgggagcgggggggatccggctcgacctggcctgagccagcagcagcgcgccagtcagaggaaggcgcaagtccgggggctgccgcgcgccaagaagcttgagaagctaggggtcttctcggcttgcaaggccaatgaaacctgtaagtgtaatggctggaaaaaccccaagccccccactgcaccccgcatggatctgcagcagccagctgccaacctgagtgagctgtgccgcagttgtgagcaccccttggctgaccacgtatcccacttggagaatgtgtcagaggatgagataaaccgactgctggggatggtggtggatgtggagaatctcttcatgtctgttcacaaggaagaggacacagacaccaagcaggtctatttctacctcttcaagctactgcggaaatgcatcctgcagatgacccggcctgtggtggaggggtccctgggcagccctccatttgagaaacctaatattgagcagggtgtgctgaactttgtgcagtacaagtttagtcacctggctccccgggagcggcagacgatgttcgagctctcaaagatgttcttgctctgccttaactactggaagcttgagacacctgcccagtttcggcagaggtctcaggctgaggacgtggctacctacaaggtcaattacaccagatggctctgttactgccacgtgccccagagctgtgatagcctcccccgctacgaaaccactcatgtctttgggcgaagccttctccggtccattttcaccgttacccgccggcagctgctggaaaagttccgagtggagaaggacaaattggtgcccgagaagaggaccctcatcctcactcacttccccacccaagtaaggctccttctggcctaccaggatttggccccaagttcacatcctccctgttgtccccttttttccaggaaggcttcctggattggtccctcctctccctccatgggccttttgggatctgggcgtctacctggcagacttgcccatggcccagaagcaacttgctagtactagtctggggatggcagattcctgtccatgctggaggaggagatctatggggcaaactctccaatctgggagtcaggcttcaccatgccaccctcagaggggacacagctggttccccggccagcttcagtcagtgcagcggttgttcccagcacccccatcttcagccccagcatgggtgggggcagcaacagctccctgagtctggattctgcaggggccgagcctatgccaggcgagaagaggacgctcccagagaacctgaccctggaggatgccaagcggctccgtgtgatgggtgacatccccatggagctggtcaatgaggtcatgctgaccatcactgaccctgctgccatgctggggcctgagacgagcctgctttcggccaatgcggcccgggatgagacagcccgcctggaggagcgccgcggcatcatcgagttccatgtcatcggcaactcactgacgcccaaggccaaccggcgggtgttgctgtggctcgtggggctgcagaatgtcttttcccaccagctgccgcgcatgcctaaggagtatatcgcccgcctcgtctttgacccgtgcgtcccccagagagcccctcccccagggcagcacacccagttcccttcctcctcggcctcttcactcctcaaaattggggatcccctgctccccacttctgaggttcatcctttgagcattcttacttctcactgcccaaccctgactacagctcagacttccagggctctggggacctgaaggggacagtcaggggctatgacatgcccccctctctcttaggaagcacaagactctggccttgatcaaggatgggcgggtcatcggtggcatctgcttccgcatgtttcccacccagggcttcacggagattgtcttctgtgctgtcacctcgaatgagcaggtcaagggttatgggacccacctgatgaaccacctgaaggagtatcacatcaagcacaacattctctacttcctcacctacgccgacgagtacgccatcggctacttcaaaaagcagggtttctccaaggacatcaaggtgcccaagagccgctacctgggctacatcaaggactacgagggagcgacgctgatggagtgtgagctgaatccccgcatcccctacacggagctgtcccacatcatcaagaagcagaaagagatcatcaagaagctgattgagcgcaaacaggcccagatccgcaaggtctacccggggctcagctgcttcaaggagggcgtgaggcagatccctgtggagagcgttcctggcattcgagagacaggctggaagccattggggaaggagaaggggaaggagctgaaggaccccgaccagctctacacaaccctcaaaaacctgctggcccaaatcaagtctcaccccagtgcctggcccttcatggagcctgtgaagaagtcggaggcccctgactactacgaggtcatccgcttccccattgacctgaagaccatgactgagcggctgcgaagccgctactacgtgacccggaagctctttgtggccgacctgcagcgggtcatcgccaactgtcgcgagtacaaccccccggacagcgagtactgccgctgtgccagcgccctggagaagttcttctacttcaagctcaaggagggaggcctcattgacaagtaggcccatctttgggccgcagccctgacctggaatgtctccacctcggattctgatctgatccttagggggtgccctggccccacggacccgactcagcttgagacactccagccaagggtcctccggacccgatcctgcagctctttctggaccttcaggcacccccaagcgtgcagctctgtcccagccttcactgtgtgtgagaggtctcctgggttggggcccagcccctctagagtagctggtggccagggatgaaccttgcccagccgtggtggcccccaggcctggtccccaagagctttggaggcttggattcctgggcctggcccaggtggctgtttccctgaggaccagaactgctcattttagcttgagtgatggcttcaggggttggaagttcagcccaaactgaagggggccatgccttgtccagcactgttctgtcagtctcccccaggggtggggggtatggggaccattcattccctggcattaatcccttagagggaataataaagctttttatttctctgtg

SEQ ID NO: 317936 - DNA, 3259 bp, Homo sapiens
agcgctggttgcccatgcggccctagggctgggagcgcggcgccgctctccgctgcgggggaggccatggcggaaccttcccaggccccgaccccggccccggctgcgcagccccggccccttcagtccccagcccctgccccaactccgactcctgcacccagcccggcttcagccccgattccgactcccaccccggcaccagcccctgccccagctgcagccccagccggcagcacagggactggggggcccggggtaggaagtgggggggccgggagcgggggggatccggctcgacctggcctgagccagcagcagcgcgccagtcagaggaaggcgcaagtccgggggctgccgcgcgccaagaagcttgagaagctaggggtcttctcggcttgcaaggccaatgaaacctgtaagtgtaatggctggaaaaaccccaagccccccactgcaccccgcatggatctgcagcagccagctgccaacctgagtgagctgtgccgcagttgtgagcaccccttggctgaccacgtatcccacttggagaatgtgtcagaggatgagataaaccgactgctggggatggtggtggatgtggagaatctcttcatgtctgttcacaaggaagaggacacagacaccaagcaggtctatttctacctcttcaagctactgcggaaatgcatcctgcagatgacccggcctgtggtggaggggtccctgggcagccctccatttgagaaacctaatattgagcagggtgtgctgaactttgtgcagtacaagtttagtcacctggctccccgggagcggcagacgatgttcgagctctcaaagatgttcttgctctgccttaactactggaagcttgagacacctgcccagtttcggcagaggtctcaggctgaggacgtggctacctacaaggtcaattacaccagatggctctgttactgccacgtgccccagagctgtgatagcctcccccgctacgaaaccactcatgtctttgggcgaagccttctccggtccattttcaccgttacccgccggcagctgctggaaaagttccgagtggagaaggacaaattggtgcccgagaagaggaccctcatcctcactcacttccccacccaagtaaggctccttctggcctaccaggatttggccccaagttcacatcctccctgttgtccccttttttccaggaaggcttcctggattggtccctcctctccctccatgggccttttgggatctgggcgtctacctggcagacttgcccatggcccagaagcaacttgctagtactagtctggggatggcagattcctgtccatgctggaggaggagatctatggggcaaactctccaatctgggagtcaggcttcaccatgccaccctcagaggggacacagctggttccccggccagcttcagtcagtgcagcggttgttcccagcacccccatcttcagccccagcatgggtgggggcagcaacagctccctgagtctggattctgcaggggccgagcctatgccaggcgagaagaggacgctcccagagaacctgaccctggaggatgccaagcggctccgtgtgatgggtgacatccccatggagctggtcaatgaggtcatgctgaccatcactgaccctgctgccatgctggggcctgagacgagcctgctttcggccaatgcggcccgggatgagacagcccgcctggaggagcgccgcggcatcatcgagttccatgtcatcggcaactcactgacgcccaaggccaaccggcgggtgttgctgtggctcgtggggctgcagaatgtcttttcccaccagctgccgcgcatgcctaaggagtatatcgcccgcctcgtctttgacccgaagcacaagactctggccttgatcaaggatgggcgggtcatcggtggcatctgcttccgcatgtttcccacccagggcttcacggagattgtcttctgtgctgtcacctcgaatgagcaggtcaagggttatgggacccacctgatgaaccacctgaaggagtatcacatcaagcacaacattctctacttcctcacctacgccgacgagtacgccatcggctacttcaaaaagcagggtttctccaaggacatcaaggtgcccaagagccgctacctgggctacatcaaggactacgagggagcgacgctgatggagtgtgagctgaatccccgcatcccctacacggagctgtcccacatcatcaagaagcagaaagagatcatcaagaagctgattgagcgcaaacaggcccagatccgcaaggtctacccggggctcagctgcttcaaggagggcgtgaggcagatccctgtggagagcgttcctggcattcgagagacaggctggaagccattggggaaggagaaggggaaggagctgaaggaccccgaccagctctacacaaccctcactgtgaagaagtcggaggcccctgactactacgaggtcatccgcttccccattgacctgaagaccatgactgagcggctgcgaagccgctactacgtgacccggaagctctttgtggccgacctgcagcgggtcatcgccaactgtcgcgagtacaaccccccggacagcgagtactgccgctgtgccagcgccctggagaagttcttctacttcaagctcaaggagggaggcctcattgacaagtaggcccatctttgggccgcagccctgacctggaatgtctccacctcggattctgatctgatccttagggggtgccctggccccacggacccgactcagcttgagacactccagccaagggtcctccggacccgatcctgcagctctttctggaccttcaggcacccccaagcgtgcagctctgtcccagccttcactgtgtgtgagaggtctcctgggttggggcccagcccctctagagtagctggtggccagggatgaaccttgcccagccgtggtggcccccaggcctggtccccaagagctttggaggcttggattcctgggcctggcccaggtggctgtttccctgaggaccagaactgctcattttagcttgagtgatggcttcaggggttggaagttcagcccaaactgaagggggccatgccttgtccagcactgttctgtcagtctcccccaggggtggggggtatggggaccattcattccctggcattaatcccttagagggaataataaagctttttatttctctgtg

SEQ ID NO: 317937 - DNA, 3686 bp, Homo sapiens
  misc_feature (3469)..(3469): n is a, c, g, or t
  misc_feature (3622)..(3622): n is a, c, g, or t
agcgctggttgcccatgcggccctagggctgggagcgcggcgccgctctccgctgcgggggaggccatggcggaaccttcccaggccccgaccccggccccggctgcgcagccccggccccttcagtccccagcccctgccccaactccgactcctgcacccagcccggcttcagccccgattccgactcccaccccggcaccagcccctgccccagctgcagccccagccggcagcacagggactggggggcccggggtaggaagtgggggggccgggagcgggggggatccggctcgacctggcctgagccagcagcagcgcgccagtcagaggaaggcgcaagtccgggggctgccgcgcgccaagaagcttgagaagctaggggtcttctcggcttgcaaggccaatgaaacctgtaagtgtaatggctggaaaaaccccaagccccccactgcaccccgcatggatctgcagcagccagctgccaacctgagtgagctgtgccgcagttgtgagcaccccttggctgaccacgtatcccacttggagaatgtgtcagaggatgagataaaccgactgctggggatggtggtggatgtggagaatctcttcatgtctgttcacaaggaagaggacacagacaccaagcaggtctatttctacctcttcaagctactgcggaaatgcatcctgcagatgacccggcctgtggtggaggggtccctgggcagccctccatttgagaaacctaatattgagcagggtgtgctgaactttgtgcagtacaagtttagtcacctggctccccgggagcggcagacgatgttcgagctctcaaagatgttcttgctctgccttaactactggaagcttgagacacctgcccagtttcggcagaggtctcaggctgaggacgtggctacctacaaggtcaattacaccagatggctctgttactgccacgtgccccagagctgtgatagcctcccccgctacgaaaccactcatgtctttgggcgaagccttctccggtccattttcaccgttacccgccggcagctgctggaaaagttccgagtggagaaggacaaattggtgcccgagaagaggaccctcatcctcactcacttccccacccaagtaaggctccttctggcctaccaggatttggccccaagttcacatcctccctgttgtccccttttttccaggaaggcttcctggattggtccctcctctccctccatgggccttttgggatctgggcgtctacctggcagacttgcccatggcccagaagcaacttgctagtactagtctggggatggcagattcctgtccatgctggaggaggagatctatggggcaaactctccaatctgggagtcaggcttcaccatgccaccctcagaggggacacagctggttccccggccagcttcagtcagtgcagcggttgttcccagcacccccatcttcagccccagcatgggtgggggcagcaacagctccctgagtctggattctgcaggggccgagcctatgccaggcgagaagaggacgctcccagagaacctgaccctggaggatgccaagcggctccgtgtgatgggtgacatccccatggagctggtcaatgaggtcatgctgaccatcactgaccctgctgccatgctggggcctgagacgagcctgctttcggccaatgcggcccgggatgagacagcccgcctggaggagcgccgcggcatcatcgagttccatgtcatcggcaactcactgacgcccaaggccaaccggcgggtgttgctgtggctcgtggggctgcagaatgtcttttcccaccagctgccgcgcatgcctaaggagtatatcgcccgcctcgtctttgacccgaagcacaagactctggccttgatcaaggatgggcgggtcatcggtggcatctgcttccgcatgtttcccacccagggcttcacggagattgtcttctgtgctgtcacctcgaatgagcaggtcaagggttatgggacccacctgatgaaccacctgaaggagtatcacatcaagcacaacattctctacttcctcacctacgccgacgagtacgccatcggctacttcaaaaagcagggtttctccaaggacatcaaggtgcccaagagccgctacctgggctacatcaaggactacgagggagcgacgctgatggagtgtgagctgaatccccgcatcccctacacggagctgtcccacatcatcaagaagcagaaagagatcatcaagaagctgattgagcgcaaacaggcccagatccgcaaggtctacccggggctcagctgcttcaaggagggcgtgaggcagatccctgtggagagcgttcctggcattcgagagacaggctggaagccattggggaaggagaaggggaaggagctgaaggaccccgaccagctctacacaaccctcaaaaacctgctggcccaaatcaagtctcaccccagtgcctggcccttcatggagcctgtgaagaagtcggaggcccctgactactacgaggtcatccgcttccccattgacctgaagaccatgactgagcggctgcgaagccgctactacgtgacccggaagctctttgtggccgacctgcagcgggtcatcgccaactgtcgcgagtacaaccccccggacagcgagtactgccgctgtgccagcgccctggagaagttcttctacttcaagctcaaggagggaggcctcattgacaagtaggcccatctttgggccgcagccctgacctggaatgtctccacctcggattctgatctgatccttagggggtgccctggccccacggacccgactcagcttgagacactccagccaagggtcctccggacccgatcctgcagctctttctggaccttcaggcacccccaagcgtgcagctctgtcccagccttcactgtgtgtgagaggtctcctgggttggggcccagcccctctagagtagctggtggccagggatgaaccttgcccagccgtggtggcccccaggcctggtccccaagagctttggaggcttggattcctgggcctggcccaggtggctgtttccctgaggaccagaactgctcattttagcttgagtgatggcttcaggggttggaagttcagcccaaactgaagggggccatgccttgtccagcactgttctgtcagtctcccccaggggtggggggtatggggaccattcattccctggcattaatcccttagagggaataataaagctttttatttctctgtgaaaaaaaaaaaaaaaaaactcgagaagtttcatagcaaatgtttaaaaaatagagattttgcagatgcatgttctgtattgtgaaaacaaatggtaaaattctttgaacaatgagaggaaaaaatctcctttacatggaggcactttgaattcatnccatcttctaagagaaagaggtgagattttctgcacaaacagagtaccatctgtggaaaagacaacattctgatttagaagaaagggctgaggaaattacacaaaagtgtatcgacacagaaagcttgaatactaatctaaatatgcatcatncacacggcatgaaaaaataaggtcagcttattctctttttttttgcatatttctaaaattaaag

SEQ ID NO: 317938 - DNA, 3128 bp, Homo sapiens
agcgctggttgcccatgcggccctagggctgggagcgcggcgccgctctccgctgcgggggaggccatggcggaaccttcccaggccccgaccccggccccggctgcgcagccccggccccttcagtccccagcccctgccccaactccgactcctgcacccagcccggcttcagccccgattccgactcccaccccggcaccagcccctgccccagctgcagccccagccggcagcacagggactggggggcccggggtaggaagtgggggggccgggagcgggggggatccggctcgacctggcctgagccagcagcagcgcgccagtcagaggaaggcgcaagtccgggggctgccgcgcgccaagaagcttgagaagctaggggtcttctcggcttgcaaggccaatgaaacctgtaagtgtaatggctggaaaaaccccaagccccccactgcaccccgcatggatctgcagcagccagctgccaacctgagtgagctgtgccgcagttgtgagcaccccttggctgaccacgtatcccacttggagaatgtgtcagaggatgagataaaccgactgctggggatggtggtggatgtggagaatctcttcatgtctgttcacaaggaagaggacacagacaccaagcaggtctatttctacctcttcaagctactgcggaaatgcatcctgcagatgacccggcctgtggtggaggggtccctgggcagccctccatttgagaaacctaatattgagcagggtgtgctgaactttgtgcagtacaagtttagtcacctggctccccgggagcggcagacgatgttcgagctctcaaagatgttcttgctctgccttaactactggaagcttgagacacctgcccagtttcggcagaggtctcaggctgaggacgtggctacctacaaggtcaattacaccagatggctctgttactgccacgtgccccagagctgtgatagcctcccccgctacgaaaccactcatgtctttgggcgaagccttctccggtccattttcaccgttacccgccggcagctgctggaaaagttccgagtggagaaggacaaattggtgcccgagaagaggaccctcatcctcactcacttccccacccaagtaaggctccttctggcctaccaggatttggccccaagttcacatcctccctgttgtccccttttttccaggaaggcttcctggattggtccctcctctccctccatgggccttttgggatctgggcgtctacctggcagacttgcccatggcccagaagcaacttgctagtactagtctggggatggcagattcctgtccatgctggaggaggagatctatggggcaaactctccaatctgggagtcaggcttcaccatgccaccctcagaggggacacagctggttccccggccagcttcagtcagtgcagcggttgttcccagcacccccatcttcagccccagcatgggtgggggcagcaacagctccctgagtctggattctgcaggggccgagcctatgccaggcgagaagaggacgctcccagagaacctgaccctggaggatgccaagcggctccgtgtgatgggtgacatccccatggagctggtcaatgaggtcatgctgaccatcactgaccctgctgccatgctggggcctgagacgagcctgctttcggccaatgcggcccgggatgagacagcccgcctggaggagcgccgcggcatcatcgagttccatgtcatcggcaactcactgacgcccaaggccaaccggcgggtgttgctgtggctcgtggggctgcagaatgtcttttcccaccagctgccgcgcatgcctaaggagtatatcgcccgcctcgtctttgacccgaagcacaagactctggccttgatcaaggatgggcgggtcatcggtggcatctgcttccgcatgtttcccacccagggcttcacggagattgtcttctgtgctgtcacctcgaatgagcaggtcaagggttatgggacccacctgatgaaccacctgaaggagtatcacatcaagcacaacattctctacttcctcacctacgccgacgagtacgccatcggctacttcaaaaagcagggtttctccaaggacatcaaggtgcccaagagccgctacctgggctacatcaaggactacgagggagcgacgctgatggagtgtgagctgaatccccgcatcccctacacggagctgtcccacatcatcaagaagcagaaagagatcatcaagaagctgattgagcgcaaacaggcccagatccgcaaggtctacccggggctcagctgcttcaaggagggcgtgaggcagatccctgtggagagcgttcctggcattcgagagacaggctggaagccattggggaaggagaaggggaaggagctgaaggaccccgaccagctctacacaaccctcaaaaacctgctggcccaaatcaagtctcaccccagtgcctggcccttcatggagcctgtgaagaagtcggaggcccctgactactacgaggtcatccgcttccccattgacctgaagaccatgactgagcggctgcgaagccgctactacgtgacccggaagctctttgtggccgacctgcagcgggtcatcgccaactgtcgcgagtacaaccccccggacagcgagtactgccgctgtgccagcgccctggagaagttcttctacttcaagctcaaggagggaggcctcattgacaagtaggcccatctttgggccgcagccctgacctgggttggggcccagcccctctagagtagctggtggccagggatgaaccttgcccagccgtggtggcccccaggcctggtccccaagagctttggaggcttggattcctgggcctggcccaggtggctgtttccctgaggaccagaactgctcattttagcttgagtgatggcttcaggggttggaagttcagcccaaactgaagggggccatgccttgtccagcactgttctgtcagtctcccccaggggtggggggtatggggaccattcattccctggcattaatcccttagagggaataataaagctttttatttctctgtg

SEQ ID NO: 317939 - DNA, 3229 bp, Homo sapiens
agcgctggttgcccatgcggccctagggctgggagcgcggcgccgctctccgctgcgggggaggccatggcggaaccttcccaggccccgaccccggccccggctgcgcagccccggccccttcagtccccagcccctgccccaactccgactcctgcacccagcccggcttcagccccgattccgactcccaccccggcaccagcccctgccccagctgcagccccagccggcagcacagggactggggggcccggggtaggaagtgggggggccgggagcgggggggatccggctcgacctggcctgagccagcagcagcgcgccagtcagaggaaggcgcaagtccgggggctgccgcgcgccaagaagcttgagaagctaggggtcttctcggcttgcaaggccaatgaaacctgtaagtgtaatggctggaaaaaccccaagccccccactgcaccccgcatggatctgcagcagccagctgccaacctgagtgagctgtgccgcagttgtgagcaccccttggctgaccacgtatcccacttggagaatgtgtcagaggatgagataaaccgactgctggggatggtggtggatgtggagaatctcttcatgtctgttcacaaggaagaggacacagacaccaagcaggtctatttctacctcttcaagctactgcggaaatgcatcctgcagatgacccggcctgtggtggaggggtccctgggcagccctccatttgagaaacctaatattgagcagggtgtgctgaactttgtgcagtacaagtttagtcacctggctccccgggagcggcagacgatgttcgagctctcaaagatgttcttgctctgccttaactactggaagcttgagacacctgcccagtttcggcagaggtctcaggctgaggacgtggctacctacaaggtcaattacaccagatggctctgttactgccacgtgccccagagctgtgatagcctcccccgctacgaaaccactcatgtctttgggcgaagccttctccggtccattttcaccgttacccgccggcagctgctggaaaagttccgagtggagaaggacaaattggtgcccgagaagaggaccctcatcctcactcacttccccacccaagtaaggctccttctggcctaccaggatttggccccaagttcacatcctccctgttgtccccttttttccaggaaggcttcctggattggtccctcctctccctccatgggccttttgggatctgggcgtctacctggcagacttgcccatggcccagaagcaacttgctagtactagtctggggatggcagattcctgtccatgctggaggaggagatctatggggcaaactctccaatctgggagtcaggcttcaccatgccaccctcagaggggacacagctggttccccggccagcttcagtcagtgcagcggttgttcccagcacccccatcttcagccccagcatgggtgggggcagcaacagctccctgagtctggattctgcaggggccgagcctatgccaggcgagaagaggacgctcccagagaacctgaccctggaggatgccaagcggctccgtgtgatgggtgacatccccatggagctggtcaatgaggtcatgctgaccatcactgaccctgctgccatgctggggcctgagacgagcctgctttcggccaatgcggcccgggatgagacagcccgcctggaggagcgccgcggcatcatcgagttccatgtcatcggcaactcactgacgcccaaggccaaccggcgggtgttgctgtggctcgtggggctgcagaatgtcttttcccaccagctgccgcgcatgcctaaggagtatatcgcccgcctcgtctttgacccgaagcacaagactctggccttgatcaaggatgggcgggtcatcggtggcatctgcttccgcatgtttcccacccagggcttcacggagattgtcttctgtgctgtcacctcgaatgagcaggtcaagggttatgggacccacctgatgaaccacctgaaggagtatcacatcaagcacaacattctctacttcctcacctacgccgacgagtacgccatcggctacttcaaaaagcagggtttctccaaggacatcaaggtgcccaagagccgctacctgggctacatcaaggactacgagggagcgacgctgatggagtgtgagctgaatccccgcatcccctacacggagctgtcccacatcatcaagaagcagaaagagatcatcaagaagctgattgagcgcaaacaggcccagatccgcaaggtctacccggggctcagctgcttcaaggagggcgtgaggcagatccctgtggagagcgttcctggcattcgagagacaggctggaagccattggggaaggagaaggggaaggagctgaaggaccccgaccagctctacacaaccctcaaaaacctgctggcccaaatcaagtctcaccccagtgcctggcccttcatggagcctgtgaagaagtcggaggcccctgactactacgaggtcatccgcttccccattgacctgaagaccatgactgagcggctgcgaagccgctactacgtgacccggaagctctttgtggccgacctgcagcgggtcatcgccaactgtcgcgagtacaaccccccggacagcgagtactgccgctgtgccagcgccctggagaagttcttctacttcaagctcaaggagggaggcctcattgacaagtaggcccatctttgggccgcagccctgacctggaatgtctccacctcggattctgatctgatccttagggggtgccctggccccacggacccgactcagcttgagacactccagccaagggtcctccggacccgatcctgcagctctttctggaccttcaggcacccccaagcgtgcagctctgtcccagccttcactgtgtgtgagaggtctccaagagctttggaggcttggattcctgggcctggcccaggtggctgtttccctgaggaccagaactgctcattttagcttgagtgatggcttcaggggttggaagttcagcccaaactgaagggggccatgccttgtccagcactgttctgtcagtctcccccaggggtggggggtatggggaccattcattccctggcattaatcccttagagggaataataaagctttttatttctctgtg

SEQ ID NO: 317940 - DNA, 927 bp, Homo sapiens
aacccgggacctccttggtcagcccagggctgcagtgtaattaaattattacagctccctacagcctcgacatccctggggtcaagggatcctcctgccgcagcctcccaatattattggggctacaggcatgtatcaccacacctagcctggtggtgctactgtatattcatgtagtcttagataccgctgatgcttctgaatgttttcgcaggatgcaaagggggtcccgggttaacccgtgaccgctctttgtggccgacctgcagcgggtcatcgccaactgtcgcgagtacaaccccccggacagcgagtactgccgctgtgccagcgccctggagaagttcttctacttcaagctcaaggagggaggcctcattgacaagtaggcccatctttgggccgcagccctgacctggaatgtctccacctcggattctgatctgatccttagggggtgccctggccccacggacccgactcagcttgagacactccagccaagggtcctccggacccgatcctgcagctctttctggaccttcaggcacccccaagcgtgcagctctgtcccagccttcactgtgtgtgagaggtctcctgggttggggcccagcccctctagagtagctggtggccagggatgaaccttgcccagccgtggtggcccccaggcctggtccccaagagctttggaggcttggattcctgggcctggcccaggtggctgtttccctgaggaccagaactgctcattttagcttgagtgatggcttcaggggttggaagttcagcccaaactgaagggggccatgccttgtccagcactgttctgtcagtctcccccaggggtggggggtatggggaccattcattccctggcattaatcccttagagggaataataaagctttttatttctctgtg

SEQ ID NO: 317941 - DNA, 419 bp, Homo sapiens
ggggcagagcttttctatagagagcacccgagagagagaggagaaggagaaccttgtccctggccagggagcatcttcctttgtctaagaaggccctgcgggctgctcacacctcattcctggttttatcccccacccaccccttctcagggtgtgctgaactttgtgcagtacaagtttagtcacctggctccccgggagcggcagacgatgttcgagctctcaaagatgttcttgctctgccttaactactggaagcttgagacacctgcccagtttcggcagaggtctcaggctgaggacgtggctacctacaaggtcaattacaccaggtaggcccagccaggggcagcttcgggggaggcttgcaggcccagcctgggttcagtggtttccgccctcacctgtctccccctcga

SEQ ID NO: 317942 - DNA, 742 bp, Homo sapiens
actctatctccagagcgggagccagacgccgacccaagcggaagtgacgttaggtgtccgccggaggtgtcgttggtgtgttgcgcgactggccttgagggagagctggggcctgctcccggagagatacggctatgtcgatcgaaatcgaatcttcggagtgagtcctgcggtggggatgttcgcgccttgccgggggcctggaggttaagggtgtggggcggagggtactcgggagaaggcatccgagaggccagggagtggagggccatttccttgcccccaaagaagcatcttggatctcgctacctcggaggtgggcccacaggaaagtagcagctctcagacgtgaagcccaaaacctcgagggaggtggcacgggtggggaaaacacaccttgcagacctaagttctgtccttggccgactgctggcgcgctgtgattgaccaaattaaggatccactctggactccagtctaattatctgcgcaaggggataggtctctttaagccttgcttctctccctgtccagcttatgcaatgtgattcgttgtctctgcttatacggcccctttgcttttctctgcctagcgtttatcactcagtattgtcactgtttgataacctcaccccaaactagcctttgtcggtgcctaggagctccttttccttgtggtctcagtgtctagcataccttagaggaagagttaattgcttttggaatgaatgaacaactagct

SEQ ID NO: 317943 - DNA, 7216 bp, Homo sapiens
  misc_feature (4498)..(4498): n is a, c, g, or t
  misc_feature (5055)..(5055): n is a, c, g, or t
  misc_feature (5061)..(5061): n is a, c, g, or t
  misc_feature (5075)..(5075): n is a, c, g, or t
  misc_feature (5093)..(5093): n is a, c, g, or t
  misc_feature (5103)..(5103): n is a, c, g, or t
  misc_feature (5985)..(5985): n is a, c, g, or t
  misc_feature (6255)..(6255): n is a, c, g, or t
actctatctccagagcgggagccagacgccgacccaagcggaagtgacgttaggtgtccgccggaggtgtcgttggtgtgttgcgcgactggccttgagggagagctggggcctgctcccggagagatacggctatgtcgatcgaaatcgaatcttcggatgtgatccgccttattatgcagtacttgaaggagaacagtttacatcgggcgttagccaccttgcaggaggagactactgtgtctctgaatactgtggacagcattgagagttttgtggctgacattaacagtggccattgggatactgtgttgcaggctatacagtctctgaaattgccagacaaaaccctcattgacctctatgaacaggttgttctggaattgatagagctccgtgaattgggtgctgccaggtcacttttgagacagactgatcccatgatcatgttaaaacaaacacagccagagcgatatattcatctggagaaccttttggccaggtcttactttgatcctcgtgaggcatacccagatggaagtagcaaagaaaagagaagagcagcaattgcccaggccttagctggcgaagtcagtgtggtgcctccatctcgtctcatggcattgctgggacaggcactgaagtggcagcagcatcagggattgcttcctcctggtatgaccatagatttgtttcgaggcaaggcagctgtcaaagatgtggaagaagaaaagtttcctacacaactgagcaggcatattaagtttggtcagaaatcacatgtggagtgtgctcgattttctccagatggtcagtatttggtcactgggtctgttgatggattcattgaagtatggaactttactactggaaaaatcagaaaggatcttaagtaccaggcccaagataactttatgatgatggatgatgctgtcctctgcatgtgtttcagcagagatacagaaatgttagcaactggggcccaagatggaaaaatcaaggtgtggaagattcagagtggacaatgtttaaggagatttgagagggcacacagtaagggtgtcacctgtctaagcttttctaaggatagcagtcagatccttagtgcttcttttgaccagacaattagaattcatggtttaaaatctgggaaaaccctgaaggaatttcgtggccattcctcctttgttaacgaagcaacatttacacaagatggacattacattattagtgcatcctctgatggcactgtaaagatctggaatatgaagaccacagaatgttcaaatacctttaaatccctgggcagcaccgcagggacagatattaccgtcaacagtgtgattctacttcctaaaaaccctgagcactttgtggtgtgcaacagatcaaacacggtggtcatcatgaacatgcaggggcagattgtcagaagcttcagttctggtaaaagagaaggtggggactttgtttgctgtgccctctctccccgtggtgaatggatctactgtgtaggggaggactttgtgctctactgtttcagtacagtcactggcaaactggagagaactttgacagtgcacgagaaggatgtgattggtattgcacatcaccctcatcagaacctgattgctacctacagtgaagatggactcctaaagctctggaaaccataattcaacttttctttttaaatcagctcgaaagcatgtacttaaatgaagcatattcatgtaatgtgcttttttttttttttgccagcttttctaagcaaatagattgtctgaattagtcacagaataattttgtgaaaattcatgtttaagtagcaactaccctttctttttttatatatttttaaggtattagtttatcttcttctaactggtgcagtcacttaatgttttcattaatcttcgacctggagagtgaaatactgatatttctagaaaaaaattctactcctctgattatttgaaatgctgaggaaaatgtccctcccatagtaaaacttgtaaataaggaactatatcatattcagtagctgtgttctgttccatctttttttttttttttgagatggagttttgcttgttgcccaggctggagtgcagcggcacgatcttggttcactgcaacctccgcctcccaggttcaagcgattctcttgcctcagcctcccgagtagctggggactacaggtgtgcgacaccatgcctggctaatttttttgtatttttagtagagatggggtttcaccatgttggccaggctggtctcaaactcctgacctcaaaggatccacccgccttggcctcccaaagtgctgggatcacaggcgtgagccaccatgcccggcccatctttttttttttttttttttttaaagatgttaataaactttatacctttctggagactttgttctaaaatgtacataaatgctcatctagttaacatatttacttagaatgtgggaggaggagtcacattattatccctgaatctcaagtacagcagaagtgaattcctgggatagtaggatagactaacatgtaaaaaggccaggtgatgcataggttctcatttcactgccctcagccttcctctccttctgagctgtgccttctcacatgttcagtcaactccagggaatattgtctccatcttctggatagaactagttgcaggatccgttacaagaattcagagttttggcatctcccctttgtatgttgtaggagaaggtttggcattgaaaatgtgctgttgttccaaagaaaaattagcaaaggacttgagatttagaaaagtctcctttgtaatgtgcatcattaccagttatctaaagaaaaacatgtaaaagccaacaaaacccttgaaaatattttgcatatggatgtctgtttcacgtttcaactgaagatgtatagagcacctctgatgatgaggaagataccatgctaggcagtactttcaagaacgtgagttcttatttctgcaggccttttgtgcccccttttaaatgttagcatttattaggtacaaactagtggggaaggtttttttaaaaagttttgcagtcttgtaatttacctttttaaaaaatttattttatttttctgagatggagtcttgctctgttgcccaggctggagtgcagtggtgccatctcagctaactgcaacttccacttcccaggttcaagcgattctcctgccttagcctcccaagtagctgggactacaggcgcatgccagcatgcctggctaatttttgtatttttagtagagcgggggttttgccatgttggccaggctggtcttgaactcctgacctcaggtgatccgcctgccctggcctcccaaagtgctgggattacaggcatgagccactgcgcccagccttgtaatttacctttgatggtgacctgaaatgcagtatgatcctatatgtggcacgtagtaatgttcagtgtttgctgaattaattctgggcagcactaagaaatccctctttcccagtcatattctataacacatttcccatttgccacaaaacctgcagctttttggtccaggtaatgacatttgctgccattttgatgatttaaaaatggtcgtgggagttgaacatagtcatgaattcaggattcctgagcatgtagacagtcatcccagtggaaagacacgttcacttaagagaagtttaagttagaggaaacagtttatgctaaaaaaatttttagaaaagtccttgagaatttttgatttagtcttgacctcatgaagctggtagttatgatgtgcatagtttgtatcaccgtttatgaagatggagaatctagtcagcacgtgttggtttattctaggaatttttagggaacacttctgttgctggcaccaggtgatgaatatggttaaaaaaagactcgtttctgcctaaacatagggaagaagagcaaattaaaaggagtaattaaaactgataaaagctcaagttacctttgtgatgatgaggcgggcagttaacgcgaaagggttgggaaaggcttcctggagggactagggggcggtctaagcacagggaacctaaccggggactccagtgtggcacagcggcaaggtatgtgctgggcaaaatgataggtgtcttgggagaccaggcaaagagagctggattaggagccgttaagtatatatttttcttctttttaaataaaataatgcactgggtgaacatgtaaacgctaagttgaaaatctgcctttcccaggtaacccttgttaatctttctacaacttcatttcgtacaaacctgaaaaacacactgattttgtctttaaatgggcacacgctgcttacactcctcggcgcctagcctttctgaagccccacgcggccgtccctccagcattgaaggctggggcagcccagctcccctccagcgcccttacagccagaccgcggcggggtcgggccgcgcacgcgcagggcgnacggccggatctggggcgccgctgctccgggtggtcggaggtaggagtcccatcttgggtccagggccggtagagccccttaccgggggtagggagactgcgcacccgctagagccaactgtcagggcctgcagacgtcgggtgacgtcactgttacaaaattggcggtcacatcgtcttaagggccggtggcagcggctgcgcgaacgggagttggctgccgggaatcagtgctcacttccttctgaattgggcgtgtgcagtcggttcctagggaagtgctctgctgcagccaccagatttaacggatgctgctctctagcacttaacatagaagctaaactacctggcgttaaaattaattccatgagcataaggacatttgtcctatcccctattctgctgttgaattaatgactggaaaacattgcgcggaggtatttgggagtagtatggctttttttttttttttttttttaacagcaaatggtataaatctcaggtacaattcagtatcttcttcaccagttgttttttttcagcatgtattattactnccactnacggcctctgttgngcccttccttgctatgtnagcagccatntttaattctcagaacaatgtaatgagggtgcgcaaatgcacatgaagaaacaggtttccagacgtgaggcacctaactcagtccaacttgcacgaagctcgcattgaaaaccagatgtgactccgaagctaggttttttttctctcttgcctcactctcaatattgctgtcagttcctcctcaatctttaggtttgggcagggacaaagaatacatggattgttcctccacatgctgcaaacacattcacctaagcagagcacaggtagtgagatgagtagagagaactgaattagaggattctggatgtcagtctttgctgtcacttcttttggcttgtgctagaacagtggttcttacaagtgtcacgtgatagacacattctaaggtcctatcccagacctacagaatcagaaattggtggtggggcccagcaagcgtgctcaaatttgagagcaggtagactacagggtagtttccgcatatacaaaaggtgttttaattcttgctgtcagtctcagaagtttcatgctgagataaccaaatttaaatgataaaggtgcaagactgactcttaaaatcacattttttcaaattgccatagcttgctagtgttctcattcactgtgcttttacagcttcattttccactattttaagagaagaaattgctatgaagtgtatgtccaagtgaggaagttccctggtctgaggttgtttaaaacttacaataggccgggcacggtggctcaagcctgtaatcccagcactttgggaggccgaggtgggtggatcacgaggtcaggagttcaagaccaccctggccaacatggtgacaccctgtctctactaaggatacaaaattagccgggcatggtggcncacgcctgtagtcccagctacctaggaggctgaggcaggagaatagctggaacccgggaggcagaggttgcagtgagctgagactgtgccactgcactccagcctgggtgacagagcaagacttggtctcaaaaacaaaaaacaaaaaaaccaaacttggaatagcaagggctgcccattatttaaccttccacggcaattttaacagtggtattctgttccaagtggttaatattaaatccatgtgtcagtgttggtggctttcaaccntggctgcgcataatcattttgatgcttaggctacacccagccgagttatacagaatccctggagggtgggacctgatgagtgttttaatgtttcccgggtaattccaatggtagccaaggttaagaaccagtaccgtacgtacaaaaaagttgagaagctaatttcacgtacagaaaatttgccactgttccaagagcactctcaagcgacataattggcctctactcctattccctacaagtatgaatgggcaggagaagcatcacagagaaagcagagttagtgctggaacttgtatttttgtggatgatgaccttggttaatgttttttcataggctctgtttcataggctttgttttttcataggctctccctcattgcattgttctgagaattgaatgtggctgcttgcatggtaatgaggggttcaacggaggctgttggtggtagtgataatacaagctgaaaaactacacagacaaacctatcagtttctgcctcttcaggatataactattaggttggtgcaaaagtaattgcggtttttgccattaaaagtaatggcacattacttttgcaccaaccgacctaatatgactttcttttagtgttcttaggatttttaattgtaaaacatgtaacaaattttcctaaacaattgtgcaattcagtggcattatttacgatgttacgcaaccactattgtatttccaaaatgtcatcaccctaaacagaagccctgtaacattgtcaattaacttctccttcccttcccctcagcctttggtactgtttctgcctcaatgcatttgtctaagtttagttcatataagtgaaattatacaatacttgtccttttttatctggcttatttcatttagcatgttttaaaggttcatccatgtatcaaacagtaaagtgcttcatatttgggggaagtataaaaagtattcctttta

SEQ ID NO: 317944 - DNA, 7035 bp, Homo sapiens
  misc_feature (18)..(18): n is a, c, g, or t
  misc_feature (4317)..(4317): n is a, c, g, or t
  misc_feature (4874)..(4874): n is a, c, g, or t
  misc_feature (4880)..(4880): n is a, c, g, or t
  misc_feature (4894)..(4894): n is a, c, g, or t
  misc_feature (4912)..(4912): n is a, c, g, or t
  misc_feature (4922)..(4922): n is a, c, g, or t
  misc_feature (5804)..(5804): n is a, c, g, or t
  misc_feature (6074)..(6074): n is a, c, g, or t
ggtgattagaggatcccntatgtctcgatcgttagccaccttgcaggaggagactactgtgtctctgaatactgtggacagcattgagagttttgtggctgacattaacagtggccattgggatactgtgttgcaggctatacagtctctgaaattgccagacaaaaccctcattgacctctatgaacaggttgttctggaattgatagagctccgtgaattgggtgctgccaggtcacttttgagacagactgatcccatgatcatgttaaaacaaacacagccagagcgatatattcatctggagaaccttttggccaggtcttactttgatcctcgtgaggcatacccagatggaagtagcaaagaaaagagaagagcagcaattgcccaggccttagctggcgaagtcagtgtggtgcctccatctcgtctcatggcattgctgggacaggcactgaagtggcagcagcatcagggattgcttcctcctggtatgaccatagatttgtttcgaggcaaggcagctgtcaaagatgtggaagaagaaaagtttcctacacaactgagcaggcatattaagtttggtcagaaatcacatgtggagtgtgctcgattttctccagatggtcagtatttggtcactgggtctgttgatggattcattgaagtatggaactttactactggaaaaatcagaaaggatcttaagtaccaggcccaagataactttatgatgatggatgatgctgtcctctgcatgtgtttcagcagagatacagaaatgttagcaactggggcccaagatggaaaaatcaaggtgtggaagattcagagtggacaatgtttaaggagatttgagagggcacacagtaagggtgtcacctgtctaagcttttctaaggatagcagtcagatccttagtgcttcttttgaccagacaattagaattcatggtttaaaatctgggaaaaccctgaaggaatttcgtggccattcctcctttgttaacgaagcaacatttacacaagatggacattacattattagtgcatcctctgatggcactgtaaagatctggaatatgaagaccacagaatgttcaaatacctttaaatccctgggcagcaccgcagggacagatattaccgtcaacagtgtgattctacttcctaaaaaccctgagcactttgtggtgtgcaacagatcaaacacggtggtcatcatgaacatgcaggggcagattgtcagaagcttcagttctggtaaaagagaaggtggggactttgtttgctgtgccctctctccccgtggtgaatggatctactgtgtaggggaggactttgtgctctactgtttcagtacagtcactggcaaactggagagaactttgacagtgcacgagaaggatgtgattggtattgcacatcaccctcatcagaacctgattgctacctacagtgaagatggactcctaaagctctggaaaccataattcaacttttctttttaaatcagctcgaaagcatgtacttaaatgaagcatattcatgtaatgtgcttttttttttttttgccagcttttctaagcaaatagattgtctgaattagtcacagaataattttgtgaaaattcatgtttaagtagcaactaccctttctttttttatatatttttaaggtattagtttatcttcttctaactggtgcagtcacttaatgttttcattaatcttcgacctggagagtgaaatactgatatttctagaaaaaaattctactcctctgattatttgaaatgctgaggaaaatgtccctcccatagtaaaacttgtaaataaggaactatatcatattcagtagctgtgttctgttccatctttttttttttttttgagatggagttttgcttgttgcccaggctggagtgcagcggcacgatcttggttcactgcaacctccgcctcccaggttcaagcgattctcttgcctcagcctcccgagtagctggggactacaggtgtgcgacaccatgcctggctaatttttttgtatttttagtagagatggggtttcaccatgttggccaggctggtctcaaactcctgacctcaaaggatccacccgccttggcctcccaaagtgctgggatcacaggcgtgagccaccatgcccggcccatctttttttttttttttttttttaaagatgttaataaactttatacctttctggagactttgttctaaaatgtacataaatgctcatctagttaacatatttacttagaatgtgggaggaggagtcacattattatccctgaatctcaagtacagcagaagtgaattcctgggatagtaggatagactaacatgtaaaaaggccaggtgatgcataggttctcatttcactgccctcagccttcctctccttctgagctgtgccttctcacatgttcagtcaactccagggaatattgtctccatcttctggatagaactagttgcaggatccgttacaagaattcagagttttggcatctcccctttgtatgttgtaggagaaggtttggcattgaaaatgtgctgttgttccaaagaaaaattagcaaaggacttgagatttagaaaagtctcctttgtaatgtgcatcattaccagttatctaaagaaaaacatgtaaaagccaacaaaacccttgaaaatattttgcatatggatgtctgtttcacgtttcaactgaagatgtatagagcacctctgatgatgaggaagataccatgctaggcagtactttcaagaacgtgagttcttatttctgcaggccttttgtgcccccttttaaatgttagcatttattaggtacaaactagtggggaaggtttttttaaaaagttttgcagtcttgtaatttacctttttaaaaaatttattttatttttctgagatggagtcttgctctgttgcccaggctggagtgcagtggtgccatctcagctaactgcaacttccacttcccaggttcaagcgattctcctgccttagcctcccaagtagctgggactacaggcgcatgccagcatgcctggctaatttttgtatttttagtagagcgggggttttgccatgttggccaggctggtcttgaactcctgacctcaggtgatccgcctgccctggcctcccaaagtgctgggattacaggcatgagccactgcgcccagccttgtaatttacctttgatggtgacctgaaatgcagtatgatcctatatgtggcacgtagtaatgttcagtgtttgctgaattaattctgggcagcactaagaaatccctctttcccagtcatattctataacacatttcccatttgccacaaaacctgcagctttttggtccaggtaatgacatttgctgccattttgatgatttaaaaatggtcgtgggagttgaacatagtcatgaattcaggattcctgagcatgtagacagtcatcccagtggaaagacacgttcacttaagagaagtttaagttagaggaaacagtttatgctaaaaaaatttttagaaaagtccttgagaatttttgatttagtcttgacctcatgaagctggtagttatgatgtgcatagtttgtatcaccgtttatgaagatggagaatctagtcagcacgtgttggtttattctaggaatttttagggaacacttctgttgctggcaccaggtgatgaatatggttaaaaaaagactcgtttctgcctaaacatagggaagaagagcaaattaaaaggagtaattaaaactgataaaagctcaagttacctttgtgatgatgaggcgggcagttaacgcgaaagggttgggaaaggcttcctggagggactagggggcggtctaagcacagggaacctaaccggggactccagtgtggcacagcggcaaggtatgtgctgggcaaaatgataggtgtcttgggagaccaggcaaagagagctggattaggagccgttaagtatatatttttcttctttttaaataaaataatgcactgggtgaacatgtaaacgctaagttgaaaatctgcctttcccaggtaacccttgttaatctttctacaacttcatttcgtacaaacctgaaaaacacactgattttgtctttaaatgggcacacgctgcttacactcctcggcgcctagcctttctgaagccccacgcggccgtccctccagcattgaaggctggggcagcccagctcccctccagcgcccttacagccagaccgcggcggggtcgggccgcgcacgcgcagggcgnacggccggatctggggcgccgctgctccgggtggtcggaggtaggagtcccatcttgggtccagggccggtagagccccttaccgggggtagggagactgcgcacccgctagagccaactgtcagggcctgcagacgtcgggtgacgtcactgttacaaaattggcggtcacatcgtcttaagggccggtggcagcggctgcgcgaacgggagttggctgccgggaatcagtgctcacttccttctgaattgggcgtgtgcagtcggttcctagggaagtgctctgctgcagccaccagatttaacggatgctgctctctagcacttaacatagaagctaaactacctggcgttaaaattaattccatgagcataaggacatttgtcctatcccctattctgctgttgaattaatgactggaaaacattgcgcggaggtatttgggagtagtatggctttttttttttttttttttttaacagcaaatggtataaatctcaggtacaattcagtatcttcttcaccagttgttttttttcagcatgtattattactnccactnacggcctctgttgngcccttccttgctatgtnagcagccatntttaattctcagaacaatgtaatgagggtgcgcaaatgcacatgaagaaacaggtttccagacgtgaggcacctaactcagtccaacttgcacgaagctcgcattgaaaaccagatgtgactccgaagctaggttttttttctctcttgcctcactctcaatattgctgtcagttcctcctcaatctttaggtttgggcagggacaaagaatacatggattgttcctccacatgctgcaaacacattcacctaagcagagcacaggtagtgagatgagtagagagaactgaattagaggattctggatgtcagtctttgctgtcacttcttttggcttgtgctagaacagtggttcttacaagtgtcacgtgatagacacattctaaggtcctatcccagacctacagaatcagaaattggtggtggggcccagcaagcgtgctcaaatttgagagcaggtagactacagggtagtttccgcatatacaaaaggtgttttaattcttgctgtcagtctcagaagtttcatgctgagataaccaaatttaaatgataaaggtgcaagactgactcttaaaatcacattttttcaaattgccatagcttgctagtgttctcattcactgtgcttttacagcttcattttccactattttaagagaagaaattgctatgaagtgtatgtccaagtgaggaagttccctggtctgaggttgtttaaaacttacaataggccgggcacggtggctcaagcctgtaatcccagcactttgggaggccgaggtgggtggatcacgaggtcaggagttcaagaccaccctggccaacatggtgacaccctgtctctactaaggatacaaaattagccgggcatggtggcncacgcctgtagtcccagctacctaggaggctgaggcaggagaatagctggaacccgggaggcagaggttgcagtgagctgagactgtgccactgcactccagcctgggtgacagagcaagacttggtctcaaaaacaaaaaacaaaaaaaccaaacttggaatagcaagggctgcccattatttaaccttccacggcaattttaacagtggtattctgttccaagtggttaatattaaatccatgtgtcagtgttggtggctttcaaccntggctgcgcataatcattttgatgcttaggctacacccagccgagttatacagaatccctggagggtgggacctgatgagtgttttaatgtttcccgggtaattccaatggtagccaaggttaagaaccagtaccgtacgtacaaaaaagttgagaagctaatttcacgtacagaaaatttgccactgttccaagagcactctcaagcgacataattggcctctactcctattccctacaagtatgaatgggcaggagaagcatcacagagaaagcagagttagtgctggaacttgtatttttgtggatgatgaccttggttaatgttttttcataggctctgtttcataggctttgttttttcataggctctccctcattgcattgttctgagaattgaatgtggctgcttgcatggtaatgaggggttcaacggaggctgttggtggtagtgataatacaagctgaaaaactacacagacaaacctatcagtttctgcctcttcaggatataactattaggttggtgcaaaagtaattgcggtttttgccattaaaagtaatggcacattacttttgcaccaaccgacctaatatgactttcttttagtgttcttaggatttttaattgtaaaacatgtaacaaattttcctaaacaattgtgcaattcagtggcattatttacgatgttacgcaaccactattgtatttccaaaatgtcatcaccctaaacagaagccctgtaacattgtcaattaacttctccttcccttcccctcagcctttggtactgtttctgcctcaatgcatttgtctaagtttagttcatataagtgaaattatacaatacttgtccttttttatctggcttatttcatttagcatgttttaaaggttcatccatgtatcaaacagtaaagtgcttcatatttgggggaagtataaaaagtattcctttta

SEQ ID NO: 317945 - DNA, 2171 bp, Homo sapiens
actctatctccagagcgggagccagacgccgacccaagcggaagtgacgttaggtgtccgccggaggtgtcgttggtgtgttgcgcgactggccttgagggagagctggggcctgctcccggagagatacggctatgtcgatcgaaatcgaatcttcggatgtgatccgccttattatgcagtacttgaaggagaacagtttacatcgggcgttagccaccttgcaggaggagactactgtgtctctgaatactgtggacagcattgagagttttgtggctgacattaacagtggccattgggatactgtgttgcaggctatacagtctctgaaattgccagacaaaaccctcattgacctctatgaacaggttgttctggaattgatagagctccgtgaattgggtgctgccaggtcacttttgagacagactgatcccatgatcatgttaaaacaaacacagccagagcgatatattcatctggagaaccttttggccaggtcttactttgatcctcgtgaggcatacccagatggaagtagcaaagaaaagagaagagcagcaattgcccaggccttagctggcgaagtcagtgtggtgcctccatctcgtctcatggcattgctgggacaggcactgaagtggcagcagcatcagggattgcttcctcctggtatgaccatagatttgtttcgaggcaaggcagctgtcaaagatgtggaagaagaaaagtttcctacacaactgagcaggcatattaagtttggtcagaaatcacatgtggagtgtgctcgattttctccagatggtcagtatttggtcactgggtctgttgatggattcattgaagtatggaactttactactggaaaaatcagaaaggatcttaagtaccaggcccaagataactttatgatgatggatgatgctgtcctctgcatgtgtttcagcagagatacagaaatgttagcaactggggcccaagatggaaaaatcaaggtgtggaagattcagagtggacaatgtttaaggagatttgagagggcacacagtaagggtgtcacctgtctaagcttttctaaggatagcagtcagatccttagtgcttcttttgaccagacaattagaattcatggtttaaaatctgggaaaaccctgaaggaatttcgtggccattcctcctttgttaacgaagcaacatttacacaagatggacattacattattagtgcatcctctgatggcactgtaaagatctggaatatgaagaccacagaatgttcaaatacctttaaatccctgggcagcaccgcagggacagatattaccgtcaacagtgtgattctacttcctaaaaaccctgagcactttgtggtgtgcaacagatcaaacacggtggtcatcatgaacatgcaggggcagattgtcagaagcttcagttctggtaaaagagaaggtggggactttgtttgctgtgccctctctccccgtggtgaatggatctactgtgtaggggaggactttgtgctctactgtttcagtacagtcactggcaaactggagagaactttgacagtgcacgagaaggatgtgattggtattgcacatcaccctcatcagaacctgattgctacctacagtgaagatggactcctaaagctctggaaaccataattcaacttttctttttaaatcagctcgaaagcatgtacttaaatgaagcatattcatgtaatgtgcttttttttttttttgccagcttttctaagcaaatagattgtctgaattagtcacagaaaaaaaaaaaaaaaaaaaaaaaaaaaaaaaaaaaaaaaaaaaaaagggggggggggaaaaaaatacgaggggggacaatgagcagttttttggacaagggggcgcccccaataaagcgggacgcgctcaattaagaacgggggacgacggggccgcgataataacaacgagggcgagggcggaaaacactaccaacgcgggacacctatggagagcgaacccacaaacggggggggggggaaaataggtaggcacgactccgtcaagaaatgttacggcggaggggagactatcaaatggaggtggtaacagggggtacacgacggatatacaggtcgaagactgcccgaggattatgcgagaaatttgcgg

SEQ ID NO: 317946 - DNA, 5913 bp, Homo sapiens
  misc_feature (3195)..(3195): n is a, c, g, or t
  misc_feature (3752)..(3752): n is a, c, g, or t
  misc_feature (3758)..(3758): n is a, c, g, or t
  misc_feature (3772)..(3772): n is a, c, g, or t
  misc_feature (3790)..(3790): n is a, c, g, or t
  misc_feature (3800)..(3800): n is a, c, g, or t
  misc_feature (4682)..(4682): n is a, c, g, or t
  misc_feature (4952)..(4952): n is a, c, g, or t
ttacaaatgatagtaaaccaaagtgcaaaataacaacgtaaaaatgtcagtttaaaatgctgcacatggttgagctgctactaatcctgatgtttttttcttggggtgtggtgtgatctagattgtcagaagcttcagttctggtaaaagagaaggtggggactttgtttgctgtgccctctctccccgtggtgaatggatctactgtgtaggggaggactttgtgctctactgtttcagtacagtcactggcaaactggagagaactttgacagtgcacgagaaggatgtgattggtattgcacatcaccctcatcagaacctgattgctacctacagtgaagatggactcctaaagctctggaaaccataattcaacttttctttttaaatcagctcgaaagcatgtacttaaatgaagcatattcatgtaatgtgcttttttttttttttgccagcttttctaagcaaatagattgtctgaattagtcacagaataattttgtgaaaattcatgtttaagtagcaactaccctttctttttttatatatttttaaggtattagtttatcttcttctaactggtgcagtcacttaatgttttcattaatcttcgacctggagagtgaaatactgatatttctagaaaaaaattctactcctctgattatttgaaatgctgaggaaaatgtccctcccatagtaaaacttgtaaataaggaactatatcatattcagtagctgtgttctgttccatctttttttttttttttgagatggagttttgcttgttgcccaggctggagtgcagcggcacgatcttggttcactgcaacctccgcctcccaggttcaagcgattctcttgcctcagcctcccgagtagctggggactacaggtgtgcgacaccatgcctggctaatttttttgtatttttagtagagatggggtttcaccatgttggccaggctggtctcaaactcctgacctcaaaggatccacccgccttggcctcccaaagtgctgggatcacaggcgtgagccaccatgcccggcccatctttttttttttttttttttttaaagatgttaataaactttatacctttctggagactttgttctaaaatgtacataaatgctcatctagttaacatatttacttagaatgtgggaggaggagtcacattattatccctgaatctcaagtacagcagaagtgaattcctgggatagtaggatagactaacatgtaaaaaggccaggtgatgcataggttctcatttcactgccctcagccttcctctccttctgagctgtgccttctcacatgttcagtcaactccagggaatattgtctccatcttctggatagaactagttgcaggatccgttacaagaattcagagttttggcatctcccctttgtatgttgtaggagaaggtttggcattgaaaatgtgctgttgttccaaagaaaaattagcaaaggacttgagatttagaaaagtctcctttgtaatgtgcatcattaccagttatctaaagaaaaacatgtaaaagccaacaaaacccttgaaaatattttgcatatggatgtctgtttcacgtttcaactgaagatgtatagagcacctctgatgatgaggaagataccatgctaggcagtactttcaagaacgtgagttcttatttctgcaggccttttgtgcccccttttaaatgttagcatttattaggtacaaactagtggggaaggtttttttaaaaagttttgcagtcttgtaatttacctttttaaaaaatttattttatttttctgagatggagtcttgctctgttgcccaggctggagtgcagtggtgccatctcagctaactgcaacttccacttcccaggttcaagcgattctcctgccttagcctcccaagtagctgggactacaggcgcatgccagcatgcctggctaatttttgtatttttagtagagcgggggttttgccatgttggccaggctggtcttgaactcctgacctcaggtgatccgcctgccctggcctcccaaagtgctgggattacaggcatgagccactgcgcccagccttgtaatttacctttgatggtgacctgaaatgcagtatgatcctatatgtggcacgtagtaatgttcagtgtttgctgaattaattctgggcagcactaagaaatccctctttcccagtcatattctataacacatttcccatttgccacaaaacctgcagctttttggtccaggtaatgacatttgctgccattttgatgatttaaaaatggtcgtgggagttgaacatagtcatgaattcaggattcctgagcatgtagacagtcatcccagtggaaagacacgttcacttaagagaagtttaagttagaggaaacagtttatgctaaaaaaatttttagaaaagtccttgagaatttttgatttagtcttgacctcatgaagctggtagttatgatgtgcatagtttgtatcaccgtttatgaagatggagaatctagtcagcacgtgttggtttattctaggaatttttagggaacacttctgttgctggcaccaggtgatgaatatggttaaaaaaagactcgtttctgcctaaacatagggaagaagagcaaattaaaaggagtaattaaaactgataaaagctcaagttacctttgtgatgatgaggcgggcagttaacgcgaaagggttgggaaaggcttcctggagggactagggggcggtctaagcacagggaacctaaccggggactccagtgtggcacagcggcaaggtatgtgctgggcaaaatgataggtgtcttgggagaccaggcaaagagagctggattaggagccgttaagtatatatttttcttctttttaaataaaataatgcactgggtgaacatgtaaacgctaagttgaaaatctgcctttcccaggtaacccttgttaatctttctacaacttcatttcgtacaaacctgaaaaacacactgattttgtctttaaatgggcacacgctgcttacactcctcggcgcctagcctttctgaagccccacgcggccgtccctccagcattgaaggctggggcagcccagctcccctccagcgcccttacagccagaccgcggcggggtcgggccgcgcacgcgcagggcgnacggccggatctggggcgccgctgctccgggtggtcggaggtaggagtcccatcttgggtccagggccggtagagccccttaccgggggtagggagactgcgcacccgctagagccaactgtcagggcctgcagacgtcgggtgacgtcactgttacaaaattggcggtcacatcgtcttaagggccggtggcagcggctgcgcgaacgggagttggctgccgggaatcagtgctcacttccttctgaattgggcgtgtgcagtcggttcctagggaagtgctctgctgcagccaccagatttaacggatgctgctctctagcacttaacatagaagctaaactacctggcgttaaaattaattccatgagcataaggacatttgtcctatcccctattctgctgttgaattaatgactggaaaacattgcgcggaggtatttgggagtagtatggctttttttttttttttttttttaacagcaaatggtataaatctcaggtacaattcagtatcttcttcaccagttgttttttttcagcatgtattattactnccactnacggcctctgttgngcccttccttgctatgtnagcagccatntttaattctcagaacaatgtaatgagggtgcgcaaatgcacatgaagaaacaggtttccagacgtgaggcacctaactcagtccaacttgcacgaagctcgcattgaaaaccagatgtgactccgaagctaggttttttttctctcttgcctcactctcaatattgctgtcagttcctcctcaatctttaggtttgggcagggacaaagaatacatggattgttcctccacatgctgcaaacacattcacctaagcagagcacaggtagtgagatgagtagagagaactgaattagaggattctggatgtcagtctttgctgtcacttcttttggcttgtgctagaacagtggttcttacaagtgtcacgtgatagacacattctaaggtcctatcccagacctacagaatcagaaattggtggtggggcccagcaagcgtgctcaaatttgagagcaggtagactacagggtagtttccgcatatacaaaaggtgttttaattcttgctgtcagtctcagaagtttcatgctgagataaccaaatttaaatgataaaggtgcaagactgactcttaaaatcacattttttcaaattgccatagcttgctagtgttctcattcactgtgcttttacagcttcattttccactattttaagagaagaaattgctatgaagtgtatgtccaagtgaggaagttccctggtctgaggttgtttaaaacttacaataggccgggcacggtggctcaagcctgtaatcccagcactttgggaggccgaggtgggtggatcacgaggtcaggagttcaagaccaccctggccaacatggtgacaccctgtctctactaaggatacaaaattagccgggcatggtggcncacgcctgtagtcccagctacctaggaggctgaggcaggagaatagctggaacccgggaggcagaggttgcagtgagctgagactgtgccactgcactccagcctgggtgacagagcaagacttggtctcaaaaacaaaaaacaaaaaaaccaaacttggaatagcaagggctgcccattatttaaccttccacggcaattttaacagtggtattctgttccaagtggttaatattaaatccatgtgtcagtgttggtggctttcaaccntggctgcgcataatcattttgatgcttaggctacacccagccgagttatacagaatccctggagggtgggacctgatgagtgttttaatgtttcccgggtaattccaatggtagccaaggttaagaaccagtaccgtacgtacaaaaaagttgagaagctaatttcacgtacagaaaatttgccactgttccaagagcactctcaagcgacataattggcctctactcctattccctacaagtatgaatgggcaggagaagcatcacagagaaagcagagttagtgctggaacttgtatttttgtggatgatgaccttggttaatgttttttcataggctctgtttcataggctttgttttttcataggctctccctcattgcattgttctgagaattgaatgtggctgcttgcatggtaatgaggggttcaacggaggctgttggtggtagtgataatacaagctgaaaaactacacagacaaacctatcagtttctgcctcttcaggatataactattaggttggtgcaaaagtaattgcggtttttgccattaaaagtaatggcacattacttttgcaccaaccgacctaatatgactttcttttagtgttcttaggatttttaattgtaaaacatgtaacaaattttcctaaacaattgtgcaattcagtggcattatttacgatgttacgcaaccactattgtatttccaaaatgtcatcaccctaaacagaagccctgtaacattgtcaattaacttctccttcccttcccctcagcctttggtactgtttctgcctcaatgcatttgtctaagtttagttcatataagtgaaattatacaatacttgtccttttttatctggcttatttcatttagcatgttttaaaggttcatccatgtatcaaacagtaaagtgcttcatatttgggggaagtataaaaagtattcctttta

SEQ ID NO: 317947 - DNA, 1515 bp, Homo sapiens
actctatctccagagcgggagccagacgccgacccaagcggaagtgacgttaggtgtccgccggaggtgtcgttggtgtgttgcgcgactggccttgagggagagctggggcctgctcccggagagatacggctatgtcgatcgaaatcgaatcttcggatgtgatccgccttattatgcagtacttgaaggagaacagtttacatcgggcgttagccaccttgcaggaggagactactgtgtctctgaatactgtggacagcattgagagttttgtggctgacattaacagtggccattgggatactgtgttgcaggctatacagtctctgaaattgccagacaaaaccctcattgacctctatgaacaggttgttctggaattgatagagctccgtgaattgggtgctgccaggtcacttttgagacagactgatcccatgatcatgttaaaacaaacacagccagagcgatatattcatctggagaaccttttggccaggtcttactttgatcctcgtgaggcatacccagatggaagtagcaaagaaaagagaagagcagcaattgcccaggccttagctggcgaagtcagtgtggtgcctccatctcgtctcatggcattgctgggacaggcactgaagtggcagcagcatcagggattgcttcctcctggtatgaccatagatttgtttcgaggcaaggcagctgtcaaagatgtggaagaagaaaagtttcctacacaactgagcaggcatattaagtttggtcagaaatcacatgtggagtgtgctcgattttctccagatggtcagtatttggtcactgggtctgttgatggattcattgaagtatggaactttactactggaaaaatcagaaaggatcttaagtaccaggcccaagataactttatgatgatggatgatgctgtcctctgcatgtgtttcagcagagatacagaaatgttagcaactggggcccaagatggaaaaatcaaggtgtggaagattcagagtggacaatgtttaaggagatttgagagggcacacagtaagggtgtcacctgtctaagcttttctaaggatagcagtcagatccttagtgcttcttttgaccagacaattagaattcatggtttaaaatctgggaaaaccctgaaggaatttcgtggccattcctcctttgttaacgaagcaacatttacacaagatggacattacattattagtgcatcctctgatggcactgtaaagatctggaatatgaagaccacagaatgttcaaatacctttaaatccctgggcagcaccgcagggacagatattaccgtcaacagtgtgattctacttcctaaaaaccctgagcactttgtggtgtgcaacagatcaaacacggtggtcatcatgaacatgcaggggcaggtgagtgttcagaacgtacccttgcacaggaactgtgggccattcccaaatcagcacttcctggtccaggcccaccctcccaataaccaaa

SEQ ID NO: 317948 - DNA, 131 bp, Homo sapiens
tcgattttctccagatggtcagtatttggtcactgggtctgttgatggattcattgaagtatggaactttactactggaaaaatcagaaaggtaaagtattttaaatgtgttaaccttcctagtggaaaaa

SEQ ID NO: 317949 - DNA, 284 bp, Homo sapiens
ccgccttattatgcagtacttgaaggagaacagtttacatcgggcgttagccaccttgcaggaggagactactgtgtctctgaatactgtggacagcattgagagttttgtggctgacattaacagtggccattgggatactgtgttgcaggctatacagtctctgaaattgccagacaaaaccctcattgacctctatgaacaggtaagagtggtggtgatgctgatccccatgggttggttcgttgtgggccagctccccaactaaaaagcgtcagtgagca

SEQ ID NO: 317950 - DNA, 1800 bp, Homo sapiens
actctatctccagagcgggagccagacgccgacccaagcggaagtgacgttaggtgtccgccggaggtgtcgttggtgtgttgcgcgactggccttgagggagagctggggcctgctcccggagagatacggctatgtcgatcgaaatcgaatcttcggatgtgatccgccttattatgcagtacttgaaggagaacagtttacatcgggcgttagccaccttgcaggaggagactactgtgtctctgaatactgtggacagcattgagagttttgtggctgacattaacagtggccattgggatactgtgttgcaggctatacagtctctgaaattgccagacaaaaccctcattgacctctatgaacaggttgttctggaattgatagagctccgtgaattgggtgctgccaggtcacttttgagacagactgatcccatgatcatgttaaaacaaacacagccagagcgatatattcatctggagaaccttttggccaggtcttactttgatcctcgtgaggcatacccagatggaagtagcaaagaaaagagaagagcagcaattgcccaggccttagctggcgaagtcagtgtggtgcctccatctcgtctcatggcattgctgggacaggcactgaagtggcagcagcatcagggattgcttcctcctggtatgaccatagatttgtttcgaggcaaggcagctgtcaaagatgtggaagaagaaaagtttcctacacaactgagcaggcatattaagtttggtcagaaatcacatgtggagtgtgctcgattttctccagatggtcagtatttggtcactgggtctgttgatggattcattgaagtatggaactttactactggaaaaatcagaaaggatcttaagtaccaggcccaagataactttatgatgatggatgatgctgtcctctgcatgtgtttcagcagagatacagaaatgttagcaactggggcccaagatggaaaaatcaaggtgtggaagattcagagtggacaatgtttaaggagatttgagagggcacacagtaagggtgtcacctgtctaagcttttctaaggatagcagtcagatccttagtgcttcttttgaccagacaattagaattcatggtttaaaatctgggaaaaccctgaaggaatttcgtggccattcctcctttgttaacgaagcaacatttacacaagatggacattacattattagtgcatcctctgatggcactgtaaagatctggaatatgaagaccacagaatgttcaaatacctttaaatccctgggcagcaccgcagggacagatattaccgtcaacagtgtgattctacttcctaaaaaccctgagcactttgtggtgtgcaacagatcaaacacggtggtcatcatgaacatgcaggggcagattgtcagaagcttcagttctggtaaaagagaaggtggggactttgtttgctgtgccctctctccccgtggtgaatggatctactgtgtaggggaggactttgtgctctactgtttcagtacagtcactggcaaactggagagaactttgacagtgcacgagaaggatgtgattggtattgcacatcaccctcatcagaacctgattgctacctacagtgaagatggactcctaaagctctggaaaccataattcaacttttctttttaaatcagctcgaaagcatgtacttaaatgaagcatattcatgtaatgtgcttttttttttttttgccagcttttctaagcaaatagattgtctgaattagtcacagaa

SEQ ID NO: 317951 - DNA, 7153 bp, Homo sapiens
  misc_feature (31)..(31): n is a, c, g, or t
  misc_feature (4435)..(4435): n is a, c, g, or t
  misc_feature (4992)..(4992): n is a, c, g, or t
  misc_feature (4998)..(4998): n is a, c, g, or t
  misc_feature (5012)..(5012): n is a, c, g, or t
  misc_feature (5030)..(5030): n is a, c, g, or t
  misc_feature (5040)..(5040): n is a, c, g, or t
  misc_feature (5922)..(5922): n is a, c, g, or t
  misc_feature (6192)..(6192): n is a, c, g, or t
actctagaggttccccgactagtcaaccatncggagggagagctggggcctgctcccggagagatacggctatgtcgatcgaaatcgaatcttcggatgtgatccgccttattatgcagtacttgaaggagaacagtttacatcgggcgttagccaccttgcaggaggagactactgtgtctctgaatactgtggacagcattgagagttttgtggctgacattaacagtggccattgggatactgtgttgcaggctatacagtctctgaaattgccagacaaaaccctcattgacctctatgaacaggttgttctggaattgatagagctccgtgaattgggtgctgccaggtcacttttgagacagactgatcccatgatcatgttaaaacaaacacagccagagcgatatattcatctggagaaccttttggccaggtcttactttgatcctcgtgaggcatacccagatggaagtagcaaagaaaagagaagagcagcaattgcccaggccttagctggcgaagtcagtgtggtgcctccatctcgtctcatggcattgctgggacaggcactgaagtggcagcagcatcagggattgcttcctcctggtatgaccatagatttgtttcgaggcaaggcagctgtcaaagatgtggaagaagaaaagtttcctacacaactgagcaggcatattaagtttggtcagaaatcacatgtggagtgtgctcgattttctccagatggtcagtatttggtcactgggtctgttgatggattcattgaagtatggaactttactactggaaaaatcagaaaggatcttaagtaccaggcccaagataactttatgatgatggatgatgctgtcctctgcatgtgtttcagcagagatacagaaatgttagcaactggggcccaagatggaaaaatcaaggtgtggaagattcagagtggacaatgtttaaggagatttgagagggcacacagtaagggtgtcacctgtctaagcttttctaaggatagcagtcagatccttagtgcttcttttgaccagacaattagaattcatggtttaaaatctgggaaaaccctgaaggaatttcgtggccattcctcctttgttaacgaagcaacatttacacaagatggacattacattattagtgcatcctctgatggcactgtaaagatctggaatatgaagaccacagaatgttcaaatacctttaaatccctgggcagcaccgcagggacagatattaccgtcaacagtgtgattctacttcctaaaaaccctgagcactttgtggtgtgcaacagatcaaacacggtggtcatcatgaacatgcaggggcagattgtcagaagcttcagttctggtaaaagagaaggtggggactttgtttgctgtgccctctctccccgtggtgaatggatctactgtgtaggggaggactttgtgctctactgtttcagtacagtcactggcaaactggagagaactttgacagtgcacgagaaggatgtgattggtattgcacatcaccctcatcagaacctgattgctacctacagtgaagatggactcctaaagctctggaaaccataattcaacttttctttttaaatcagctcgaaagcatgtacttaaatgaagcatattcatgtaatgtgcttttttttttttttgccagcttttctaagcaaatagattgtctgaattagtcacagaataattttgtgaaaattcatgtttaagtagcaactaccctttctttttttatatatttttaaggtattagtttatcttcttctaactggtgcagtcacttaatgttttcattaatcttcgacctggagagtgaaatactgatatttctagaaaaaaattctactcctctgattatttgaaatgctgaggaaaatgtccctcccatagtaaaacttgtaaataaggaactatatcatattcagtagctgtgttctgttccatctttttttttttttttgagatggagttttgcttgttgcccaggctggagtgcagcggcacgatcttggttcactgcaacctccgcctcccaggttcaagcgattctcttgcctcagcctcccgagtagctggggactacaggtgtgcgacaccatgcctggctaatttttttgtatttttagtagagatggggtttcaccatgttggccaggctggtctcaaactcctgacctcaaaggatccacccgccttggcctcccaaagtgctgggatcacaggcgtgagccaccatgcccggcccatctttttttttttttttttttttaaagatgttaataaactttatacctttctggagactttgttctaaaatgtacataaatgctcatctagttaacatatttacttagaatgtgggaggaggagtcacattattatccctgaatctcaagtacagcagaagtgaattcctgggatagtaggatagactaacatgtaaaaaggccaggtgatgcataggttctcatttcactgccctcagccttcctctccttctgagctgtgccttctcacatgttcagtcaactccagggaatattgtctccatcttctggatagaactagttgcaggatccgttacaagaattcagagttttggcatctcccctttgtatgttgtaggagaaggtttggcattgaaaatgtgctgttgttccaaagaaaaattagcaaaggacttgagatttagaaaagtctcctttgtaatgtgcatcattaccagttatctaaagaaaaacatgtaaaagccaacaaaacccttgaaaatattttgcatatggatgtctgtttcacgtttcaactgaagatgtatagagcacctctgatgatgaggaagataccatgctaggcagtactttcaagaacgtgagttcttatttctgcaggccttttgtgcccccttttaaatgttagcatttattaggtacaaactagtggggaaggtttttttaaaaagttttgcagtcttgtaatttacctttttaaaaaatttattttatttttctgagatggagtcttgctctgttgcccaggctggagtgcagtggtgccatctcagctaactgcaacttccacttcccaggttcaagcgattctcctgccttagcctcccaagtagctgggactacaggcgcatgccagcatgcctggctaatttttgtatttttagtagagcgggggttttgccatgttggccaggctggtcttgaactcctgacctcaggtgatccgcctgccctggcctcccaaagtgctgggattacaggcatgagccactgcgcccagccttgtaatttacctttgatggtgacctgaaatgcagtatgatcctatatgtggcacgtagtaatgttcagtgtttgctgaattaattctgggcagcactaagaaatccctctttcccagtcatattctataacacatttcccatttgccacaaaacctgcagctttttggtccaggtaatgacatttgctgccattttgatgatttaaaaatggtcgtgggagttgaacatagtcatgaattcaggattcctgagcatgtagacagtcatcccagtggaaagacacgttcacttaagagaagtttaagttagaggaaacagtttatgctaaaaaaatttttagaaaagtccttgagaatttttgatttagtcttgacctcatgaagctggtagttatgatgtgcatagtttgtatcaccgtttatgaagatggagaatctagtcagcacgtgttggtttattctaggaatttttagggaacacttctgttgctggcaccaggtgatgaatatggttaaaaaaagactcgtttctgcctaaacatagggaagaagagcaaattaaaaggagtaattaaaactgataaaagctcaagttacctttgtgatgatgaggcgggcagttaacgcgaaagggttgggaaaggcttcctggagggactagggggcggtctaagcacagggaacctaaccggggactccagtgtggcacagcggcaaggtatgtgctgggcaaaatgataggtgtcttgggagaccaggcaaagagagctggattaggagccgttaagtatatatttttcttctttttaaataaaataatgcactgggtgaacatgtaaacgctaagttgaaaatctgcctttcccaggtaacccttgttaatctttctacaacttcatttcgtacaaacctgaaaaacacactgattttgtctttaaatgggcacacgctgcttacactcctcggcgcctagcctttctgaagccccacgcggccgtccctccagcattgaaggctggggcagcccagctcccctccagcgcccttacagccagaccgcggcggggtcgggccgcgcacgcgcagggcgnacggccggatctggggcgccgctgctccgggtggtcggaggtaggagtcccatcttgggtccagggccggtagagccccttaccgggggtagggagactgcgcacccgctagagccaactgtcagggcctgcagacgtcgggtgacgtcactgttacaaaattggcggtcacatcgtcttaagggccggtggcagcggctgcgcgaacgggagttggctgccgggaatcagtgctcacttccttctgaattgggcgtgtgcagtcggttcctagggaagtgctctgctgcagccaccagatttaacggatgctgctctctagcacttaacatagaagctaaactacctggcgttaaaattaattccatgagcataaggacatttgtcctatcccctattctgctgttgaattaatgactggaaaacattgcgcggaggtatttgggagtagtatggctttttttttttttttttttttaacagcaaatggtataaatctcaggtacaattcagtatcttcttcaccagttgttttttttcagcatgtattattactnccactnacggcctctgttgngcccttccttgctatgtnagcagccatntttaattctcagaacaatgtaatgagggtgcgcaaatgcacatgaagaaacaggtttccagacgtgaggcacctaactcagtccaacttgcacgaagctcgcattgaaaaccagatgtgactccgaagctaggttttttttctctcttgcctcactctcaatattgctgtcagttcctcctcaatctttaggtttgggcagggacaaagaatacatggattgttcctccacatgctgcaaacacattcacctaagcagagcacaggtagtgagatgagtagagagaactgaattagaggattctggatgtcagtctttgctgtcacttcttttggcttgtgctagaacagtggttcttacaagtgtcacgtgatagacacattctaaggtcctatcccagacctacagaatcagaaattggtggtggggcccagcaagcgtgctcaaatttgagagcaggtagactacagggtagtttccgcatatacaaaaggtgttttaattcttgctgtcagtctcagaagtttcatgctgagataaccaaatttaaatgataaaggtgcaagactgactcttaaaatcacattttttcaaattgccatagcttgctagtgttctcattcactgtgcttttacagcttcattttccactattttaagagaagaaattgctatgaagtgtatgtccaagtgaggaagttccctggtctgaggttgtttaaaacttacaataggccgggcacggtggctcaagcctgtaatcccagcactttgggaggccgaggtgggtggatcacgaggtcaggagttcaagaccaccctggccaacatggtgacaccctgtctctactaaggatacaaaattagccgggcatggtggcncacgcctgtagtcccagctacctaggaggctgaggcaggagaatagctggaacccgggaggcagaggttgcagtgagctgagactgtgccactgcactccagcctgggtgacagagcaagacttggtctcaaaaacaaaaaacaaaaaaaccaaacttggaatagcaagggctgcccattatttaaccttccacggcaattttaacagtggtattctgttccaagtggttaatattaaatccatgtgtcagtgttggtggctttcaaccntggctgcgcataatcattttgatgcttaggctacacccagccgagttatacagaatccctggagggtgggacctgatgagtgttttaatgtttcccgggtaattccaatggtagccaaggttaagaaccagtaccgtacgtacaaaaaagttgagaagctaatttcacgtacagaaaatttgccactgttccaagagcactctcaagcgacataattggcctctactcctattccctacaagtatgaatgggcaggagaagcatcacagagaaagcagagttagtgctggaacttgtatttttgtggatgatgaccttggttaatgttttttcataggctctgtttcataggctttgttttttcataggctctccctcattgcattgttctgagaattgaatgtggctgcttgcatggtaatgaggggttcaacggaggctgttggtggtagtgataatacaagctgaaaaactacacagacaaacctatcagtttctgcctcttcaggatataactattaggttggtgcaaaagtaattgcggtttttgccattaaaagtaatggcacattacttttgcaccaaccgacctaatatgactttcttttagtgttcttaggatttttaattgtaaaacatgtaacaaattttcctaaacaattgtgcaattcagtggcattatttacgatgttacgcaaccactattgtatttccaaaatgtcatcaccctaaacagaagccctgtaacattgtcaattaacttctccttcccttcccctcagcctttggtactgtttctgcctcaatgcatttgtctaagtttagttcatataagtgaaattatacaatacttgtccttttttatctggcttatttcatttagcatgttttaaaggttcatccatgtatcaaacagtaaagtgcttcatatttgggggaagtataaaaagtattcctttta

SEQ ID NO: 317952 - DNA, 6352 bp, Homo sapiens
  misc_feature (3634)..(3634): n is a, c, g, or t
  misc_feature (4191)..(4191): n is a, c, g, or t
  misc_feature (4197)..(4197): n is a, c, g, or t
  misc_feature (4211)..(4211): n is a, c, g, or t
  misc_feature (4229)..(4229): n is a, c, g, or t
  misc_feature (4239)..(4239): n is a, c, g, or t
  misc_feature (5121)..(5121): n is a, c, g, or t
  misc_feature (5391)..(5391): n is a, c, g, or t
atgattttgatcagatatctaggaaggtgcaggtttagaaatttggtgtctcgatatccaaggacatttcagtaagaatagaatttctcatatgaccagagaggcgcttaaagactgggacggaaatgaaaaataaggtgtggaagattcagagtggacaatgtttaaggagatttgagagggcacacagtaagggtgtcacctgtctaagcttttctaaggatagcagtcagatccttagtgcttcttttgaccagacaattagaattcatggtttaaaatctgggaaaaccctgaaggaatttcgtggccattcctcctttgttaacgaagcaacatttacacaagatggacattacattattagtgcatcctctgatggcactgtaaagatctggaatatgaagaccacagaatgttcaaatacctttaaatccctgggcagcaccgcagggacagatattaccgtcaacagtgtgattctacttcctaaaaaccctgagcactttgtggtgtgcaacagatcaaacacggtggtcatcatgaacatgcaggggcagattgtcagaagcttcagttctggtaaaagagaaggtggggactttgtttgctgtgccctctctccccgtggtgaatggatctactgtgtaggggaggactttgtgctctactgtttcagtacagtcactggcaaactggagagaactttgacagtgcacgagaaggatgtgattggtattgcacatcaccctcatcagaacctgattgctacctacagtgaagatggactcctaaagctctggaaaccataattcaacttttctttttaaatcagctcgaaagcatgtacttaaatgaagcatattcatgtaatgtgcttttttttttttttgccagcttttctaagcaaatagattgtctgaattagtcacagaataattttgtgaaaattcatgtttaagtagcaactaccctttctttttttatatatttttaaggtattagtttatcttcttctaactggtgcagtcacttaatgttttcattaatcttcgacctggagagtgaaatactgatatttctagaaaaaaattctactcctctgattatttgaaatgctgaggaaaatgtccctcccatagtaaaacttgtaaataaggaactatatcatattcagtagctgtgttctgttccatctttttttttttttttgagatggagttttgcttgttgcccaggctggagtgcagcggcacgatcttggttcactgcaacctccgcctcccaggttcaagcgattctcttgcctcagcctcccgagtagctggggactacaggtgtgcgacaccatgcctggctaatttttttgtatttttagtagagatggggtttcaccatgttggccaggctggtctcaaactcctgacctcaaaggatccacccgccttggcctcccaaagtgctgggatcacaggcgtgagccaccatgcccggcccatctttttttttttttttttttttaaagatgttaataaactttatacctttctggagactttgttctaaaatgtacataaatgctcatctagttaacatatttacttagaatgtgggaggaggagtcacattattatccctgaatctcaagtacagcagaagtgaattcctgggatagtaggatagactaacatgtaaaaaggccaggtgatgcataggttctcatttcactgccctcagccttcctctccttctgagctgtgccttctcacatgttcagtcaactccagggaatattgtctccatcttctggatagaactagttgcaggatccgttacaagaattcagagttttggcatctcccctttgtatgttgtaggagaaggtttggcattgaaaatgtgctgttgttccaaagaaaaattagcaaaggacttgagatttagaaaagtctcctttgtaatgtgcatcattaccagttatctaaagaaaaacatgtaaaagccaacaaaacccttgaaaatattttgcatatggatgtctgtttcacgtttcaactgaagatgtatagagcacctctgatgatgaggaagataccatgctaggcagtactttcaagaacgtgagttcttatttctgcaggccttttgtgcccccttttaaatgttagcatttattaggtacaaactagtggggaaggtttttttaaaaagttttgcagtcttgtaatttacctttttaaaaaatttattttatttttctgagatggagtcttgctctgttgcccaggctggagtgcagtggtgccatctcagctaactgcaacttccacttcccaggttcaagcgattctcctgccttagcctcccaagtagctgggactacaggcgcatgccagcatgcctggctaatttttgtatttttagtagagcgggggttttgccatgttggccaggctggtcttgaactcctgacctcaggtgatccgcctgccctggcctcccaaagtgctgggattacaggcatgagccactgcgcccagccttgtaatttacctttgatggtgacctgaaatgcagtatgatcctatatgtggcacgtagtaatgttcagtgtttgctgaattaattctgggcagcactaagaaatccctctttcccagtcatattctataacacatttcccatttgccacaaaacctgcagctttttggtccaggtaatgacatttgctgccattttgatgatttaaaaatggtcgtgggagttgaacatagtcatgaattcaggattcctgagcatgtagacagtcatcccagtggaaagacacgttcacttaagagaagtttaagttagaggaaacagtttatgctaaaaaaatttttagaaaagtccttgagaatttttgatttagtcttgacctcatgaagctggtagttatgatgtgcatagtttgtatcaccgtttatgaagatggagaatctagtcagcacgtgttggtttattctaggaatttttagggaacacttctgttgctggcaccaggtgatgaatatggttaaaaaaagactcgtttctgcctaaacatagggaagaagagcaaattaaaaggagtaattaaaactgataaaagctcaagttacctttgtgatgatgaggcgggcagttaacgcgaaagggttgggaaaggcttcctggagggactagggggcggtctaagcacagggaacctaaccggggactccagtgtggcacagcggcaaggtatgtgctgggcaaaatgataggtgtcttgggagaccaggcaaagagagctggattaggagccgttaagtatatatttttcttctttttaaataaaataatgcactgggtgaacatgtaaacgctaagttgaaaatctgcctttcccaggtaacccttgttaatctttctacaacttcatttcgtacaaacctgaaaaacacactgattttgtctttaaatgggcacacgctgcttacactcctcggcgcctagcctttctgaagccccacgcggccgtccctccagcattgaaggctggggcagcccagctcccctccagcgcccttacagccagaccgcggcggggtcgggccgcgcacgcgcagggcgnacggccggatctggggcgccgctgctccgggtggtcggaggtaggagtcccatcttgggtccagggccggtagagccccttaccgggggtagggagactgcgcacccgctagagccaactgtcagggcctgcagacgtcgggtgacgtcactgttacaaaattggcggtcacatcgtcttaagggccggtggcagcggctgcgcgaacgggagttggctgccgggaatcagtgctcacttccttctgaattgggcgtgtgcagtcggttcctagggaagtgctctgctgcagccaccagatttaacggatgctgctctctagcacttaacatagaagctaaactacctggcgttaaaattaattccatgagcataaggacatttgtcctatcccctattctgctgttgaattaatgactggaaaacattgcgcggaggtatttgggagtagtatggctttttttttttttttttttttaacagcaaatggtataaatctcaggtacaattcagtatcttcttcaccagttgttttttttcagcatgtattattactnccactnacggcctctgttgngcccttccttgctatgtnagcagccatntttaattctcagaacaatgtaatgagggtgcgcaaatgcacatgaagaaacaggtttccagacgtgaggcacctaactcagtccaacttgcacgaagctcgcattgaaaaccagatgtgactccgaagctaggttttttttctctcttgcctcactctcaatattgctgtcagttcctcctcaatctttaggtttgggcagggacaaagaatacatggattgttcctccacatgctgcaaacacattcacctaagcagagcacaggtagtgagatgagtagagagaactgaattagaggattctggatgtcagtctttgctgtcacttcttttggcttgtgctagaacagtggttcttacaagtgtcacgtgatagacacattctaaggtcctatcccagacctacagaatcagaaattggtggtggggcccagcaagcgtgctcaaatttgagagcaggtagactacagggtagtttccgcatatacaaaaggtgttttaattcttgctgtcagtctcagaagtttcatgctgagataaccaaatttaaatgataaaggtgcaagactgactcttaaaatcacattttttcaaattgccatagcttgctagtgttctcattcactgtgcttttacagcttcattttccactattttaagagaagaaattgctatgaagtgtatgtccaagtgaggaagttccctggtctgaggttgtttaaaacttacaataggccgggcacggtggctcaagcctgtaatcccagcactttgggaggccgaggtgggtggatcacgaggtcaggagttcaagaccaccctggccaacatggtgacaccctgtctctactaaggatacaaaattagccgggcatggtggcncacgcctgtagtcccagctacctaggaggctgaggcaggagaatagctggaacccgggaggcagaggttgcagtgagctgagactgtgccactgcactccagcctgggtgacagagcaagacttggtctcaaaaacaaaaaacaaaaaaaccaaacttggaatagcaagggctgcccattatttaaccttccacggcaattttaacagtggtattctgttccaagtggttaatattaaatccatgtgtcagtgttggtggctttcaaccntggctgcgcataatcattttgatgcttaggctacacccagccgagttatacagaatccctggagggtgggacctgatgagtgttttaatgtttcccgggtaattccaatggtagccaaggttaagaaccagtaccgtacgtacaaaaaagttgagaagctaatttcacgtacagaaaatttgccactgttccaagagcactctcaagcgacataattggcctctactcctattccctacaagtatgaatgggcaggagaagcatcacagagaaagcagagttagtgctggaacttgtatttttgtggatgatgaccttggttaatgttttttcataggctctgtttcataggctttgttttttcataggctctccctcattgcattgttctgagaattgaatgtggctgcttgcatggtaatgaggggttcaacggaggctgttggtggtagtgataatacaagctgaaaaactacacagacaaacctatcagtttctgcctcttcaggatataactattaggttggtgcaaaagtaattgcggtttttgccattaaaagtaatggcacattacttttgcaccaaccgacctaatatgactttcttttagtgttcttaggatttttaattgtaaaacatgtaacaaattttcctaaacaattgtgcaattcagtggcattatttacgatgttacgcaaccactattgtatttccaaaatgtcatcaccctaaacagaagccctgtaacattgtcaattaacttctccttcccttcccctcagcctttggtactgtttctgcctcaatgcatttgtctaagtttagttcatataagtgaaattatacaatacttgtccttttttatctggcttatttcatttagcatgttttaaaggttcatccatgtatcaaacagtaaagtgcttcatatttgggggaagtataaaaagtattcctttta

SEQ ID NO: 317953 - DNA, 1810 bp, Homo sapiens
actctatctccagagcgggagccagacgccgacccaagcggaagtgacgttaggtgtccgccggaggtgtcgttggtgtgttgcgcgactggccttgagggagagctggggcctgctcccggagagatacggctatgtcgatcgaaatcgaatcttcggatgtgatccgccttattatgcagtacttgaaggagaacagtttacatcgggcgttagccaccttgcaggaggagactactgtgtctctgaatactgtggacagcattgagagttttgtggctgacattaacagtggccattgggatactgtgttgcaggctatacagtctctgaaattgccagacaaaaccctcattgacctctatgaacaggttgttctggaattgatagagctccgtgaattgggtgctgccaggtcacttttgagacagactgatcccatgatcatgttaaaacaaacacagccagagcgatatattcatctggagaaccttttggccaggtcttactttgatcctcgtgaggcatacccagatggaagtagcaaagaaaagagaagagcagcaattgcccaggccttagctggcgaagtcagtgtggtgcctccatctcgtctcatggcattgctgggacaggcactgaagtggcagcagcatcagggattgcttcctcctggtatgaccatagatttgtttcgaggcaaggcagctgtcaaagatgtggaagaagaaaagtttcctacacaactgagcaggcatattaagtttggtcagaaatcacatgtggagtgtgctcgattttctccagatggtcagtatttggtcactgggtctgttgatggattcattgaagtatggaactttactactggaaaaatcagaaaggatcttaagtaccaggcccaagataactttatgatgatggatgatgctgtcctctgcatgtgtttcagcagagatacagaaatgttagcaactggggcccaagatggaaaaatcaaggtgtggaagattcagagtggacaatgtttaaggagatttgagagggcacacagtaagggtgtcacctgtctaagcttttctaaggatagcagtcagatccttagtgcttcttttgaccagacaattagaattcatggtttaaaatctgggaaaaccctgaaggaatttcgtggccattcctcctttgttaacgaagcaacatttacacaagatggacattacattattagtgcatcctctgatggcactgtaaagatctggaatatgaagaccacagaatgttcaaatacctttaaatccctgggcagcaccgcagggacagatattaccgtcaacagtgtgattctacttcctaaaaaccctgagcactttgtggtgtgcaacagatcaaacacggtggtcatcatgaacatgcaggggcagattgtcagaagcttcagttctggtaaaagagaaggtggggactttgtttgctgtgccctctctccccgtggtgaatggatctactgtgtaggggaggactttgtgctctactgtttcagtacagtcactggcaaactggagagaactttgacagtgcacgagaaggatgtgattggtattgcacatcaccctcatcagaacctgattgctacctacagtgaagatggactcctaaagctctggaaaccataattcaacttttctttttaaatcagctcgaaagcatgtacttaaatgaagcatattcatgtaatgtgctttttttttttttttttttttttttttttttttttttttttttttttttttgttgggcgggggggggg

SEQ ID NO: 317954 - DNA, 732 bp, Homo sapiens
actctatctccagagcgggagccagacgccgacccaagcggaagtgacgttaggtgtccgccggaggtgtcgttggtgtgttgcgcgactggccttgagggagagctggggcctgctcccggagagatacggctatgtcgatcgaaatcgaatcttcggatgtgatccgccttattatgcagtacttgaaggagaacagtttacatcgggcgttagccaccttgcaggaggagactactgtgtctctgaatactgtggacagcattgagagttttgtggctgacattaacagtggccattgggatactgtgttgcaggctatacagtctctgaaattgccagacaaaaccctcattgacctctatgaacaggttgttctggaattgatagagctccgtgaattgggtgctgccaggtcacttttgagacagactgatcccatgatcatgttaaaacaaacacagccagagcgatatattcatctggagaaccttttggccaggtcttactttgatcctcgtgaggcatacccagatggaagtagcaaagaaaagagaagagcagcaattgcccaggccttagctggcgaagtcagtgtggtgcctccatctcgtctcatggcattgctgggacaggcactgaagtggcagcagcatcagggattgcttcctcctggtatgaccatagatttgtttcgaggcaaggcagcaccaccaatacgggggatcctct

SEQ ID NO: 317955 - DNA, 992 bp, Homo sapiens
ggtcacactcctctgtgacacgcgaggctcctcagttacttagccaacggcagaggcgggaagtgagaggagtctggggctggggctgccttccaggcccacggggcggcccgctcttttcggatggttacctttgggcagagtggagactgctgcacggactctggaaccatgaacatatttgatcgaaagatcaactttgatgcgcttttaaaattttctcatataaccccgtcaacgcagcagcacctgaagaaggtctatgcaagttttgccctttgtatgtttgtggcggctgcaggggcctatgtccatatggtcactcatttcattcaggctggcctgctgtctgccttgggctccctgatattgatgatttggctgatggcaacacctcatagccatgaaactgaacagaaaagactgggacttcttgctggatttgcattccttacaggagttggcctgggccctgccctggagttttgtattgctgtcaaccccagcatccttcccactgctttcatgggcacggcaatgatctttacctgcttcaccctcagtgcactctatgccaggcgccgtagctacctctttctgggaggtatcttgatgtcagccctgagcttgttgcttttgtcttccctggggaatgttttctttggatccatttggcttttccaggcaaacctgtatgtgggactggtggtcatgtgtggcttcgtcctttttgatactcaactcattattgaaaaggccgaacatggagatcaagattatatctggcactgcattgatctcttcttagatttcattactgtcttcagaaaactcatgatgatcctggccatgaatgaaaaggataagaagaaagagaagaaatgaagtgaccatccagcctttcccaattagacttcctctccttccacccctcatttcctttttgcacacattacaggtggtgtgttctgtgataatgaaaagcatcagaa

SEQ ID NO: 317956 - DNA, 432 bp, Homo sapiens
ggtaccccagacttctgactcggccaccatggggccagtcctgcagatacagtctcatgttccagttactcaggacacaccccgtcgggtggagcgctccacccgacggggtgggggtggggacagctgcttaacctttattcttggtcggtctgtcggcaactttgggaaccaccagtaggatgtggttaagattcagttcttgctgagctaaggaagcatttctcatttctttttaattgtctggctcacttctagtccctaactaaatgctcactcaagagttttagcttgaatgtcaaatgtcaaaaaattaattgggtgatttttctccatttctaggataagaagaaagagaagaaatgaagtgaccatccagcctttcccaattagtcgggtggagcggggtcctctagatcgacacagcgacac

SEQ ID NO: 317957 - DNA, 1032 bp, Homo sapiens
gaatgtgttgcacaaattgggccttatggcgggtttgtgtccccccactgttgggggcccctgtccccgagatttgggggctaacaatgtgggggtgacaactcattatggggttttcaccagaagacttgtccttggggttcaacaacagaacaggattacccccgcaggggggtcactttttggggaattgtttttgcgtctttttgaggtggtgtttccagtggctttccacgggtgacagagttcggagccgccttgtaggggttccttattcccgtattgggccacttaattgtttgggcgttttcccctaatttgcagccaaccccggggcgccacgtctgtgtgcacacccgtgggcgccctccgggtgtcacacccggggcacccccaggtccactgtgggtacatccttggaaaatctacctttggtgttgaaaaggtgtgttctaatttcccggaggggaaacaggcccaccccgcgatgggctcacacacttcaccgaaggaattcctgctcctttgagaatttatctgctggcctcccacgacctctctggcttttagaaactctatttaaaaggcaccttccttcctcgctttaacaccccgcgtgtaaacttgtccccaaaaattgtggggagattttctctggctaaggcctcataagaattttgtagggtacacatctctcttgtgaagcccaaatccaccccttttgtgcgcttctttgcctgtggaatataatgggtgtttttcctttatggaacccctgcccacagagaatagacaccacagagatattaaaaaaaaaaaagaaagaaaaaaaaaaaaacacctacttttaaagaaaatacctaacagatttttaatatagttatctctaccactttcttttctagtttcttgattttcagctcaggctgcattctaactcatactgtgaagacaaaggtgtttttgattcagaaatatatgaaatctgcatagtcttaatttgtaaaaaataaagaaaattccttaaccttt

SEQ ID NO: 317958 - DNA, 809 bp, Homo sapiens
  misc_feature (586)..(586): n is a, c, g, or t
tttctcacttggtgcctcggtgcataaaaaagttttctgtataacataattctctctttgtggtagccaatgtttttttatcgcccgtccacctatatttagtcccactgtcttctgttgttaacaccccatattattcacccccttacaaacgttttagtaattttttcccctcttatagtgcgttgtattatacttctctgtcaggagagtgagtttttcttccccccaacatattgtttcttccccctcccccccaatgatagatagtggtgtgctgcctttttcccacacagatgttgtctcctccgtgttgccgcttctgttgtcccaccttcttcccccgtttatgttgtatccagctgcgccgcccctcgcctccctgtttataattaataggccccccctctatttgtgggcgcccccccttcttctatccaaagataatgctcggctgctccgctgcctatttaggtggtgccctcccctggaggagcttctcttttcccccccccccccttttttttttttttttttttttttttttttttttttttttttttttttttttttttttttttttttnaaggttaaggaattttctttattttttacaaattaagactatgcaaaatacctaacagatttttaatatagttatctctaccactttcttttctagtttcttgattttcagctcaggctgcattctaactcatactgtgaagacaaaggtgtttttgattcagaaatatatgaaatctgcatagtcttaatttgtaaaaaataaagaaaattccttaaccttt

SEQ ID NO: 317959 - DNA, 771 bp, Homo sapiens
  misc_feature (586)..(586): n is a, c, g, or t
tttctcacttggtgcctcggtgcataaaaaagttttctgtataacataattctctctttgtggtagccaatgtttttttatcgcccgtccacctatatttagtcccactgtcttctgttgttaacaccccatattattcacccccttacaaacgttttagtaattttttcccctcttatagtgcgttgtattatacttctctgtcaggagagtgagtttttcttccccccaacatattgtttcttccccctcccccccaatgatagatagtggtgtgctgcctttttcccacacagatgttgtctcctccgtgttgccgcttctgttgtcccaccttcttcccccgtttatgttgtatccagctgcgccgcccctcgcctccctgtttataattaataggccccccctctatttgtgggcgcccccccttcttctatccaaagataatgctcggctgctccgctgcctatttaggtggtgccctcccctggaggagcttctcttttcccccccccccccttttttttttttttttttttttttttttttttttttttttttttttttttttttttttttttttttnaaggttaaggaattttctttattttttacaaattaagactatgcgctcaggctgcattctaactcatactgtgaagacaaaggtgtttttgattcagaaatatatgaaatctgcatagtcttaatttgtaaaaaataaagaaaattccttaacctttgcggacgcgtgggtcgcccacgcgtccg

SEQ ID NO: 317960 - DNA, 2098 bp, Homo sapiens
atccccgagcctaagggctacccaaagaatgaaaaggataagaagaaagagaagaaatgaagtgaccatccagcctttcccaattagacttcctctccttccacccctcatttcctttttgcacacattacaggtggtgtgttctgtgataatgaaaagcatcagaaaagcttttgtactttgtggtttcctctattttgaattttttgatcaaaaaactgattagcagaatatagtttggagtttggcttcatcttcctggggttcccctcactcccttttttgtcaaccccatctgtagcctcttcctctactcaggcagtcgacccgccacgatgagaagtgggaccagcagagggcgccaacttcaggagtccgctttcccaccaggcttcattcacccagtggacctgaactgtttggtagagccacccggcccttccttcctcattgttgtttggtatgcgcacagttcctgtgggactgggccgtgagttttccattggaaagaagttcagtggtcccattgttaactcagcctcaaatctcaactgtcaggccctacaaagaaaatggagagcctcttctggtggatgctttgctccctctgagctgcccatgctggtctggcaaacacacctttctgctttgccttcacaaaagtaatgtgttccctttcccaccccttgcctgaccctcagggagtcagcctgcttccatccatgggtgggaagacttcagcacaaaggaaagactaattcttgtcaggcatttttgaaaaggctgattatgtgtatcaaggtacagcatcgtagggttcccctaaacttgccctgtttttgtttttttagtttgttatccccttactgagcggcctctactaggtggctgtgattaaatgtcccaagcaaggatagggaaggggaatggttgagcctctggagatcattgtaaccaatcctgccagacctgtttggggcagtggggagcaaacctagataaggacctgtttggggcagcagggagcaaaatctcctttaacaaccaagcagttcctcattcacatcaacagagcgaggctgtgataacttaggaggcagcaatcctaatagtccttcagtgcattttagtctgtctccaactggacaccagtaggtagtgtcaagccagagattcggggcagtagataaatgttcattttactgatgcactttagtttttggtctgttacctgttttccagaaatttgtggccttttaggcgggagttaggcgaccaaaccagtgagagccccaatccctgcagttttgtggcttcaagtgtgggtggacagtcctaatggggatctccagctccttcctgtgggctgccacagacagctacccccagaagggtcaatgttgggagtggttgtggctctgagctgctctacagagcttcagtgtgagaggatcgagccattgaaagctcattaccagtaggacataatttttggctctccctattcacaaccagtgcacagtttgacacagtggcctcaggttcacagtgcaccatgtcactgtgctatcctacgaaatcatttgtttctaagttgtgtttattcctggagtgacatgccaccccgaatggctcactttcactgaggatgctgtcctctgatttagctgctgcctccagcctctggcttgagaacttactaaaggcacttccttcctgttaaacccctgttaactctccataaatttggtgattctctgctaggcctaagattttgagttaacatctcttgaagccaaactccaccttctgtgctttttgcttgggataatggagtttttctttagaaacagtgccaagaatgacaagatattaaaaaaaaaaaagaaagaaaaaaaaaaaaacacctacttttaaagaaaatacctaacagatttttaatatagttatctctaccactttcttttctagtttcttgattttcagctcaggctgcattctaactcatactgtgaagacaaaggtgtttttgattcagaaatatatgaaatctgcatagtcttaatttgtaaaaaataaagaaaattccttaaccttt

SEQ ID NO: 317961 - DNA, 2567 bp, Homo sapiens
ttgggatttgaagttgttgcccatttatccatccatccatccatccagtcatccatccacccatccactcacccacccatctatccacccaactacccattcactcactcttccactcacctgtctacccatccacccattcttccatccatccatccacctgtccacccaacttctcatccacttatccatctactcacccatccatctaccctccacttatccattcatccatccttccaccccgtcgggtggagcgctccacccgacggggtgggggtggggacagctgcttaacctttattcttggtcggtctgtcggcaactttgggaaccaccagtaggatgtggttaagattcagttcttgctgagctaaggaagcatttctcatttctttttaattgtctggctcacttctagtccctaactaaatgctcactcaagagttttagcttgaatgtcaaatgtcaaaaaattaattgggtgatttttctccatttctaggataagaagaaagagaagaaatgaagtgaccatccagcctttcccaattagacttcctctccttccacccctcatttcctttttgcacacattacaggtggtgtgttctgtgataatgaaaagcatcagaaaagcttttgtactttgtggtttcctctattttgaattttttgatcaaaaaactgattagcagaatatagtttggagtttggcttcatcttcctggggttcccctcactcccttttttgtcaaccccatctgtagcctcttcctctactcaggcagtcgacccgccacgatgagaagtgggaccagcagagggcgccaacttcaggagtccgctttcccaccaggcttcattcacccagtggacctgaactgtttggtagagccacccggcccttccttcctcattgttgtttggtatgcgcacagttcctgtgggactgggccgtgagttttccattggaaagaagttcagtggtcccattgttaactcagcctcaaatctcaactgtcaggccctacaaagaaaatggagagcctcttctggtggatgctttgctccctctgagctgcccatgctggtctggcaaacacacctttctgctttgccttcacaaaagtaatgtgttccctttcccaccccttgcctgaccctcagggagtcagcctgcttccatccatgggtgggaagacttcagcacaaaggaaagactaattcttgtcaggcatttttgaaaaggctgattatgtgtatcaaggtacagcatcgtagggttcccctaaacttgccctgtttttgtttttttagtttgttatccccttactgagcggcctctactaggtggctgtgattaaatgtcccaagcaaggatagggaaggggaatggttgagcctctggagatcattgtaaccaatcctgccagacctgtttggggcagtggggagcaaacctagataaggacctgtttggggcagcagggagcaaaatctcctttaacaaccaagcagttcctcattcacatcaacagagcgaggctgtgataacttaggaggcagcaatcctaatagtccttcagtgcattttagtctgtctccaactggacaccagtaggtagtgtcaagccagagattcggggcagtagataaatgttcattttactgatgcactttagtttttggtctgttacctgttttccagaaatttgtggccttttaggcgggagttaggcgaccaaaccagtgagagccccaatccctgcagttttgtggcttcaagtgtgggtggacagtcctaatggggatctccagctccttcctgtgggctgccacagacagctacccccagaagggtcaatgttgggagtggttgtggctctgagctgctctacagagcttcagtgtgagaggatcgagccattgaaagctcattaccagtaggacataatttttggctctccctattcacaaccagtgcacagtttgacacagtggcctcaggttcacagtgcaccatgtcactgtgctatcctacgaaatcatttgtttctaagttgtgtttattcctggagtgacatgccaccccgaatggctcactttcactgaggatgctgtcctctgatttagctgctgcctccagcctctggcttgagaacttactaaaggcacttccttcctgttaaacccctgttaactctccataaatttggtgattctctgctaggcctaagattttgagttaacatctcttgaagccaaactccaccttctgtgctttttgcttgggataatggagtttttctttagaaacagtgccaagaatgacaagatattaaaaaaaaaaaagaaagaaaaaaaaaaaaacacctacttttaaagaaaatacctaacagatttttaatatagttatctctaccactttcttttctagtttcttgattttcagctcaggctgcattctaactcatactgtgaagacaaaggtgtttttgattcagaaatatatgaaatctgcatagtcttaatttgtaaaaaataaagaaaattccttaaccttt

SEQ ID NO: 317962 - DNA, 2347 bp, Homo sapiens
gcaggcagctgatgctgatgtcgaatctagaggtccccgctccacccgacggggtgggggtggggacagctgcttaacctttattcttggtcggtctgtcggcaactttgggaaccaccagtaggatgtggttaagattcagttcttgctgagctaaggaagcatttctcatttctttttaattgtctggctcacttctagtccctaactaaatgctcactcaagagttttagcttgaatgtcaaatgtcaaaaaattaattgggtgatttttctccatttctaggataagaagaaagagaagaaatgaagtgaccatccagcctttcccaattagacttcctctccttccacccctcatttcctttttgcacacattacaggtggtgtgttctgtgataatgaaaagcatcagaaaagcttttgtactttgtggtttcctctattttgaattttttgatcaaaaaactgattagcagaatatagtttggagtttggcttcatcttcctggggttcccctcactcccttttttgtcaaccccatctgtagcctcttcctctactcaggcagtcgacccgccacgatgagaagtgggaccagcagagggcgccaacttcaggagtccgctttcccaccaggcttcattcacccagtggacctgaactgtttggtagagccacccggcccttccttcctcattgttgtttggtatgcgcacagttcctgtgggactgggccgtgagttttccattggaaagaagttcagtggtcccattgttaactcagcctcaaatctcaactgtcaggccctacaaagaaaatggagagcctcttctggtggatgctttgctccctctgagctgcccatgctggtctggcaaacacacctttctgctttgccttcacaaaagtaatgtgttccctttcccaccccttgcctgaccctcagggagtcagcctgcttccatccatgggtgggaagacttcagcacaaaggaaagactaattcttgtcaggcatttttgaaaaggctgattatgtgtatcaaggtacagcatcgtagggttcccctaaacttgccctgtttttgtttttttagtttgttatccccttactgagcggcctctactaggtggctgtgattaaatgtcccaagcaaggatagggaaggggaatggttgagcctctggagatcattgtaaccaatcctgccagacctgtttggggcagtggggagcaaacctagataaggacctgtttggggcagcagggagcaaaatctcctttaacaaccaagcagttcctcattcacatcaacagagcgaggctgtgataacttaggaggcagcaatcctaatagtccttcagtgcattttagtctgtctccaactggacaccagtaggtagtgtcaagccagagattcggggcagtagataaatgttcattttactgatgcactttagtttttggtctgttacctgttttccagaaatttgtggccttttaggcgggagttaggcgaccaaaccagtgagagccccaatccctgcagttttgtggcttcaagtgtgggtggacagtcctaatggggatctccagctccttcctgtgggctgccacagacagctacccccagaagggtcaatgttgggagtggttgtggctctgagctgctctacagagcttcagtgtgagaggatcgagccattgaaagctcattaccagtaggacataatttttggctctccctattcacaaccagtgcacagtttgacacagtggcctcaggttcacagtgcaccatgtcactgtgctatcctacgaaatcatttgtttctaagttgtgtttattcctggagtgacatgccaccccgaatggctcactttcactgaggatgctgtcctctgatttagctgctgcctccagcctctggcttgagaacttactaaaggcacttccttcctgttaaacccctgttaactctccataaatttggtgattctctgctaggcctaagattttgagttaacatctcttgaagccaaactccaccttctgtgctttttgcttgggataatggagtttttctttagaaacagtgccaagaatgacaagatattaaaaaaaaaaaagaaagaaaaaaaaaaaaacacctacttttaaagaaaatacctaacagatttttaatatagttatctctaccactttcttttctagtttcttgattttcagctcaggctgcattctaactcatactgtgaagacaaaggtgtttttgattcagaaatatatgaaatctgcatagtcttaatttgtaaaaaataaagaaaattccttaaccttt

SEQ ID NO: 317963 - DNA, 2103 bp, Homo sapiens
aattcaagcttctaacgatgtacggggacatgaatgaaaaggataagaagaaagagaagaaatgaagtgaccatccagcctttcccaattagacttcctctccttccacccctcatttcctttttgcacacattacaggtggtgtgttctgtgataatgaaaagcatcagaaaagcttttgtactttgtggtttcctctattttgaattttttgatcaaaaaactgattagcagaatatagtttggagtttggcttcatcttcctggggttcccctcactcccttttttgtcaaccccatctgtagcctcttcctctactcaggcagtcgacccgccacgatgagaagtgggaccagcagagggcgccaacttcaggagtccgctttcccaccaggcttcattcacccagtggacctgaactgtttggtagagccacccggcccttccttcctcattgttgtttggtatgcgcacagttcctgtgggactgggccgtgagttttccattggaaagaagttcagtggtcccattgttaactcagcctcaaatctcaactgtcaggccctacaaagaaaatggagagcctcttctggtggatgctttgctccctctgagctgcccatgctggtctggcaaacacacctttctgctttgccttcacaaaagtaatgtgttccctttcccaccccttgcctgaccctcagggagtcagcctgcttccatccatgggtgggaagacttcagcacaaaggaaagactaattcttgtcaggcatttttgaaaaggctgattatgtgtatcaaggtacagcatcgtagggttcccctaaacttgccctgtttttgtttttttagtttgttatccccttactgagcggcctctactaggtggctgtgattaaatgtcccaagcaaggatagggaaggggaatggttgagcctctggagatcattgtaaccaatcctgccagacctgtttggggcagtggggagcaaacctagataaggacctgtttggggcagcagggagcaaaatctcctttaacaaccaagcagttcctcattcacatcaacagagcgaggctgtgataacttaggaggcagcaatcctaatagtccttcagtgcattttagtctgtctccaactggacaccagtaggtagtgtcaagccagagattcggggcagtagataaatgttcattttactgatgcactttagtttttggtctgttacctgttttccagaaatttgtggccttttaggcgggagttaggcgaccaaaccagtgagagccccaatccctgcagttttgtggcttcaagtgtgggtggacagtcctaatggggatctccagctccttcctgtgggctgccacagacagctacccccagaagggtcaatgttgggagtggttgtggctctgagctgctctacagagcttcagtgtgagaggatcgagccattgaaagctcattaccagtaggacataatttttggctctccctattcacaaccagtgcacagtttgacacagtggcctcaggttcacagtgcaccatgtcactgtgctatcctacgaaatcatttgtttctaagttgtgtttattcctggagtgacatgccaccccgaatggctcactttcactgaggatgctgtcctctgatttagctgctgcctccagcctctggcttgagaacttactaaaggcacttccttcctgttaaacccctgttaactctccataaatttggtgattctctgctaggcctaagattttgagttaacatctcttgaagccaaactccaccttctgtgctttttgcttgggataatggagtttttctttagaaacagtgccaagaatgacaagatattaaaaaaaaaaaagaaagaaaaaaaaaaaaacacctacttttaaagaaaatacctaacagatttttaatatagttatctctaccactttcttttctagtttcttgattttcagctcaggctgcattctaactcatactgtgaagacaaaggtgtttttgattcagaaatatatgaaatctgcatagtcttaatttgtaaaaaataaagaaaattccttaaccttt

SEQ ID NO: 317964 - DNA, 2541 bp, Homo sapiens
gtcatgacggatcattactgcaccatctggcctgacccttacctggaatctagaatcactggtatatagaagacgacgacgaggaagaggaggagctggaatctgagctggagctggaagcgctaaggcgtagacactgctactagctgtagcagaggatgactctgtattctcattcgctttcttggggggctttttagtagaattgagctgtccgctgacatcttgtaaccgcttttctaattcccgctttttctccaaagccagttcctcctttgtctttcccacaggcttcttaatggtgtagggcttccggggtttcttacgtaggcaggaaaggacatagcgctcaagctctctaagtgtggatggcttgagtgtatcaaaatcaatctcaatctcttctgggtttgaatcacgttaagagggctccctggcttggattatatgcacaactcggcccagcttctccccaggtaatttgttgatgtccaggctcagctgccgcttctcatcgtaactcatgggcgacttcctctccttccacccctcatttcctttttgcacacattacaggtggtgtgttctgtgataatgaaaagcatcagaaaagcttttgtactttgtggtttcctctattttgaattttttgatcaaaaaactgattagcagaatatagtttggagtttggcttcatcttcctggggttcccctcactcccttttttgtcaaccccatctgtagcctcttcctctactcaggcagtcgacccgccacgatgagaagtgggaccagcagagggcgccaacttcaggagtccgctttcccaccaggcttcattcacccagtggacctgaactgtttggtagagccacccggcccttccttcctcattgttgtttggtatgcgcacagttcctgtgggactgggccgtgagttttccattggaaagaagttcagtggtcccattgttaactcagcctcaaatctcaactgtcaggccctacaaagaaaatggagagcctcttctggtggatgctttgctccctctgagctgcccatgctggtctggcaaacacacctttctgctttgccttcacaaaagtaatgtgttccctttcccaccccttgcctgaccctcagggagtcagcctgcttccatccatgggtgggaagacttcagcacaaaggaaagactaattcttgtcaggcatttttgaaaaggctgattatgtgtatcaaggtacagcatcgtagggttcccctaaacttgccctgtttttgtttttttagtttgttatccccttactgagcggcctctactaggtggctgtgattaaatgtcccaagcaaggatagggaaggggaatggttgagcctctggagatcattgtaaccaatcctgccagacctgtttggggcagtggggagcaaacctagataaggacctgtttggggcagcagggagcaaaatctcctttaacaaccaagcagttcctcattcacatcaacagagcgaggctgtgataacttaggaggcagcaatcctaatagtccttcagtgcattttagtctgtctccaactggacaccagtaggtagtgtcaagccagagattcggggcagtagataaatgttcattttactgatgcactttagtttttggtctgttacctgttttccagaaatttgtggccttttaggcgggagttaggcgaccaaaccagtgagagccccaatccctgcagttttgtggcttcaagtgtgggtggacagtcctaatggggatctccagctccttcctgtgggctgccacagacagctacccccagaagggtcaatgttgggagtggttgtggctctgagctgctctacagagcttcagtgtgagaggatcgagccattgaaagctcattaccagtaggacataatttttggctctccctattcacaaccagtgcacagtttgacacagtggcctcaggttcacagtgcaccatgtcactgtgctatcctacgaaatcatttgtttctaagttgtgtttattcctggagtgacatgccaccccgaatggctcactttcactgaggatgctgtcctctgatttagctgctgcctccagcctctggcttgagaacttactaaaggcacttccttcctgttaaacccctgttaactctccataaatttggtgattctctgctaggcctaagattttgagttaacatctcttgaagccaaactccaccttctgtgctttttgcttgggataatggagtttttctttagaaacagtgccaagaatgacaagatattaaaaaaaaaaaagaaagaaaaaaaaaaaaacacctacttttaaagaaaatacctaacagatttttaatatagttatctctaccactttcttttctagtttcttgattttcagctcaggctgcattctaactcatactgtgaagacaaaggtgtttttgattcagaaatatatgaaatctgcatagtcttaatttgtaaaaaataaagaaaattccttaaccttt

SEQ ID NO: 317965 - DNA, 2043 bp, Homo sapiens
atgtgaggtgactctcaggatcttatcggcggacttcctctccttccacccctcatttcctttttgcacacattacaggtggtgtgttctgtgataatgaaaagcatcagaaaagcttttgtactttgtggtttcctctattttgaattttttgatcaaaaaactgattagcagaatatagtttggagtttggcttcatcttcctggggttcccctcactcccttttttgtcaaccccatctgtagcctcttcctctactcaggcagtcgacccgccacgatgagaagtgggaccagcagagggcgccaacttcaggagtccgctttcccaccaggcttcattcacccagtggacctgaactgtttggtagagccacccggcccttccttcctcattgttgtttggtatgcgcacagttcctgtgggactgggccgtgagttttccattggaaagaagttcagtggtcccattgttaactcagcctcaaatctcaactgtcaggccctacaaagaaaatggagagcctcttctggtggatgctttgctccctctgagctgcccatgctggtctggcaaacacacctttctgctttgccttcacaaaagtaatgtgttccctttcccaccccttgcctgaccctcagggagtcagcctgcttccatccatgggtgggaagacttcagcacaaaggaaagactaattcttgtcaggcatttttgaaaaggctgattatgtgtatcaaggtacagcatcgtagggttcccctaaacttgccctgtttttgtttttttagtttgttatccccttactgagcggcctctactaggtggctgtgattaaatgtcccaagcaaggatagggaaggggaatggttgagcctctggagatcattgtaaccaatcctgccagacctgtttggggcagtggggagcaaacctagataaggacctgtttggggcagcagggagcaaaatctcctttaacaaccaagcagttcctcattcacatcaacagagcgaggctgtgataacttaggaggcagcaatcctaatagtccttcagtgcattttagtctgtctccaactggacaccagtaggtagtgtcaagccagagattcggggcagtagataaatgttcattttactgatgcactttagtttttggtctgttacctgttttccagaaatttgtggccttttaggcgggagttaggcgaccaaaccagtgagagccccaatccctgcagttttgtggcttcaagtgtgggtggacagtcctaatggggatctccagctccttcctgtgggctgccacagacagctacccccagaagggtcaatgttgggagtggttgtggctctgagctgctctacagagcttcagtgtgagaggatcgagccattgaaagctcattaccagtaggacataatttttggctctccctattcacaaccagtgcacagtttgacacagtggcctcaggttcacagtgcaccatgtcactgtgctatcctacgaaatcatttgtttctaagttgtgtttattcctggagtgacatgccaccccgaatggctcactttcactgaggatgctgtcctctgatttagctgctgcctccagcctctggcttgagaacttactaaaggcacttccttcctgttaaacccctgttaactctccataaatttggtgattctctgctaggcctaagattttgagttaacatctcttgaagccaaactccaccttctgtgctttttgcttgggataatggagtttttctttagaaacagtgccaagaatgacaagatattaaaaaaaaaaaagaaagaaaaaaaaaaaaacacctacttttaaagaaaatacctaacagatttttaatatagttatctctaccactttcttttctagtttcttgattttcagctcaggctgcattctaactcatactgtgaagacaaaggtgtttttgattcagaaatatatgaaatctgcatagtcttaatttgtaaaaaataaagaaaattccttaaccttt

SEQ ID NO: 317966 - DNA, 2217 bp, Homo sapiens
atccccgagcctaagggctacccaaagaatgaaaaggataagaagaaagagaagaaatgaagtgaccatccagcctttcccaattagacttcctctccttccacccctcatttcctttttgcacacattacaggtggtgtgttctgtgataatgaaaagcatcagaaaagcttttgtactttgtggtttcctctattttgaattttttgatcaaaaaactgattagcagaatatagtttggagtttggcttcatcttcctggggttcccctcactcccttttttgtcaaccccatctgtagcctcttcctctactcaggcagtcgacccgccacgatgagaagtgggaccagcagagggcgccaacttcaggagtccgctttcccaccaggcttcattcacccagtggacctgaactgtttggtagagccacccggcccttccttcctcattgttgtttggtatgcgcacagttcctgtgggactgggccgtgagttttccattggaaagaagttcagtggtcccattgttaactcagcctcaaatctcaactgtcaggccctacaaagaaaatggagagcctcttctggtggatgctttgctccctctgagctgcccatgctggtctggcaaacacacctttctgctttgccttcacaaaagtaatgtgttccctttcccaccccttgcctgaccctcagggagtcagcctgcttccatccatgggtgggaagacttcagcacaaaggaaagactaattcttgtcaggcatttttgaaaaggctgattatgtgtatcaaggtacagcatcgtagggttcccctaaacttgccctgtttttgtttttttagtttgttatccccttactgagcggcctctactaggtggctgtgattaaatgtcccaagcaaggatagggaaggggaatggttgagcctctggagatcattgtaaccaatcctgccagacctgtttggggcagtggggagcaaacctagataaggacctgtttggggcagcagggagcaaaatctcctttaacaaccaagcagttcctcattcacatcaacagagcgaggctgtgataacttaggaggcagcaatcctaatagtccttcagtgcattttagtctgtctccaactggacaccagtaggtagtgtcaagccagagattcggggcagtagataaatgttcattttactgatgcactttagtttttggtctgttacctgttttccagaaatttgtggccttttaggcgggagttaggcgaccaaaccagtgagagccccaatccctgcagttttgtggcttcaagtgtgggtggacagtcctaatggggatctccagctccttcctgtgggctgccacagacagctacccccagaagggtcaatgttgggagtggttgtggctctgagctgctctacagagcttcagtgtgagaggatcgagccattgaaagctcattaccagtaggacataatttttggctctccctattcacaaccagtgcacagtttgacacagtggcctcaggttcacagtgcaccatgtcactgtgctatcctacgaaatcatttgtttctaagttgtgtttattcctggagtgacatgccaccccgaatggctcactttcactgaggatgctgtcctctgatttagctgctgcctccagcctctggcttgagaacttactaaaggcacttccttcctgttaaacccctgttaactctccataaatttggtgattctctgctaggcctaagattttgagttaacatctcttgaagccaaactccaccttctgtgctttttgcttgggataatggagtttttctttagaaacagtgccaagaatgacaagatattaaaaaaaaaaaagaaagaaaaaaaaaaaaacacctacttttaaagaaaatacctaacagatttttaatatagttatctctaccactttcttttctagtttcttgattttcagctcaggctgcattctaactcatactgtgaagacaaaggtgtttttgattcagaaatatatgaaatctgcatagtcttaatttgtaaaaaataaagaaaattccttaacctttaaaaaaaaaaaaaaatcaaactagtttgttttagggggggcccgggacctaattaaacctatgttgggtgatggcaaattaatgggcgtcttttaccaacgtggaactggggagacctt

SEQ ID NO: 317967 - DNA, 2224 bp, Homo sapiens
tgcacacgccgaggacccacatccgaaggccacactgcacacgccggactcgcggcggtggtaactcggaggtcactgtggacgaagttgttgctgcacacgccgaaggccctaacaagattatatctggcactgcattgatctcttcttagatttcattactgtcttcagaaaactcatgatgatcctggccatgaatgaaaaggataagaagaaagagaagaaatgaagtgaccatccagcctttcccaattagacttcctctccttccacccctcatttcctttttgcacacattacaggtggtgtgttctgtgataatgaaaagcatcagaaaagcttttgtactttgtggtttcctctattttgaattttttgatcaaaaaactgattacctcactcccttttttgtcaaccccatctgtagcctcttcctctactcaggcagtcgacccgccacgatgagaagtgggaccagcagagggcgccaacttcaggagtccgctttcccaccaggcttcattcacccagtggacctgaactgtttggtagagccacccggcccttccttcctcattgttgtttggtatgcgcacagttcctgtgggactgggccgtgagttttccattggaaagaagttcagtggtcccattgttaactcagcctcaaatctcaactgtcaggccctacaaagaaaatggagagcctcttctggtggatgctttgctccctctgagctgcccatgctggtctggcaaacacacctttctgctttgccttcacaaaagtaatgtgttccctttcccaccccttgcctgaccctcagggagtcagcctgcttccatccatgggtgggaagacttcagcacaaaggaaagactaattcttgtcaggcatttttgaaaaggctgattatgtgtatcaaggtacagcatcgtagggttcccctaaacttgccctgtttttgtttttttagtttgttatccccttactgagcggcctctactaggtggctgtgattaaatgtcccaagcaaggatagggaaggggaatggttgagcctctggagatcattgtaaccaatcctgccagacctgtttggggcagtggggagcaaacctagataaggacctgtttggggcagcagggagcaaaatctcctttaacaaccaagcagttcctcattcacatcaacagagcgaggctgtgataacttaggaggcagcaatcctaatagtccttcagtgcattttagtctgtctccaactggacaccagtaggtagtgtcaagccagagattcggggcagtagataaatgttcattttactgatgcactttagtttttggtctgttacctgttttccagaaatttgtggccttttaggcgggagttaggcgaccaaaccagtgagagccccaatccctgcagttttgtggcttcaagtgtgggtggacagtcctaatggggatctccagctccttcctgtgggctgccacagacagctacccccagaagggtcaatgttgggagtggttgtggctctgagctgctctacagagcttcagtgtgagaggatcgagccattgaaagctcattaccagtaggacataatttttggctctccctattcacaaccagtgcacagtttgacacagtggcctcaggttcacagtgcaccatgtcactgtgctatcctacgaaatcatttgtttctaagttgtgtttattcctggagtgacatgccaccccgaatggctcactttcactgaggatgctgtcctctgatttagctgctgcctccagcctctggcttgagaacttactaaaggcacttccttcctgttaaacccctgttaactctccataaatttggtgattctctgctaggcctaagattttgagttaacatctcttgaagccaaactccaccttctgtgctttttgcttgggataatggagtttttctttagaaacagtgccaagaatgacaagatattaaaaaaaaaaaagaaagaaaaaaaaaaaaacacctacttttaaagaaaatacctaacagatttttaatatagttatctctaccactttcttttctagtttcttgattttcagctcaggctgcattctaactcatactgtgaagacaaaggtgtttttgattcagaaatatatgaaatctgcatagtcttaatttgtaaaaaataaagaaaattccttaaccttt

SEQ ID NO: 317968 - DNA, 2500 bp, Homo sapiens
atccccgagcctaagggctacccaaagaatgaaaaggataagaagaaagagaagaaatgaagtgaccatccagcctttcccaattagacttcctctccttccacccctcatttcctttttgcacacattacaggtggtgtgttctgtgataatgaaaagcatcagaaaagcttttgtactttgtggtttcctctattttgaattttttgatcaaaaaactgattagcagaatatagtttggagtttggcttcatcttcctggggttcccctcactcccttttttgtcaaccccatctgtagcctcttcctctactcaggcagtcgacccgccacgatgagaagtgggaccagcagagggcgccaacttcaggagtccgctttcccaccaggcttcattcacccagtggacctgaactgtttggtagagccacccggcccttccttcctcattgttgtttggtatgcgcacagttcctgtgggactgggccgtgagttttccattggaaagaagttcagtggtcccattgttaactcagcctcaaatctcaactgtcaggccctacaaagaaaatggagagcctcttctggtggatgctttgctccctctgagctgcccatgctggtctggcaaacacacctttctgctttgccttcacaaaagtaatgtgttccctttcccaccccttgcctgaccctcagggagtcagcctgcttccatccatgggtgggaagacttcagcacaaaggaaagactaattcttgtcaggcatttttgaaaaggctgattatgtgtatcaaggtacagcatcgtagggttcccctaaacttgccctgtttttgtttttttagtttgttatccccttactgagcggcctctactaggtggctgtgattaaatgtcccaagcaaggatagggaaggggaatggttgagcctctggagatcattgtaaccaatcctgccagacctgtttggggcagtggggagcaaacctagataaggacctgtttggggcagcagggagcaaaatctcctttaacaaccaagcagttcctcattcacatcaacagagcgaggctgtgataacttaggaggcagcaatcctaatagtccttcagtgcattttagtctgtctccaactggacaccagtaggtagtgtcaagccagagattcggggcagtagataaatgttcattttactgatgcactttagtttttggtctgttacctgttttccagaaatttgtggccttttaggcgggagttaggcgaccaaaccagtgagagccccaatccctgcagttttgtggcttcaagtgtgggtggacagtcctaatggggatctccagctccttcctgtgggctgccacagacagctacccccagaagggtcaatgttgggagtggttgtggctctgagctgctctacagagcttcagtgtgagaggatcgagccattgaaagctcattaccagtaggacataatttttggctctccctattcacaaccagtgcacagtttgacacagtggcctcaggttcacagtgcaccatgtcactgtgctatcctacgaaatcatttgtttctaagttgtgtttattcctggagtgacatgccaccccgaatggctcactttcactgaggatgctgtcctctgatttagctgctgcctccagcctctggcttgagaacttactaaaggcacttccttcctgttaaacccctgttaactctccataaatttggtgattctctgctaggcctaagattttgagttaacatctcttgaagccaaactccaccttctgtgctttttgcttgggataatggagtttttctttagaaacagtgccaagaatgacaagatattaaaaaaaaaaaagaaagaaaaaaaaaaaaacacctacttttaaagaaaatacctaacagatttttaatatagttatctctaccactttcttttctagtttcttgattttcagctcaggctgcattctaactcatactgtgaagacaaaggtgtttttgattcagaaatatatgaaatctgcatagtcttaatttgtaaaaaataaagaaaattccttaacctttaaaaaaaaaaaaagcatacacacatatcaaaaaagaaaacaacgaatataacacacaagagaatgaacagaacaagccagacaacaaggccaacagcgcgagccaaaccaacaacaagaacgcccgcagcacacccaaaataccaccatgagcggcaggaagcaagatgcacgcatacagctcaactagtatagaacccgacgacaccgccagtactatgaacctaaacaaaccagcgagcagcagcaaacaaaccaccgggaggaagcaccaaacactcaccgtattgaggagacgacacacgcatgacaggcataacacatggacccagacacaatgaacccacgcgaacacgaccacccggatctgcaagagacgtctatagaaatagacaaccacaac

SEQ ID NO: 317969 - DNA, 2452 bp, Homo sapiens
atccccgagcctaagggctacccaaagaatgaaaaggataagaagaaagagaagaaatgaagtgaccatccagcctttcccaattagacttcctctccttccacccctcatttcctttttgcacacattacaggtggtgtgttctgtgataatgaaaagcatcagaaaagcttttgtactttgtggtttcctctattttgaattttttgatcaaaaaactgattagcagaatatagtttggagtttggcttcatcttcctggggttcccctcactcccttttttgtcaaccccatctgtagcctcttcctctactcaggcagtcgacccgccacgatgagaagtgggaccagcagagggcgccaacttcaggagtccgctttcccaccaggcttcattcacccagtggacctgaactgtttggtagagccacccggcccttccttcctcattgttgtttggtatgcgcacagttcctgtgggactgggccgtgagttttccattggaaagaagttcagtggtcccattgttaactcagcctcaaatctcaactgtcaggccctacaaagaaaatggagagcctcttctggtggatgctttgctccctctgagctgcccatgctggtctggcaaacacacctttctgctttgccttcacaaaagtaatgtgttccctttcccaccccttgcctgaccctcagggagtcagcctgcttccatccatgggtgggaagacttcagcacaaaggaaagactaattcttgtcaggcatttttgaaaaggctgattatgtgtatcaaggtacagcatcgtagggttcccctaaacttgccctgtttttgtttttttagtttgttatccccttactgagcggcctctactaggtggctgtgattaaatgtcccaagcaaggatagggaaggggaatggttgagcctctggagatcattgtaaccaatcctgccagacctgtttggggcagtggggagcaaacctagataaggacctgtttggggcagcagggagcaaaatctcctttaacaaccaagcagttcctcattcacatcaacagagcgaggctgtgataacttaggaggcagcaatcctaatagtccttcagtgcattttagtctgtctccaactggacaccagtaggtagtgtcaagccagagattcggggcagtagataaatgttcattttactgatgcactttagtttttggtctgttacctgttttccagaaatttgtggccttttaggcgggagttaggcgaccaaaccagtgagagccccaatccctgcagttttgtggcttcaagtgtgggtggacagtcctaatggggatctccagctccttcctgtgggctgccacagacagctacccccagaagggtcaatgttgggagtggttgtggctctgagctgctctacagagcttcagtgtgagaggatcgagccattgaaagctcattaccagtaggacataatttttggctctccctattcacaaccagtgcacagtttgacacagtggcctcaggttcacagtgcaccatgtcactgtgctatcctacgaaatcatttgtttctaagttgtgtttattcctggagtgacatgccaccccgaatggctcactttcactgaggatgctgtcctctgatttagctgctgcctccagcctctggcttgagaacttactaaaggcacttccttcctgttaaacccctgttaactctccataaatttggtgattctctgctaggcctaagattttgagttaacatctcttgaagccaaactccaccttctgtgctttttgcttgggataatggagtttttctttagaaacagtgccaagaatgacaagatattaaaaaaaaaaaagaaagaaaaaaaaaaaaacacctacttttaaagaaaatacctaacagatttttaatatagttatctctaccactttcttttctagtttcttgattttcagctcaggctgcattctaactcatactgtgaagacaaaggtgtttttgattcagaaatatatgaaatctgcatagtcttaatttgtaaaaaataaagaaaattccttaacctttaaaaaaaaaaaaaaaaaaaaaaaaaaaaaaaaaaaaaaaaaaaaaaaaaaaaaaaaaaaaaaaaagaaaaaaagagaagaagggaaaaaggaaaaagataaaagaaagaaggaaggaggagttaatgagatggtacagtgtagtatagtaagatgggttaggtgatgaggtgagatagaaggtagctaaacctaggtgtaaggtaatcgtggaggaaagtagtggggtgaggaacgattagtgaaggagggagaggatggttgggtagtgtgtggttttgttggaggggaaacgatttgtgtgatgtatatgggagaggaggaaactataagagtgaaaaaggtagggtggaaa

SEQ ID NO: 317970 - DNA, 2126 bp, Homo sapiens
  misc_feature (2112)..(2112): n is a, c, g, or t
  misc_feature (2126)..(2126): n is a, c, g, or t
atccccgagcctaagggctacccaaagaatgaaaaggataagaagaaagagaagaaatgaagtgaccatccagcctttcccaattagacttcctctccttccacccctcatttcctttttgcacacattacaggtggtgtgttctgtgataatgaaaagcatcagaaaagcttttgtactttgtggtttcctctattttgaattttttgatcaaaaaactgattagcagaatatagtttggagtttggcttcatcttcctggggttcccctcactcccttttttgtcaaccccatctgtagcctcttcctctactcaggcagtcgacccgccacgatgagaagtgggaccagcagagggcgccaacttcaggagtccgctttcccaccaggcttcattcacccagtggacctgaactgtttggtagagccacccggcccttccttcctcattgttgtttggtatgcgcacagttcctgtgggactgggccgtgagttttccattggaaagaagttcagtggtcccattgttaactcagcctcaaatctcaactgtcaggccctacaaagaaaatggagagcctcttctggtggatgctttgctccctctgagctgcccatgctggtctggcaaacacacctttctgctttgccttcacaaaagtaatgtgttccctttcccaccccttgcctgaccctcagggagtcagcctgcttccatccatgggtgggaagacttcagcacaaaggaaagactaattcttgtcaggcatttttgaaaaggctgattatgtgtatcaaggtacagcatcgtagggttcccctaaacttgccctgtttttgtttttttagtttgttatccccttactgagcggcctctactaggtggctgtgattaaatgtcccaagcaaggatagggaaggggaatggttgagcctctggagatcattgtaaccaatcctgccagacctgtttggggcagtggggagcaaacctagataaggacctgtttggggcagcagggagcaaaatctcctttaacaaccaagcagttcctcattcacatcaacagagcgaggctgtgataacttaggaggcagcaatcctaatagtccttcagtgcattttagtctgtctccaactggacaccagtaggtagtgtcaagccagagattcggggcagtagataaatgttcattttactgatgcactttagtttttggtctgttacctgttttccagaaatttgtggccttttaggcgggagttaggcgaccaaaccagtgagagccccaatccctgcagttttgtggcttcaagtgtgggtggacagtcctaatggggatctccagctccttcctgtgggctgccacagacagctacccccagaagggtcaatgttgggagtggttgtggctctgagctgctctacagagcttcagtgtgagaggatcgagccattgaaagctcattaccagtaggacataatttttggctctccctattcacaaccagtgcacagtttgacacagtggcctcaggttcacagtgcaccatgtcactgtgctatcctacgaaatcatttgtttctaagttgtgtttattcctggagtgacatgccaccccgaatggctcactttcactgaggatgctgtcctctgatttagctgctgcctccagcctctggcttgagaacttactaaaggcacttccttcctgttaaacccctgttaactctccataaatttggtgattctctgctaggcctaagattttgagttaacatctcttgaagccaaactccaccttctgtgctttttgcttgggataatggagtttttctttagaaacagtgccaagaatgacaagatattaaaaaaaaaaaagaaagaaaaaaaaaaaaacacctacttttaaagaaaatacctaacagatttttaatatagttatctctaccactttcttttctagtttcttgattttcagctcaggctgcattctaactcatactgtgaagacaaaggtgtttttgattcagaaatatatgaaatctgcatagtcttaatttgtaaaaaataaagaaaattccttaacctttaaaaaaaaaaaaangtcgacgcggccgn

SEQ ID NO: 317971 - DNA, 1758 bp, Homo sapiens
aggattccagtgcttactccacaaacagcaggagtccgctttcccaccaggcttcattcacccagtggacctgaactgtttggtagagccacccggcccttccttcctcattgttgtttggtatgcgcacagttcctgtgggactgggccgtgagttttccattggaaagaagttcagtggtcccattgttaactcagcctcaaatctcaactgtcaggccctacaaagaaaatggagagcctcttctggtggatgctttgctccctctgagctgcccatgctggtctggcaaacacacctttctgctttgccttcacaaaagtaatgtgttccctttcccaccccttgcctgaccctcagggagtcagcctgcttccatccatgggtgggaagacttcagcacaaaggaaagactaattcttgtcaggcatttttgaaaaggctgattatgtgtatcaaggtacagcatcgtagggttcccctaaacttgccctgtttttgtttttttagtttgttatccccttactgagcggcctctactaggtggctgtgattaaatgtcccaagcaaggatagggaaggggaatggttgagcctctggagatcattgtaaccaatcctgccagacctgtttggggcagtggggagcaaacctagataaggacctgtttggggcagcagggagcaaaatctcctttaacaaccaagcagttcctcattcacatcaacagagcgaggctgtgataacttaggaggcagcaatcctaatagtccttcagtgcattttagtctgtctccaactggacaccagtaggtagtgtcaagccagagattcggggcagtagataaatgttcattttactgatgcactttagtttttggtctgttacctgttttccagaaatttgtggccttttaggcgggagttaggcgaccaaaccagtgagagccccaatccctgcagttttgtggcttcaagtgtgggtggacagtcctaatggggatctccagctccttcctgtgggctgccacagacagctacccccagaagggtcaatgttgggagtggttgtggctctgagctgctctacagagcttcagtgtgagaggatcgagccattgaaagctcattaccagtaggacataatttttggctctccctattcacaaccagtgcacagtttgacacagtggcctcaggttcacagtgcaccatgtcactgtgctatcctacgaaatcatttgtttctaagttgtgtttattcctggagtgacatgccaccccgaatggctcactttcactgaggatgctgtcctctgatttagctgctgcctccagcctctggcttgagaacttactaaaggcacttccttcctgttaaacccctgttaactctccataaatttggtgattctctgctaggcctaagattttgagttaacatctcttgaagccaaactccaccttctgtgctttttgcttgggataatggagtttttctttagaaacagtgccaagaatgacaagatattaaaaaaaaaaaagaaagaaaaaaaaaaaaacacctacttttaaagaaaatacctaacagatttttaatatagttatctctaccactttcttttctagtttcttgattttcagctcaggctgcattctaactcatactgtgaagacaaaggtgtttttgattcagaaatatatgaaatctgcatagtcttaatttgtaaaaaataaagaaaattccttaaccttt

SEQ ID NO: 317972 - DNA, 1780 bp, Homo sapiens
acatacatacatagtaatcatttggaaactttcacagtaataataaacaccaggagtccgctttcccaccaggcttcattcacccagtggacctgaactgtttggtagagccacccggcccttccttcctcattgttgtttggtatgcgcacagttcctgtgggactgggccgtgagttttccattggaaagaagttcagtggtcccattgttaactcagcctcaaatctcaactgtcaggccctacaaagaaaatggagagcctcttctggtggatgctttgctccctctgagctgcccatgctggtctggcaaacacacctttctgctttgccttcacaaaagtaatgtgttccctttcccaccccttgcctgaccctcagggagtcagcctgcttccatccatgggtgggaagacttcagcacaaaggaaagactaattcttgtcaggcatttttgaaaaggctgattatgtgtatcaaggtacagcatcgtagggttcccctaaacttgccctgtttttgtttttttagtttgttatccccttactgagcggcctctactaggtggctgtgattaaatgtcccaagcaaggatagggaaggggaatggttgagcctctggagatcattgtaaccaatcctgccagacctgtttggggcagtggggagcaaacctagataaggacctgtttggggcagcagggagcaaaatctcctttaacaaccaagcagttcctcattcacatcaacagagcgaggctgtgataacttaggaggcagcaatcctaatagtccttcagtgcattttagtctgtctccaactggacaccagtaggtagtgtcaagccagagattcggggcagtagataaatgttcattttactgatgcactttagtttttggtctgttacctgttttccagaaatttgtggccttttaggcgggagttaggcgaccaaaccagtgagagccccaatccctgcagttttgtggcttcaagtgtgggtggacagtcctaatggggatctccagctccttcctgtgggctgccacagacagctacccccagaagggtcaatgttgggagtggttgtggctctgagctgctctacagagcttcagtgtgagaggatcgagccattgaaagctcattaccagtaggacataatttttggctctccctattcacaaccagtgcacagtttgacacagtggcctcaggttcacagtgcaccatgtcactgtgctatcctacgaaatcatttgtttctaagttgtgtttattcctggagtgacatgccaccccgaatggctcactttcactgaggatgctgtcctctgatttagctgctgcctccagcctctggcttgagaacttactaaaggcacttccttcctgttaaacccctgttaactctccataaatttggtgattctctgctaggcctaagattttgagttaacatctcttgaagccaaactccaccttctgtgctttttgcttgggataatggagtttttctttagaaacagtgccaagaatgacaagatattaaaaaaaaaaaagaaagaaaaaaaaaaaaacacctacttttaaagaaaatacctaacagatttttaatatagttatctctaccactttcttttctagtttcttgattttcagctcaggctgcattctaactcatactgtgaagacaaaggtgtttttgattcagaaatatatgaaatctgcatagtcttaatttgtaaaaaataaagaaaattccttaaccttt

SEQ ID NO: 317973 - DNA, 1684 bp, Homo sapiens
  misc_feature (3)..(3): n is a, c, g, or t
ggnccgctctagagtatcccctccccgtacgcccaattgttgtttggtatgcgcacagttcctgtgggactgggccgtgagttttccattggaaagaagttcagtggtcccattgttaactcagcctcaaatctcaactgtcaggccctacaaagaaaatggagagcctcttctggtggatgctttgctccctctgagctgcccatgctggtctggcaaacacacctttctgctttgccttcacaaaagtaatgtgttccctttcccaccccttgcctgaccctcagggagtcagcctgcttccatccatgggtgggaagacttcagcacaaaggaaagactaattcttgtcaggcatttttgaaaaggctgattatgtgtatcaaggtacagcatcgtagggttcccctaaacttgccctgtttttgtttttttagtttgttatccccttactgagcggcctctactaggtggctgtgattaaatgtcccaagcaaggatagggaaggggaatggttgagcctctggagatcattgtaaccaatcctgccagacctgtttggggcagtggggagcaaacctagataaggacctgtttggggcagcagggagcaaaatctcctttaacaaccaagcagttcctcattcacatcaacagagcgaggctgtgataacttaggaggcagcaatcctaatagtccttcagtgcattttagtctgtctccaactggacaccagtaggtagtgtcaagccagagattcggggcagtagataaatgttcattttactgatgcactttagtttttggtctgttacctgttttccagaaatttgtggccttttaggcgggagttaggcgaccaaaccagtgagagccccaatccctgcagttttgtggcttcaagtgtgggtggacagtcctaatggggatctccagctccttcctgtgggctgccacagacagctacccccagaagggtcaatgttgggagtggttgtggctctgagctgctctacagagcttcagtgtgagaggatcgagccattgaaagctcattaccagtaggacataatttttggctctccctattcacaaccagtgcacagtttgacacagtggcctcaggttcacagtgcaccatgtcactgtgctatcctacgaaatcatttgtttctaagttgtgtttattcctggagtgacatgccaccccgaatggctcactttcactgaggatgctgtcctctgatttagctgctgcctccagcctctggcttgagaacttactaaaggcacttccttcctgttaaacccctgttaactctccataaatttggtgattctctgctaggcctaagattttgagttaacatctcttgaagccaaactccaccttctgtgctttttgcttgggataatggagtttttctttagaaacagtgccaagaatgacaagatattaaaaaaaaaaaagaaagaaaaaaaaaaaaacacctacttttaaagaaaatacctaacagatttttaatatagttatctctaccactttcttttctagtttcttgattttcagctcaggctgcattctaactcatactgtgaagacaaaggtgtttttgattcagaaatatatgaaatctgcatagtcttaatttgtaaaaaataaagaaaattccttaaccttt

SEQ ID NO: 317974 - DNA, 2046 bp, Homo sapiens
atccccgagcctaagggctacccaaagaatgaaaaggataagaagaaagagaagaaatgaagtgaccatccagcctttcccaattagacttcctctccttccacccctcatttcctttttgcacacattacaggtggtgtgttctgtgataatgaaaagcatcagaaaagcttttgtactttgtggtttcctctattttgaattttttgatcaaaaaactgattagcagaatatagtttggagtttggcttcatcttcctggggttcccctcactcccttttttgtcaaccccatctgtagcctcttcctctactcaggcagtcgacccgccacgatgagaagtgggaccagcagagggcgccaacttcaggagtccgctttcccaccaggcttcattcacccagtggacctgaactgtttggtagagccacccggcccttccttcctcattgttgtttggtatgcgcacagttcctgtgggactgggccgtgagttttccattggaaagaagttcagtggtcccattgttaactcagcctcaaatctcaactgtcaggccctacaaagaaaatggagagcctcttctggtggatgctttgctccctctgagctgcccatgctggtctggcaaacacacctttctgctttgccttcacaaaagtaatgtgttccctttcccaccccttgcctgaccctcagggagtcagcctgcttccatccatgggtgggaagacttcagcacaaaggaaagactaattcttgtcaggcatttttgaaaaggctgattatgtgtatcaaggtacagcatcgtagggttcccctaaacttgccctgtttttgtttttttagtttgttatccccttactgagcggcctctactaggtggctgtgattaaatgtcccaagcaaggatagggaaggggaatggttgagcctctggagatcattgtaaccaatcctgccagacctgtttggggcagtggggagcaaacctagataaggacctgtttggggcagcagggagcaaaatctcctttaacaaccaagcagttcctcattcacatcaacagagcgaggctgtgataacttaggaggcagcaatcctaatagtccttcagtgcattttagtctgtctccaactggacaccagtaggtagtgtcaagccagagattcggggcagtagataaatgttcattttactgatgcactttagtttttggtctgttacctgttttccagaaatttgtggccttttaggcgggagttaggcgaccaaaccagtgagagccccaatccctgcagttttgtggcttcaagtgtgggtggacagtcctaatggggatctccagctccttcctgtgggctgccacagacagctacccccagaagggtcaatgttgggagtggttgtggctctgagctgctctacagagcttcagtgtgagaggatcgagccattgaaagctcattaccagtaggacataatttttggctctccctattcacaaccagtgcacagtttgacacagtggcctcaggttcacagtgcaccatgtcactgtgctatcctacgaaatcatttgtttctaagttgtgtttattcctggagtgacatgccaccccgaatggctcactttcactgaggatgctgtcctctgatttagctgctgcctccagcctctggcttgagaacttactaaaggcacttccttcctgttaaacccctgttaactctccataaatttggtgattctctgctaggcctaagattttgagttaacatctcttgaagccaaactccaccttctgtgctttttgcttgggataatggagtttttctttagaaacagtgccaagaatgacaagatattaaaaaaaaaaaagaaagaaaaaaaaaaaaacacctacttttaaagaaaatacctaacagatttttaatatagttatctctaccactttcttttctagtttcttgattttcagctcaggctgcattctaactcatactgtgaagacaaagggacacacgggatcctctagaat

SEQ ID NO: 317975 - DNA, 2032 bp, Homo sapiens
atccccgagcctaagggctacccaaagaatgaaaaggataagaagaaagagaagaaatgaagtgaccatccagcctttcccaattagacttcctctccttccacccctcatttcctttttgcacacattacaggtggtgtgttctgtgataatgaaaagcatcagaaaagcttttgtactttgtggtttcctctattttgaattttttgatcaaaaaactgattagcagaatatagtttggagtttggcttcatcttcctggggttcccctcactcccttttttgtcaaccccatctgtagcctcttcctctactcaggcagtcgacccgccacgatgagaagtgggaccagcagagggcgccaacttcaggagtccgctttcccaccaggcttcattcacccagtggacctgaactgtttggtagagccacccggcccttccttcctcattgttgtttggtatgcgcacagttcctgtgggactgggccgtgagttttccattggaaagaagttcagtggtcccattgttaactcagcctcaaatctcaactgtcaggccctacaaagaaaatggagagcctcttctggtggatgctttgctccctctgagctgcccatgctggtctggcaaacacacctttctgctttgccttcacaaaagtaatgtgttccctttcccaccccttgcctgaccctcagggagtcagcctgcttccatccatgggtgggaagacttcagcacaaaggaaagactaattcttgtcaggcatttttgaaaaggctgattatgtgtatcaaggtacagcatcgtagggttcccctaaacttgccctgtttttgtttttttagtttgttatccccttactgagcggcctctactaggtggctgtgattaaatgtcccaagcaaggatagggaaggggaatggttgagcctctggagatcattgtaaccaatcctgccagacctgtttggggcagtggggagcaaacctagataaggacctgtttggggcagcagggagcaaaatctcctttaacaaccaagcagttcctcattcacatcaacagagcgaggctgtgataacttaggaggcagcaatcctaatagtccttcagtgcattttagtctgtctccaactggacaccagtaggtagtgtcaagccagagattcggggcagtagataaatgttcattttactgatgcactttagtttttggtctgttacctgttttccagaaatttgtggccttttaggcgggagttaggcgaccaaaccagtgagagccccaatccctgcagttttgtggcttcaagtgtgggtggacagtcctaatggggatctccagctccttcctgtgggctgccacagacagctacccccagaagggtcaatgttgggagtggttgtggctctgagctgctctacagagcttcagtgtgagaggatcgagccattgaaagctcattaccagtaggacataatttttggctctccctattcacaaccagtgcacagtttgacacagtggcctcaggttcacagtgcaccatgtcactgtgctatcctacgaaatcatttgtttctaagttgtgtttattcctggagtgacatgccaccccgaatggctcactttcactgaggatgctgtcctctgatttagctgctgcctccagcctctggcttgagaacttactaaaggcacttccttcctgttaaacccctgttaactctccataaatttggtgattctctgctaggcctaagattttgagttaacatctcttgaagccaaactccaccttctgtgctttttgcttgggataatggagtttttctttagaaacagtgccaagaatgacaagatattaaaaaaaaaaaagaaagaaaaaaaaaaaaacacctacttttaaaggctcaggctgcattctaactcatactgtgaagacaaaggtgtttttgattcagaaatatatgaaatctgcatagtcttaatttgtaaaaaataaagaaaattccttaaccttt

SEQ ID NO: 317976 - DNA, 2045 bp, Homo sapiens
atccccgagcctaagggctacccaaagaatgaaaaggataagaagaaagagaagaaatgaagtgaccatccagcctttcccaattagacttcctctccttccacccctcatttcctttttgcacacattacaggtggtgtgttctgtgataatgaaaagcatcagaaaagcttttgtactttgtggtttcctctattttgaattttttgatcaaaaaactgattagcagaatatagtttggagtttggcttcatcttcctggggttcccctcactcccttttttgtcaaccccatctgtagcctcttcctctactcaggcagtcgacccgccacgatgagaagtgggaccagcagagggcgccaacttcaggagtccgctttcccaccaggcttcattcacccagtggacctgaactgtttggtagagccacccggcccttccttcctcattgttgtttggtatgcgcacagttcctgtgggactgggccgtgagttttccattggaaagaagttcagtggtcccattgttaactcagcctcaaatctcaactgtcaggccctacaaagaaaatggagagcctcttctggtggatgctttgctccctctgagctgcccatgctggtctggcaaacacacctttctgctttgccttcacaaaagtaatgtgttccctttcccaccccttgcctgaccctcagggagtcagcctgcttccatccatgggtgggaagacttcagcacaaaggaaagactaattcttgtcaggcatttttgaccctgtttttgtttttttagtttgttatccccttactgagcggcctctactaggtggctgtgattaaatgtcccaagcaaggatagggaaggggaatggttgagcctctggagatcattgtaaccaatcctgccagacctgtttggggcagtggggagcaaacctagataaggacctgtttggggcagcagggagcaaaatctcctttaacaaccaagcagttcctcattcacatcaacagagcgaggctgtgataacttaggaggcagcaatcctaatagtccttcagtgcattttagtctgtctccaactggacaccagtaggtagtgtcaagccagagattcggggcagtagataaatgttcattttactgatgcactttagtttttggtctgttacctgttttccagaaatttgtggccttttaggcgggagttaggcgaccaaaccagtgagagccccaatccctgcagttttgtggcttcaagtgtgggtggacagtcctaatggggatctccagctccttcctgtgggctgccacagacagctacccccagaagggtcaatgttgggagtggttgtggctctgagctgctctacagagcttcagtgtgagaggatcgagccattgaaagctcattaccagtaggacataatttttggctctccctattcacaaccagtgcacagtttgacacagtggcctcaggttcacagtgcaccatgtcactgtgctatcctacgaaatcatttgtttctaagttgtgtttattcctggagtgacatgccaccccgaatggctcactttcactgaggatgctgtcctctgatttagctgctgcctccagcctctggcttgagaacttactaaaggcacttccttcctgttaaacccctgttaactctccataaatttggtgattctctgctaggcctaagattttgagttaacatctcttgaagccaaactccaccttctgtgctttttgcttgggataatggagtttttctttagaaacagtgccaagaatgacaagatattaaaaaaaaaaaagaaagaaaaaaaaaaaaacacctacttttaaagaaaatacctaacagatttttaatatagttatctctaccactttcttttctagtttcttgattttcagctcaggctgcattctaactcatactgtgaagacaaaggtgtttttgattcagaaatatatgaaatctgcatagtcttaatttgtaaaaaataaagaaaattccttaaccttt

SEQ ID NO: 317977 - DNA, 1268 bp, Homo sapiens
tactagtgagactggggtgaatcggcgagggccttactgagcggcctctactaggtggctgtgattaaatgtcccaagcaaggatagggaaggggaatggttgagcctctggagatcattgtaaccaatcctgccagacctgtttggggcagtggggagcaaacctagataaggacctgtttggggcagcagggagcaaaatctcctttaacaaccaagcagttcctcattcacatcaacagagcgaggctgtgataacttaggaggcagcaatcctaatagtccttcagtgcattttagtctgtctccaactggacaccagtaggtagtgtcaagccagagattcggggcagtagataaatgttcattttactgatgcactttagtttttggtctgttacctgttttccagaaatttgtggccttttaggcgggagttaggcgaccaaaccagtgagagccccaatccctgcagttttgtggcttcaagtgtgggtggacagtcctaatggggatctccagctccttcctgtgggctgccacagacagctacccccagaagggtcaatgttgggagtggttgtggctctgagctgctctacagagcttcagtgtgagaggatcgagccattgaaagctcattaccagtaggacataatttttggctctccctattcacaaccagtgcacagtttgacacagtggcctcaggttcacagtgcaccatgtcactgtgctatcctacgaaatcatttgtttctaagttgtgtttattcctggagtgacatgccaccccgaatggctcactttcactgaggatgctgtcctctgatttagctgctgcctccagcctctggcttgagaacttactaaaggcacttccttcctgttaaacccctgttaactctccataaatttggtgattctctgctaggcctaagattttgagttaacatctcttgaagccaaactccaccttctgtgctttttgcttgggataatggagtttttctttagaaacagtgccaagaatgacaagatattaaaaaaaaaaaagaaagaaaaaaaaaaaaacacctacttttaaagaaaatacctaacagatttttaatatagttatctctaccactttcttttctagtttcttgattttcagctcaggctgcattctaactcatactgtgaagacaaaggtgtttttgattcagaaatatatgaaatctgcatagtcttaatttgtaaaaaataaagaaaattccttaaccttt

SEQ ID NO: 317978 - DNA, 2047 bp, Homo sapiens
atccccgagcctaagggctacccaaagaatgaaaaggataagaagaaagagaagaaatgaagtgaccatccagcctttcccaattagacttcctctccttccacccctcatttcctttttgcacacattacaggtggtgtgttctgtgataatgaaaagcatcagaaaagcttttgtactttgtggtttcctctattttgaattttttgatcaaaaaactgattagcagaatatagtttggagtttggcttcatcttcctggggttcccctcactcccttttttgtcaaccccatctgtagcctcttcctctactcaggcagtcgacccgccacgatgagaagtgggaccagcagagggcgccaacttcaggagtccgctttcccaccaggcttcattcacccagtggacctgaactgtttggtagagccacccggcccttccttcctcattgttgtttggtatgcgcacagttcctgtgggactgggccgtgagttttccattggaaagaagttcagtggtcccattgttaactcagcctcaaatctcaactgtcaggccctacaaagaaaatggagagcctcttctggtggatgctttgctccctctgagctgcccatgctggtctggcaaacacacctttctgctttgccttcacaaaagtaatgtgttccctttcccaccccttgcctgaccctcagggagtcagcctgcttccatccatgggtgggaagacttcagcacaaaggaaagactaattcttgtcaggcatttttgaaaaggctgattatgtgtatcaaggtacagcatcgtagggttcccctaaacttgccctgtttttgtttttttagtttgttatccccttactgagcggcctctactaggtggctgtgattaaatgtcccaagcaaggatagggaaggggaatggttgagcctctggagatcattgtaaccaatcctgccagacctgtttggggcagtggggagcaaacctagataaggacctgtttggggcagcagggaaggctgtgataacttaggaggcagcaatcctaatagtccttcagtgcattttagtctgtctccaactggacaccagtaggtagtgtcaagccagagattcggggcagtagataaatgttcattttactgatgcactttagtttttggtctgttacctgttttccagaaatttgtggccttttaggcgggagttaggcgaccaaaccagtgagagccccaatccctgcagttttgtggcttcaagtgtgggtggacagtcctaatggggatctccagctccttcctgtgggctgccacagacagctacccccagaagggtcaatgttgggagtggttgtggctctgagctgctctacagagcttcagtgtgagaggatcgagccattgaaagctcattaccagtaggacataatttttggctctccctattcacaaccagtgcacagtttgacacagtggcctcaggttcacagtgcaccatgtcactgtgctatcctacgaaatcatttgtttctaagttgtgtttattcctggagtgacatgccaccccgaatggctcactttcactgaggatgctgtcctctgatttagctgctgcctccagcctctggcttgagaacttactaaaggcacttccttcctgttaaacccctgttaactctccataaatttggtgattctctgctaggcctaagattttgagttaacatctcttgaagccaaactccaccttctgtgctttttgcttgggataatggagtttttctttagaaacagtgccaagaatgacaagatattaaaaaaaaaaaagaaagaaaaaaaaaaaaacacctacttttaaagaaaatacctaacagatttttaatatagttatctctaccactttcttttctagtttcttgattttcagctcaggctgcattctaactcatactgtgaagacaaaggtgtttttgattcagaaatatatgaaatctgcatagtcttaatttgtaaaaaataaagaaaattccttaaccttt

SEQ ID NO: 317979 - DNA, 1080 bp, Homo sapiens
ccaggtggtacggtccggaggttttgggatgcagttcctcattcacatcaacagagcgaggctgtgataacttaggaggcagcaatcctaatagtccttcagtgcattttagtctgtctccaactggacaccagtaggtagtgtcaagccagagattcggggcagtagataaatgttcattttactgatgcactttagtttttggtctgttacctgttttccagaaatttgtggccttttaggcgggagttaggcgaccaaaccagtgagagccccaatccctgcagttttgtggcttcaagtgtgggtggacagtcctaatggggatctccagctccttcctgtgggctgccacagacagctacccccagaagggtcaatgttgggagtggttgtggctctgagctgctctacagagcttcagtgtgagaggatcgagccattgaaagctcattaccagtaggacataatttttggctctccctattcacaaccagtgcacagtttgacacagtggcctcaggttcacagtgcaccatgtcactgtgctatcctacgaaatcatttgtttctaagttgtgtttattcctggagtgacatgccaccccgaatggctcactttcactgaggatgctgtcctctgatttagctgctgcctccagcctctggcttgagaacttactaaaggcacttccttcctgttaaacccctgttaactctccataaatttggtgattctctgctaggcctaagattttgagttaacatctcttgaagccaaactccaccttctgtgctttttgcttgggataatggagtttttctttagaaacagtgccaagaatgacaagatattaaaaaaaaaaaagaaagaaaaaaaaaaaaacacctacttttaaagaaaatacctaacagatttttaatatagttatctctaccactttcttttctagtttcttgattttcagctcaggctgcattctaactcatactgtgaagacaaaggtgtttttgattcagaaatatatgaaatctgcatagtcttaatttgtaaaaaataaagaaaattccttaaccttt

SEQ ID NO: 317980 - DNA, 2413 bp, Homo sapiens
atccccgagcctaagggctacccaaagaatgaaaaggataagaagaaagagaagaaatgaagtgaccatccagcctttcccaattagacttcctctccttccacccctcatttcctttttgcacacattacaggtggtgtgttctgtgataatgaaaagcatcagaaaagcttttgtactttgtggtttcctctattttgaattttttgatcaaaaaactgattagcagaatatagtttggagtttggcttcatcttcctggggttcccctcactcccttttttgtcaaccccatctgtagcctcttcctctactcaggcagtcgacccgccacgatgagaagtgggaccagcagagggcgccaacttcaggagtccgctttcccaccaggcttcattcacccagtggacctgaactgtttggtagagccacccggcccttccttcctcattgttgtttggtatgcgcacagttcctgtgggactgggccgtgagttttccattggaaagaagttcagtggtcccattgttaactcagcctcaaatctcaactgtcaggccctacaaagaaaatggagagcctcttctggtggatgctttgctccctctgagctgcccatgctggtctggcaaacacacctttctgctttgccttcacaaaagtaatgtgttccctttcccaccccttgcctgaccctcagggagtcagcctgcttccatccatgggtgggaagacttcagcacaaaggaaagactaattcttgtcaggcatttttgaaaaggctgattatgtgtatcaaggtacagcatcgtagggttcccctaaacttgccctgtttttgtttttttagtttgttatccccttactgagcggcctctactaggtggctgtgattaaatgtcccaagcaaggatagggaaggggaatggttgagcctctggagatcattgtaaccaatcctgccagacctgtttggggcagtggggagcaaacctagataaggacctgtttggggcagcagggagcaaaatctcctttaacaaccaagcagttcctcattcacatcaacagagcgaggctgtgataacttaggaggcagcaatcctaatagtccttcagtgcattttagtctgtctccaactggacaccagtaggtagtgtcaagccagagattcggggcagtagataaatgttcattttactgatgcactttagtttttggtctgttacctgttttccagaaatttgtggccttttaggcgggagttaggcgaccaaaccagtgagagccccaatccctgcagttttgtggcttcaagtgtgggtggacagtcctaatggggatctccagctccttcctgtgggctgccacagacagctacccccagaagggtcaatgttgggagtggttgtggctctgagctgctctacagagcttcagtgtgagaggatcgagccattgaaagctcattaccagtaggacataatttttggctctccctattcacaaccagtgcacagtttgacacagtggcctcaggttcacagtgcaccatgtcactgtgctatcctacgaaatcatttgtttctaagttgtgtttattcctggagtgacatgccaccccgaatggctcactttcactgaggatgctgtcctctgatttagctgctgcctccagcctctggcttgagaacttactaaaggcacttccttcctgttaaacccctgttaactctccataaatttggtgattctctgctaggcctaagattttgagttaacatctcttgaagccaaactccaccttctgtgctttttgcttgggataatggagtttttctttagaaacagtgccaagaatgacaagattatagtatctctacactttccttcctagttctcgatttcaggtcaggtgcgatctacccatactgggaagccaaggtgttttgatcagaaaactttggatctgcatagcctaatttggaaaattaagaaattcttaaccttataaaaaatatacacgccgtcctggatttccgcaaacccacaaaataaaaaactgtgggcctcttggccaacgtttatcctcggagacttattttcggcctattggccaatggcccatgccctataggggggtacaaaactgggccgcttaaagatggctgtgaaacccggttcccattaatgcgttggaaacccttttcacggggcgaatcgaaggccccctatgctctcaaattggcctcttagctcgggaattggcggcttttttaaaacgcgcgattcttcaacgctttttaaacaggcgaatccgacctctttacccctctacgcgggttcattctcaaaccctttgcgctccctccgggaatctcttgtggggcccttccctcctttttgtggcg

SEQ ID NO: 317981 - DNA, 1904 bp, Homo sapiens
  misc_feature (1875)..(1875): n is a, c, g, or t
atccccgagcctaagggctacccaaagaatgaaaaggataagaagaaagagaagaaatgaagtgaccatccagcctttcccaattagacttcctctccttccacccctcatttcctttttgcacacattacaggtggtgtgttctgtgataatgaaaagcatcagaaaagcttttgtactttgtggtttcctctattttgaattttttgatcaaaaaactgattagcagaatatagtttggagtttggcttcatcttcctggggttcccctcactcccttttttgtcaaccccatctgtagcctcttcctctactcaggcagtcgacccgccacgatgagaagtgggaccagcagagggcgccaacttcaggagtccgctttcccaccaggcttcattcacccagtggacctgaactgtttggtagagccacccggcccttccttcctcattgttgtttggtatgcgcacagttcctgtgggactgggccgtgagttttccattggaaagaagttcagtggtcccattgttaactcagcctcaaatctcaactgtcaggccctacaaagaaaatggagagcctcttctggtggatgctttgctccctctgagctgcccatgctggtctggcaaacacacctttctgctttgccttcacaaaagtaatgtgttccctttcccaccccttgcctgaccctcagggagtcagcctgcttccatccatgggtgggaagacttcagcacaaaggaaagactaattcttgtcaggcatttttgaaaaggctgattatgtgtatcaaggtacagcatcgtagggttcccctaaacttgccctgtttttgtttttttagtttgttatccccttactgagcggcctctactaggtggctgtgattaaatgtcccaagcaaggatagggaaggggaatggttgagcctctggagatcattgtaaccaatcctgccagacctgtttggggcagtggggagcaaacctagataaggacctgtttggggcagcagggagcaaaatctcctttaacaaccaagcagttcctcattcacatcaacagagcgaggctgtgataacttaggaggcagcaatcctaatagtccttcagtgcattttagtctgtctccaactggacaccagtaggtagtgtcaagccagagattcggggcagtagataaatgttcattttactgatgcactttagtttttggtctgttacctgttttccagaaatttgtggccttttaggcgggagttaggcgaccaaaccagtgagagccccaatccctgcagttttgtggcttcaagtgtgggtggacagtcctaatggggatctccagctccttcctgtgggctgccacagacagctacccccagaagggtcaatgttgggagtggttgtggctctgagctgctctacagagcttcagtgtgagaggatcgagccattgaaagctcattaccagtaggacataatttttggctctccctattcacaaccagtgcacagtttgacacagtggcctcaggttcacagtgcaccatgtcactgtgctatcctacgaaatcatttgtttctaagttgtgtttattcctggagtgacatgccaccccgaatggctcactttcactgaggatgctgtcctctgatttagctgctgcctccagcctctggcttgagaacttactaaaggcacttccttcctgttaaacccctgttaactctccataaatttggtgattctctgctaggcctaagattttgagttaacatctcttgaagccaaactccaccttctgtgctttttgcttgggataatggagtttttctttagaaacagtgccaagaatgacaagatcagnatgatgaatcgcaccactgccctccagcc

SEQ ID NO: 317982 - DNA, 1973 bp, Homo sapiens
atccccgagcctaagggctacccaaagaatgaaaaggataagaagaaagagaagaaatgaagtgaccatccagcctttcccaattagacttcctctccttccacccctcatttcctttttgcacacattacaggtggtgtgttctgtgataatgaaaagcatcagaaaagcttttgtactttgtggtttcctctattttgaattttttgatcaaaaaactgattagcagaatatagtttggagtttggcttcatcttcctggggttcccctcactcccttttttgtcaaccccatctgtagcctcttcctctactcaggcagtcgacccgccacgatgagaagtgggaccagcagagggcgccaacttcaggagtccgctttcccaccaggcttcattcacccagtggacctgaactgtttggtagagccacccggcccttccttcctcattgttgtttggtatgcgcacagttcctgtgggactgggccgtgagttttccattggaaagaagttcagtggtcccattgttaactcagcctcaaatctcaactgtcaggccctacaaagaaaatggagagcctcttctggtggatgctttgctccctctgagctgcccatgctggtctggcaaacacacctttctgctttgccttcacaaaagtaatgtgttccctttcccaccccttgcctgaccctcagggagtcagcctgcttccatccatgggtgggaagacttcagcacaaaggaaagactaattcttgtcaggcatttttgaaaaggctgattatgtgtatcaaggtacagcatcgtagggttcccctaaacttgccctgtttttgtttttttagtttgttatccccttactgagcggcctctactaggtggctgtgattaaatgtcccaagcaaggatagggaaggggaatggttgagcctctggagatcattgtaaccaatcctgccagacctgtttggggcagtggggagcaaacctagataaggacctgtttggggcagcagggagcaaaatctcctttaacaaccaagcagttcctcattcacatcaacagagcgaggctgtgataacttaggaggcagcaatcctaatagtccttcagtgcattttagtctgtctccaactggacaccagtaggtagtgtcaagccagagattcggggcagtagataaatgttcattttactgatgcactttagtttttggtctgttacctgttttccagaaatttgtggccttttaggcgggagttaggcgaccaaaccagtgagagccccaatccctgcagttttgtggcttcaagtgtgggtggacagtcctaatggggatctccagctccttcctgtgggctgccacagacagctacccccagaagggtcaatgttgggagtggttgtggctctgagctgctctacagagcttcagtgtgagaggatcgagccattgaaagctcattaccagtaggacataatttttggctctccctattcacaaccagtgcacagtttgacacagtggcctcaggttcacagtgcaccatgtcactgtgctatcctacgaaatcatttgtttctaagttgtgtttattcctggagtgacatgccaccccgaatggctcactttcactgaggatgctgtcctctgatttagctgctgcctccagcctctggcttgagaacttactaaaggcacttccttcctgttaaacccctgttaactctccataaatttggtgattctctgctaggcctaagattttgagttaacatctcttgaagccaaactccaccttctgtgctttttgcttgggataatggagttttgaaccgcgccacgactgactcgacatttacactctcctccgaagcacccctcatactccctacttttaaggccaactccctcagatttttacactggctacctctccctctcctttccccgtccctcgtgccg

SEQ ID NO: 317983 - DNA, 1879 bp, Homo sapiens
atccccgagcctaagggctacccaaagaatgaaaaggataagaagaaagagaagaaatgaagtgaccatccagcctttcccaattagacttcctctccttccacccctcatttcctttttgcacacattacaggtggtgtgttctgtgataatgaaaagcatcagaaaagcttttgtactttgtggtttcctctattttgaattttttgatcaaaaaactgattagcagaatatagtttggagtttggcttcatcttcctggggttcccctcactcccttttttgtcaaccccatctgtagcctcttcctctactcaggcagtcgacccgccacgatgagaagtgggaccagcagagggcgccaacttcaggagtccgctttcccaccaggcttcattcacccagtggacctgaactgtttggtagagccacccggcccttccttcctcattgttgtttggtatgcgcacagttcctgtgggactgggccgtgagttttccattggaaagaagttcagtggtcccattgttaactcagcctcaaatctcaactgtcaggccctacaaagaaaatggagagcctcttctggtggatgctttgctccctctgagctgcccatgctggtctggcaaacacacctttctgctttgccttcacaaaagtaatgtgttccctttcccaccccttgcctgaccctcagggagtcagcctgcttccatccatgggtgggaagacttcagcacaaaggaaagactaattcttgtcaggcatttttgaaaaggctgattatgtgtatcaaggtacagcatcgtagggttcccctaaacttgccctgtttttgtttttttagtttgttatccccttactgagcggcctctactaggtggctgtgattaaatgtcccaagcaaggatagggaaggggaatggttgagcctctggagatcattgtaaccaatcctgccagacctgtttggggcagtggggagcaaacctagataaggacctgtttggggcagcagggagcaaaatctcctttaacaaccaagcagttcctcattcacatcaacagagcgaggctgtgataacttaggaggcagcaatcctaatagtccttcagtgcattttagtctgtctccaactggacaccagtaggtagtgtcaagccagagattcggggcagtagataaatgttcattttactgatgcactttagtttttggtctgttacctgttttccagaaatttgtggccttttaggcgggagttaggcgaccaaaccagtgagagccccaatccctgcagttttgtggcttcaagtgtgggtggacagtcctaatggggatctccagctccttcctgtgggctgccacagacagctacccccagaagggtcaatgttgggagtggttgtggctctgagctgctctacagagcttcagtgtgagaggatcgagccattgaaagctcattaccagtaggacataatttttggctctccctattcacaaccagtgcacagtttgacacagtggcctcaggttcacagtgcaccatgtcactgtgctatcctacgaaatcatttgtttctaagttgtgtttattcctggagtgacatgccaccccgaatggctcactttcactgaggatgctgtcctctgatttagctgctgcctccagcctctggcttgagaacttactaaaggcacttccttcctgttaaacccctgttaactctccataaatttggtgattctctgctaggcctaagattttgagttaacatctcttgaagccaaactccaccttctgtgctttttgcttgggataatggagttagtaacgcctgtagaatcaggccagattcattctttctgct

SEQ ID NO: 317984 - DNA, 1751 bp, Homo sapiens
atccccgagcctaagggctacccaaagaatgaaaaggataagaagaaagagaagaaatgaagtgaccatccagcctttcccaattagacttcctctccttccacccctcatttcctttttgcacacattacaggtggtgtgttctgtgataatgaaaagcatcagaaaagcttttgtactttgtggtttcctctattttgaattttttgatcaaaaaactgattagcagaatatagtttggagtttggcttcatcttcctggggttcccctcactcccttttttgtcaaccccatctgtagcctcttcctctactcaggcagtcgacccgccacgatgagaagtgggaccagcagagggcgccaacttcaggagtccgctttcccaccaggcttcattcacccagtggacctgaactgtttggtagagccacccggcccttccttcctcattgttgtttggtatgcgcacagttcctgtgggactgggccgtgagttttccattggaaagaagttcagtggtcccattgttaactcagcctcaaatctcaactgtcaggccctacaaagaaaatggagagcctcttctggtggatgctttgctccctctgagctgcccatgctggtctggcaaacacacctttctgctttgccttcacaaaagtaatgtgttccctttcccaccccttgcctgaccctcagggagtcagcctgcttccatccatgggtgggaagacttcagcacaaaggaaagactaattcttgtcaggcatttttgaaaaggctgattatgtgtatcaaggtacagcatcgtagggttcccctaaacttgccctgtttttgtttttttagtttgttatccccttactgagcggcctctactaggtggctgtgattaaatgtcccaagcaaggatagggaaggggaatggttgagcctctggagatcattgtaaccaatcctgccagacctgtttggggcagtggggagcaaacctagataaggacctgtttggggcagcagggagcaaaatctcctttaacaaccaagcagttcctcattcacatcaacagagcgaggctgtgataacttaggaggcagcaatcctaatagtccttcagtgcattttagtctgtctccaactggacaccagtaggtagtgtcaagccagagattcggggcagtagataaatgttcattttactgatgcactttagtttttggtctgttacctgttttccagaaatttgtggccttttaggcgggagttaggcgaccaaaccagtgagagccccaatccctgcagttttgtggcttcaagtgtgggtggacagtcctaatggggatctccagctccttcctgtgggctgccacagacagctacccccagaagggtcaatgttgggagtggttgtggctctgagctgctctacagagcttcagtgtgagaggatcgagccattgaaagctcattaccagtaggacataatttttggctctccctattcacaaccagtgcacagtttgacacagtggcctcaggttcacagtgcaccatgtcactgtgctatcctacgaaatcatttgtttctaagttgtgtttattcctggagtgacatgccaccccgaatggctcactttcactgaggatgctgtcctctgatttagctgctgcctccagcctctggcttgagaacttactaaaggcacttccttcctgttaactccctaaacgagggtaccggagctcga

SEQ ID NO: 317985 - DNA, 846 bp, Homo sapiens
caggttcccgctcggtagctgtactaaccctgtgagagccccaatccctgcagttttgtggcttcaagtgtgggtggacagtcctaatggggatctccagctccttcctgtgggctgccacagacagctacccccagaagggtcaatgttgggagtggttgtggctctgagctgctctacagagcttcagtgtgagaggatcgagccattgaaagctcattaccagtaggacataatttttggctctccctattcacaaccagtgcacagtttgacacagtggcctcaggttcacagtgcaccatgtcactgtgctatcctacgaaatcatttgtttctaagttgtgtttattcctggagtgacatgccaccccgaatggctcactttcactgaggatgctgtcctctgatttagctgctgcctccagcctctggcttgagaacttactaaaggcacttccttcctgttaaacccctgttaactctccataaatttggtgattctctgctaggcctaagattttgagttaacatctcttgaagccaaactccaccttctgtgctttttgcttgggataatggagtttttctttagaaacagtgccaagaatgacaagatattaaaaaaaaaaaagaaagaaaaaaaaaaaaacacctacttttaaagaaaatacctaacagatttttaatatagttatctctaccactttcttttctagtttcttgattttcagctcaggctgcattctaactcatactgtgaagacaaaggtgtttttgattcagaaatatatgaaatctgcatagtcttaatttgtaaaaaataaagaaaattccttaaccttt

SEQ ID NO: 317986 - DNA, 1627 bp, Homo sapiens
atccccgagcctaagggctacccaaagaatgaaaaggataagaagaaagagaagaaatgaagtgaccatccagcctttcccaattagacttcctctccttccacccctcatttcctttttgcacacattacaggtggtgtgttctgtgataatgaaaagcatcagaaaagcttttgtactttgtggtttcctctattttgaattttttgatcaaaaaactgattagcagaatatagtttggagtttggcttcatcttcctggggttcccctcactcccttttttgtcaaccccatctgtagcctcttcctctactcaggcagtcgacccgccacgatgagaagtgggaccagcagagggcgccaacttcaggagtccgctttcccaccaggcttcattcacccagtggacctgaactgtttggtagagccacccggcccttccttcctcattgttgtttggtatgcgcacagttcctgtgggactgggccgtgagttttccattggaaagaagttcagtggtcccattgttaactcagcctcaaatctcaactgtcaggccctacaaagaaaatggagagcctcttctggtggatgctttgctccctctgagctgcccatgctggtctggcaaacacacctttctgctttgccttcacaaaagtaatgtgttccctttcccaccccttgcctgaccctcagggagtcagcctgcttccatccatgggtgggaagacttcagcacaaaggaaagactaattcttgtcaggcatttttgaaaaggctgattatgtgtatcaaggtacagcatcgtagggttcccctaaacttgccctgtttttgtttttttagtttgttatccccttactgagcggcctctactaggtggctgtgattaaatgtcccaagcaaggatagggaaggggaatggttgagcctctggagatcattgtaaccaatcctgccagacctgtttggggcagtggggagcaaacctagataaggacctgtttggggcagcagggagcaaaatctcctttaacaaccaagcagttcctcattcacatcaacagagcgaggctgtgataacttaggaggcagcaatcctaatagtccttcagtgcattttagtctgtctccaactggacaccagtaggtagtgtcaagccagagattcggggcagtagataaatgttcattttactgatgcactttagtttttggtctgttacctgttttccagaaatttgtggccttttaggcgggagttaggcgaccaaaccagtgagagccccaatccctgcagttttgtggcttcaagtgtgggtggacagtcctaatggggatctccagctccttcctgtgggctgccacagacagctacccccagaagggtcaatgttgggagtggttgtggctctgagctgctctacagagcttcagtgtgagaggatcgagccattgaaagctcattaccagtaggacataatttttggctctccctattcacaaccagtgcacagtttgacacagtggcctcaggttcacagtgcaccatgtcactgtgctatcctacgaaatcatttgtttctaagttgtgaaactgattgggatcctctagaacacca

SEQ ID NO: 317987 - DNA, 1939 bp, Homo sapiens
atccccgagcctaagggctacccaaagaatgaaaaggataagaagaaagagaagaaatgaagtgaccatccagcctttcccaattagacttcctctccttccacccctcatttcctttttgcacacattacaggtggtgtgttctgtgataatgaaaagcatcagaaaagcttttgtactttgtggtttcctctattttgaattttttgatcaaaaaactgattagcagaatatagtttggagtttggcttcatcttcctggggttcccctcactcccttttttgtcaaccccatctgtagcctcttcctctactcaggcagtcgacccgccacgatgagaagtgggaccagcagagggcgccaacttcaggagtccgctttcccaccaggcttcattcacccagtggacctgaactgtttggtagagccacccggcccttccttcctcattgttgtttggtatgcgcacagttcctgtgggactgggccgtgagttttccattggaaagaagttcagtggtcccattgttaactcagcctcaaatctcaactgtcaggccctacaaagaaaatggagagcctcttctggtggatgctttgctccctctgagctgcccatgctggtctggcaaacacacctttctgctttgccttcacaaaagtaatgtgttccctttcccaccccttgcctgaccctcagggagtcagcctgcttccatccatgggtgggaagacttcagcacaaaggaaagactaattcttgtcaggcatttttgaaaaggctgattatgtgtatcaaggtacagcatcgtagggttcccctaaacttgccctgtttttgtttttttagtttgttatccccttactgagcggcctctactaggtggctgtgattaaatgtcccaagcaaggatagggaaggggaatggttgagcctctggagatcattgtaaccaatcctgccagacctgtttggggcagtggggagcaaacctagataaggacctgtttggggcagcagggagcaaaatctcctttaacaaccaagcagttcctcattcacatcaacagagcgaggctgtgataacttaggaggcagcaatcctaatagtccttcagtgcattttagtctgtctccaactggacaccagtaggtagtgtcaagccagagattcggggcagtagataaatgttcattttactgatgcactttagtttttggtctgttacctgttttccagaaatttgtggccttttaggcgggagttaggcgaccaaaccagtgagagccccaatccctgcagttttgtggcttcaagtgtgggtggacagtcctaatggggatctccagctccttcctgtgggctgccacagacagctacccccagaagggtcaatgttgggagtggttgtggctctgagctgctctacagagcttctttattcctggagtgacatgccaccccgaatggctcactttcactgaggatgctgtcctctgatttagctgctgcctccagcctctggcttgagaacttactaaaggcacttccttcctgttaaacccctgttaactctccataaatttggtgattctctgctaggcctaagattttgagttaacatctcttgaagccaaactccaccttctgtgctttttgcttgggataatggagtttttctttagaaacagtgccaagaatgacaagatattaaaaaaaaaaaagaaagaaaaaaaaaaaaacacctacttttaaagaaaatacctaacagatttttaatatagttatctctaccactttcttttctagtttcttgattttcagctcaggctgcattctaactcatactgtgaagacaaaggtgtttttgattcagaaatatatgaaatctgcatagtcttaatttgtaaaaaataaagaaaattccttaaccttt

SEQ ID NO: 317988 - DNA, 1734 bp, Homo sapiens
atccccgagcctaagggctacccaaagaatgaaaaggataagaagaaagagaagaaatgaagtgaccatccagcctttcccaattagacttcctctccttccacccctcatttcctttttgcacacattacaggtggtgtgttctgtgataatgaaaagcatcagaaaagcttttgtactttgtggtttcctctattttgaattttttgatcaaaaaactgattagcagaatatagtttggagtttggcttcatcttcctggggttcccctcactcccttttttgtcaaccccatctgtagcctcttcctctactcaggcagtcgacccgccacgatgagaagtgggaccagcagagggcgccaacttcaggagtccgctttcccaccaggcttcattcacccagtggacctgaactgtttggtagagccacccggcccttccttcctcattgttgtttggtatgcgcacagttcctgtgggactgggccgtgagttttccattggaaagaagttcagtggtcccattgttaactcagcctcaaatctcaactgtcaggccctacaaagaaaatggagagcctcttctggtggatgctttgctccctctgagctgcccatgctggtctggcaaacacacctttctgctttgccttcacaaaagtaatgtgttccctttcccaccccttgcctgaccctcagggagtcagcctgcttccatccatgggtgggaagacttcagcacaaaggaaagactaattcttgtcaggcatttttgaaaaggctgattatgtgtatcaaggtacagcatcgtagggttcccctaaacttgccctgtttttgtttttttagtttgttatccccttactgagcggcctctactaggtggctgtgattaaatgtcccaagcaaggatagggaaggggaatggttgagcctctggagatcattgtaaccaatcctgccagacctgtttggggcagtggggagcaaacctagataaggacctgtttggggcagcagggagcaaaatctcctttaacaaccaagcagttcctcattcacatcaacagagcgagtgtgagaggatcgagccattgaaagctcattaccagtaggacataatttttggctctccctattcacaaccagtgcacagtttgacacagtggcctcaggttcacagtgcaccatgtcactgtgctatcctacgaaatcatttgtttctaagttgtgtttattcctggagtgacatgccaccccgaatggctcactttcactgaggatgctgtcctctgatttagctgctgcctccagcctctggcttgagaacttactaaaggcacttccttcctgttaaacccctgttaactctccataaatttggtgattctctgctaggcctaagattttgagttaacatctcttgaagccaaactccaccttctgtgctttttgcttgggataatggagtttttctttagaaacagtgccaagaatgacaagatattaaaaaaaaaaaagaaagaaaaaaaaaaaaacacctacttttaaagaaaatacctaacagatttttaatatagttatctctaccactttcttttctagtttcttgattttcagctcaggctgcattctaactcatactgtgaagacaaaggtgtttttgattcagaaatatatgaaatctgcatagtcttaatttgtaaaaaataaagaaaattccttaaccttt

SEQ ID NO: 317989 - DNA, 1505 bp, Homo sapiens
atccccgagcctaagggctacccaaagaatgaaaaggataagaagaaagagaagaaatgaagtgaccatccagcctttcccaattagacttcctctccttccacccctcatttcctttttgcacacattacaggtggtgtgttctgtgataatgaaaagcatcagaaaagcttttgtactttgtggtttcctctattttgaattttttgatcaaaaaactgattagcagaatatagtttggagtttggcttcatcttcctggggttcccctcactcccttttttgtcaaccccatctgtagcctcttcctctactcaggcagtcgacccgccacgatgagaagtgggaccagcagagggcgccaacttcaggagtccgctttcccaccaggcttcattcacccagtggacctgaactgtttggtagagccacccggcccttccttcctcattgttgtttggtatgcgcacagttcctgtgggactgggccgtgagttttccattggaaagaagttcagtggtcccattgttaactcagcctcaaatctcaactgtcaggccctacaaagaaaatggagagcctcttctggtggatgctttgctccctctgagctgcccatgctggtctggcaaacacacctttctgctttgccttcacaaaagtaatgtgttccctttcccaccccttgcctgaccctcagggagtcagcctgcttccatccatgggtgggaagacttcagcacaaaggaaagactaattcttgtcaggcatttttgaaaaggctgattatgtgtatcaaggtacagcatcgtagggttcccctaaacttgccctgtttttgtttttttagtttgttatccccttactgagcggcctctactaggtggctgtgattaaatgtcccaagcaaggatagggaaggggaatggttgagcctctggagatcattgtaaccaatcctgccagacctgtttggggcagtggggagcaaacctagataaggacctgtttggggcagcagggagcaaaatctcctttaacaaccaagcagttcctcattcacatcaacagagcgaggctgtgataacttaggaggcagcaatcctaatagtccttcagtgcattttagtctgtctccaactggacaccagtaggtagtgtcaagccagagattcggggcagtagataaatgttcattttactgatgcactttagtttttggtctgttacctgttttccagaaatttgtggccttttaggcgggagttaggcgaccaaaccagtgagagccccaatccctgcagttttgtggcttcaagtgtgggtggacagtcctaatggggatctccagctccttcctgtgggctgccacagacagctacccccagaagggtcaatgttgggagtggttgtggctctgagctgctctacagagcttcagtgtgagaggatcgagccattgaaagctcattaccagtaagggtaagactggtaccgactcgat

SEQ ID NO: 317990 - DNA, 1532 bp, Homo sapiens
aggctaggaggaggccgggggcggcagaatatagtttggagtttggcttcatcttcctggggttcccctcactcccttttttgtcaaccccatctgtagcctcttcctctactcaggcagtcgacccgccacgatgagaagtgggaccagcagagggcgccaacttcaggagtccgctttcccaccaggcttcattcacccagtggacctgaactgtttggtagagccacccggcccttccttcctcattgttgtttggtatgcgcacagttcctgtgggactgggccgtgagttttccattggaaagaagttcagtggtcccattgttaactcagcctcaaatctcaactgtcaggccctacaaagaaaatggagagcctcttctggtggatgctttgctccctctgagctgcccatgctggtctggcaaacacacctttctgctttgccttcacaaaagtaatgtgttccctttcccaccccttgcctgaccctcagggagtcagcctgcttccatccatgggtgggaagacttcagcacaaaggaaagactaattcttgtcaggcatttttgaaaaggctgattatgtgtatcaaggtacagcatcgtagggttcccctaaacttgccctgtttttgtttttttagtttgttatccccttactgagcggcctctactaggtggctgtgattaaatgtcccaagcaaggatagggaaggggaatggttgagcctctggagatcattgtaaccaatcctgccagacctgtttggggcagtggggagcaaacctagataaggacctgtttggggcagcagggagcaaaatctcctttaacaaccaagcagttcctcattcacatcaacagagcgagtgtgagaggatcgagccattgaaagctcattaccagtaggacataatttttggctctccctattcacaaccagtgcacagtttgacacagtggcctcaggttcacagtgcaccatgtcactgtgctatcctacgaaatcatttgtttctaagttgtgtttattcctggagtgacatgccaccccgaatggctcactttcactgaggatgctgtcctctgatttagctgctgcctccagcctctggcttgagaacttactaaaggcacttccttcctgttaaacccctgttaactctccataaatttggtgattctctgctaggcctaagattttgagttaacatctcttgaagccaaactccaccttctgtgctttttgcttgggataatggagtttttctttagaaacagtgccaagaatgacaagatattaaaaaaaaaaaagaaagaaaaaaaaaaaaacacctacttttaaagaaaatacctaacagatttttaatatagttatctctaccactttcttttctagtttcttgattttcagctcaggctgcattctaactcatactgtgaagacaaaggtgtttttgattcagaaatatatgaaatctgcatagtcttaatttgtaaaaaataaagaaaattccttaaccttt

SEQ ID NO: 317991 - DNA, 1608 bp, Homo sapiens
  misc_feature (15)..(15): n is a, c, g, or t
  misc_feature (1608)..(1608): n is a, c, g, or t
ggggagcggaagtgngcggggagagcacatccggtgttagaagcgctggtaggccttggagaggcgggttaggaagagtggagactgctgcacggactctggaaccatgaacatatttgatcgaaagatcaactttgatgcgcttttaaaattttctcatataaccccgtcaacgcagcagcacctgaagaaggtctatgcaagttttgccctttgtatgtttgtggcggctgcaggggcctatgtccatatggtcactcatttcattcaggctggcctgctgtctgccttgggctccctgatattgatgatttggctgatggcaacacctcatagccatgaaactgaacagaaaagactgggacttcttgctggatttgcattccttacaggagttggcctgggccctgccctggagttttgtattgctgtcaaccccagcatccttcccactgctttcatgggcacggcaatgatctttacctgcttcaccctcagtgcactctatgccaggcgccgtagctacctctttctgggaggtatcttgatgtcagccctgagcttgttgcttttgtcttccctggggaatgttttctttggatccatttggcttttccaggcaaacctgtatgtgggactggtggtcatgtgtggcttcgtcctttttgatactcaactcattattgaaaaggccgaacatggagatcaagattatatctggcactgcattgatctcttcttagatttcattactgtcttcagaaaactcatgatgatcctggccatgaatgaaaaggataagaagaaagagaagaaatgaagtgaccatccagcctttcccaattagacttcctctccttccacccctcatttcctttttgcacacattacaggtggtgtgttctgtgataatgaaaagcatcagaaaagcttttgtactttgtggtttcctctattttgaattttttgatcaaaaaactgattagcagaatatagtttggagtttggcttcatcttcctggggttcccctcactcccttttttgtcaaccccatctgtagcctcttcctctactcaggcagtcgacccgccacgatgagaagtgggaccagcagagggcgccaacttcaggagtccgctttcccaccaggcttcattcacccagtggacctgaactgtttggtagagccacccggcccttccttcctcattgttgtttggtatgcgcacagttcctgtgggactgggccgtgagttttccattggaaagaagttcagtggtcccattgttaactcagcctcaaatctcaactgtcaggccctacaaagaaaatggagagcctcttctggtggatgctttgctccctctgagctgcccatgctggtctggcaaacacacctttctgctttgccttcacaaaagtaatgtgttccctttcccaccccttgcctgaccctcagggagtcagcctgcttccatccatgggtgggaagacttcagcacaaaggaaagactaattcttgtcaggcatttttgaaaaggctgattatgtgtatcaaggtacaggtaaggaaggctgctaggggtaaggaaattggggccgactn

SEQ ID NO: 317992 - DNA, 1595 bp, Homo sapiens
  misc_feature (15)..(15): n is a, c, g, or t
ggggagcggaagtgngcggggagagcacatccggtgttagaagcgctggtaggccttggagaggcgggttaggaagagtggagactgctgcacggactctggaaccatgaacatatttgatcgaaagatcaactttgatgcgcttttaaaattttctcatataaccccgtcaacgcagcagcacctgaagaaggtctatgcaagttttgccctttgtatgtttgtggcggctgcaggggcctatgtccatatggtcactcatttcattcaggctggcctgctgtctgccttgggctccctgatattgatgatttggctgatggcaacacctcatagccatgaaactgaacagaaaagactgggacttcttgctggatttgcattccttacaggagttggcctgggccctgccctggagttttgtattgctgtcaaccccagcatccttcccactgctttcatgggcacggcaatgatctttacctgcttcaccctcagtgcactctatgccaggcgccgtagctacctctttctgggaggtatcttgatgtcagccctgagcttgttgcttttgtcttccctggggaatgttttctttggatccatttggcttttccaggcaaacctgtatgtgggactggtggtcatgtgtggcttcgtcctttttgatactcaactcattattgaaaaggccgaacatggagatcaagattatatctggcactgcattgatctcttcttagatttcattactgtcttcagaaaactcatgatgatcctggccatgaatgaaaaggataagaagaaagagaagaaatgaagtgaccatccagcctttcccaattagacttcctctccttccacccctcatttcctttttgcacacattacaggtggtgtgttctgtgataatgaaaagcatcagaaaagcttttgtactttgtggtttcctctattttgaattttttgatcaaaaaactgattagcagaatatagtttggagtttggcttcatcttcctggggttcccctcactcccttttttgtcaaccccatctgtagcctcttcctctactcaggcagtcgacccgccacgatgagaagtgggaccagcagagggcgccaacttcaggagtccgctttcccaccaggcttcattcacccagtggacctgaactgtttggtagagccacccggcccttccttcctcattgttgtttggtatgcgcacagttcctgtgggactgggccgtgagttttccattggaaagaagttcagtggtcccattgttaactcagcctcaaatctcaactgtcaggccctacaaagaaaatggagagcctcttctggtggatgctttgctccctctgagctgcccatgctggtctggcaaacacacctttctacttttaaagaaaatacctaacagatttttaatatagttatctctaccactttcttttctagtttcttgattttcagctcaggctgcattctaactcatactgtgaagacaaaggtgtttttgattcagaaatatatgaaatctgcatagtcttaatttgtaaaaaataaagaaaattccttaacctttc

SEQ ID NO: 317993 - DNA, 2577 bp, Homo sapiens
  misc_feature (15)..(15): n is a, c, g, or t
ggggagcggaagtgngcggggagagcacatccggtgttagaagcgctggtaggccttggagaggcgggttaggaagtgtagacgcagggccccttggcctagcttcgatcgttcgaattcagagcacgtccttccgaggtgaaggaacgcgaaactccacccatccgattgctgttcggctgcgggcgggtcctttggtcgggctgaccctgggtgagcggcccggagccaagactcgagagtggagactgctgcacggactctggaaccatgaacatatttgatcgaaagatcaactttgatgcgcttttaaaattttctcatataaccccgtcaacgcagcagcacctgaagaaggtctatgcaagttttgccctttgtatgtttgtggcggctgcaggggcctatgtccatatggtcactcatttcattcaggctggcctgctgtctgccttgggctccctgatattgatgatttggctgatggcaacacctcatagccatgaaactgaacagaaaagactgggacttcttgctggatttgcattccttacaggagttggcctgggccctgccctggagttttgtattgctgtcaaccccagcatccttcccactgctttcatgggcacggcaatgatctttacctgcttcaccctcagtgcactctatgccaggcgccgtagctacctctttctgggaggtatcttgatgtcagccctgagcttgttgcttttgtcttccctggggaatgttttctttggatccatttggcttttccaggcaaacctgtatgtgggactggtggtcatgtgtggcttcgtcctttttgatactcaactcattattgaaaaggccgaacatggagatcaagattatatctggcactgcattgatctcttcttagatttcattactgtcttcagaaaactcatgatgatcctggccatgaatgaaaaggataagaagaaagagaagaaatgaagtgaccatccagcctttcccaattagacttcctctccttccacccctcatttcctttttgcacacattacaggtggtgtgttctgtgataatgaaaagcatcagaaaagcttttgtactttgtggtttcctctattttgaattttttgatcaaaaaactgattagcagaatatagtttggagtttggcttcatcttcctggggttcccctcactcccttttttgtcaaccccatctgtagcctcttcctctactcaggcagtcgacccgccacgatgagaagtgggaccagcagagggcgccaacttcaggagtccgctttcccaccaggcttcattcacccagtggacctgaactgtttggtagagccacccggcccttccttcctcattgttgtttggtatgcgcacagttcctgtgggactgggccgtgagttttccattggaaagaagttcagtggtcccattgttaactcagcctcaaatctcaactgtcaggccctacaaagaaaatggagagcctcttctggtggatgctttgctccctctgagctgcccatgctggtctggcaaacacacctttctgctttgccttcacaaaagtaatgtgttccctttcccaccccttgcctgaccctcagggagtcagcctgcttccatccatgggtgggaagacttcagcacaaaggaaagactaattcttgtcaggcatttttgaaaaggctgattatgtgtatcaaggtacagcatcgtagggttcccctaaacttgccctgtttttgtttttttagtttgttatccccttactgagcggcctctactaggtggctgtgattaaatgtcccaagcaaggatagggaaggggaatggttgagcctctggagatcattgtaaccaatcctgccagacctgtttggggcagtggggagcaaacctagataaggacctgtttggggcagcagggagcaaaatctcctttaacaaccaagcagttcctcattcacatcaacagagcgaggctgtgataacttaggaggcagcaatcctaatagtccttcagtgcattttagtctgtctccaactggacaccagtaggtagtgtcaagccagagattcggggcagtagataaatgttcattttactgatgcactttagtttttggtctgttacctgttttccagaaatttgtggccttttaggcgggagttaggcgaccaaaccagtgagagccccaatccctgcagttttgtggcttcaagtgtgggtggacagtcctaatggggatctccagctccttcctgtgggctgccacagacagctacccccagaagggtcaatgttgggagtggttgtggctctgagctgctctacagagcttcagtgtgagaggatcgagccattgaaagctcattaccagtaggacataatttttggctctccctattcacaaccagtgcacagtttgacacagtggcctcaggttcacagtgcaccatgtcactgtgctatcctacgaaatcatttgttttgaggatgctgtcctctgatttagctgctgcctccagcctctggcttgagaacttactaaaggc

SEQ ID NO: 317994 - DNA, 1307 bp, Homo sapiens
atccccgagcctaagggctacccaaagaatgaaaaggataagaagaaagagaagaaatgaagtgaccatccagcctttcccaattagacttcctctccttccacccctcatttcctttttgcacacattacaggtggtgtgttctgtgataatgaaaagcatcagaaaagcttttgtactttgtggtttcctctattttgaattttttgatcaaaaaactgattagcagaatatagtttggagtttggcttcatcttcctggggttcccctcactcccttttttgtcaaccccatctgtagcctcttcctctactcaggcagtcgacccgccacgatgagaagtgggaccagcagagggcgccaacttcaggagtccgctttcccaccaggcttcattcacccagtggacctgaactgtttggtagagccacccggcccttccttcctcattgttgtttggtatgcgcacagttcctgtgggactgggccgtgagttttccattggaaagaagttcagtggtcccattgttaactcagcctcaaatctcaactgtcaggccctacaaagaaaatggagagcctcttctggtggatgctttgctccctctgagctgcccatgctggtctggcaaacacacctttctgctttgccttcacaaaagtaatgtgttccctttcccaccccttgcctgaccctcagggagtcagcctgcttccatccatgggtgggaagacttcagcacaaaggaaagactaattcttgtcaggcatttttgaaaaggctgattatgtgtatcaaggtacagcatcgtagggttcccctaaacttgccctgtttttgtttttttagtttgttatccccttactgagcggcctctactaggtggctgtgattaaatgtcccaagcaaggatagggaaggggaatggttgagcctctggagatcattgtaaccaatcctgccagacctgtttggggcagtggggagcaaacctagataaggacctgtttggggcagcagggagcaaaatctcctttaacaaccaagcagttcctcattcacatcaacagagcgaggctgtgataacttaggaggcagcaatcctaatagtccttcagtgcattttagtctgtctccaactggacaccagtaggtagtgtcaagccagagattcggggcagtagataaatgttcattttactgatgcactttagtttttggtctgttacctgttttccagaaatttgtggccttttaggcgggagttaggcgaccaaaccagaagggtaaggctggtaccgagcc

SEQ ID NO: 317995 - DNA, 2245 bp, Homo sapiens
  misc_feature (15)..(15): n is a, c, g, or t
ggggagcggaagtgngcggggagagcacatccggtgttagaagcgctggtaggccttggagaggcgggttaggaagagtggagactgctgcacggactctggaaccatgaacatatttgatcgaaagatcaactttgatgcgcttttaaaattttctcatataaccccgtcaacgcagcagcacctgaagaaggtctatgcaagttttgccctttgtatgtttggagttggcctgggccctgccctggagttttgtattgctgtcaaccccagcatccttcccactgctttcatgggcacggcaatgatctttacctgcttcaccctcagtgcactctatgccaggcgccgtagctacctctttctgggaggtatcttgatgtcagccctgagcttgttgcttttgtcttccctggggaatgttttctttggatccatttggcttttccaggcaaacctgtatgtgggactggtggtcatgtgtggcttcgtcctttttgatactcaactcattattgaaaaggccgaacatggagatcaagattatatctggcactgcattgatctcttcttagatttcattactgtcttcagaaaactcatgatgatcctggccatgaatgaaaaggataagaagaaagagaagaaatgaagtgaccatccagcctttcccaattagacttcctctccttccacccctcatttcctttttgcacacattacaggtggtgtgttctgtgataatgaaaagcatcagaaaagcttttgtactttgtggtttcctctattttgaattttttgatcaaaaaactgattagcagaatatagtttggagtttggcttcatcttcctggggttcccctcactcccttttttgtcaaccccatctgtagcctcttcctctactcaggcagtcgacccgccacgatgagaagtgggaccagcagagggcgccaacttcaggagtccgctttcccaccaggcttcattcacccagtggacctgaactgtttggtagagccacccggcccttccttcctcattgttgtttggtatgcgcacagttcctgtgggactgggccgtgagttttccattggaaagaagttcagtggtcccattgttaactcagcctcaaatctcaactgtcaggccctacaaagaaaatggagagcctcttctggtggatgctttgctccctctgagctgcccatgctggtctggcaaacacacctttctgctttgccttcacaaaagtaatgtgttccctttcccaccccttgcctgaccctcagggagtcagcctgcttccatccatgggtgggaagacttcagcacaaaggaaagactaattcttgtcaggcatttttgaaaaggctgattatgtgtatcaaggtacagcatcgtagggttcccctaaacttgccctgtttttgtttttttagtttgttatccccttactgagcggcctctactaggtggctgtgattaaatgtcccaagcaaggatagggaaggggaatggttgagcctctggagatcattgtaaccaatcctgccagacctgtttggggcagtggggagcaaacctagataaggacctgtttggggcagcagggagcaaaatctcctttaacaaccaagcagttcctcattcacatcaacagagcgaggctgtgataacttaggaggcagcaatcctaatagtccttcagtgcattttagtctgtctccaactggacaccagtaggtagtgtcaagccagagattcggggcagtagataaatgttcattttactgatgcactttagtttttggtctgttacctgttttccagaaatttgtggccttttaggcgggagttaggcgaccaaaccagtgagagccccaatccctgcagttttgtggcttcaagtgtgggtggacagtcctaatggggatctccagctccttcctgtgggctgccacagacagctacccccagaagggtcaatgttgggagtggttgtggctctgagctgctctacagagcttcagtgtgagaggatcgagccattgaaagctcattaccagtaggacataatttttggctctccctattcacaaccagtgcacagtttgacacagtggcctcaggttcacagtgcaccatgtcactgtgctatcctacgaaatcatttgttttgaggatgctgtcctctgatttagctgctgcctccagcctctggcttgagaacttactaaaggc

SEQ ID NO: 317996 - DNA, 2196 bp, Homo sapiens
  misc_feature (15)..(15): n is a, c, g, or t
ggggagcggaagtgngcggggagagcacatccggtgttagaagcgctggtaggccttggagaggcgggttaggaagagtggagactgctgcacggactctggaaccatgaacatatttgatcgaaagatcaactttgatgcgcttttaaaattttctcatataaccccgtcaacgcagcagcacctgaagaaggtctatgcaagttttgccctttgtatgtttgcatccttcccactgctttcatgggcacggcaatgatctttacctgcttcaccctcagtgcactctatgccaggcgccgtagctacctctttctgggaggtatcttgatgtcagccctgagcttgttgcttttgtcttccctggggaatgttttctttggatccatttggcttttccaggcaaacctgtatgtgggactggtggtcatgtgtggcttcgtcctttttgatactcaactcattattgaaaaggccgaacatggagatcaagattatatctggcactgcattgatctcttcttagatttcattactgtcttcagaaaactcatgatgatcctggccatgaatgaaaaggataagaagaaagagaagaaatgaagtgaccatccagcctttcccaattagacttcctctccttccacccctcatttcctttttgcacacattacaggtggtgtgttctgtgataatgaaaagcatcagaaaagcttttgtactttgtggtttcctctattttgaattttttgatcaaaaaactgattagcagaatatagtttggagtttggcttcatcttcctggggttcccctcactcccttttttgtcaaccccatctgtagcctcttcctctactcaggcagtcgacccgccacgatgagaagtgggaccagcagagggcgccaacttcaggagtccgctttcccaccaggcttcattcacccagtggacctgaactgtttggtagagccacccggcccttccttcctcattgttgtttggtatgcgcacagttcctgtgggactgggccgtgagttttccattggaaagaagttcagtggtcccattgttaactcagcctcaaatctcaactgtcaggccctacaaagaaaatggagagcctcttctggtggatgctttgctccctctgagctgcccatgctggtctggcaaacacacctttctgctttgccttcacaaaagtaatgtgttccctttcccaccccttgcctgaccctcagggagtcagcctgcttccatccatgggtgggaagacttcagcacaaaggaaagactaattcttgtcaggcatttttgaaaaggctgattatgtgtatcaaggtacagcatcgtagggttcccctaaacttgccctgtttttgtttttttagtttgttatccccttactgagcggcctctactaggtggctgtgattaaatgtcccaagcaaggatagggaaggggaatggttgagcctctggagatcattgtaaccaatcctgccagacctgtttggggcagtggggagcaaacctagataaggacctgtttggggcagcagggagcaaaatctcctttaacaaccaagcagttcctcattcacatcaacagagcgaggctgtgataacttaggaggcagcaatcctaatagtccttcagtgcattttagtctgtctccaactggacaccagtaggtagtgtcaagccagagattcggggcagtagataaatgttcattttactgatgcactttagtttttggtctgttacctgttttccagaaatttgtggccttttaggcgggagttaggcgaccaaaccagtgagagccccaatccctgcagttttgtggcttcaagtgtgggtggacagtcctaatggggatctccagctccttcctgtgggctgccacagacagctacccccagaagggtcaatgttgggagtggttgtggctctgagctgctctacagagcttcagtgtgagaggatcgagccattgaaagctcattaccagtaggacataatttttggctctccctattcacaaccagtgcacagtttgacacagtggcctcaggttcacagtgcaccatgtcactgtgctatcctacgaaatcatttgttttgaggatgctgtcctctgatttagctgctgcctccagcctctggcttgagaacttactaaaggc

SEQ ID NO: 317997 - DNA, 2513 bp, Homo sapiens
atccccgagcctaagggctacccaaagaatgaaaaggataagaagaaagagaagaaatgaagtgaccatccagcctttcccaattagacttcctctccttccacccctcatttcctttttgcacacattacaggtggtgtgttctgtgataatgaaaagcatcagaaaagcttttgtactttgtggtttcctctattttgaattttttgatcaaaaaactgattagcagaatatagtttggagtttggcttcatcttcctggggttcccctcactcccttttttgtcaaccccatctgtagcctcttcctctactcaggcagtcgacccgccacgatgagaagtgggaccagcagagggcgccaacttcaggagtccgctttcccaccaggcttcattcacccagtggacctgaactgtttggtagagccacccggcccttccttcctcattgttgtttggtatgcgcacagttcctgtgggactgggccgtgagttttccattggaaagaagttcagtggtcccattgttaactcagcctcaaatctcaactgtcaggccctacaaagaaaatggagagcctcttctggtggatgctttgctccctctgagctgcccatgctggtctggcaaacacacctttctgctttgccttcacaaaagtaatgtgttccctttcccaccccttgcctgaccctcagggagtcagcctgcttccatccatgggtgggaagacttcagcacaaaggaaagactaattcttgtcaggcatttttgaaaaggctgattatgtgtatcaaggtacagcatcgtagggttcccctaaacttgccctgtttttgtttttttagtttgttatccccttactgagcggcctctactaggtggctgtgattaaatgtcccaagcaaggatagggaaggggaatggttgagcctctggagatcattgtaaccaatcctgccagacctgtttggggcagtggggagcaaacctagataaggacctgtttggggcagcagggagcaaaatctcctttaacaaccaagcagttcctcattcacatcaacagagcgaggctgtgataacttaggaggcagcaatcctaatagtccttcagtgcattttagtctgtctccaactggacaccagtaggtagtgtcaagccagagattcggggcatcgacccgccacgatgagaagtgggaccagcagagggcgccaacttcaggagtccgctttcccaccaggcttcattcacccagtggacctgaactgtttggtagagccacccggcccttccttcctcattgttgtttggtatgcgcacagttcctgtgggactgggccgtgagttttccattggaaagaagttcagtggtcccattgttaactcagcctcaaatctcaactgtcaggccctacaaagaaaatggagagcctcttctggtggatgctttgctccctctgagctgcccatgctggtctggcaaacacacctttctgctttgccttcacaaaagtaatgtgttccctttcccaccccttgcctgaccctcagggagtcagcctgcttccatccatgggtgggaagacttcagcacaaaggaaagactaattcttgtcaggcatttttgaaaaggctgattatgtgtatcaaggtacagcatcgtagggttcccctaaacttgccctgtttttgtttttttagtttgttatccccttactgagcggcctctactaggtggctgtgattaaatgtcccaagcaaggatagggaaggggaatggttgagcctctggagatcattgtaaccaatcctgccagacctgtttggggcagtggggagcaaacctagataaggacctgtttggggcagcagggagcaaaatctcctttaacaaccaagcagttcctcattcacatcaacagagcgaggctgtgataacttaggaggcagcaatcctaatagtccttcagtgcattttagtctgtctccaactggacaccagtaggtagtgtcaagccagagattcggggcagtagataaatgttcattttactgatgcactttagtttttggtctgttacctgttttccagaaatttgtggccttttaggcgggagttaggcgaccaaaccagtgagagccccaatccctgcagttttgtggcttcaagtgtgggtggacagtcctaatggggatctccagctccttcctgtgggctgccacagacagctacccccagaagggtcaatgttgggagtggttgtggctctgagctgctctacagagcttcagtgtgagaggatcgagccattgaaagctcattaccagtaggacataatttttggctctccctattcacaaccagtgcacagtttgacacagtggcctcaggttcacagtgcaccatgtcactgtgctatcctacgaaatcatttgttttgaggatgctgtcctctgatttagctgctgcctccagcctctggcttgagaacttactaaaggc

SEQ ID NO: 317998 - DNA, 1241 bp, Homo sapiens
atccccgagcctaagggctacccaaagaatgaaaaggataagaagaaagagaagaaatgaagtgaccatccagcctttcccaattagacttcctctccttccacccctcatttcctttttgcacacattacaggtggtgtgttctgtgataatgaaaagcatcagaaaagcttttgtactttgtggtttcctctattttgaattttttgatcaaaaaactgattagcagaatatagtttggagtttggcttcatcttcctggggttcccctcactcccttttttgtcaaccccatctgtagcctcttcctctactcaggcagtcgacccgccacgatgagaagtgggaccagcagagggcgccaacttcaggagtccgctttcccaccaggcttcattcacccagtggacctgaactgtttggtagagccacccggcccttccttcctcattgttgtttggtatgcgcacagttcctgtgggactgggccgtgagttttccattggaaagaagttcagtggtcccattgttaactcagcctcaaatctcaactgtcaggccctacaaagaaaatggagagcctcttctggtggatgctttgctccctctgagctgcccatgctggtctggcaaacacacctttctgctttgccttcacaaaagtaatgtgttccctttcccaccccttgcctgaccctcagggagtcagcctgcttccatccatgggtgggaagacttcagcacaaaggaaagactaattcttgtcaggcatttttgaaaaggctgattatgtgtatcaaggtacagcatcgtagggttcccctaaacttgccctgtttttgtttttttagtttgttatccccttactgagcggcctctactaggtggctgtgattaaatgtcccaagcaaggatagggaaggggaatggttgagcctctggagatcattgtaaccaatcctgccagacctgtttggggcagtggggagcaaacctagataaggacctgtttggggcagcagggagcaaaatctcctttaacaaccaagcagttcctcattcacatcaacagagcgaggctgtgataacttaggaggcagcaatcctaatagtccttcagtgcattttagtctgtctccaactggacaccagtaggtagtgtcaagccagagattcggggcagtagataaatgcactgaaggactattaggattgctgcctcctaagttatcacagcctcg

SEQ ID NO: 317999 - DNA, 1306 bp, Homo sapiens
atccccgagcctaagggctacccaaagaatgaaaaggataagaagaaagagaagaaatgaagtgaccatccagcctttcccaattagacttcctctccttccacccctcatttcctttttgcacacattacaggtggtgtgttctgtgataatgaaaagcatcagaaaagcttttgtactttgtggtttcctctattttgaattttttgatcaaaaaactgattagcagaatatagtttggagtttggcttcatcttcctggggttcccctcactcccttttttgtcaaccccatctgtagcctcttcctctactcaggcagtcgacccgccacgatgagaagtgggaccagcagagggcgccaacttcaggagtccgctttcccaccaggcttcattcacccagtggacctgaactgtttggtagagccacccggcccttccttcctcattgttgtttggtatgcgcacagttcctgtgggactgggccgtgagttttccattggaaagaagttcagtggtcccattgttaactcagcctcaaatctcaactgtcaggccctacaaagaaaatggagagcctcttctggtggatgctttgctccctctgagctgcccatgctggtctggcaaacacacctttctgctttgccttcacaaaagtaatgtgttccctttcccaccccttgcctgaccctcagggagtcagcctgcttccatccatgggtgggaagacttcagcacaaaggaaagactaattcttgtcaggcatttttgaaaaggctgattatgtgtatcaaggtacagcatcgtagggttcccctaaacttgccctgtttttgtttttttagtttgttatccccttactgagcggcctctactaggtggctgtgattaaatgtcccaagcaaggatagggaaggggaatggttgagcctctggagatcattgtaaccaatcctgccagacctgtttggggcagtggggagcaaacctagataaggacctgtttggggcagcagggagcaaaatctcctttaacaaccaagcagttcctcattcacatcaacagagcgaggctgtgataacttaggaggcagcaatcctaatagtccttcagtgcattttagtctgtctccaactggacaccagtaggtagggtttttccagtgaagaacatctgatagacaaatgtcaatgtaaagattgaactatagcagggctactctacatgagtgccctagaatacagagcgatatttaatggataattggaatcatgtgtgagcacgggatatgtagatcaa

SEQ ID NO: 318000 - DNA, 1203 bp, Homo sapiens
atccccgagcctaagggctacccaaagaatgaaaaggataagaagaaagagaagaaatgaagtgaccatccagcctttcccaattagacttcctctccttccacccctcatttcctttttgcacacattacaggtggtgtgttctgtgataatgaaaagcatcagaaaagcttttgtactttgtggtttcctctattttgaattttttgatcaaaaaactgattagcagaatatagtttggagtttggcttcatcttcctggggttcccctcactcccttttttgtcaaccccatctgtagcctcttcctctactcaggcagtcgacccgccacgatgagaagtgggaccagcagagggcgccaacttcaggagtccgctttcccaccaggcttcattcacccagtggacctgaactgtttggtagagccacccggcccttccttcctcattgttgtttggtatgcgcacagttcctgtgggactgggccgtgagttttccattggaaagaagttcagtggtcccattgttaactcagcctcaaatctcaactgtcaggccctacaaagaaaatggagagcctcttctggtggatgctttgctccctctgagctgcccatgctggtctggcaaacacacctttctgctttgccttcacaaaagtaatgtgttccctttcccaccccttgcctgaccctcagggagtcagcctgcttccatccatgggtgggaagacttcagcacaaaggaaagactaattcttgtcaggcatttttgaaaaggctgattatgtgtatcaaggtacagcatcgtagggttcccctaaacttgccctgtttttgtttttttagtttgttatccccttactgagcggcctctactaggtggctgtgattaaatgtcccaagcaaggatagggaaggggaatggttgagcctctggagatcattgtaaccaatcctgccagacctgtttggggcagtggggagcaaacctagataaggacctgtttggggcagcagggagcaaaatctcctttaacaaccaagcagttcctcattcacatcaacagagcgaggctgtgataacttaggaggcagcaatcctaatagtccttcagtgcatccgcaggggtttcccacgggagacccgtagagattctcaagccagtgacacggggaagtgctacgatcatgattacga

SEQ ID NO: 318001 - DNA, 927 bp, Homo sapiens
  misc_feature (15)..(15): n is a, c, g, or t
ggggagcggaagtgngcggggagagcacatccggtgttagaagcgctggtaggccttggagaggcgggttaggaagagtggagactgctgcacggactctggaaccatgaacatatttgatcgaaagatcaactttgatgcgcttttaaaattttctcatataaccccgtcaacgcagcagcacctgaagaaggtctatgcaagttttgccctttgtatgtttgtggcggctgcaggggcctatgtccatatggtcactcatttcattcaggctggcctgctgtctgccttgggctccctgatattgatgatttggctgatggcaacacctcatagccatgaaactgaacagaaaagactgggacttcttgctggatttgcattccttacaggagttggcctgggccctgccctggagttttgtattgctgtcaaccccagcatccttcccactgctttcatgggcacggcaatgatctttacctgcttcaccctcagtgcactctatgccaggcgccgtagctacctctttctgggaggtatcttgatgtcagccctgagcttgttgcttttgtcttccctggggaatgttttctttggatccatttggcttttccaggcaaacctgtatgtgggactggtggtcatgtgtggcttcgtcctttttgatactcaactcattattgaaaaggccgaacatggagatcaagattatatctggcactgcattgatctcttcttagatttcattactgtcttcagaaaactcatgatgatcctggccatgaatgaaaaggataagaagaaagagaagaaatgaagtgaccatccagcctttcccaattagacttcctctccttccacccctcatttcctttttgcacacattacaggtggtgtgttctgtgataatgaaaagcatcagaa

SEQ ID NO: 318002 - DNA, 1102 bp, Homo sapiens
atccccgagcctaagggctacccaaagaatgaaaaggataagaagaaagagaagaaatgaagtgaccatccagcctttcccaattagacttcctctccttccacccctcatttcctttttgcacacattacaggtggtgtgttctgtgataatgaaaagcatcagaaaagcttttgtactttgtggtttcctctattttgaattttttgatcaaaaaactgattagcagaatatagtttggagtttggcttcatcttcctggggttcccctcactcccttttttgtcaaccccatctgtagcctcttcctctactcaggcagtcgacccgccacgatgagaagtgggaccagcagagggcgccaacttcaggagtccgctttcccaccaggcttcattcacccagtggacctgaactgtttggtagagccacccggcccttccttcctcattgttgtttggtatgcgcacagttcctgtgggactgggccgtgagttttccattggaaagaagttcagtggtcccattgttaactcagcctcaaatctcaactgtcaggccctacaaagaaaatggagagcctcttctggtggatgctttgctccctctgagctgcccatgctggtctggcaaacacacctttctgctttgccttcacaaaagtaatgtgttccctttcccaccccttgcctgaccctcagggagtcagcctgcttccatccatgggtgggaagacttcagcacaaaggaaagactaattcttgtcaggcatttttgaaaaggctgattatgtgtatcaaggtacagcatcgtagggttcccctaaacttgccctgtttttgtttttttagtttgttatccccttactgagcggcctctactaggtggctgtgattaaatgtcccaagcaaggatagggaaggggaatggttgagcctctggagatcattgtaaccaatcctgccagacctgtttggggcagtggggagcaaacctagataaggacctgtttggggcagcagggagcaaaatctcctttaacaaccaagcagttcctcattcacatcaacagagcgctgcaggtacccctctacttctatat

SEQ ID NO: 318003 - DNA, 1042 bp, Homo sapiens
atccccgagcctaagggctacccaaagaatgaaaaggataagaagaaagagaagaaatgaagtgaccatccagcctttcccaattagacttcctctccttccacccctcatttcctttttgcacacattacaggtggtgtgttctgtgataatgaaaagcatcagaaaagcttttgtactttgtggtttcctctattttgaattttttgatcaaaaaactgattagcagaatatagtttggagtttggcttcatcttcctggggttcccctcactcccttttttgtcaaccccatctgtagcctcttcctctactcaggcagtcgacccgccacgatgagaagtgggaccagcagagggcgccaacttcaggagtccgctttcccaccaggcttcattcacccagtggacctgaactgtttggtagagccacccggcccttccttcctcattgttgtttggtatgcgcacagttcctgtgggactgggccgtgagttttccattggaaagaagttcagtggtcccattgttaactcagcctcaaatctcaactgtcaggccctacaaagaaaatggagagcctcttctggtggatgtgtcctctgatttagctgctgcctccagcctctggcttgagaacttactaaaggcacttccttcctgttaaacccctgttaactctccataaatttggtgattctctgctaggcctaagattttgagttaacatctcttgaagccaaactccaccttctgtgctttttgcttgggataatggagtttttctttagaaacagtgccaagaatgacaagatattaaaaaaaaaaaagaaagaaaaaaaaaaaaacacctacttttaaagaaaatacctaacagatttttaatatagttatctctaccactttcttttctagtttcttgattttcagctcaggctgcattctaactcatactgtgaagacaaaggtgtttttgattcagaaatatatgaaatctgcatagtcttaatttgtaaaaaataaagaaaattccttaaccttt

SEQ ID NO: 318004 - DNA, 1486 bp, Homo sapiens
  misc_feature (15)..(15): n is a, c, g, or t
ggggagcggaagtgngcggggagagcacatccggtgttagaagcgctggtaggccttggagaggcgggttaggaagagtggagactgctgcacggactctggaaccatgaacatatttgatcgaaagatcaactttgatgcgcttttaaaattttctcatataaccccgtcaacgcagcagcacctgaagaaggtctatgcaagttttgccctttgtatgtttgtggcggctgcaggggcctatgtccatatggtcactcatttcattcaggctggcctgctgtctgccttgggctccctgatattgatgatttggctgatggcaacacctcatagccatgaaactgaacagaaaagactgggacttcttgctggatttgcattccttacaggagttggcctgggccctgccctggagttttgtattgctgtcaaccccagcatccttcccactgctttcatgggcacggcaatgatctttacctgcttcaccctcagtgcactctatgccaggcgccgtagctacctctttctgggaggtatcttgatgtcagccctgagcttgttgcttttgtcttccctggggaatgttttctttggatccatttggcttttccaggcaaacctgtatgtgggactggtggtcatgtgtggcttcgtcctttttgatactcaactcattattgaaaaggccgaacatggagatcaagattatatctggcactgcattgatctcttcttagatttcattactgtcttcagaaaactcatgatgatcctggccatgaatgaaaaggataagaagaaagagaagaaatgaagtgaccatccagcctttcccaattagacttcctctccttccacccctcatttcctttttgcacacattacaggtggtgtgttctgtgataatgaaaagcatcagaagataaacaaggcatcatggatttccctgttccagtcctttcaaatgcctccatctcagtgtgcagctttccaaggaggctgtccagcgttgttgtctatcaagctggatcgaggaagccactgtaagcctcaagaaccctgcgggaacaattggtgaattggggcctgtatccaaattgcaacaaaccaatgacttataattggacccggttcttgggagaaccttggtatgaaaaatgggccaaaacaaagaagggcccctttgggagagttccttctacctagttgggcgaacttggaagacctttggctttggcgacccccgtggaagacacttgtgtccttatcgataacaaacacttcaacaaccttgggatccaagcgttgtgtatcatacacgcttagtactgttataggggtagtatatacacccgcaagagccccaacttattaaacctttccaatgggagcaacccgacatcagttgtatttcgttattcgctgaacatactctatctggagtcgacttcatgtaccaacttgagcgactaacatacaa

SEQ ID NO: 318005 - DNA, 951 bp, Homo sapiens
  misc_feature (15)..(15): n is a, c, g, or t
ggggagcggaagtgngcggggagagcacatccggtgttagaagcgctggtaggccttggagaggcgggttaggaagagtggagactgctgcacggactctggaaccatgaacatatttgatcgaaagatcaactttgatgcgcttttaaaattttctcatataaccccgtcaacgcagcagcacctgaagaaggtctatgcaagttttgccctttgtatgtttgtggcggctgcaggggcctatgtccatatggtcactcatttcattcaggctggcctgctgtctgccttgggctccctgatattgatgatttggctgatggcaacacctcatagccatgaaactgaacagaaaagactgggacttcttgctggatttgcattccttacaggagttggcctgggccctgccctggagttttgtattgctgtcaaccccagcatccttcccactgctttcatgggcacggcaatgatctttacctgcttcaccctcagtgcactctatgccaggcgccgtagctacctctttctgggaggtatcttgatgtcagccctgagcttgttgcttttgtcttccctggggaatgttttctttggatccatttggcttttccaggcaaacctgtatgtgggactggtggtcatgtgtggcttcgtcctttttgatactcaactcattattgaaaaggccgaacatggagatcaagattatatctggcactgcattgatctcttcttagatttcattactgtcttcagaaaactcatgatgatcctggccatgaatgaaaaggataagaagaaagagaagaaatgaagtgaccatccagcctttcccaattagacttcctctccttccacccctcatttcctttttgcacacattacaggtggtgtgttctgtgataatgaaaagcatcagaaaaaaaaaaatagtaaagaaagcat

SEQ ID NO: 318006 - DNA, 980 bp, Homo sapiens
atccccgagcctaagggctacccaaagaatgaaaaggataagaagaaagagaagaaatgaagtgaccatccagcctttcccaattagacttcctctccttccacccctcatttcctttttgcacacattacaggtggtgtgttctgtgataatgaaaagcatcagaaaagcttttgtactttgtggtttcctctattttgaattttttgatcaaaaaactgattagcagaatatagtttggagtttggcttcatcttcctggggttcccctcactcccttttttgtcaaccccatctgtagcctcttcctctactcaggcagtcgacccgccacgatgagaagtgggaccagcagagggcgccaacttcaggagtccgctttcccaccaggcttcattcacccagtggacctgaactgtttggtagagccacccggcccttccttcctcattgttgtttggtatgcgcacagttcctgtgggactgggccgtgagttttccattggaaagaagttcagtggtcccattgttaactcagcctcaaatctcaactgtcaggccctacaaagaaaatggagagcctcttctggtggatgctttgctccctctgagctgcccatgctggtctggcaaacacacctttctgctttgccttcacaaaagtaatgtgttccctttcccaccccttgcctgaccctcagggagtcagcctgcttccatccatgggtgggaagacttcagcacaaaggaaagactaattcttgtcaggcatttttgaaaaggctgattatgtgtatcaagaaaatacctaacagatttttaatatagttatctctaccactttcttttctagtttcttgattttcagctcaggctgcattctaactcatactgtgaagacaaaggtgtttttgattcagaaatatatgaaatctgcatagtcttaatttgtaaaaaataaagaaaattccttaaccttt

SEQ ID NO: 318007 - DNA, 1070 bp, Homo sapiens
  misc_feature (1056)..(1056): n is a, c, g, or t
  misc_feature (1070)..(1070): n is a, c, g, or t
atccccgagcctaagggctacccaaagaatgaaaaggataagaagaaagagaagaaatgaagtgaccatccagcctttcccaattagacttcctctccttccacccctcatttcctttttgcacacattacaggtggtgtgttctgtgataatgaaaagcatcagaaaagcttttgtactttgtggtttcctctattttgaattttttgatcaaaaaactgattagcagaatatagtttggagtttggcttcatcttcctggggttcccctcactcccttttttgtcaaccccatctgtagcctcttcctctactcaggcagtcgacccgccacgatgagaagtgggaccagcagagggcgccaacttcaggagtccgctttcccaccaggcttcattcacccagtggacctgaactgtttggtagagccacccggcccttccttcctcattgttgtttggtatgcgcacagttcctgtgggactgggccgtgagttttccattggaaagaagttcagtggtcccattgttaactcagcctcaaatctcaactgtcaggccctacaaagaaaatggagagcctcttctggtggatgtgtcctctgatttagctgctgcctccagcctctggcttgagaacttactaaaggcacttccttcctgttaaacccctgttaactctccataaatttggtgattctctgctaggcctaagattttgagttaacatctcttgaagccaaactccaccttctgtgctttttgcttgggataatggagtttttctttagaaacagtgccaagaatgacaagatattaaaaaaaaaaaagaaagaaaaaaaaaaaaacacctacttttaaagaaaatacctaacagatttttaatatagttatctctaccactttcttttctagtttcttgattttcagctcaggctgcattctaactcatactgtgaagacaaaggtgtttttgattcagaaatatatgaaatctgcatagtcttaatttgtaaaaaataaagaaaattccttaacctttaaaaaaaaaaaaangtcgacgcggccgn

SEQ ID NO: 318008 - DNA, 1180 bp, Homo sapiens
atccccgagcctaagggctacccaaagaatgaaaaggataagaagaaagagaagaaatgaagtgaccatccagcctttcccaattagacttcctctccttccacccctcatttcctttttgcacacattacaggtggtgtgttctgtgataatgaaaagcatcagaaaagcttttgtactttgtggtttcctctattttgaattttttgatcaaaaaactgattagcagaatatagtttggagtttggcttcatcttcctggggttcccctcactcccttttttgtcaaccccatctgtagcctcttcctctactcaggcagtcgacccgccacgatgagaagtgggaccagcagagggcgccaacttcaggagtccgctttcccaccaggcttcattcacccagtggacctgaactgtttggtagagccacccggcccttccttcctcattgttgtttggtatgcgcacagttcctgtgggactgggccgtgagttttccattggaaagaagttcagtggtcccattgttaactcagcctcaaatctcaactgtcaggccctacaaagaaaatggagagcctcttctggtggatgctttgctccctctgagctgcccatgctggtctggcaaacacacctttctgctttgccttcacaaaagtaatgtgttccctttcccaccccttgcctgaccctcagggagtcagcctgcttccatccatgggtgggaagacttcagcacaaaggaaagactaattcttgtcaggcatttttgaccctgtttttgtttttttagtttgttatccccttactgagcggcctctactaggtggctgtgattaaatgtcccaagcaaggatagggaaggggaatggttgagcctctggagatcattgtaaccaatcctgccagacctgtttggggcagtggggagcaaacctagataaggacctgtttggggcagcagggagcaaaatctcctttaacaaccaagcagttcctcattcacatcaacagagcgaggctgtgataacttaggaggcagcatctatagtctcatgatttagctgctcactgacacagagtaggcagcagaattcggagagatatgtcattctgtgactagttggctgactgttcagaatgtgcttagcgagtagcacacaggagccatctgt

SEQ ID NO: 318009 - DNA, 755 bp, Homo sapiens
caggttcccgctcggtagctgtactaaccctgtgagagccccaatccctgcagttttgtggcttcaagtgtgggtggacagtcctaatggggatctccagctccttcctgtgggctgccacagacagctacccccagaagggtcaatgttgggagtggttgtggctctgagctgctctacagagcttcagtgtgagaggatcgagccattgaaagctcattaccagtaggacataatttttggctctccctattcacaaccagtgcacagtttgacacagtggcctcaggttcacagtgcaccatgtcactgtgctatcctacgaaatcatttgtttctaagttgtgtttattcctggagtgacatgccaccccgaatggctcactttcactgaggatgctgtcctctgatttagctgtaggcctaagattttgagttaacatctcttgaagccaaactccaccttctgtgctttttgcttgggataatggagtttttctttagaaacagtgccaagaatgacaagatattaaaaaaaaaaaagaaagaaaaaaaaaaaaacacctacttttaaagaaaatacctaacagatttttaatatagttatctctaccactttcttttctagtttcttgattttcagctcaggctgcattctaactcatactgtgaagacaaaggtgtttttgattcagaaatatatgaaatctgcatagtcttaatttgtaaaaaataaagaaaattccttaaccttt

SEQ ID NO: 318010 - DNA, 750 bp, Homo sapiens
atccccgagcctaagggctacccaaagaatgaaaaggataagaagaaagagaagaaatgaagtgaccatccagcctttcccaattagacttcctctccttccacccctcatttcctttttgcacacattacaggtggtgtgttctgtgataatgaaaagcatcagaaaagcttttgtactttgtggtttcctctattttgaattttttgatcaaaaaactgattagcagaatatagtttggagtttggcttcatcttcctggggttcccctcactcccttttttgtcaaccccatctgtagcctcttcctctactcaggcagtcgacccgccacgatgagaagtgggaccagcagagggcgccaacttcaggagtccgctttcccaccaggcttcattcacccagtggacctgaactgtttggtagagccacccggcccttccttcctcattgttgtttggtatgcgcacagttcctgtgggactgggccgtgagttttccattggaaagaagttcagtggtcccattgttaactcagcctcaaatctcaactgtcaggccctacaaagaaaatggagagcctcttctggtggatgctttgctccctctgagctgcccatgctggtctggcaaacacgctcaggctgcattctaactcatactgtgaagacaaaggtgtttttgattcagaaatatatgaaatctgcatagtcttaatttgtaaaaaataaagaaaattccttaaccttt

SEQ ID NO: 318011 - DNA, 605 bp, Homo sapiens
ttgggatttgaagttgttgcccatttatccatccatccatccatccagtcatccatccacccatccactcacccacccatctatccacccaactacccattcactcactcttccactcacctgtctacccatccacccattcttccatccatccatccacctgtccacccaacttctcatccacttatccatctactcacccatccatctaccctccacttatccattcatccatccttccaccccgtcgggtggagcgctccacccgacggggtgggggtggggacagctgcttaacctttattcttggtcggtctgtcggcaactttgggaaccaccagtaggatgtggttaagattcagttcttgctgagctaaggaagcatttctcatttctttttaattgtctggctcacttctagtccctaactaaatgctcactcaagagttttagcttgaatgtcaaatgtcaaaaaattaattgggtgatttttctccatttctaggataagaagaaagagaagaaatgaagtgaccatccagcctttcccaattaagccagcccccctcccccactcgactcggcggccacccccacgggtcgag

SEQ ID NO: 318012 - DNA, 1052 bp, Homo sapiens
  misc_feature (15)..(15): n is a, c, g, or t
  misc_feature (937)..(937): n is a, c, g, or t
  misc_feature (939)..(939): n is a, c, g, or t
  misc_feature (963)..(963): n is a, c, g, or t
  misc_feature (988)..(988): n is a, c, g, or t
ggggagcggaagtgngcggggagagcacatccggtgttagaagcgctggtaggccttggagaggcgggttaggaagagtggagactgctgcacggactctggaaccatgaacatatttgatcgaaagatcaactttgatgcgcttttaaaattttctcatataaccccgtcaacgcagcagcacctgaagaaggtctatgcaagttttgccctttgtatgtttgtggcggctgcaggggcctatgtccatatggtcactcatttcattcaggctggcctgctgtctgccttgggctccctgatattgatgatttggctgatggcaacacctcatagccatgaaactgaacagaaaagactgggacttcttgctggatttgcattccttacaggagttggcctgggccctgccctggagttttgtattgctgtcaaccccagcatccttcccactgctttcatgggcacggcaatgatctttacctgcttcaccctcagtgcactctatgccaggcgccgtagctacctctttctgggaggtatcttgatgtcagccctgagcttgttgcttttgtcttccctggggaatgttttctttggatccatttggcttttccaggccactgccaactaattgccaatatttgcccctcccctttaataaagcttttaagaagtcacattattggaaaacttaacttcaacatttggcctactcaagctcttctgaagttctcctgagatgactgaatatgaaccaaagctgcactgtgctgtacttttcagcttcaactgggaatactcttccaaggataaaagcagctccagtccctgaaggtgttcgtgccaacagcacagcggtacactccttctctaacccagtttgtcaatagtactatagcatctgtggaaaatcttagaaaaaaacattttctcncncaccctctctcttccctgttaagnccatcccaaaatgcttcaagtaaanaataacaagtttaaggggttaagcacttttaaagtctgattaagggggtggggggaaaaaagag

SEQ ID NO: 318013 - DNA, 2267 bp, Homo sapiens
tgcacacgccgaggacccacatccgaaggccacactgcacacgccggactcgcggcggtggtaactcggaggtcactgtggacgaagttgttgctgcacacgccgaaggccctaacaagattatatctggcactgcattgatctcttcttagatttcattactgtcttcagaaaactcatgatgatcctggccatgaatgaaaaggataagaagaaagagaagaaatgaagtgaccatccagcctttcccaattagacttcctctccttccacccctcatttcctttttgcacacattacaggtggtgtgttctgtgataatgaaaagcatcagaaaagcttttgtactttgtggtttcctctattttgaattttttgatcaaaaaactgattagcagaatatagtttggagtttggcttcatcttcctggggttcccctcactcccttttttgtcaaccccatctgtagcctcttcctctactcaggcagtcgacccgccacgatgagaagtgggaccagcagagggcgccaacttcaggagtccgctttcccaccaggcttcattcacccagtggacctgaactgtttggtagagccacccggcccttccttcctcattgttgtttggtatgcgcacagttcctgtgggactgggccgtgagttttccattggaaagaagttcagtggtcccattgttaactcagcctcaaatctcaactgtcaggccctacaaagaaaatggagagcctcttctggtggatgctttgctccctctgagctgcccatgctggtctggcaaacacacctttctgctttgccttcacaaaagtaatgtgttccctttcccaccccttgcctgaccctcagggagtcagcctgcttccatccatgggtgggaagacttcagcacaaaggaaagactaattcttgtcaggcatttttgaaaaggctgattatgtgtatcaaggtacagcatcgtagggttcccctaaacttgccctgtttttgtttttttagtttgttatccccttactgagcggcctctactaggtggctgtgattaaatgtcccaagcaaggatagggaaggggaatggttgagcctctggagatcattgtaaccaatcctgccagacctgtttggggcagtggggagcaaacctagataaggacctgtttggggcagcagggagcaaaatctcctttaacaaccaagcagttcctcattcacatcaacagagcgaggctgtgataacttaggaggcagcaatcctaatagtccttcagtgcattttagtctgtctccaactggacaccagtaggtagtgtcaagccagagattcggggcagtagataaatgttcattttactgatgcactttagtttttggtctgttacctgttttccagaaatttgtggccttttaggcgggagttaggcgaccaaaccagtgagagccccaatccctgcagttttgtggcttcaagtgtgggtggacagtcctaatggggatctccagctccttcctgtgggctgccacagacagctacccccagaagggtcaatgttgggagtggttgtggctctgagctgctctacagagcttcagtgtgagaggatcgagccattgaaagctcattaccagtaggacataatttttggctctccctattcacaaccagtgcacagtttgacacagtggcctcaggttcacagtgcaccatgtcactgtgctatcctacgaaatcatttgtttctaagttgtgtttattcctggagtgacatgccaccccgaatggctcactttcactgaggatgctgtcctctgatttagctgctgcctccagcctctggcttgagaacttactaaaggcacttccttcctgttaaacccctgttaactctccataaatttggtgattctctgctaggcctaagattttgagttaacatctcttgaagccaaactccaccttctgtgctttttgcttgggataatggagtttttctttagaaacagtgccaagaatgacaagatattaaaaaaaaaaaagaaagaaaaaaaaaaaaacacctacttttaaagaaaatacctaacagatttttaatatagttatctctaccactttcttttctagtttcttgattttcagctcaggctgcattctaactcatactgtgaagacaaaggtgtttttgattcagaaatatatgaaatctgcatagtcttaatttgtaaaaaataaagaaaattccttaaccttt

SEQ ID NO: 318014 - DNA, 1809 bp, Homo sapiens
aaaattaggctagtacgaggcgggggtgaatcggcagaggcgcacgatgagaagtgggaccagcagagggcgccaacttcaggagtccgctttcccaccaggcttcattcacccagtggacctgaactgtttggtagagccacccggcccttccttcctcattgttgtttggtatgcgcacagttcctgtgggactgggccgtgagttttccattggaaagaagttcagtggtcccattgttaactcagcctcaaatctcaactgtcaggccctacaaagaaaatggagagcctcttctggtggatgctttgctccctctgagctgcccatgctggtctggcaaacacacctttctgctttgccttcacaaaagtaatgtgttccctttcccaccccttgcctgaccctcagggagtcagcctgcttccatccatgggtgggaagacttcagcacaaaggaaagactaattcttgtcaggcatttttgaaaaggctgattatgtgtatcaaggtacagcatcgtagggttcccctaaacttgccctgtttttgtttttttagtttgttatccccttactgagcggcctctactaggtggctgtgattaaatgtcccaagcaaggatagggaaggggaatggttgagcctctggagatcattgtaaccaatcctgccagacctgtttggggcagtggggagcaaacctagataaggacctgtttggggcagcagggagcaaaatctcctttaacaaccaagcagttcctcattcacatcaacagagcgaggctgtgataacttaggaggcagcaatcctaatagtccttcagtgcattttagtctgtctccaactggacaccagtaggtagtgtcaagccagagattcggggcagtagataaatgttcattttactgatgcactttagtttttggtctgttacctgttttccagaaatttgtggccttttaggcgggagttaggcgaccaaaccagtgagagccccaatccctgcagttttgtggcttcaagtgtgggtggacagtcctaatggggatctccagctccttcctgtgggctgccacagacagctacccccagaagggtcaatgttgggagtggttgtggctctgagctgctctacagagcttcagtgtgagaggatcgagccattgaaagctcattaccagtaggacataatttttggctctccctattcacaaccagtgcacagtttgacacagtggcctcaggttcacagtgcaccatgtcactgtgctatcctacgaaatcatttgtttctaagttgtgtttattcctggagtgacatgccaccccgaatggctcactttcactgaggatgctgtcctctgatttagctgctgcctccagcctctggcttgagaacttactaaaggcacttccttcctgttaaacccctgttaactctccataaatttggtgattctctgctaggcctaagattttgagttaacatctcttgaagccaaactccaccttctgtgctttttgcttgggataatggagtttttctttagaaacagtgccaagaatgacaagatattaaaaaaaaaaaagaaagaaaaaaaaaaaaacacctacttttaaagaaaatacctaacagatttttaatatagttatctctaccactttcttttctagtttcttgattttcagctcaggctgcattctaactcatactgtgaagacaaaggtgtttttgattcagaaatatatgaaatctgcatagtcttaatttgtaaaaaataaagaaaattccttaaccttt

SEQ ID NO: 318015 - DNA, 2413 bp, Homo sapiens
  misc_feature (15)..(15): n is a, c, g, or t
ggggagcggaagtgngcggggagagcacatccggtgttagaagcgctggtaggccttggagaggcgggttaggaagagtggagactgctgcacggactctggaaccatgaacatatttgatcgaaagatcaactttgatgcgcttttaaaattttctcatataaccccgtcaacgcagcagcacctgaagaaggtctatgcaagttttgccctttgtatgtttgtggcggctgcaggggcctatgtccatatggtcactcatttcattcaggctggcctgctgtctgccttgggctccctgatattgatgatttggctgatggcaacacctcatagccatgaaactgaacagaaaagactgggacttcttgctggatttgcattccttacaggagttggcctgggccctgccctggagttttgtattgctgtcaaccccagcatccttcccactgctttcatgggcacggcaatgatctttacctgcttcaccctcagtgcactctatgccaggcgccgtagctacctctttctgggaggtatcttgatgtcagccctgagcttgttgcttttgtcttccctggggaatgttttctttggatccatttggcttttccaggcaaacctgtatgtgggactggtggtcatgtgtggcttcgtcctttttgatactcaactcattattgaaaaggccgaacatggagatcaagattatatctggcactgcattgatctcttcttagatttcattactgtcttcagaaaactcatgatgatcctggccatgaatgaaaaggataagaagaaagagaagaaatgaagtgaccatccagcctttcccaattagacttcctctccttccacccctcatttcctttttgcacacattacaggtggtgtgttctgtgataatgaaaagcatcagaaaagcttttgtactttgtggtttcctctattttgaattttttgatcaaaaaactgattagcagaatatagtttggagtttggcttcatcttcctggggttcccctcactcccttttttgtcaaccccatctgtagcctcttcctctactcaggcagtcgacccgccacgatgagaagtgggaccagcagagggcgccaacttcaggagtccgctttcccaccaggcttcattcacccagtggacctgaactgtttggtagagccacccggcccttccttcctcattgttgtttggtatgcgcacagttcctgtgggactgggccgtgagttttccattggaaagaagttcagtggtcccattgttaactcagcctcaaatctcaactgtcaggccctacaaagaaaatggagagcctcttctggtggatgctttgctccctctgagctgcccatgctggtctggcaaacacacctttctgctttgccttcacaaaagtaatgtgttccctttcccaccccttgcctgaccctcagggagtcagcctgcttccatccatgggtgggaagacttcagcacaaaggaaagactaattcttgtcaggcatttttgaaaaggctgattatgtgtatcaaggtacagcatcgtagggttcccctaaacttgccctgtttttgtttttttagtttgttatccccttactgagcggcctctactaggtggctgtgattaaatgtcccaagcaaggatagggaaggggaatggttgagcctctggagatcattgtaaccaatcctgccagacctgtttggggcagtggggagcaaacctagataaggacctgtttggggcagcagggagcaaaatctcctttaacaaccaagcagttcctcattcacatcaacagagcgaggctgtgataacttaggaggcagcaatcctaatagtccttcagtgcattttagtctgtctccaactggacaccagtaggtagtgtcaagccagagattcggggcagtagataaatgttcattttactgatgcactttagtttttggtctgttacctgttttccagaaatttgtggccttttaggcgggagttaggcgaccaaaccagtgagagccccaatccctgcagttttgtggcttcaagtgtgggtggacagtcctaatggggatctccagctccttcctgtgggctgccacagacagctacccccagaagggtcaatgttgggagtggttgtggctctgagctgctctacagagcttcagtgtgagaggatcgagccattgaaagctcattaccagtaggacataatttttggctctccctattcacaaccagtgcacagtttgacacagtggcctcaggttcacagtgcaccatgtcactgtgctatcctacgaaatcatttgttttgaggatgctgtcctctgatttagctgctgcctccagcctctggcttgagaacttactaaaggc

SEQ ID NO: 318016 - DNA, 2478 bp, Homo sapiens
ggtcacactcctctgtgacacgcgaggctcctcagttacttagccaacggcagaggcgggaagtgagaggagtctggggctggggctgccttccaggcccacggggcggcccgctcttttcggatggttacctttgggcagagtggagactgctgcacggactctggaaccatgaacatatttgatcgaaagatcaactttgatgcgcttttaaaattttctcatataaccccgtcaacgcagcagcacctgaagaaggtctatgcaagttttgccctttgtatgtttgtggcggctgcaggggcctatgtccatatggtcactcatttcattcaggctggcctgctgtctgccttgggctccctgatattgatgatttggctgatggcaacacctcatagccatgaaactgaacagaaaagactgggacttcttgctggatttgcattccttacaggagttggcctgggccctgccctggagttttgtattgctgtcaaccccagcatccttcccactgctttcatgggcacggcaatgatctttacctgcttcaccctcagtgcactctatgccaggcgccgtagctacctctttctgggaggtatcttgatgtcagccctgagcttgttgcttttgtcttccctggggaatgttttctttggatccatttggcttttccaggcaaacctgtatgtgggactggtggtcatgtgtggcttcgtcctttttgatactcaactcattattgaaaaggccgaacatggagatcaagattatatctggcactgcattgatctcttcttagatttcattactgtcttcagaaaactcatgatgatcctggccatgaatgaaaaggataagaagaaagagaagaaatgaagtgaccatccagcctttcccaattagacttcctctccttccacccctcatttcctttttgcacacattacaggtggtgtgttctgtgataatgaaaagcatcagaaaagcttttgtactttgtggtttcctctattttgaattttttgatcaaaaaactgattagcagaatatagtttggagtttggcttcatcttcctggggttcccctcactcccttttttgtcaaccccatctgtagcctcttcctctactcaggcagtcgacccgccacgatgagaagtgggaccagcagagggcgccaacttcaggagtccgctttcccaccaggcttcattcacccagtggacctgaactgtttggtagagccacccggcccttccttcctcattgttgtttggtatgcgcacagttcctgtgggactgggccgtgagttttccattggaaagaagttcagtggtcccattgttaactcagcctcaaatctcaactgtcaggccctacaaagaaaatggagagcctcttctggtggatgctttgctccctctgagctgcccatgctggtctggcaaacacacctttctgctttgccttcacaaaagtaatgtgttccctttcccaccccttgcctgaccctcagggagtcagcctgcttccatccatgggtgggaagacttcagcacaaaggaaagactaattcttgtcaggcatttttgaaaaggctgattatgtgtatcaaggtacagcatcgtagggttcccctaaacttgccctgtttttgtttttttagtttgttatccccttactgagcggcctctactaggtggctgtgattaaatgtcccaagcaaggatagggaaggggaatggttgagcctctggagatcattgtaaccaatcctgccagacctgtttggggcagtggggagcaaacctagataaggacctgtttggggcagcagggagcaaaatctcctttaacaaccaagcagttcctcattcacatcaacagagcgaggctgtgataacttaggaggcagcaatcctaatagtccttcagtgcattttagtctgtctccaactggacaccagtaggtagtgtcaagccagagattcggggcagtagataaatgttcattttactgatgcactttagtttttggtctgttacctgttttccagaaatttgtggccttttaggcgggagttaggcgaccaaaccagtgagagccccaatccctgcagttttgtggcttcaagtgtgggtggacagtcctaatggggatctccagctccttcctgtgggctgccacagacagctacccccagaagggtcaatgttgggagtggttgtggctctgagctgctctacagagcttcagtgtgagaggatcgagccattgaaagctcattaccagtaggacataatttttggctctccctattcacaaccagtgcacagtttgacacagtggcctcaggttcacagtgcaccatgtcactgtgctatcctacgaaatcatttgttttgaggatgctgtcctctgatttagctgctgcctccagcctctggcttgagaacttactaaaggc

SEQ ID NO: 318017 - DNA, 2530 bp, Homo sapiens
  misc_feature (15)..(15): n is a, c, g, or t
ggggagcggaagtgngcggggagagcacatccggtgttagaagcgctggtaggccttggagaggcgggttaggaagagacagggtttcgccgtgttggccagactggtctcgaactcctgacgtcaaagtgatccacctgcctcggcctcccaaagtactgggattacaggcgtgagccactgtgcccaacctagtggagactgctgcacggactctggaaccatgaacatatttgatcgaaagatcaactttgatgcgcttttaaaattttctcatataaccccgtcaacgcagcagcacctgaagaaggtctatgcaagttttgccctttgtatgtttgtggcggctgcaggggcctatgtccatatggtcactcatttcattcaggctggcctgctgtctgccttgggctccctgatattgatgatttggctgatggcaacacctcatagccatgaaactgaacagaaaagactgggacttcttgctggatttgcattccttacaggagttggcctgggccctgccctggagttttgtattgctgtcaaccccagcatccttcccactgctttcatgggcacggcaatgatctttacctgcttcaccctcagtgcactctatgccaggcgccgtagctacctctttctgggaggtatcttgatgtcagccctgagcttgttgcttttgtcttccctggggaatgttttctttggatccatttggcttttccaggcaaacctgtatgtgggactggtggtcatgtgtggcttcgtcctttttgatactcaactcattattgaaaaggccgaacatggagatcaagattatatctggcactgcattgatctcttcttagatttcattactgtcttcagaaaactcatgatgatcctggccatgaatgaaaaggataagaagaaagagaagaaatgaagtgaccatccagcctttcccaattagacttcctctccttccacccctcatttcctttttgcacacattacaggtggtgtgttctgtgataatgaaaagcatcagaaaagcttttgtactttgtggtttcctctattttgaattttttgatcaaaaaactgattagcagaatatagtttggagtttggcttcatcttcctggggttcccctcactcccttttttgtcaaccccatctgtagcctcttcctctactcaggcagtcgacccgccacgatgagaagtgggaccagcagagggcgccaacttcaggagtccgctttcccaccaggcttcattcacccagtggacctgaactgtttggtagagccacccggcccttccttcctcattgttgtttggtatgcgcacagttcctgtgggactgggccgtgagttttccattggaaagaagttcagtggtcccattgttaactcagcctcaaatctcaactgtcaggccctacaaagaaaatggagagcctcttctggtggatgctttgctccctctgagctgcccatgctggtctggcaaacacacctttctgctttgccttcacaaaagtaatgtgttccctttcccaccccttgcctgaccctcagggagtcagcctgcttccatccatgggtgggaagacttcagcacaaaggaaagactaattcttgtcaggcatttttgaaaaggctgattatgtgtatcaaggtacagcatcgtagggttcccctaaacttgccctgtttttgtttttttagtttgttatccccttactgagcggcctctactaggtggctgtgattaaatgtcccaagcaaggatagggaaggggaatggttgagcctctggagatcattgtaaccaatcctgccagacctgtttggggcagtggggagcaaacctagataaggacctgtttggggcagcagggagcaaaatctcctttaacaaccaagcagttcctcattcacatcaacagagcgaggctgtgataacttaggaggcagcaatcctaatagtccttcagtgcattttagtctgtctccaactggacaccagtaggtagtgtcaagccagagattcggggcagtagataaatgttcattttactgatgcactttagtttttggtctgttacctgttttccagaaatttgtggccttttaggcgggagttaggcgaccaaaccagtgagagccccaatccctgcagttttgtggcttcaagtgtgggtggacagtcctaatggggatctccagctccttcctgtgggctgccacagacagctacccccagaagggtcaatgttgggagtggttgtggctctgagctgctctacagagcttcagtgtgagaggatcgagccattgaaagctcattaccagtaggacataatttttggctctccctattcacaaccagtgcacagtttgacacagtggcctcaggttcacagtgcaccatgtcactgtgctatcctacgaaatcatttgttttgaggatgctgtcctctgatttagctgctgcctccagcctctggcttgagaacttactaaaggc

SEQ ID NO: 318018 - DNA, 2373 bp, Homo sapiens
  misc_feature (15)..(15): n is a, c, g, or t
ggggagcggaagtgngcggggagagcacatccggtgttagaagcgctggtaggccttggagaggcgggttaggaagagtggagactgctgcacggactctggaaccatgaacatatttgatcgaaagatcaactttgatgcgcttttaaaattttctcatataaccccgtcaacgcagcagcacctgaagaaggtctatgcaagttttgccctttgtatgtttgtggcggctgcaggggcctatgtccatatggtcactcatttcattcaggctggcctgctgtctgccttgggctccctgatattgatgatttggctgatggcaacacctcatagccatgaaactgaacaggagttggcctgggccctgccctggagttttgtattgctgtcaaccccagcatccttcccactgctttcatgggcacggcaatgatctttacctgcttcaccctcagtgcactctatgccaggcgccgtagctacctctttctgggaggtatcttgatgtcagccctgagcttgttgcttttgtcttccctggggaatgttttctttggatccatttggcttttccaggcaaacctgtatgtgggactggtggtcatgtgtggcttcgtcctttttgatactcaactcattattgaaaaggccgaacatggagatcaagattatatctggcactgcattgatctcttcttagatttcattactgtcttcagaaaactcatgatgatcctggccatgaatgaaaaggataagaagaaagagaagaaatgaagtgaccatccagcctttcccaattagacttcctctccttccacccctcatttcctttttgcacacattacaggtggtgtgttctgtgataatgaaaagcatcagaaaagcttttgtactttgtggtttcctctattttgaattttttgatcaaaaaactgattagcagaatatagtttggagtttggcttcatcttcctggggttcccctcactcccttttttgtcaaccccatctgtagcctcttcctctactcaggcagtcgacccgccacgatgagaagtgggaccagcagagggcgccaacttcaggagtccgctttcccaccaggcttcattcacccagtggacctgaactgtttggtagagccacccggcccttccttcctcattgttgtttggtatgcgcacagttcctgtgggactgggccgtgagttttccattggaaagaagttcagtggtcccattgttaactcagcctcaaatctcaactgtcaggccctacaaagaaaatggagagcctcttctggtggatgctttgctccctctgagctgcccatgctggtctggcaaacacacctttctgctttgccttcacaaaagtaatgtgttccctttcccaccccttgcctgaccctcagggagtcagcctgcttccatccatgggtgggaagacttcagcacaaaggaaagactaattcttgtcaggcatttttgaaaaggctgattatgtgtatcaaggtacagcatcgtagggttcccctaaacttgccctgtttttgtttttttagtttgttatccccttactgagcggcctctactaggtggctgtgattaaatgtcccaagcaaggatagggaaggggaatggttgagcctctggagatcattgtaaccaatcctgccagacctgtttggggcagtggggagcaaacctagataaggacctgtttggggcagcagggagcaaaatctcctttaacaaccaagcagttcctcattcacatcaacagagcgaggctgtgataacttaggaggcagcaatcctaatagtccttcagtgcattttagtctgtctccaactggacaccagtaggtagtgtcaagccagagattcggggcagtagataaatgttcattttactgatgcactttagtttttggtctgttacctgttttccagaaatttgtggccttttaggcgggagttaggcgaccaaaccagtgagagccccaatccctgcagttttgtggcttcaagtgtgggtggacagtcctaatggggatctccagctccttcctgtgggctgccacagacagctacccccagaagggtcaatgttgggagtggttgtggctctgagctgctctacagagcttcagtgtgagaggatcgagccattgaaagctcattaccagtaggacataatttttggctctccctattcacaaccagtgcacagtttgacacagtggcctcaggttcacagtgcaccatgtcactgtgctatcctacgaaatcatttgttttgaggatgctgtcctctgatttagctgctgcctccagcctctggcttgagaacttactaaaggc

SEQ ID NO: 318019 - DNA, 1277 bp, Homo sapiens
  misc_feature (15)..(15): n is a, c, g, or t
ggggagcggaagtgngcggggagagcacatccggtgttagaagcgctggtaggccttggagaggcgggttaggaagagtggagactgctgcacggactctggaaccatgaacatatttgatcgaaagatcaactttgatgcgcttttaaaattttctcatataaccccgtcaacgcagcagcacctgaagaaggtctatgcaagttttgccctttgtatgtttgtggcggctgcaggggcctatgtccatatggtcactcatttcattcaggctggcctgctgtctgccttgggctccctgatattgatgatttggctgatggcaacacctcatagccatgaaactgaacagaaaagactgggacttcttgctggatttgcattccttacaggagttggcctgggccctgccctggagttttgtattgctgtcaaccccagcatccttcccactgctttcatgggcacggcaatgatctttacctgcttcaccctcagtgcactctatgccaggcgccgtagctacctctttctgggaggtatcttgatgtcagccctgagcttgttgcttttgtcttccctggggaatgttttctttggatccatttggcttttccaggcaaacctgtatgtgggactggtggtcatgtgtggcttcgtcctttttgatactcaactcattattgaaaaggccgaacatggagatcaagattatatctggcactgcattgatctcttcttagatttcattactgtcttcagaaaactcatgatgatcctggccatgaatgaaaaggataagaagaaagagaagaaatgaagtgaccatccagcctttcccaattagacttcctctccttccacccctcatttcctttttgcacacattacaggtggtgtgttctgtgataatgaaaagcatcagaaaagcttttgtactttgtggtttcctctattttgaattttttgatcaaaaaactccaccttctgtgctttttgcttgggataatggagtttttctttagaaacagtgccaagaatgacaagatattaaaaaaaaaaaagaaagaaaaaaaaaaaaacacctacttttaaagaaaatacctaacagatttttaatatagttatctctaccactttcttttctagtttcttgattttcagctcaggctgcattctaactcatactgtgaagacaaaggtgtttttgattcagaaatatatgaaatctgcatagtcttaatttgtaaaaaataaagaaaattccttaacctttc

SEQ ID NO: 318020 - DNA, 953 bp, Homo sapiens
  misc_feature (15)..(15): n is a, c, g, or t
ggggagcggaagtgngcggggagagcacatccggtgttagaagcgctggtaggccttggagaggcgggttaggaagagtggagactgctgcacggactctggaaccatgaacatatttgatcgaaagatcaactttgatgcgcttttaaaattttctcatataaccccgtcaacgcagcagcacctgaagaaggtctatgcaagttttgccctttgtatgtttgtggcggctgcaggggcctatgtccatatggtcactcatttcattcaggctggcctgctgtctgccttgggctccctgatattgatgatttggctgatggcaacacctcatagccatgaaactgaacagaaaagactgggacttcttgctggatttgcattccttacaggagttggcctgggccctgccctggagttttgtattgctgtcaaccccagcatccttcccactgctttcatgggcacggcaatgatctttacctgcttcaccctcagtgcactctatgccaggcgccgtagctacctctttctgggaggtatcttgatgtcagccctgagcttgttgcttttgtcttccctggggaatgttttctttggatccatttggcttttccaggcaaacctgtatgtgggactggtggtcatgtgtggcttcgtcctttttgatactcaactcattattgaaaaggccgaacatggagatcaagattatatctggcactgcattgatctcttcttagatttcattactgtcttcagaaaactcatgatgatcctggccatgaatgaaaaggataagaagaaagagaagaaatgaagtgaccatccagcctttcccaattagacttcctctccttccacccctcatttcctttttgcacacattacaggtggtgtgttctgtgataatgaaaagcatcagaacaaagggtaagggtagcgagctcgat

SEQ ID NO: 318021 - DNA, 884 bp, Homo sapiens
  misc_feature (15)..(15): n is a, c, g, or t
ggggagcggaagtgngcggggagagcacatccggtgttagaagcgctggtaggccttggagaggcgggttaggaagagtggagactgctgcacggactctggaaccatgaacatatttgatcgaaagatcaactttgatgcgcttttaaaattttctcatataaccccgtcaacgcagcagcacctgaagaaggtctatgcaagttttgccctttgtatgtttgtggcggctgcaggggcctatgtccatatggtcactcatttcattcaggctggcctgctgtctgccttgggctccctgatattgatgatttggctgatggcaacacctcatagccatgaaactgaacagaaaagactgggacttcttgctggatttgcattccttacaggagttggcctgggccctgccctggagttttgtattgctgtcaaccccagcatccttcccactgctttcatgggcacggcaatgatctttacctgcttcaccctcagtgcactctatgccaggcgccgtagctacctctttctgggaggtatcttgatgtcagccctgagcttgttgcttttgtcttccctggggaatgttttctttggatccatttggcttttccaggcaaacctgtatgtgggactggtggtcatgtgtggcttcgtcctttttgatactcaactcattattgaaaaggccgaacatggagatcaagattatatctggcactgcattgatctcttcttagatttcattactgtcttcagaaaactcatgatgatcctggccatgaatgaaaaggctacgaaagaacgacacgacattgcagtgaccatcagctttccaattagaattcctcttcttcaacctaattccttttggccctttc

SEQ ID NO: 318022 - DNA, 532 bp, Homo sapiens
ttgggatttgaagttgttgcccatttatccatccatccatccatccagtcatccatccacccatccactcacccacccatctatccacccaactacccattcactcactcttccactcacctgtctacccatccacccattcttccatccatccatccacctgtccacccaacttctcatccacttatccatctactcacccatccatctaccctccacttatccattcatccatccttccaccccgtcgggtggagcgctccacccgacggggtgggggtggggacagctgcttaacctttattcttggtcggtctgtcggcaactttgggaaccaccagtaggatgtggttaagattcagttcttgctgagctaaggaagcatttctcatttctttttaattgtctggctcacttctagtccctaactaaatgctcactcaagagttttagcttgaatgtcaaatgtcaaaaaattaattgggtgatttttctccatttctagagaggagaatgactcacctcgtggcgg

SEQ ID NO: 318023 - DNA, 564 bp, Homo sapiens
ctcaagcagtcctcctgtagctgggataacagatgcgtccagctggaatgtatagttttaaaaagctctcaggtaattgtgtaaaagcacacatagaagataatgacctagaagcctggtaatgtacctgtgtaatgacactagagttagaaaaagattgttctgcacttgatgtcctatgaccttggggaagttgcttgactctttggagtctgttttctgtaaaaagggattggtaatttctgccttgaatggtttccttggtatgctagaaagcaccattagtgtacctaacacccaaaccctcaaaactcccctcttgccatctctctgccctcctccttccctgtatcagctaaaagaagaggttcagagattaggcgggcctttcctgtgcactgaccaggcctcattaatagtctgggccctggctccagctgggccggctccttgtctttctcctaggggatttcttcactgctttcccttgtcattgcttcttggtggtaagcctatggaccttcagggcctgccaggcactagtcactcagcaagccaggacat

SEQ ID NO: 318024 - DNA, 1174 bp, Homo sapiens
  misc_feature (1)..(1): n is a, c, g, or t
  misc_feature (254)..(254): n is a, c, g, or t
nttagttgaacaaccattagtaatgctaaggatgaccaccgtgttaaagtgatgacaatctgcttctcattggacaattgtgctagaagcattatctcatcaaccattaacctaatcatttccagaactaataatttcattagagttgcagaatgaccaatgtctaattctgttactcctacattataattgacattcttctgtaaagagagccttccttcatcaactgaagctatttgggtattctcaaaggnaaattttacaaattttacaggaaaggaaagagaaatgcttaatttatttgtatttagttaccagttttctttttttttttttttttccaatttgagagcaggtactgtttattaaccaaccagcttagagaaatagtcatgggtagacaccttagttcattcttctaataagcctgttgatctggtcctccctgttgccagcatctccaccttctacaaaatgggtggtcttttttcttcattccacctcgtggagaagacaatttgaagggccacaggaagttatttgcctctttgaagcgttttccaacagtatagatctcatgaatcaaatcctccatgcagatgatgccgtatttaccaagagatcgagcaatcaaagcgttatctgtcaaagcaattcgcttcttattgattttgccataaccacgcttgtagattagttcatttactgacttcagattggggtacccccatgcaatatatggctctacaatcctcagcatgttaatcgaagccttgttgagcttcacaaaggttccattgaagatttgacgaaggcgaagaagctgcaacacctttcgaacctttgggctcactccattgatacctctgattctgatgacaaacgccaatttgggttctgcaggtacatagaagttgccagcttttcttgccatcctcgccattcgaatttcagttctgtacatctgcctatattccttgtgatagtgctttgctttttcatagataagcttcctccttgcctttcgaagcatcttttgggcaaacttctttctcaggcgcttgatcttcagctctgcgaaattccttcgctttttcttaagggtttctggcacagcaggaacctccttcttcttctcttctacaccctccatggttccagccggaaaaagagc

SEQ ID NO: 318025 - DNA, 1646 bp, Homo sapiens
aaaaaataaaataaaaaataaattgactgtctctggaccgctatctaataaggctgtcctgcattgctgacatcccgttcgctgtcagtctaaaagacccttgtgattcttggggctttaatggaccatttgttctgtctgtgctcttctttgccagcaacagctatcattcaggttgaagaccagaatacaggtgcaattgagaacattatagttgaagtaaaaaaagagccagatgctgagcccgcagagggagaggaagaggaggcccagccagctgccacagatgcccccaacggagacctcacgcccgagatgatcctcagcatgatggaccggtgatggcggagccttgtgcgtcgccaggacttctctgggctgtgtttaaacggcccgcatcttaatttttctcccttctttctttttttggctttgggaaaagcatcattttaccaaacataccgagaacgaaaacttcaaggatgatgttagaaaaaaatgtgatttaactagaacttgctgtctgatgttagcaaatcatggaatgttctgagtccctgagggtttactgtgaagtgctgaggacagtgttgacaactaactcgttttcctagatggaaacggagacattgacccctccctccatgtggtaaaccactccagaatggccaccaggcttcccagagttctatggtcttcttcccaagagagtttttaattgtaaatgcatacttgggaaggacttagagttttaaactgttttttgcttttgcttttccctgactccctttgcttggagtcagctgcacaccagtagtatggcatgctacgatcaggttctgtcctgaaagctttgcctctttcttggcaaagtttctggtatggtcaagcttgtaaataactttttttacattttaatcttttccattaattaagaggttgaaaagaagtgcagtgtaagaaaacccagcattttaattacttgcaaattaagttaccacagactctgtagtgtgtaaatgttgacaaggaattggatcacaatcatgtagcagaatggcacccagaccactgcccaccagtgacggacatgcacgtggcagatcatgatttccagcccacggagccagcatttgaaccttgtataattaactttcagttatgatttcccatcgacattttctttgccctgtttgtagctgattgttgtgttttataaatcttctgttaaggcagaagggtgattatgagtggttcacagcagcccttataagctgggccagaaaatttcactaggtcagtaatttaaaccttggatcttcaaaaaataaaataatgtgaagcaaaaccaactaaaaagtgattcttgcacatgaactgtcacatgtttaaaaatgtgttttttagagagcctcagtcttactgatttcaaacacttttttcttctgtgtattgcttttaagagagccatcagttagctatcagactctaggttgatgcattttgtacttagctgtactgtgtgatatttttcattattttaggacgccaacatgagacctgtaataaaatatgtaatggggttgaaagctggggaggaggatctactgctgtacagctaataaatcataacggattaacaagtg

SEQ ID NO: 318026 - DNA, 3817 bp, Homo sapiens
tgtgtctgagcctgtggagcgattaaaccgtgcgcggagctgcttctttggcggcagcggcggcggcggtggccggtgcggacgcgcggagctcgccggagacgccgggtggccggagccgtggagcggcggcggagcgggcgccgcggggggtgtggcgcggagaatgattacggacctgaagccaaagaacaagatgcgctagtggacagattgctgaccaggggcttgagagctgggttctattttccctcctcaaactgactttgcagccacggagaggcaggggaaatggaaggtgatgcagtcgaagccattgtggaggagtccgaaacttttattaaaggaaaggagagaaagacttaccagagacgccgggaagggggccaggaagaagatgcctgccacttaccccagaaccagacggatgggggtgaggtggtccaggatgtcaacagcagtgtacagatggtgatgatggaacagctggaccccacccttcttcagatgaagactgaagtaatggagggcacagtggctccagaagcagaggctgctgtggacgatacccagattataactttacaggttgtaaatatggaggaacagcccataaacataggagaacttcagcttgttcaagtacctgttcctgtgactgtacctgttgctaccacttcagtagaagaacttcagggggcttatgaaaatgaagtgtctaaagagggccttgcggaaagtgaacccatgatatgccacaccctacctttgcctgaagggtttcaggtggttaaagtgggggccaatggagaggtggagacactagaacaaggggaacttccaccccaggaagatcctagttggcaaaaagacccagactatcagccaccagccaaaaaaacaaagaaaaccaaaaagagcaaactgcgttatacagaggagggcaaagatgtagatgtgtctgtctacgattttgaggaagaacagcaggagggtctgctatcagaggttaatgcagagaaagtggttggtaatatgaagcctccaaagccaacaaaaattaaaaagaaaggtgtaaagaagacattccagtgtgagctttgcagttacacgtgtccacggcgttcaaatttggatcgtcacatgaaaagccacactgatgagagaccacacaagtgccatctctgtggcagggcattcagaacagtcaccctcctgaggaatcaccttaacacacacacaggtactcgtcctcacaagtgcccagactgcgacatggcctttgtgaccagtggagaattggttcggcatcgtcgttacaaacacacccacgagaagccattcaagtgttccatgtgcgattacgccagtgtagaagtcagcaaattaaaacgtcacattcgctctcatactggagagcgtccgtttcagtgcagtttgtgcagttatgccagcagggacacatacaagctgaaaaggcacatgagaacccattcaggggaaaagccttatgaatgttatatttgtcatgctcggtttacccaaagtggtaccatgaagatgcacattttacagaagcacacagaaaatgtggccaaatttcactgtccccactgtgacacagtcatagcccgaaaaagtgatttgggtgtccacttgcgaaagcagcattcctatattgagcaaggcaagaaatgccgttactgtgatgctgtgtttcatgagcgctatgccctcatccagcatcagaagtcacacaagaatgagaagcgctttaagtgtgaccagtgtgattacgcttgtagacaggagaggcacatgatcatgcacaagcgcacccacaccggggagaagccttacgcctgcagccactgcgataagaccttccgccagaagcagcttctcgacatgcacttcaagcgctatcacgaccccaacttcgtccctgcggcttttgtctgttctaagtgtgggaaaacatttacacgtcggaataccatggcaagacatgctgataattgtgctggcccagatggcgtagagggggaaaatggaggagaaacgaagaagagtaaacgtggaagaaaaagaaagatgcgctctaagaaagaagattcctctgacagtgaaaatgctgaaccagatctggacgacaatgaggatgaggaggagcctgccgtagaaattgaacctgagccagagcctcagcctgtgaccccagccccaccacccgccaagaagcggagaggacgaccccctggcagaaccaaccagcccaaacagaaccagccaacagctatcattcaggttgaagaccagaatacaggtgcaattgagaacattatagttgaagtaaaaaaagagccagatgctgagcccgcagagggagaggaagaggaggcccagccagctgccacagatgcccccaacggagacctcacgcccgagatgatcctcagcatgatggaccggtgatggcggagccttgtgcgtcgccaggacttctctgggctgtgtttaaacggcccgcatcttaatttttctcccttctttctttttttggctttgggaaaagcatcattttaccaaacataccgagaacgaaaacttcaaggatgatgttagaaaaaaatgtgatttaactagaacttgctgtctgatgttagcaaatcatggaatgttctgagtccctgagggtttactgtgaagtgctgaggacagtgttgacaactaactcgttttcctagatggaaacggagacattgacccctccctccatgtggtaaaccactccagaatggccaccaggcttcccagagttctatggtcttcttcccaagagagtttttaattgtaaatgcatacttgggaaggacttagagttttaaactgttttttgcttttgcttttccctgactccctttgcttggagtcagctgcacaccagtagtatggcatgctacgatcaggttctgtcctgaaagctttgcctctttcttggcaaagtttctggtatggtcaagcttgtaaataactttttttacattttaatcttttccattaattaagaggttgaaaagaagtgcagtgtaagaaaacccagcattttaattacttgcaaattaagttaccacagactctgtagtgtgtaaatgttgacaaggaattggatcacaatcatgtagcagaatggcacccagaccactgcccaccagtgacggacatgcacgtggcagatcatgatttccagcccacggagccagcatttgaaccttgtataattaactttcagttatgatttcccatcgacattttctttgccctgtttgtagctgattgttgtgttttataaatcttctgttaaggcagaagggtgattatgagtggttcacagcagcccttataagctgggccagaaaatttcactaggtcagtaatttaaaccttggatcttcaaaaaataaaataatgtgaagcaaaaccaactaaaaagtgattcttgcacatgaactgtcacatgtttaaaaatgtgttttttagagagcctcagtcttactgatttcaaacacttttttcttctgtgtattgcttttaagagagccatcagttagctatcagactctaggttgatgcattttgtacttagctgtactgtgtgatatttttcattattttaggacgccaacatgagacctgtaataaaatatgtaatggggttgaaagctggggaggaggatctactgctgtacagctaataaatcataacggattaacaagtgaagaaacaaaaaaaggtcgacgcggccggaaatttagg

SEQ ID NO: 318027 - DNA, 2569 bp, Homo sapiens
caaaaggcactcttctatatctacacacacacagtactcgtcctcacaagtgcccagactgcgacatggcctttgtgaccagtggagaattggttcggcatcgtcgttacaaacacacccacgagaagccattcaagtgttccatgtgcgattacgccagtgtagaagtcagcaaattaaaacgtcacattcgctctcatactggagagcgtccgtttcagtgcagtttgtgcagttatgccagcagggacacatacaagctgaaaaggcacatgagaacccattcaggggaaaagccttatgaatgttatatttgtcatgctcggtttacccaaagtggtaccatgaagatgcacattttacagaagcacacagaaaatgtggccaaatttcactgtccccactgtgacacagtcatagcccgaaaaagtgatttgggtgtccacttgcgaaagcagcattcctatattgagcaaggcaagaaatgccgttactgtgatgctgtgtttcatgagcgctatgccctcatccagcatcagaagtcacacaagaatgagaagcgctttaagtgtgaccagtgtgattacgcttgtagacaggagaggcacatgatcatgcacaagcgcacccacaccggggagaagccttacgcctgcagccactgcgataagaccttccgccagaagcagcttctcgacatgcacttcaagcgctatcacgaccccaacttcgtccctgcggcttttgtctgttctaagtgtgggaaaacatttacacgtcggaataccatggcaagacatgctgataattgtgctggcccagatggcgtagagggggaaaatggaggagaaacgaagaagagtaaacgtggaagaaaaagaaagatgcgctctaagaaagaagattcctctgacagtgaaaatgctgaaccagatctggacgacaatgaggatgaggaggagcctgccgtagaaattgaacctgagccagagcctcagcctgtgaccccagccccaccacccgccaagaagcggagaggacgaccccctggcagaaccaaccagcccaaacagaaccagccaacagctatcattcaggttgaagaccagaatacaggtgcaattgagaacattatagttgaagtaaaaaaagagccagatgctgagcccgcagagggagaggaagaggaggcccagccagctgccacagatgcccccaacggagacctcacgcccgagatgatcctcagcatgatggaccggtgatggcggagccttgtgcgtcgccaggacttctctgggctgtgtttaaacggcccgcatcttaatttttctcccttctttctttttttggctttgggaaaagcatcattttaccaaacataccgagaacgaaaacttcaaggatgatgttagaaaaaaatgtgatttaactagaacttgctgtctgatgttagcaaatcatggaatgttctgagtccctgagggtttactgtgaagtgctgaggacagtgttgacaactaactcgttttcctagatggaaacggagacattgacccctccctccatgtggtaaaccactccagaatggccaccaggcttcccagagttctatggtcttcttcccaagagagtttttaattgtaaatgcatacttgggaaggacttagagttttaaactgttttttgcttttgcttttccctgactccctttgcttggagtcagctgcacaccagtagtatggcatgctacgatcaggttctgtcctgaaagctttgcctctttcttggcaaagtttctggtatggtcaagcttgtaaataactttttttacattttaatcttttccattaattaagaggttgaaaagaagtgcagtgtaagaaaacccagcattttaattacttgcaaattaagttaccacagactctgtagtgtgtaaatgttgacaaggaattggatcacaatcatgtagcagaatggcacccagaccactgcccaccagtgacggacatgcacgtggcagatcatgatttccagcccacggagccagcatttgaaccttgtataattaactttcagttatgatttcccatcgacattttctttgccctgtttgtagctgattgttgtgttttataaatcttctgttaaggcagaagggtgattatgagtggttcacagcagcccttataagctgggccagaaaatttcactaggtcagtaatttaaaccttggatcttcaaaaaataaaataatgtgaagcaaaaccaactaaaaagtgattcttgcacatgaactgtcacatgtttaaaaatgtgttttttagagagcctcagtcttactgatttcaaacacttttttcttctgtgtattgcttttaagagagccatcagttagctatcagactctaggttgatgcattttgtacttagctgtactgtgtgatatttttcattattttaggacgccaacatgagacctgtaataaaatatgtaatggggttgaaagctggggaggaggatctactgctgtacagctaataaatcataacggattaacaagtg

SEQ ID NO: 318028 - DNA, 2060 bp, Homo sapiens
tgtgtctgagcctgtggagcgattaaaccgtgcgcggagctgcttctttggcggcagcggcggcggcggtggccggtgcggacgcgcggagctcgccggagacgccgggtggccggagccgtggagcggcggcggagcgggcgccgcggggggtgtggcgcggagaatgattacggacctgaagccaaagaacaagatgcgctagtggacagattgctgaccaggggcttgagagctgggttctattttccctcctcaaactgactttgcagccacggagaggcaggggaaatggaaggtgatgcagtcgaagccattgtggaggagtccgaaacttttattaaaggaaaggagagaaagacttaccagagacgccgggaagggggccaggaagaagatgcctgccacttaccccagaaccagacggatgggggtgaggtggtccaggatgtcaacagcagtgtacagatggtgatgatggaacagctggaccccacccttcttcagatgaagactgaagtaatggagggcacagtggctccagaagcagaggctgctgtggacgatacccagattataactttacaggttgtaaatatggaggaacagcccataaacataggagaacttcagcttgttcaagtacctgttcctgtgactgtacctgttgctaccacttcagtagaagaacttcagggggcttatgaaaatgaagtgtctaaagagggccttgcggaaagtgaacccatgatatgccacaccctacctttgcctgaagggtttcaggtggttaaagtgggggccaatggagaggtggagacactagaacaaggggaacttccaccccaggaagatcctagttggcaaaaagacccagactatcagccaccagccaaaaaaacaaagaaaaccaaaaagagcaaactgcgttatacagaggagggcaaagatgtagatgtgtctgtctacgattttgaggaagaacagcaggagggtctgctatcagaggttaatgcagagaaagtggttggtaatatgaagcctccaaagccaacaaaaattaaaaagaaaggtgtaaagaagacattccagtgtgagctttgcagttacacgtgtccacggcgttcaaatttggatcgtcacatgaaaagccacactgatgagagaccacacaagtgccatctctgtggcagggcattcagaacagtcaccctcctgaggaatcaccttaacacacacacaggtactcgtcctcacaagtgcccagactgcgacatggcctttgtgaccagtggagaattggttcggcatcgtcgttacaaacacacccacgagaagccattcaagtgttccatgtgcgattacgccagtgtagaagtcagcaaattaaaacgtcacattcgctctcatactggagagcgtccgtttcagtgcagtttgtgcagttatgccagcagggacacatacaagctgaaaaggcacatgagaacccattcaggggaaaagccttatgaatgttatatttgtcatgctcggtttacccaaagtggtaccatgaagatgcacattttacagaagcacacagaaaatgtggccaaatttcactgtccccactgtgacacagtcatagcccgaaaaagtgatttgggtgtccacttgcgaaagcagcattcctatattgagcaaggcaagaaatgccgttactgtgatgctgtgtttcatgagcgctatgccctcatccagcatcagaagtcacacaagaatgagaagcgctttaagtgtgaccagtgtgattacgcttgtagacaggagaggcacatgatcatgcacaagcgcacccacaccggggagaagccttacgcctgcagccactgcgataagaccttccgccagaagcagcttctcgacatgcacttcaagcgctatcacgaccccaacttcgtccctgcggcttttgtctgttctaagtgtgggaaaacatttacacgtcggaataccatggcaagacatgctgataattgcgctggcctacagcacatgccgggatcctctaacgtcag

SEQ ID NO: 318029 - DNA, 2642 bp, Homo sapiens
tgtgtctgagcctgtggagcgattaaaccgtgcgcggagctgcttctttggcggcagcggcggcggcggtggccggtgcggacgcgcggagctcgccggagacgccgggtggccggagccgtggagcggcggcggagcgggcgccgcggggggtgtggcgcggagaatgattacggacctgaagccaaagaacaagatgcgctagtggacagattgctgaccaggggcttgagagctgggttctattttccctcctcaaactgactttgcagccacggagaggcaggggaaatggaaggtgatgcagtcgaagccattgtggaggagtccgaaacttttattaaaggaaaggagagaaagacttaccagagacgccgggaagggggccaggaagaagatgcctgccacttaccccagaaccagacggatgggggtgaggtggtccaggatgtcaacagcagtgtacagatggtgatgatggaacagctggaccccacccttcttcagatgaagactgaagtaatggagggcacagtggctccagaagcagaggctgctgtggacgatacccagattataactttacaggttgtaaatatggaggaacagcccataaacataggagaacttcagcttgttcaagtacctgttcctgtgactgtacctgttgctaccacttcagtagaagaacttcagggggcttatgaaaatgaagtgtctaaagagggccttgcggaaagtgaacccatgatatgccacaccctacctttgcctgaagggtttcaggtggttaaagtgggggccaatggagaggtggagacactagaacaaggggaacttccaccccaggaagatcctagttggcaaaaagacccagactatcagccaccagccaaaaaaacaaagaaaaccaaaaagagcaaactgcgttatacagaggagggcaaagatgtagatgtgtctgtctacgattttgaggaagaacagcaggagggtctgctatcagaggttaatgcagagaaagtggttggtaatatgaagcctccaaagccaacaaaaattaaaaagaaaggtgtaaagaagacattccagtgtgagctttgcagttacacgtgtccacggcgttcaaatttggatcgtcacatgaaaagccacactgatgagagaccacacaagtgccatctctgtggcagggcattcagaacagtcaccctcctgaggaatcaccttaacacacacacaggtactcgtcctcacaagtgcccagactgcgacatggcctttgtgaccagtggagaattggttcggcatcgtcgttacaaacacacccacgagaagccattcaagtgttccatgtgcgattacgccagtgtagaagtcagcaaattaaaacgtcacattcgctctcatactggagagcgtccgtttcagtgcagtttgtgcagttatgccagcagggacacatacaagctgaaaaggcacatgagaacccattcaggggaaaagccttatgaatgttatatttgtcatgctcggtttacccaaagtggtaccatgaagatgcacattttacagaagcacacagaaaatgtggccaaatttcactgtccccactgtgacacagtcatagcccgaaaaagtgatttgggtgtccacttgcgaaagcagcattcctatattgagcaaggcaagaaatgccgttactgtgatgctgtgtttcatgagcgctatgccctcatccagcatcagaagtcacacaagaatgagaagcgctttaagtgtgaccagtgtgattacgcttgtagacaggtaggaaccttcattgaaagttgttggtgctttctcggtgtctggtgttatcagagggcatttacatatctagtacagtggctgtttttaaagatagtattttcaaactgtggattatgaggaatgtcaccaaaatcaaaggtcatgctccttgtcaattgtgtcatcccggtgtccagatgatgttttattcagtcacagcttacctcttccttaagcagacatctttctgaaaactgtggaaagtaagtccaggacttgagagaggggaagaatctcatgcggggacatgactgttgggagggagccaaagaaggagctcagcaggaataagcagctctatctgtgctacaattatggaagcagttgtgcaccacactaaaaatacctttatcaagccgggtgcagtggctcacacctgtaatcctagcactttgggaggccgagataggcaacagagagagaccccatctctacaaaaagaaaaaattagggccgggcgcggtggctcgagcgcctgtaatcccagcactttgggaggctgaggtgggcggatcacttgaggtcaggagcttgagagcagcctggccaacacggtgaaaccccgcctctactaaaaatacaaaaattagccgggcatggtgatagacgcctgtaatcccagctactctggaagctgaggcaggagaatcgcttgaacctggggcggaggttgcattgagccgcgattgcgccactgcgctccagcctgggtggcagagcgagactctgtctccaaaagaaaaagaaaaaattagctggggccaggcacggtgactcacacctgtaatccc

SEQ ID NO: 318030 - DNA, 3779 bp, Homo sapiens
tgtgtctgagcctgtggagcgattaaaccgtgcgcggagctgcttctttggcggcagcggcggcggcggtggccggtgcggacgcgcggagctcgccggagacgccgggtggccggagccgtggagcggcggcggagcgggcgccgcggggggtgtggcgcggagaatgattacggacctgaagccaaagaacaagatgcgctagtggacagattgctgaccaggggcttgagagctgggttctattttccctcctcaaactgactttgcagccacggagaggcaggggaaatggaaggtgatgcagtcgaagccattgtggaggagtccgaaacttttattaaaggaaaggagagaaagacttaccagagacgccgggaagggggccaggaagaagatgcctgccacttaccccagaaccagacggatgggggtgaggtggtccaggatgtcaacagcagtgtacagatggtgatgatggaacagctggaccccacccttcttcagatgaagactgaagtaatggagggcacagtggctccagaagcagaggctgctgtggacgatacccagattataactttacaggttgtaaatatggaggaacagcccataaacataggagaacttcagcttgttcaagtacctgttcctgtgactgtacctgttgctaccacttcagtagaagaacttcagggggcttatgaaaatgaagtgtctaaagagggccttgcggaaagtgaacccatgatatgccacaccctacctttgcctgaagggtttcaggtggttaaagtgggggccaatggagaggtggagacactagaacaaggggaacttccaccccaggaagatcctagttggcaaaaagacccagactatcagccaccagccaaaaaaacaaagaaaaccaaaaagagcaaactgcgttatacagaggagggcaaagatgtagatgtgtctgtctacgattttgaggaagaacagcaggagggtctgctatcagaggttaatgcagagaaagtggttggtaatatgaagcctccaaagccaacaaaaattaaaaagaaaggtgtaaagaagacattccagtgtgagctttgcagttacacgtgtccacggcgttcaaatttggatcgtcacatgaaaagccacactgatgagagaccacacaagtgccatctctgtggcagggcattcagaacagtcaccctcctgaggaatcaccttaacacacacacaggtactcgtcctcacaagtgcccagactgcgacatggcctttgtgaccagtggagaattggttcggcatcgtcgttacaaacacacccacgagaagccattcaagtgttccatgtgcgattacgccagtgtagaagtcagcaaattaaaacgtcacattcgctctcatactggagagcgtccgtttcagtgcagtttgtgcagttatgccagcagggacacatacaagctgaaaaggcacatgagaacccattcaggggaaaagccttatgaatgttatatttgtcatgctcggtttacccaaagtggtaccatgaagatgcacattttacagaagcacacagaaaatgtggccaaatttcactgtccccactgtgacacagtcatagcccgaaaaagtgatttgggtgtccacttgcgaaagcagcattcctatattgagcaaggcaagaaatgccgttactgtgatgctgtgtttcatgagcgctatgccctcatccagcatcagaagtcacacaagaatgagaagcgctttaagtgtgaccagtgtgattacgcttgtagacaggagaggcacatgatcatgcacaagcgcacccacaccggggagaagccttacgcctgcagccactgcgataagaccttccgccagaagcagcttctcgacatgcacttcaagcgctatcacgaccccaacttcgtccctgcggcttttgtctgttctaagtgtgggaaaacatttacacgtcggaataccatggcaagacatgctgataattgtgctggcccagatggcgtagagggggaaaatggaggagaaacgaagaagagtaaacgtggaagaaaaagaaagatgcgctctaagaaagaagattcctctgacagtgaaaatgctgaaccagatctggacgacaatgaggatgaggaggagcctgccgtagaaattgaacctgagccagagcctcagcctgtgaccccagccccaccacccgccaagaagcggagaggacgaccccctggcagaaccaaccagcccaaacagaaccagccaacagctatcattcaggttgaagaccagaatacaggtgcaattgagaacattatagttgaagtaaaaaaagagccagatgctgagcccgcagagggagaggaagaggaggcccagccagctgccacagatgcccccaacggagacctcacgcccgagatgatcctcagcatgatggaccggtgatggcggagccttgtgcgtcgccaggacttctctgggctgtgtttaaacggcccgcatcttaatttttctcccttctttctttttttggctttgggaaaagcatcattttaccaaacataccgagaacgaaaacttcaaggatgatgttagaaaaaaatgtgatttaactagaacttgctgtctgatgttagcaaatcatggaatgttctgagtccctgagggtttactgtgaagtgctgaggacagtgttgacaactaactcgttttcctagatggaaacggagacattgacccctccctccatgtggtaaaccactccagaatggccaccaggcttcccagagttctatggtcttcttcccaagagagtttttaattgtaaatgcatacttgggaaggacttagagttttaaactgttttttgcttttgcttttccctgactccctttgcttggagtcagctgcacaccagtagtatggcatgctacgatcaggttctgtcctgaaagctttgcctctttcttggcaaagtttctggtatggtcaagcttgtaaataactttttttacattttaatcttttccattaattaagaggttgaaaagaagtgcagtgtaagaaaacccagcattttaattacttgcaaattaagttaccacagactctgtagtgtgtaaatgttgacaaggaattggatcacaatcatgtagcagaatggcacccagaccactgcccaccagtgacggacatgcacgtggcagatcatgatttccagcccacggagccagcatttgaaccttgtataattaactttcagttatgatttcccatcgacattttctttgccctgtttgtagctgattgttgtgttttataaatcttctgttaaggcagaagggtgattatgagtggttcacagcagcccttataagctgggccagaaaatttcactaggtcagtaatttaaaccttggatcttcaaaaaataaaataatgtgaagcaaaaccaactaaaaagtgattcttgcacatgaactgtcacatgtttaaaaatgtgttttttagagagcctcagtcttactgatttcaaacacttttttcttctgtgtattgcttttaagagagccatcagttagctatcagactctaggttgatgcattttgtacttagctgtactgtgtgatatttttcattattttaggacgccaacatgagacctgtaataaaatatgtaatggggttgaaagctggggaggaggatctactgctgtacagctaataaatcataacggattaacaagtg

SEQ ID NO: 318031 - DNA, 2504 bp, Homo sapiens
tgtgtctgagcctgtggagcgattaaaccgtgcgcggagctgcttctttggcggcagcggcggcggcggtggccggtgcggacgcgcggagctcgccggagacgccgggtggccggagccgtggagcggcggcggagcgggcgccgcggggggtgtggcgcggagaatgattacggacctgaagccaaagaacaagatgcgctagtggacagattgctgaccaggggcttgagagctgggttctattttccctcctcaaactgactttgcagccacggagaggcaggggaaatggaaggtgatgcagtcgaagccattgtggaggagtccgaaacttttattaaaggaaaggagagaaagacttaccagagacgccgggaagggggccaggaagaagatgcctgccacttaccccagaaccagacggatgggggtgaggtggtccaggatgtcaacagcagtgtacagatggtgatgatggaacagctggaccccacccttcttcagatgaagactgaagtaatggagggcacagtggctccagaagcagaggctgctgtggacgatacccagattataactttacaggttgtaaatatggaggaacagcccataaacataggagaacttcagcttgttcaagtacctgttcctgtgactgtacctgttgctaccacttcagtagaagaacttcagggggcttatgaaaatgaagtgtctaaagagggccttgcggaaagtgaacccatgatatgccacaccctacctttgcctgaagggtttcaggtggttaaagtgggggccaatggagaggtggagacactagaacaaggggaacttccaccccaggaagatcctagttggcaaaaagacccagactatcagccaccagccaaaaaaacaaagaaaaccaaaaagagcaaactgcgttatacagaggagggcaaagatgtagatgtgtctgtctacgattttgaggaagaacagcaggagggtctgctatcagaggttaatgcagagaaagtggttggtaatatgaagcctccaaagccaacaaaaattaaaaagaaaggtgtaaagaagacattccagtgtgagctttgcagttacacgtgtccacggcgttcaaatttggatcgtcacatgaaaagccacactgatgagagaccacacaagtgccatctctgtggcagggcattcagaacagtcaccctcctgaggaatcaccttaacacacacacaggtactcgtcctcacaagtgcccagactgcgacatggcctttgtgaccagtggagaattggttcggcatcgtcgttacaaacacacccacgagaagccattcaagtgttccatgtgcgattacgccagtgtagaagtcagcaaattaaaacgtcacattcgctctcatactggagagcgtccgtttcagtgcagtttgtgcagttatgccagcagggacacatacaagctgaaaaggcacatgagaacccattcaggggaaaagccttatgaatgttatatttgtcatgctcggtttacccaaagtggtaccatgaagatgcacattttacagaagcacacagaaaatgtggccaaatttcactgtccccactgtgacacagtcatagcccgaaaaagtgatttgggtgtccacttgcgaaagcagcattcctatattgagcaaggcaagaaatgccgttactgtgatgctgtgtttcatgagcgctatgccctcatccagcatcagaagtcacacaagaatgagaagcgctttaagtgtgaccagtgtgattacgcttgtagacaggagaggcacatgatcatgcacaagcgcacccacaccggggagaagccttacgcctgcagccactgcgataagaccttccgccagaagcagcttctcgacatgcacttcaagcgctatcacgaccccaacttcgtccctgcggcttttgtctgttctaagtgtgggaaaacatttacacgtcggaataccatggcaagacatgctgataattgtgctggcccagatggcgtagagggggaaaatggaggagaaacgaagaagagtaaacgtggaagaaaaagaaagatgcgctctaagaaagaagattcctctgacagtgaaaatgctgaaccagatctggacgacaatgaggatgaggaggagcctgccgtagaaattgaacctgagccagagcctcagcctgtgaccccagccccaccacccgccaagaagcggagaggacgaccccctggcagaaccaaccagcccaaacagaaccagcgtaagttgttcatctctgctctggaggctggcgtcttctccgagcatgtgggggagccagatgggtccttgttctttggggatgtgggaactaagccatgagaacaagttaagggcatgtcgagaacaaactctcaggaaatggctttttaggagtttttactgaggaacatctgaggaagtctttagaggcctgttacatttcaagaagaagt

SEQ ID NO: 318032 - DNA, 717 bp, Homo sapiens
tgtgtctgagcctgtggagcgattaaaccgtgcgcggagctgcttctttggcggcagcggcggcggcggtggccggtgcggacgcgcggagctcgccggagacgccgggtggccggagccgtggagcggcggcggagcgggcgccgcggggggtgtggcgcggagaatgattacggacctgaagccaaagaacaagatgcgctagtggacagattgctgaccaggggcttgagagctgggttctattttccctcctcaaactgactttgcagccacggagaggcaggggaaatggaaggtgatgcagtcgaagccattgtggaggagtccgaaacttttattaaaggaaaggagagaaagacttaccagagacgccgggaagggggccaggaagaagatgcctgccacttaccccagaaccagacggatgggggtgaggtggtccaggatgtcaacagcagtgtacagatggtgatgatggaacagctggaccccacccttcttcagatgaagactgaagtaatggagggcacagtggctccagaagcagaggctgctgtggacgatacccagattataactttccgcaaggccctctttagacacttcattttcataagccccctgaagttcttctactgaagtggtagcaacaggtacagtcacaggtacaggtacttgaacagctgaagttctcctatgtttatgggcttcctc

SEQ ID NO: 318033 - DNA, 1935 bp, Homo sapiens
tggttagagttacattcatctgcatgcatcagaaagtctaattctaatagcttaagcaaaaatatattttttcacataaaaaatagagaaacaaatgattgttgatatcagttcagtggctcagtgacatcagggccaatgactgttattctcttagcctgtccttcctatgattattgtagctccagctgttaagaccatattcaagttgggaaaaaagagaaaatgagaagggtcagagctgtatgaactaatctgtctccttcattgggatagaaaaacaaacataaaaacccaacagaataagtttgccaacctgagtacaggaagacccgtaggagtagttaaattttaactttaaagaaaatttgtctcacctaagaaagaacgaaggtcggtaggctcaatgagacttaagtaaaactagcgccaccgaggtcttgcttcctcctctctccttgtcccttccccatgcagccatcgcgctcctcaaggaccaggagccgggggccttcatcatccgcgacagtcactccttccgaggcgcgtacgggctggccatgaaggtgtcttcgccacctccaaccatcatgcagcagaataaaaaaggagacatgacccatgagctggtcaggcattttctgatagagactggccccagaggagtcaagctcaagggctgccccaatgagccaaacttcggatcgctgtctgccctggtctaccagcactccatcatcccattggccctgccttgcaagctggtcattccaaaccgagaccccacagatgaatcgaaagatagctccggccctgccaactcaactgcagacctgctgaaacaaggggcagcctgcaatgtgctcttcatcaactctgtggacatggagtcactcactgggccacaggccatctctaaagccacatctgagacgttggctgcagaccccacgccagctgccaccatcgttcacttcaaagtctctgcccagggaatcactctgactgacaaccagagaaagctctttttcagacgccactaccctctcaacactgtcaccttctgtgacctggatccacaggaaagaaagtggatgaaaacagagggtggtgcccctgctaagctcttcggcttcgtggcccggaagcagggcagcaccacggacaacgcctgccacctctttgctgagcttgaccccaaccagccggcctctgccatcgtcaacttcgtctccaaggtcatgctgaatgccggccaaaagagatgaaccctgccccttgcccagggccagtgccatggggaaggggcttgtggggaggggacccatgaatcctgaccactcttgaacccagaaggaggactttgggccaatttcggaggagagaagaaagtgcaacgtggggagagggaagtgaattgcagaggggagggggaagagagagagagagagagagagagagagagagagagagagaaagatggaggagaagaacttggattcccctgggtagatggaaactgcaaaaacccaaagcctccaaaactaaccaggtccacctaacaccccctccctcccctaagaagatggatgtcctcaaaagagaaggaacaaacctccttgggaatccacattttttgggggaatggaaaagctctgtctccctaactcaactgctttgcaaggggaaatcaagctgggagaatctttttctggccacctgtagggtaggttgtcaaaccaaacagagccaccgtgggacatcaagtggaagaacttgtttgcttgaaagtatctcagacccaaggcacctcaggtctctttgctgtgcctccactatattgtcgtgtgggtgtgtgtctgcacccacatcctcacacattgatctagatctgcctttatccactcgaattataaacagctcggcttgtccttg

SEQ ID NO: 318034 - DNA, 844 bp, Homo sapiens
atgaggaggccgaaggtcccttccactgtgtccgcatggtgttcgaggacatcagcttttgatgtcagtttcctggggctgccataacaaaggaccatgtgcttagtggcttataaatgacagaaatatgttctctcacagttctggaggctagaagtccaaaatcaaggtgttggcaaggttggctccttcctgatgttctaggggagaatctgtcccaggcctctctcccagtttcttgtggctgccagcatccttggtgtcccttggcatgtagacgcatcaccccagtctctgcctgcaccttccatggtgctctcccctgtgtgtatctctgtctcctctccttgtaaggacaccaggcatacaggcatactggattaaggctcaccctaatcctgtgtgacctcatcttaatttgtctacatctgcaaagaccctatttccaaataaggtcaaattcacaagcactgggggccaggactttgatgtatgttttgggtgaacacaatttaacccataacactttcttcccttctcctgctttagacaacagcccggagacgcgggctaaagtgaagtttgtccaggacacttctaagtattggtacaagcctgagatctccagggagcagggtgagtgctgggctctgtggtgcatcagaggccatagctggctgaggcctgctgtgtcttccctgggcaaggaacagaggcaaattcagtcctctttgtagcagggggtcatcacagagggggctggggttgaagctggacagtaggaagcacttcctgcagtgaagtgtgggaacacagaagcagtagttgtagacacctcttggaa

SEQ ID NO: 318035 - DNA, 377 bp, Homo sapiens
cctcatccgcttcttcgtcaatatcttctaatccttcctcctcttcatcatcatcatcatttcttcccttctcctgctttagacaacagcccggagacgcgggctaaagtgaagtttgtccaggacacttctaagtattggtacaagcctgagatctccagggagcagggtgagtgctgggctctgtggtgcatcagaggccatagctggctgaggcctgctgtgtcttccctgggcaaggaacagaggcaaattcagtcctctttgtagcagggggtcatcacagagggggctggggttgaagctggacagtaggaagcacttcctgcagtgaagtgtgggaacacagaagcagtagttgtagacacctcttggaa

SEQ ID NO: 318036 - DNA, 10259 bp, Homo sapiens
  misc_feature (3737)..(3737): n is a, c, g, or t
  misc_feature (3848)..(3848): n is a, c, g, or t
ctgctccttgcaccccgctccctgcctggacacaggctcactcgctgccttcttctgggggaaaccagcttcttgccagccacagctgctgcctccgccactggccaccgcccctgtcctgggagtcccttggcccagacacccacctgacttagtggctcctctgcaggaaaggtggctgccccctgcgttcctccatccaaccatgagctggtgcccatcaccactgagaatgcaccaaagaatgtagtggacaagggagaaggaggctcccggggtggaaacacacggaaaagcctcgaggacaacggctccaccagggtcaccccgagtgtccagccccacctccagcccatcagaaacatgagtgtgagccggaccatggaggacagctgtgagctggacctggtgtacgtcacagagaggatcatcgctgtctccttccccagcacagccaatgaggagaacttccggagcaacctccgtgaggtggcgcagatgctcaagtccaaacatggaggcaactacctgctttcaacctctctgagcggagacctgacatcacgaagctccatgccaaggtactggaatttggctggcccgacctccacaccccagccctggagaagatctgcagcatctgtaaggccatggacacatggctcaatgcagaccctcacaatgtcgttgttctacacaacaagggaaaccgaggcaggataggagttgtcatcgcggcttacatgcactacagcaacatttctgccagtgcggaccaggctctggaccggtttgcaatgaagcggttctatgaggataagattgtgcccattggccagccatcccaaagaaggtacgtgcattacttcagtggcctgctctccggctccatcaaaatgaacaacaagcccttgtttctgcaccacgtgatcatgcacggcatccccaactttgagtctaaaggaggatgtcggccatttctccgcatctaccaggccatgcaacctgtgtacacatctggcatctacaacatcccaggagacagccagactagcgtctgcatcaccatcgagccaggactgctcttgaagggagacatcttgctgaagtgctaccacaagaagttccgaagcccagcccgagacgtcatcttccgtgtgcagttccacacctgtgccatccatgacctgggggttgtctttgggaaggaggaccttgatgatgctttcaaagatgatcgatttccagagtatggcaaagtggagtttgtattttcttatgggccagagaaaattcaaggcatggagcacctggagaacgggccgagcgtgtctgtggactataacacctctgaccccctcatccgctgggactcctacgacaacttcagtgggcatcgagatgacggcatggaggaggtggtgggacacacgcaggggccactagatgggagcctgtatgctaaggtgaagaagaaagactccctgcacggcagcaccggggctgttaatgccacacgtcctacactgtcggccacccccaaccacgtggaacacacgctttctgtgagcagcgactcgggcaactccacagcctccaccaagaccgacaagaccgacgagcctgtccccggggcctccagtgccactgctgccttgagtccccaggagaagcgggagctggaccgcctgctgagtggctttggcttagagcgagagaagcaaggcgccatgtaccacacccagcacctcaggtcccgcccagcagggggctcggctgtgccctcctctggacgccacgttgtcccagcccaggttcatgtcaatggtggggcgttagcatctgagcgggagacagacatcctggacgatgaattgccaaaccaggatggtcacagtgcgggcagcatgggcacactctcttctctggacggggtcaccaacaccagtgaggggggctacccagaggccctgtccccactgaccaacggtctggacaagtcctaccccatggagcctatggtcaatggaggaggctacccctacgagtctgccagccgggcggggcctgcccatgctggccacacggcccccatgcggccctcctactctgcacaggagggtttagctggctaccagagggaggggccccacccagcctggccacagccagtgaccacctcccactatgcccatgaccccagcggtatgttccgctctcaatccttttcggaagctgaaccccagctgcccccagctccggtccgagggggaagcagccgggaggctgtgcaaaggggactgaattcgtggcagcagcagcagcagcagcagcagcagcctcgcccacctccacgccagcaggaaagagcccacttggagagtcttgtagccagcaggcccagccctcagccattggcagagacccccatccccagtctccctgagttcccgcgagcagcctcccagcaggagattgaacagtccatcgaaacactcaatatgctgatgctggacctggagccagcctccgctgctgccccactacacaagtcccagagtgtccccggggcctggccaggggcttctccactctcctcccagcccctctctggatcctcccgtcagtcccatccactgacccagtccagatctggctatatccccagtgggcattcgttgggaacccctgagccagccccacgggcctctctggagtctgtccctcctggcaggtcttactcaccttatgactatcagccatgtttggctgggcctaaccaggatttccattcaaagagcccagcctcttcctccttgcctgccttccttccgaccacccacagccctccagggcctcagcaacccccagcctctctccctggcctcactgctcagcctctgctctcaccaaaggaagcgacttcagacccctcccggactccagaggaggagccattgaatttagaagggctggtggcccacagggtagcaggggtacaggctcgggagaagcagcctgcagagcccccagcccctctgcggaggcgggcggccagtgatggacagtatgagaaccagtctccagaagccacatcccctcgtagccctggggttcgctcccctgtccagtgtgtctccccggagctggctcttaccatcgctctcaatcctggagggcggcccaaagagccccatttgcacagctacaaggaggccttcgaggagatggagggaacctccccgagcagcccaccacccagtggggtgcggtcccccccgggtctggccaagacacccctgtctgctctgggcctgaaacctcacaacccagcggacatcctgttgcaccccacaggagttaccagaagacggatccagccagaggaagatgaggggaaggtggtggtcaggctgtcagaagagccccggagctatgtggagtctgtggcacggacagcggtggctggaccccgagctcaggactctgagcccaagagctttagtgctccagccacccaggcctatggccatgagatacccctgaggaacgggaccctgggtggctcctttgtctcccccagccccctctccaccagcagccccatcctcagtgctgacagcacttcagtggggagtttcccgtcgggagagagcagtgaccagggtccccggacgcccacccagcctctgttggagtctggcttccgctcaggcagcctgggacagcccagcccntctgcccagagaaactaccagagctcttctcctctcccgactgtgggcagtagctacagcagccccgactactcacttcagcatttcagctcctctccggaaagccaggcncgagctcagttcagtgtggctggcgtccacacggtgcctgggagccctcaggcgcgccacagaacagtgggcaccaacactccccctagtcctggcttcggccggcgggccatcaatcccagcatggctgcccccagcagtcccagtttgagccatcaccagatgatgggtccaccaggcactggcttccatggtagcactgtctccagcccccagagcagtgcagcgaccaccccggggagccccagcctgtgtcggcacccagcaggggtctaccaggtttctggcctccacaacaaagtggccaccaccccggggagtcccagcctgggccggcaccctggggctcaccaaggcaacctggcctccggtcttcatagcaatgcaatagccagccctggaagccccagcctgggccgtcacctcggagggtctggatctgtggttcccggcagcccctgcttggaccggcatgtggcctatggtggctattctaccccggaggatcggagacccacactgtcccggcagagcagtgcctctggctaccaggctccttccacgccctccttccctgtctcccctgcctactaccctggcctgagcagccctgccacctccccgtcaccagactccgcagccttccggcaagggagcccaacaccagccttgccagagaagcgaaggatgtcagtgggagaccgggcaggcagcctccccaactatgccaccatcaatgggaaggtgtcttcgcctgtcgccagcggcatgtccagtcccagtgggggcagcaccgtctccttctcccacactctgcccgacttctccaagtactccatgccagacaacagcccggagacgcgggctaaagtgaagtttgtccaggacacttctaagtattggtacaagcctgagatctccagggagcaggccatcgcgctcctcaaggaccaggagccgggggccttcatcatccgcgacagtcactccttccgaggcgcgtacgggctggccatgaaggtgtcttcgccacctccaaccatcatgcagcagaataaaaaaggagacatgacccatgagctggtcaggcattttctgatagagactggccccagaggagtcaagctcaagggctgccccaatgagccaaacttcggatcgctgtctgccctggtctaccagcactccatcatcccattggccctgccttgcaagctggtcattccaaaccgagaccccacagatgaatcgaaagatagctccggccctgccaactcaactgcagacctgctgaaacaaggggcagcctgcaatgtgctcttcatcaactctgtggacatggagtcactcactgggccacaggccatctctaaagccacatctgagacgttggctgcagaccccacgccagctgccaccatcgttcacttcaaagtctctgcccagggaatcactctgactgacaaccagagaaagctctttttcagacgccactaccctctcaacactgtcaccttctgtgacctggatccacaggaaagaaagtggatgaaaacagagggtggtgcccctgctaagctcttcggcttcgtggcccggaagcagggcagcaccacggacaacgcctgccacctctttgctgagcttgaccccaaccagccggcctctgccatcgtcaacttcgtctccaaggtcatgctgaatgccggccaaaagagatgaaccctgccccttgcccagggccagtgccatggggaaggggcttgtggggaggggacccatgaatcctgaccactcttgaacccagaaggaggactttgggccaatttcggaggagagaagaaagtgcaacgtggggagagggaagtgaattgcagaggggagggggaagagagagagagagagagagagagagagagagagagagagaaagatggaggagaagaacttggattcccctgggtagatggaaactgcaaaaacccaaagcctccaaaactaaccaggtccacctaacaccccctccctcccctaagaagatggatgtcctcaaaagagaaggaacaaacctccttgggaatccacattttttgggggaatggaaaagctctgtctccctaactcaactgctttgcaaggggaaatcaagctgggagaatctttttctggccacctgtagggtaggttgtcaaaccaaacagagccaccgtgggacatcaagtggaagaacttgtttgcttgaaagtatctcagacccaaggcacctcaggtctctttgctgtgcctccactatattgtcgtgtgggtgtgtgtctgcacccacatcctcacacattgatctagatctgcctttatccactcgaattataaacagctcggcttgtccttgtcccatgtgtttgtagacacacatgcatactgtccaaagattagggttggtggtggcagtgcagcaggggagggacaaacaaccaagctatgggtgacagaggctctctcctggtgcctgcacctgcactctagtgaccctgggtgccgccagacccttctcttctacaaagaccccagcaggagtgggagggtctgcaatggcatcgccctgtcctgccttggccagaagcctggagctttggtttgaggaggtagagatatgtgtatccataggaagagatctgtcagaacaggcagctgttgagctcggggtgtcttccccaaggcatgtggctcagcagcaagaaaggcaagttgctcctgctggggccctggactctgccttagctcccacctctcagccttgttattgggtttcatgcccctggaccagccttatctcagacctgcttacctgcatgatgcctttttgggggctggggattgagtcttgctgctctgcccagccctgttctattctgcagggtccctgtgttggaattctccctggggaacctactttctgctcagtgaggctccggccagaaacctggagtccttatcctcccctctgtaagtgttttagggtctggcttttgcaggcaccctctgacctcagcagagctcctgggcctgctgcctgcacaccacatcgcctacctacaatgccaaagcctcactgtcaccctttctgccttggtttccctagctgagccacgctgcccatgcagcagagggcagaaggcttgcacttgggccaaagggcctaaggtccactggacagttgggaaaacacctgaccaccatttaaggactctaagccagaatggaaaattcaccaggactccattcttaagcctatgcgagtcccctagagagaggcattgtactgatatataaatattatataatatatacatgagacatactgacagaatctgtaagctaataaaatgtaagaaaaggttaaaaaaagaataggtaaattgacaagaagtatttattgtttttccatattgctttattgccttccttggggataaaccaattcctatccttttttatatgtgtaagtaaagcctgaagtgtagggggcctttgttcttgaagcagccagggtctccttgccctggccttggccttccctagactgtgtggggctcagcattgggaggggttgcacatgtcccagcctttggcccccttacttttcagcaagccaggggcccagcagtcagctcccaggatgtgtggggagctgtccctgactctgcaggcctgagcgagtgtgtgagcatgcggggacatgggtgtgtatggcacacataggtgcgtgtgtgtcttttgtattttttctcctccaaggagctgtgtcagtgtggacgttctgtttcagggagttggaaaggagggtgtctgcagaaggtggagagcaggggcagaggccccactggccaccccctgcttcccagagtgaaaccttgtgcctggtgaccaaagtccctccaaagtgctcttccttctgggttattcaagccaaatatctgggtttccccctctcctcattccctagcaaaccccaattatcttccaagataggagatatttcccatccccttcctttgtaaatatctcatctcccactggagagcccaggagcctattcctggcatggatgttctgtccacacttgaggctgggcggtgtatcagacccttcaagcagcctggctggggcccaggactgagtctggggtcagctttcacggtcgcttttcccttcctcaccacccaccacagcccaccttgcatgcatggccagcccctccactccagcctgagccatgtgtgcccctgcgggaggacccattcatgccagaaagctggtaactccctcccagcatccctgcggaaggagtcagtttctgagagtgtgacttttcaaggcgaatgatggggaagggttccccagtccccacagtggccccacctctgggccctgcaccagagcccttctgtgtcacggcgggctgtgcacccatgcacacacctacgcacacacaacactccgcactgcagtatattcttgccaaagatttcctttaaaagcaagcacttttactaattattattttgtaaatgtttatcttcttctgtcttctccctccctgaatctattttactgttgtttattgttgaatctgtgtgtcagccaggagagcgctgtctggccttgaacatgggctgggatgggaaagggtctgggagaagatgggcaacaaagagccagggagtcatggacatcgcagcgacgcagaccccagcaggttcagtcccgtgctgccaccagctgtccagctgggtgtctggagggaagagggcagaggagggtcatgtcccttcagctgggggaggggcccagtgagctccacgtggctttttcccaaagggagcaagagggaaggattgggcgagaaaacaatggagaggggacctgcgaaggaaaacagggaggaagtgagcggtttgatcagcctgctatcacggtgttctggctctcttatttagccaggcgcttaagggacagatacatcacatcctaagtttgggaaaggcctttgacccatgtcatctgagcgtctcctccagtagctctgaaagctgtggacaccaatggccaggattccttctcccctggtttttgaggatccctgggtcttctgagactggccaggagagggatggtggggccagtggttgtgtgaaagcaggaggggcagccctcctggacaagtgtgatccccctataaacggctctcaggaggttagtgagtaggagattctgccttgttctgatgagcctgtgcaggggctccaggggagcatgctgtccagggggcacagaagggtggtgagtgtgatcaaatctagtctcactcccactttttagtctcactcctacttttgtccaccacccctgcctcctggatcttctcccactttttttttcagctttaggacctggggagatcctgtgagtcaaggcagacacccaatcctgcccccacactcggggtcctccaagaggttggggggcagagtcccagagcagccctttaccccaggtccaggccctggaatcctgagactcgcgtttccttggccagtggtaacacaggacgtgtgtgcgcatgtgcaagtgtggatgtatgtgtgtgcgtgtgttttgctcatttctttagggaacttgggagtcggggttggaggtgctgggcaatggaacttcaaattcaatgtcgcccagcagtgaggggagtcgggaggtgaggcctgtaggccaaccaattggtggagtctcagcgatagcccaggtgagaagtggttcacccagaggggcagggtgggggcctcgggcagatctgtccctcttggcccctctgtcctcaaatgtccaaaatgttggaggacctctgttcatatcccacgcctgggctcttgccagcagtggagttactgtagagggatgtcccaagcttgttttccaatcagtgttaagctgtttgaaactctcctgtgtctgtgttttgtttgtgcgtgtgtgtgagagcacatcagtgtgtgcaggctgtgtttccccatttctctcctcccttcagacccatcattgagaacaaatgtaagaaatcccttcccaccaccctccctgcctcccaggccctctgcgggggaaacaagatcacccagcatccttccccaccccagctgtgtatttatatagatggaaatatactttatattttgtatcatcgtgcctatagccgctgccaccgtgtataaatcctggtgtatgctccttatcctggacatgaatgtattgtacactgacgcgtccccactcctgtacagctgctttgtttctttgcaatgcattgtatggctttataaatgataaagttaagaaaaaactcagaaacgaaatcta

SEQ ID NO: 318037 - DNA, 9826 bp, Homo sapiens
  misc_feature (3737)..(3737): n is a, c, g, or t
  misc_feature (3848)..(3848): n is a, c, g, or t
ctgctccttgcaccccgctccctgcctggacacaggctcactcgctgccttcttctgggggaaaccagcttcttgccagccacagctgctgcctccgccactggccaccgcccctgtcctgggagtcccttggcccagacacccacctgacttagtggctcctctgcaggaaaggtggctgccccctgcgttcctccatccaaccatgagctggtgcccatcaccactgagaatgcaccaaagaatgtagtggacaagggagaaggaggctcccggggtggaaacacacggaaaagcctcgaggacaacggctccaccagggtcaccccgagtgtccagccccacctccagcccatcagaaacatgagtgtgagccggaccatggaggacagctgtgagctggacctggtgtacgtcacagagaggatcatcgctgtctccttccccagcacagccaatgaggagaacttccggagcaacctccgtgaggtggcgcagatgctcaagtccaaacatggaggcaactacctgctttcaacctctctgagcggagacctgacatcacgaagctccatgccaaggtactggaatttggctggcccgacctccacaccccagccctggagaagatctgcagcatctgtaaggccatggacacatggctcaatgcagaccctcacaatgtcgttgttctacacaacaagggaaaccgaggcaggataggagttgtcatcgcggcttacatgcactacagcaacatttctgccagtgcggaccaggctctggaccggtttgcaatgaagcggttctatgaggataagattgtgcccattggccagccatcccaaagaaggtacgtgcattacttcagtggcctgctctccggctccatcaaaatgaacaacaagcccttgtttctgcaccacgtgatcatgcacggcatccccaactttgagtctaaaggaggatgtcggccatttctccgcatctaccaggccatgcaacctgtgtacacatctggcatctacaacatcccaggagacagccagactagcgtctgcatcaccatcgagccaggactgctcttgaagggagacatcttgctgaagtgctaccacaagaagttccgaagcccagcccgagacgtcatcttccgtgtgcagttccacacctgtgccatccatgacctgggggttgtctttgggaaggaggaccttgatgatgctttcaaagatgatcgatttccagagtatggcaaagtggagtttgtattttcttatgggccagagaaaattcaaggcatggagcacctggagaacgggccgagcgtgtctgtggactataacacctctgaccccctcatccgctgggactcctacgacaacttcagtgggcatcgagatgacggcatggaggaggtggtgggacacacgcaggggccactagatgggagcctgtatgctaaggtgaagaagaaagactccctgcacggcagcaccggggctgttaatgccacacgtcctacactgtcggccacccccaaccacgtggaacacacgctttctgtgagcagcgactcgggcaactccacagcctccaccaagaccgacaagaccgacgagcctgtccccggggcctccagtgccactgctgccttgagtccccaggagaagcgggagctggaccgcctgctgagtggctttggcttagagcgagagaagcaaggcgccatgtaccacacccagcacctcaggtcccgcccagcagggggctcggctgtgccctcctctggacgccacgttgtcccagcccaggttcatgtcaatggtggggcgttagcatctgagcgggagacagacatcctggacgatgaattgccaaaccaggatggtcacagtgcgggcagcatgggcacactctcttctctggacggggtcaccaacaccagtgaggggggctacccagaggccctgtccccactgaccaacggtctggacaagtcctaccccatggagcctatggtcaatggaggaggctacccctacgagtctgccagccgggcggggcctgcccatgctggccacacggcccccatgcggccctcctactctgcacaggagggtttagctggctaccagagggaggggccccacccagcctggccacagccagtgaccacctcccactatgcccatgaccccagcggtatgttccgctctcaatccttttcggaagctgaaccccagctgcccccagctccggtccgagggggaagcagccgggaggctgtgcaaaggggactgaattcgtggcagcagcagcagcagcagcagcagcagcctcgcccacctccacgccagcaggaaagagcccacttggagagtcttgtagccagcaggcccagccctcagccattggcagagacccccatccccagtctccctgagttcccgcgagcagcctcccagcaggagattgaacagtccatcgaaacactcaatatgctgatgctggacctggagccagcctccgctgctgccccactacacaagtcccagagtgtccccggggcctggccaggggcttctccactctcctcccagcccctctctggatcctcccgtcagtcccatccactgacccagtccagatctggctatatccccagtgggcattcgttgggaacccctgagccagccccacgggcctctctggagtctgtccctcctggcaggtcttactcaccttatgactatcagccatgtttggctgggcctaaccaggatttccattcaaagagcccagcctcttcctccttgcctgccttccttccgaccacccacagccctccagggcctcagcaacccccagcctctctccctggcctcactgctcagcctctgctctcaccaaaggaagcgacttcagacccctcccggactccagaggaggagccattgaatttagaagggctggtggcccacagggtagcaggggtacaggctcgggagaagcagcctgcagagcccccagcccctctgcggaggcgggcggccagtgatggacagtatgagaaccagtctccagaagccacatcccctcgtagccctggggttcgctcccctgtccagtgtgtctccccggagctggctcttaccatcgctctcaatcctggagggcggcccaaagagccccatttgcacagctacaaggaggccttcgaggagatggagggaacctccccgagcagcccaccacccagtggggtgcggtcccccccgggtctggccaagacacccctgtctgctctgggcctgaaacctcacaacccagcggacatcctgttgcaccccacaggagttaccagaagacggatccagccagaggaagatgaggggaaggtggtggtcaggctgtcagaagagccccggagctatgtggagtctgtggcacggacagcggtggctggaccccgagctcaggactctgagcccaagagctttagtgctccagccacccaggcctatggccatgagatacccctgaggaacgggaccctgggtggctcctttgtctcccccagccccctctccaccagcagccccatcctcagtgctgacagcacttcagtggggagtttcccgtcgggagagagcagtgaccagggtccccggacgcccacccagcctctgttggagtctggcttccgctcaggcagcctgggacagcccagcccntctgcccagagaaactaccagagctcttctcctctcccgactgtgggcagtagctacagcagccccgactactcacttcagcatttcagctcctctccggaaagccaggcncgagctcagttcagtgtggctggcgtccacacggtgcctgggagccctcaggcgcgccacagaacagtgggcaccaacactccccctagtcctggcttcggccggcgggccatcaatcccagcatggctgcccccagcagtcccagtttgagccatcaccagatgatgggtccaccaggcactggcttccatggtagcactgtctccagcccccagagcagtgcagcgaccaccccggggagccccagcctgtgtcggcacccagcaggggtctaccaggtttctggcctccacaacaaagtggccaccaccccggggagtcccagcctgggccggcaccctggggctcaccaaggcaacctggcctccggtcttcatagcaatgcaatagccagccctggaagccccagcctgggccgtcacctcggagggtctggatctgtggttcccggcagcccctgcttggaccggcatgtggcctatggtggctattctaccccggaggatcggagacccacactgtcccggcagagcagtgcctctggctaccaggctccttccacgccctccttccctgtctcccctgcctactaccctggcctgagcagccctgccacctccccgtcaccagactccgcagccttccggcaagggagcccaacaccagccttgccagagaagcgaaggatgtcagtgggagaccgggcaggcagcctccccaactatgccaccatcaatgggaaggtgtcttcgcctgtcgccagcggcatgtccagtcccagtgggggcagcaccgtctccttctcccacactctgcccgacttctccaagtactccatgccagacaacagcccggagacgcgggctaaagtgaagtttgtccaggacacttctaagtattggtacaagcctgagatctccagggagcaggccatcgcgctcctcaaggaccaggagccgggggccttcatcatccgcgacagtcactccttccgaggcgcgtacgggctggccatgaaggtgtcttcgccacctccaaccatcatgcagcagaataaaaaaggagacatgacccatgagctggtcaggcattttctgatagagactggccccagaggagtcaagctcaagggctgccccaatgagccaaacttcggatcgctgtctgccctggtctaccagcactccatcatcccattggccctgccttgcaagctggtcattccaaaccgagaccccacagatgaatcgaaagatagctccggccctgccaactcaactgcagacctgctgaaacaaggggcagcctgcaatgtgctcttcatcaactctgtggacatggagtcactcactgggccacaggccatctctaaagccacatctgagacgttggctgcagaccccacgccagctgccaccatcgttcacttcaaagtctctgcccagggaatcactctgactgacaaccagagaaagctctttttcagacgccactaccctctcaacactgtcaccttctgtgacctggatccacaggaaagaaagtggatgaaaacagagggtggtgcccctgctaagctcttcggcttcgtggcccggaagcagggcagcaccacggacaacgcctgccacctctttgctgagcttgaccccaaccagccggcctctgccatcgtcaacttcgtctccaaggtcatgctgaatgccggccaaaagagatgaaccctgccccttgcccagggccagtgccatggggaaggggcttgtggggaggggacccatgaatcctgaccactcttgaacccagaaggaggactttgggccaatttcggaggagagaagaaagtgcaacgtggggagagggaagtgaattgcagaggggagggggaagagagagagagagagagagagagagagagagagagagagaaagatggaggagaagaacttggattcccctgggtagatggaaactgcaaaaacccaaagcctccaaaactaaccaggtccacctaacaccccctccctcccctaagaagatggatgtcctcaaaagagaaggaacaaacctccttgggaatccacattttttgggggaatggaaaagctctgtctccctaactcaactgctttgcaaggggaaatcaagctgggagaatctttttctggccacctgtagggtaggttgtcaaaccaaacagagccaccgtgggacatcaagtggaagaacttgtttgcttgaaagtatctcagacccaaggcacctcaggtctctttgctgtgcctccactatattgtcgtgtgggtgtgtgtctgcacccacatcctcacacattgatctagatctgcctttatccactcgaattataaacagctcggcttgtccttgtcccatgtgtttgtagacacacatgcatactgtccaaagattagggttggtggtggcagtgcagcaggggagggacaaacaaccaagctatgggtgacagaggctctctcctggtgcctgcacctgcactctagtgaccctgggtgccgccagacccttctcttctacaaagaccccagcaggagtgggagggtctgcaatggcatcgccctgtcctgccttggccagaagcctggagctttggtttgaggaggtagagatatgtgtatccataggaagagatctgtcagaacaggcagctgttgagctcggggtgtcttccccacgctgcccatgcagcagagggcagaaggcttgcacttgggccaaagggcctaaggtccactggacagttgggaaaacacctgaccaccatttaaggactctaagccagaatggaaaattcaccaggactccattcttaagcctatgcgagtcccctagagagaggcattgtactgatatataaatattatataatatatacatgagacatactgacagaatctgtaagctaataaaatgtaagaaaaggttaaaaaaagaataggtaaattgacaagaagtatttattgtttttccatattgctttattgccttccttggggataaaccaattcctatccttttttatatgtgtaagtaaagcctgaagtgtagggggcctttgttcttgaagcagccagggtctccttgccctggccttggccttccctagactgtgtggggctcagcattgggaggggttgcacatgtcccagcctttggcccccttacttttcagcaagccaggggcccagcagtcagctcccaggatgtgtggggagctgtccctgactctgcaggcctgagcgagtgtgtgagcatgcggggacatgggtgtgtatggcacacataggtgcgtgtgtgtcttttgtattttttctcctccaaggagctgtgtcagtgtggacgttctgtttcagggagttggaaaggagggtgtctgcagaaggtggagagcaggggcagaggccccactggccaccccctgcttcccagagtgaaaccttgtgcctggtgaccaaagtccctccaaagtgctcttccttctgggttattcaagccaaatatctgggtttccccctctcctcattccctagcaaaccccaattatcttccaagataggagatatttcccatccccttcctttgtaaatatctcatctcccactggagagcccaggagcctattcctggcatggatgttctgtccacacttgaggctgggcggtgtatcagacccttcaagcagcctggctggggcccaggactgagtctggggtcagctttcacggtcgcttttcccttcctcaccacccaccacagcccaccttgcatgcatggccagcccctccactccagcctgagccatgtgtgcccctgcgggaggacccattcatgccagaaagctggtaactccctcccagcatccctgcggaaggagtcagtttctgagagtgtgacttttcaaggcgaatgatggggaagggttccccagtccccacagtggccccacctctgggccctgcaccagagcccttctgtgtcacggcgggctgtgcacccatgcacacacctacgcacacacaacactccgcactgcagtatattcttgccaaagatttcctttaaaagcaagcacttttactaattattattttgtaaatgtttatcttcttctgtcttctccctccctgaatctattttactgttgtttattgttgaatctgtgtgtcagccaggagagcgctgtctggccttgaacatgggctgggatgggaaagggtctgggagaagatgggcaacaaagagccagggagtcatggacatcgcagcgacgcagaccccagcaggttcagtcccgtgctgccaccagctgtccagctgggtgtctggagggaagagggcagaggagggtcatgtcccttcagctgggggaggggcccagtgagctccacgtggctttttcccaaagggagcaagagggaaggattgggcgagaaaacaatggagaggggacctgcgaaggaaaacagggaggaagtgagcggtttgatcagcctgctatcacggtgttctggctctcttatttagccaggcgcttaagggacagatacatcacatcctaagtttgggaaaggcctttgacccatgtcatctgagcgtctcctccagtagctctgaaagctgtggacaccaatggccaggattccttctcccctggtttttgaggatccctgggtcttctgagactggccaggagagggatggtggggccagtggttgtgtgaaagcaggaggggcagccctcctggacaagtgtgatccccctataaacggctctcaggaggttagtgagtaggagattctgccttgttctgatgagcctgtgcaggggctccaggggagcatgctgtccagggggcacagaagggtggtgagtgtgatcaaatctagtctcactcccactttttagtctcactcctacttttgtccaccacccctgcctcctggatcttctcccactttttttttcagctttaggacctggggagatcctgtgagtcaaggcagacacccaatcctgcccccacactcggggtcctccaagaggttggggggcagagtcccagagcagccctttaccccaggtccaggccctggaatcctgagactcgcgtttccttggccagtggtaacacaggacgtgtgtgcgcatgtgcaagtgtggatgtatgtgtgtgcgtgtgttttgctcatttctttagggaacttgggagtcggggttggaggtgctgggcaatggaacttcaaattcaatgtcgcccagcagtgaggggagtcgggaggtgaggcctgtaggccaaccaattggtggagtctcagcgatagcccaggtgagaagtggttcacccagaggggcagggtgggggcctcgggcagatctgtccctcttggcccctctgtcctcaaatgtccaaaatgttggaggacctctgttcatatcccacgcctgggctcttgccagcagtggagttactgtagagggatgtcccaagcttgttttccaatcagtgttaagctgtttgaaactctcctgtgtctgtgttttgtttgtgcgtgtgtgtgagagcacatcagtgtgtgcaggctgtgtttccccatttctctcctcccttcagacccatcattgagaacaaatgtaagaaatcccttcccaccaccctccctgcctcccaggccctctgcgggggaaacaagatcacccagcatccttccccaccccagctgtgtatttatatagatggaaatatactttatattttgtatcatcgtgcctatagccgctgccaccgtgtataaatcctggtgtatgctccttatcctggacatgaatgtattgtacactgacgcgtccccactcctgtacagctgctttgtttctttgcaatgcattgtatggctttataaatgataaagttaagaaaaaactcagaaacgaaatcta

SEQ ID NO: 318038 - DNA, 10123 bp, Homo sapiens
  misc_feature (3601)..(3601): n is a, c, g, or t
  misc_feature (3712)..(3712): n is a, c, g, or t
ggagccacccagtagtgtctgagtggtgatccactcttgcctgcaatgaggaccaaggcaaaaagagttggctgaatctgcagcaggaaggatgagggttagataccaggaggaacttcctgacagtgagaaaagtaagacactctgtctgggaggctgtcgaatttcctttcatggtgccctttcagcaaaggaaggattgtgttttggagggctccaccagggtcaccccgagtgtccagccccacctccagcccatcagaaacatgagtgtgagccggaccatggaggacagctgtgagctggacctggtgtacgtcacagagaggatcatcgctgtctccttccccagcacagccaatgaggagaacttccggagcaacctccgtgaggtggcgcagatgctcaagtccaaacatggaggcaactacctgctttcaacctctctgagcggagacctgacatcacgaagctccatgccaaggtactggaatttggctggcccgacctccacaccccagccctggagaagatctgcagcatctgtaaggccatggacacatggctcaatgcagaccctcacaatgtcgttgttctacacaacaagggaaaccgaggcaggataggagttgtcatcgcggcttacatgcactacagcaacatttctgccagtgcggaccaggctctggaccggtttgcaatgaagcggttctatgaggataagattgtgcccattggccagccatcccaaagaaggtacgtgcattacttcagtggcctgctctccggctccatcaaaatgaacaacaagcccttgtttctgcaccacgtgatcatgcacggcatccccaactttgagtctaaaggaggatgtcggccatttctccgcatctaccaggccatgcaacctgtgtacacatctggcatctacaacatcccaggagacagccagactagcgtctgcatcaccatcgagccaggactgctcttgaagggagacatcttgctgaagtgctaccacaagaagttccgaagcccagcccgagacgtcatcttccgtgtgcagttccacacctgtgccatccatgacctgggggttgtctttgggaaggaggaccttgatgatgctttcaaagatgatcgatttccagagtatggcaaagtggagtttgtattttcttatgggccagagaaaattcaaggcatggagcacctggagaacgggccgagcgtgtctgtggactataacacctctgaccccctcatccgctgggactcctacgacaacttcagtgggcatcgagatgacggcatggaggaggtggtgggacacacgcaggggccactagatgggagcctgtatgctaaggtgaagaagaaagactccctgcacggcagcaccggggctgttaatgccacacgtcctacactgtcggccacccccaaccacgtggaacacacgctttctgtgagcagcgactcgggcaactccacagcctccaccaagaccgacaagaccgacgagcctgtccccggggcctccagtgccactgctgccttgagtccccaggagaagcgggagctggaccgcctgctgagtggctttggcttagagcgagagaagcaaggcgccatgtaccacacccagcacctcaggtcccgcccagcagggggctcggctgtgccctcctctggacgccacgttgtcccagcccaggttcatgtcaatggtggggcgttagcatctgagcgggagacagacatcctggacgatgaattgccaaaccaggatggtcacagtgcgggcagcatgggcacactctcttctctggacggggtcaccaacaccagtgaggggggctacccagaggccctgtccccactgaccaacggtctggacaagtcctaccccatggagcctatggtcaatggaggaggctacccctacgagtctgccagccgggcggggcctgcccatgctggccacacggcccccatgcggccctcctactctgcacaggagggtttagctggctaccagagggaggggccccacccagcctggccacagccagtgaccacctcccactatgcccatgaccccagcggtatgttccgctctcaatccttttcggaagctgaaccccagctgcccccagctccggtccgagggggaagcagccgggaggctgtgcaaaggggactgaattcgtggcagcagcagcagcagcagcagcagcagcctcgcccacctccacgccagcaggaaagagcccacttggagagtcttgtagccagcaggcccagccctcagccattggcagagacccccatccccagtctccctgagttcccgcgagcagcctcccagcaggagattgaacagtccatcgaaacactcaatatgctgatgctggacctggagccagcctccgctgctgccccactacacaagtcccagagtgtccccggggcctggccaggggcttctccactctcctcccagcccctctctggatcctcccgtcagtcccatccactgacccagtccagatctggctatatccccagtgggcattcgttgggaacccctgagccagccccacgggcctctctggagtctgtccctcctggcaggtcttactcaccttatgactatcagccatgtttggctgggcctaaccaggatttccattcaaagagcccagcctcttcctccttgcctgccttccttccgaccacccacagccctccagggcctcagcaacccccagcctctctccctggcctcactgctcagcctctgctctcaccaaaggaagcgacttcagacccctcccggactccagaggaggagccattgaatttagaagggctggtggcccacagggtagcaggggtacaggctcgggagaagcagcctgcagagcccccagcccctctgcggaggcgggcggccagtgatggacagtatgagaaccagtctccagaagccacatcccctcgtagccctggggttcgctcccctgtccagtgtgtctccccggagctggctcttaccatcgctctcaatcctggagggcggcccaaagagccccatttgcacagctacaaggaggccttcgaggagatggagggaacctccccgagcagcccaccacccagtggggtgcggtcccccccgggtctggccaagacacccctgtctgctctgggcctgaaacctcacaacccagcggacatcctgttgcaccccacaggagttaccagaagacggatccagccagagccccggagctatgtggagtctgtggcacggacagcggtggctggaccccgagctcaggactctgagcccaagagctttagtgctccagccacccaggcctatggccatgagatacccctgaggaacgggaccctgggtggctcctttgtctcccccagccccctctccaccagcagccccatcctcagtgctgacagcacttcagtggggagtttcccgtcgggagagagcagtgaccagggtccccggacgcccacccagcctctgttggagtctggcttccgctcaggcagcctgggacagcccagcccntctgcccagagaaactaccagagctcttctcctctcccgactgtgggcagtagctacagcagccccgactactcacttcagcatttcagctcctctccggaaagccaggcncgagctcagttcagtgtggctggcgtccacacggtgcctgggagccctcaggcgcgccacagaacagtgggcaccaacactccccctagtcctggcttcggccggcgggccatcaatcccagcatggctgcccccagcagtcccagtttgagccatcaccagatgatgggtccaccaggcactggcttccatggtagcactgtctccagcccccagagcagtgcagcgaccaccccggggagccccagcctgtgtcggcacccagcaggggtctaccaggtttctggcctccacaacaaagtggccaccaccccggggagtcccagcctgggccggcaccctggggctcaccaaggcaacctggcctccggtcttcatagcaatgcaatagccagccctggaagccccagcctgggccgtcacctcggagggtctggatctgtggttcccggcagcccctgcttggaccggcatgtggcctatggtggctattctaccccggaggatcggagacccacactgtcccggcagagcagtgcctctggctaccaggctccttccacgccctccttccctgtctcccctgcctactaccctggcctgagcagccctgccacctccccgtcaccagactccgcagccttccggcaagggagcccaacaccagccttgccagagaagcgaaggatgtcagtgggagaccgggcaggcagcctccccaactatgccaccatcaatgggaaggtgtcttcgcctgtcgccagcggcatgtccagtcccagtgggggcagcaccgtctccttctcccacactctgcccgacttctccaagtactccatgccagacaacagcccggagacgcgggctaaagtgaagtttgtccaggacacttctaagtattggtacaagcctgagatctccagggagcaggccatcgcgctcctcaaggaccaggagccgggggccttcatcatccgcgacagtcactccttccgaggcgcgtacgggctggccatgaaggtgtcttcgccacctccaaccatcatgcagcagaataaaaaaggagacatgacccatgagctggtcaggcattttctgatagagactggccccagaggagtcaagctcaagggctgccccaatgagccaaacttcggatcgctgtctgccctggtctaccagcactccatcatcccattggccctgccttgcaagctggtcattccaaaccgagaccccacagatgaatcgaaagatagctccggccctgccaactcaactgcagacctgctgaaacaaggggcagcctgcaatgtgctcttcatcaactctgtggacatggagtcactcactgggccacaggccatctctaaagccacatctgagacgttggctgcagaccccacgccagctgccaccatcgttcacttcaaagtctctgcccagggaatcactctgactgacaaccagagaaagctctttttcagacgccactaccctctcaacactgtcaccttctgtgacctggatccacaggaaagaaagtggatgaaaacagagggtggtgcccctgctaagctcttcggcttcgtggcccggaagcagggcagcaccacggacaacgcctgccacctctttgctgagcttgaccccaaccagccggcctctgccatcgtcaacttcgtctccaaggtcatgctgaatgccggccaaaagagatgaaccctgccccttgcccagggccagtgccatggggaaggggcttgtggggaggggacccatgaatcctgaccactcttgaacccagaaggaggactttgggccaatttcggaggagagaagaaagtgcaacgtggggagagggaagtgaattgcagaggggagggggaagagagagagagagagagagagagagagagagagagagagaaagatggaggagaagaacttggattcccctgggtagatggaaactgcaaaaacccaaagcctccaaaactaaccaggtccacctaacaccccctccctcccctaagaagatggatgtcctcaaaagagaaggaacaaacctccttgggaatccacattttttgggggaatggaaaagctctgtctccctaactcaactgctttgcaaggggaaatcaagctgggagaatctttttctggccacctgtagggtaggttgtcaaaccaaacagagccaccgtgggacatcaagtggaagaacttgtttgcttgaaagtatctcagacccaaggcacctcaggtctctttgctgtgcctccactatattgtcgtgtgggtgtgtgtctgcacccacatcctcacacattgatctagatctgcctttatccactcgaattataaacagctcggcttgtccttgtcccatgtgtttgtagacacacatgcatactgtccaaagattagggttggtggtggcagtgcagcaggggagggacaaacaaccaagctatgggtgacagaggctctctcctggtgcctgcacctgcactctagtgaccctgggtgccgccagacccttctcttctacaaagaccccagcaggagtgggagggtctgcaatggcatcgccctgtcctgccttggccagaagcctggagctttggtttgaggaggtagagatatgtgtatccataggaagagatctgtcagaacaggcagctgttgagctcggggtgtcttccccaaggcatgtggctcagcagcaagaaaggcaagttgctcctgctggggccctggactctgccttagctcccacctctcagccttgttattgggtttcatgcccctggaccagccttatctcagacctgcttacctgcatgatgcctttttgggggctggggattgagtcttgctgctctgcccagccctgttctattctgcagggtccctgtgttggaattctccctggggaacctactttctgctcagtgaggctccggccagaaacctggagtccttatcctcccctctgtaagtgttttagggtctggcttttgcaggcaccctctgacctcagcagagctcctgggcctgctgcctgcacaccacatcgcctacctacaatgccaaagcctcactgtcaccctttctgccttggtttccctagctgagccacgctgcccatgcagcagagggcagaaggcttgcacttgggccaaagggcctaaggtccactggacagttgggaaaacacctgaccaccatttaaggactctaagccagaatggaaaattcaccaggactccattcttaagcctatgcgagtcccctagagagaggcattgtactgatatataaatattatataatatatacatgagacatactgacagaatctgtaagctaataaaatgtaagaaaaggttaaaaaaagaataggtaaattgacaagaagtatttattgtttttccatattgctttattgccttccttggggataaaccaattcctatccttttttatatgtgtaagtaaagcctgaagtgtagggggcctttgttcttgaagcagccagggtctccttgccctggccttggccttccctagactgtgtggggctcagcattgggaggggttgcacatgtcccagcctttggcccccttacttttcagcaagccaggggcccagcagtcagctcccaggatgtgtggggagctgtccctgactctgcaggcctgagcgagtgtgtgagcatgcggggacatgggtgtgtatggcacacataggtgcgtgtgtgtcttttgtattttttctcctccaaggagctgtgtcagtgtggacgttctgtttcagggagttggaaaggagggtgtctgcagaaggtggagagcaggggcagaggccccactggccaccccctgcttcccagagtgaaaccttgtgcctggtgaccaaagtccctccaaagtgctcttccttctgggttattcaagccaaatatctgggtttccccctctcctcattccctagcaaaccccaattatcttccaagataggagatatttcccatccccttcctttgtaaatatctcatctcccactggagagcccaggagcctattcctggcatggatgttctgtccacacttgaggctgggcggtgtatcagacccttcaagcagcctggctggggcccaggactgagtctggggtcagctttcacggtcgcttttcccttcctcaccacccaccacagcccaccttgcatgcatggccagcccctccactccagcctgagccatgtgtgcccctgcgggaggacccattcatgccagaaagctggtaactccctcccagcatccctgcggaaggagtcagtttctgagagtgtgacttttcaaggcgaatgatggggaagggttccccagtccccacagtggccccacctctgggccctgcaccagagcccttctgtgtcacggcgggctgtgcacccatgcacacacctacgcacacacaacactccgcactgcagtatattcttgccaaagatttcctttaaaagcaagcacttttactaattattattttgtaaatgtttatcttcttctgtcttctccctccctgaatctattttactgttgtttattgttgaatctgtgtgtcagccaggagagcgctgtctggccttgaacatgggctgggatgggaaagggtctgggagaagatgggcaacaaagagccagggagtcatggacatcgcagcgacgcagaccccagcaggttcagtcccgtgctgccaccagctgtccagctgggtgtctggagggaagagggcagaggagggtcatgtcccttcagctgggggaggggcccagtgagctccacgtggctttttcccaaagggagcaagagggaaggattgggcgagaaaacaatggagaggggacctgcgaaggaaaacagggaggaagtgagcggtttgatcagcctgctatcacggtgttctggctctcttatttagccaggcgcttaagggacagatacatcacatcctaagtttgggaaaggcctttgacccatgtcatctgagcgtctcctccagtagctctgaaagctgtggacaccaatggccaggattccttctcccctggtttttgaggatccctgggtcttctgagactggccaggagagggatggtggggccagtggttgtgtgaaagcaggaggggcagccctcctggacaagtgtgatccccctataaacggctctcaggaggttagtgagtaggagattctgccttgttctgatgagcctgtgcaggggctccaggggagcatgctgtccagggggcacagaagggtggtgagtgtgatcaaatctagtctcactcccactttttagtctcactcctacttttgtccaccacccctgcctcctggatcttctcccactttttttttcagctttaggacctggggagatcctgtgagtcaaggcagacacccaatcctgcccccacactcggggtcctccaagaggttggggggcagagtcccagagcagccctttaccccaggtccaggccctggaatcctgagactcgcgtttccttggccagtggtaacacaggacgtgtgtgcgcatgtgcaagtgtggatgtatgtgtgtgcgtgtgttttgctcatttctttagggaacttgggagtcggggttggaggtgctgggcaatggaacttcaaattcaatgtcgcccagcagtgaggggagtcgggaggtgaggcctgtaggccaaccaattggtggagtctcagcgatagcccaggtgagaagtggttcacccagaggggcagggtgggggcctcgggcagatctgtccctcttggcccctctgtcctcaaatgtccaaaatgttggaggacctctgttcatatcccacgcctgggctcttgccagcagtggagttactgtagagggatgtcccaagcttgttttccaatcagtgttaagctgtttgaaactctcctgtgtctgtgttttgtttgtgcgtgtgtgtgagagcacatcagtgtgtgcaggctgtgtttccccatttctctcctcccttcagacccatcattgagaacaaatgtaagaaatcccttcccaccaccctccctgcctcccaggccctctgcgggggaaacaagatcacccagcatccttccccaccccagctgtgtatttatatagatggaaatatactttatattttgtatcatcgtgcctatagccgctgccaccgtgtataaatcctggtgtatgctccttatcctggacatgaatgtattgtacactgacgcgtccccactcctgtacagctgctttgtttctttgcaatgcattgtatggctttataaatgataaagttaagaaaaaactcagaaacgaaatcta

SEQ ID NO: 318039 - DNA, 8048 bp, Homo sapiens
  misc_feature (1526)..(1526): n is a, c, g, or t
  misc_feature (1637)..(1637): n is a, c, g, or t
tgtggtgatctagaggatcccgacgctctctctgtggggacaggctctgggtagccccccttcactgatgttggtgaccccgttccagagaagagagtctgcccccagctccggtccgagggggaagcagccgggaggctgtgcaaaggggactgaattcgtggcagcagcagcagcagcagcagcagcagcctcgcccacctccacgccagcaggaaagagcccacttggagagtcttgtagccagcaggcccagccctcagccattggcagagacccccatccccagtctccctgagttcccgcgagcagcctcccagcaggagattgaacagtccatcgaaacactcaatatgctgatgctggacctggagccagcctccgctgctgccccactacacaagtcccagagtgtccccggggcctggccaggggcttctccactctcctcccagcccctctctggatcctcccgtcagtcccatccactgacccagtccagatctggctatatccccagtgggcattcgttgggaacccctgagccagccccacgggcctctctggagtctgtccctcctggcaggtcttactcaccttatgactatcagccatgtttggctgggcctaaccaggatttccattcaaagagcccagcctcttcctccttgcctgccttccttccgaccacccacagccctccagggcctcagcaacccccagcctctctccctggcctcactgctcagcctctgctctcaccaaaggaagcgacttcagacccctcccggactccagaggaggagccattgaatttagaagggctggtggcccacagggtagcaggggtacaggctcgggagaagcagcctgcagagcccccagcccctctgcggaggcgggcggccagtgatggacagtatgagaaccagtctccagaagccacatcccctcgtagccctggggttcgctcccctgtccagtgtgtctccccggagctggctcttaccatcgctctcaatcctggagggcggcccaaagagccccatttgcacagctacaaggaggccttcgaggagatggagggaacctccccgagcagcccaccacccagtggggtgcggtcccccccgggtctggccaagacacccctgtctgctctgggcctgaaacctcacaacccagcggacatcctgttgcaccccacaggagagccccggagctatgtggagtctgtggcacggacagcggtggctggaccccgagctcaggactctgagcccaagagctttagtgctccagccacccaggcctatggccatgagatacccctgaggaacgggaccctgggtggctcctttgtctcccccagccccctctccaccagcagccccatcctcagtgctgacagcacttcagtggggagtttcccgtcgggagagagcagtgaccagggtccccggacgcccacccagcctctgttggagtctggcttccgctcaggcagcctgggacagcccagcccntctgcccagagaaactaccagagctcttctcctctcccgactgtgggcagtagctacagcagccccgactactcacttcagcatttcagctcctctccggaaagccaggcncgagctcagttcagtgtggctggcgtccacacggtgcctgggagccctcaggcgcgccacagaacagtgggcaccaacactccccctagtcctggcttcggccggcgggccatcaatcccagcatggctgcccccagcagtcccagtttgagccatcaccagatgatgggtccaccaggcactggcttccatggtagcactgtctccagcccccagagcagtgcagcgaccaccccggggagccccagcctgtgtcggcacccagcaggggtctaccaggtttctggcctccacaacaaagtggccaccaccccggggagtcccagcctgggccggcaccctggggctcaccaaggcaacctggcctccggtcttcatagcaatgcaatagccagccctggaagccccagcctgggccgtcacctcggagggtctggatctgtggttcccggcagcccctgcttggaccggcatgtggcctatggtggctattctaccccggaggatcggagacccacactgtcccggcagagcagtgcctctggctaccaggctccttccacgccctccttccctgtctcccctgcctactaccctggcctgagcagccctgccacctccccgtcaccagactccgcagccttccggcaagggagcccaacaccagccttgccagagaagcgaaggatgtcagtgggagaccgggcaggcagcctccccaactatgccaccatcaatgggaaggtgtcttcgcctgtcgccagcggcatgtccagtcccagtgggggcagcaccgtctccttctcccacactctgcccgacttctccaagtactccatgccagacaacagcccggagacgcgggctaaagtgaagtttgtccaggacacttctaagtattggtacaagcctgagatctccagggagcaggccatcgcgctcctcaaggaccaggagccgggggccttcatcatccgcgacagtcactccttccgaggcgcgtacgggctggccatgaaggtgtcttcgccacctccaaccatcatgcagcagaataaaaaaggagacatgacccatgagctggtcaggcattttctgatagagactggccccagaggagtcaagctcaagggctgccccaatgagccaaacttcggatcgctgtctgccctggtctaccagcactccatcatcccattggccctgccttgcaagctggtcattccaaaccgagaccccacagatgaatcgaaagatagctccggccctgccaactcaactgcagacctgctgaaacaaggggcagcctgcaatgtgctcttcatcaactctgtggacatggagtcactcactgggccacaggccatctctaaagccacatctgagacgttggctgcagaccccacgccagctgccaccatcgttcacttcaaagtctctgcccagggaatcactctgactgacaaccagagaaagctctttttcagacgccactaccctctcaacactgtcaccttctgtgacctggatccacaggaaagaaagtggatgaaaacagagggtggtgcccctgctaagctcttcggcttcgtggcccggaagcagggcagcaccacggacaacgcctgccacctctttgctgagcttgaccccaaccagccggcctctgccatcgtcaacttcgtctccaaggtcatgctgaatgccggccaaaagagatgaaccctgccccttgcccagggccagtgccatggggaaggggcttgtggggaggggacccatgaatcctgaccactcttgaacccagaaggaggactttgggccaatttcggaggagagaagaaagtgcaacgtggggagagggaagtgaattgcagaggggagggggaagagagagagagagagagagagagagagagagagagagagaaagatggaggagaagaacttggattcccctgggtagatggaaactgcaaaaacccaaagcctccaaaactaaccaggtccacctaacaccccctccctcccctaagaagatggatgtcctcaaaagagaaggaacaaacctccttgggaatccacattttttgggggaatggaaaagctctgtctccctaactcaactgctttgcaaggggaaatcaagctgggagaatctttttctggccacctgtagggtaggttgtcaaaccaaacagagccaccgtgggacatcaagtggaagaacttgtttgcttgaaagtatctcagacccaaggcacctcaggtctctttgctgtgcctccactatattgtcgtgtgggtgtgtgtctgcacccacatcctcacacattgatctagatctgcctttatccactcgaattataaacagctcggcttgtccttgtcccatgtgtttgtagacacacatgcatactgtccaaagattagggttggtggtggcagtgcagcaggggagggacaaacaaccaagctatgggtgacagaggctctctcctggtgcctgcacctgcactctagtgaccctgggtgccgccagacccttctcttctacaaagaccccagcaggagtgggagggtctgcaatggcatcgccctgtcctgccttggccagaagcctggagctttggtttgaggaggtagagatatgtgtatccataggaagagatctgtcagaacaggcagctgttgagctcggggtgtcttccccaaggcatgtggctcagcagcaagaaaggcaagttgctcctgctggggccctggactctgccttagctcccacctctcagccttgttattgggtttcatgcccctggaccagccttatctcagacctgcttacctgcatgatgcctttttgggggctggggattgagtcttgctgctctgcccagccctgttctattctgcagggtccctgtgttggaattctccctggggaacctactttctgctcagtgaggctccggccagaaacctggagtccttatcctcccctctgtaagtgttttagggtctggcttttgcaggcaccctctgacctcagcagagctcctgggcctgctgcctgcacaccacatcgcctacctacaatgccaaagcctcactgtcaccctttctgccttggtttccctagctgagccacgctgcccatgcagcagagggcagaaggcttgcacttgggccaaagggcctaaggtccactggacagttgggaaaacacctgaccaccatttaaggactctaagccagaatggaaaattcaccaggactccattcttaagcctatgcgagtcccctagagagaggcattgtactgatatataaatattatataatatatacatgagacatactgacagaatctgtaagctaataaaatgtaagaaaaggttaaaaaaagaataggtaaattgacaagaagtatttattgtttttccatattgctttattgccttccttggggataaaccaattcctatccttttttatatgtgtaagtaaagcctgaagtgtagggggcctttgttcttgaagcagccagggtctccttgccctggccttggccttccctagactgtgtggggctcagcattgggaggggttgcacatgtcccagcctttggcccccttacttttcagcaagccaggggcccagcagtcagctcccaggatgtgtggggagctgtccctgactctgcaggcctgagcgagtgtgtgagcatgcggggacatgggtgtgtatggcacacataggtgcgtgtgtgtcttttgtattttttctcctccaaggagctgtgtcagtgtggacgttctgtttcagggagttggaaaggagggtgtctgcagaaggtggagagcaggggcagaggccccactggccaccccctgcttcccagagtgaaaccttgtgcctggtgaccaaagtccctccaaagtgctcttccttctgggttattcaagccaaatatctgggtttccccctctcctcattccctagcaaaccccaattatcttccaagataggagatatttcccatccccttcctttgtaaatatctcatctcccactggagagcccaggagcctattcctggcatggatgttctgtccacacttgaggctgggcggtgtatcagacccttcaagcagcctggctggggcccaggactgagtctggggtcagctttcacggtcgcttttcccttcctcaccacccaccacagcccaccttgcatgcatggccagcccctccactccagcctgagccatgtgtgcccctgcgggaggacccattcatgccagaaagctggtaactccctcccagcatccctgcggaaggagtcagtttctgagagtgtgacttttcaaggcgaatgatggggaagggttccccagtccccacagtggccccacctctgggccctgcaccagagcccttctgtgtcacggcgggctgtgcacccatgcacacacctacgcacacacaacactccgcactgcagtatattcttgccaaagatttcctttaaaagcaagcacttttactaattattattttgtaaatgtttatcttcttctgtcttctccctccctgaatctattttactgttgtttattgttgaatctgtgtgtcagccaggagagcgctgtctggccttgaacatgggctgggatgggaaagggtctgggagaagatgggcaacaaagagccagggagtcatggacatcgcagcgacgcagaccccagcaggttcagtcccgtgctgccaccagctgtccagctgggtgtctggagggaagagggcagaggagggtcatgtcccttcagctgggggaggggcccagtgagctccacgtggctttttcccaaagggagcaagagggaaggattgggcgagaaaacaatggagaggggacctgcgaaggaaaacagggaggaagtgagcggtttgatcagcctgctatcacggtgttctggctctcttatttagccaggcgcttaagggacagatacatcacatcctaagtttgggaaaggcctttgacccatgtcatctgagcgtctcctccagtagctctgaaagctgtggacaccaatggccaggattccttctcccctggtttttgaggatccctgggtcttctgagactggccaggagagggatggtggggccagtggttgtgtgaaagcaggaggggcagccctcctggacaagtgtgatccccctataaacggctctcaggaggttagtgagtaggagattctgccttgttctgatgagcctgtgcaggggctccaggggagcatgctgtccagggggcacagaagggtggtgagtgtgatcaaatctagtctcactcccactttttagtctcactcctacttttgtccaccacccctgcctcctggatcttctcccactttttttttcagctttaggacctggggagatcctgtgagtcaaggcagacacccaatcctgcccccacactcggggtcctccaagaggttggggggcagagtcccagagcagccctttaccccaggtccaggccctggaatcctgagactcgcgtttccttggccagtggtaacacaggacgtgtgtgcgcatgtgcaagtgtggatgtatgtgtgtgcgtgtgttttgctcatttctttagggaacttgggagtcggggttggaggtgctgggcaatggaacttcaaattcaatgtcgcccagcagtgaggggagtcgggaggtgaggcctgtaggccaaccaattggtggagtctcagcgatagcccaggtgagaagtggttcacccagaggggcagggtgggggcctcgggcagatctgtccctcttggcccctctgtcctcaaatgtccaaaatgttggaggacctctgttcatatcccacgcctgggctcttgccagcagtggagttactgtagagggatgtcccaagcttgttttccaatcagtgttaagctgtttgaaactctcctgtgtctgtgttttgtttgtgcgtgtgtgtgagagcacatcagtgtgtgcaggctgtgtttccccatttctctcctcccttcagacccatcattgagaacaaatgtaagaaatcccttcccaccaccctccctgcctcccaggccctctgcgggggaaacaagatcacccagcatccttccccaccccagctgtgtatttatatagatggaaatatactttatattttgtatcatcgtgcctatagccgctgccaccgtgtataaatcctggtgtatgctccttatcctggacatgaatgtattgtacactgacgcgtccccactcctgtacagctgctttgtttctttgcaatgcattgtatggctttataaatgataaagttaagaaaaaactcagaaacgaaatcta

SEQ ID NO: 318040 - DNA, 5909 bp, Homo sapiens
gcggccgccacctgccaactcaaccgtcccatgccgccgctaatccgggacccacagccacgccctccttccctgtctcccctgcctactaccctggcctgagcagccctgccacctccccgtcaccagactccgcagccttccggcaagggagcccaacaccagccttgccagagaagcgaaggatgtcagtgggagaccgggcaggcagcctccccaactatgccaccatcaatgggaaggtgtcttcgcctgtcgccagcggcatgtccagtcccagtgggggcagcaccgtctccttctcccacactctgcccgacttctccaagtactccatgccagacaacagcccggagacgcgggctaaagtgaagtttgtccaggacacttctaagtattggtacaagcctgagatctccagggagcaggccatcgcgctcctcaaggaccaggagccgggggccttcatcatccgcgacagtcactccttccgaggcgcgtacgggctggccatgaaggtgtcttcgccacctccaaccatcatgcagcagaataaaaaaggagacatgacccatgagctggtcaggcattttctgatagagactggccccagaggagtcaagctcaagggctgccccaatgagccaaacttcggatcgctgtctgccctggtctaccagcactccatcatcccattggccctgccttgcaagctggtcattccaaaccgagaccccacagatgaatcgaaagatagctccggccctgccaactcaactgcagacctgctgaaacaaggggcagcctgcaatgtgctcttcatcaactctgtggacatggagtcactcactgggccacaggccatctctaaagccacatctgagacgttggctgcagaccccacgccagctgccaccatcgttcacttcaaagtctctgcccagggaatcactctgactgacaaccagagaaagctctttttcagacgccactaccctctcaacactgtcaccttctgtgacctggatccacaggaaagaaagtggatgaaaacagagggtggtgcccctgctaagctcttcggcttcgtggcccggaagcagggcagcaccacggacaacgcctgccacctctttgctgagcttgaccccaaccagccggcctctgccatcgtcaacttcgtctccaaggtcatgctgaatgccggccaaaagagatgaaccctgccccttgcccagggccagtgccatggggaaggggcttgtggggaggggacccatgaatcctgaccactcttgaacccagaaggaggactttgggccaatttcggaggagagaagaaagtgcaacgtggggagagggaagtgaattgcagaggggagggggaagagagagagagagagagagagagagagagagagagagagaaagatggaggagaagaacttggattcccctgggtagatggaaactgcaaaaacccaaagcctccaaaactaaccaggtccacctaacaccccctccctcccctaagaagatggatgtcctcaaaagagaaggaacaaacctccttgggaatccacattttttgggggaatggaaaagctctgtctccctaactcaactgctttgcaaggggaaatcaagctgggagaatctttttctggccacctgtagggtaggttgtcaaaccaaacagagccaccgtgggacatcaagtggaagaacttgtttgcttgaaagtatctcagacccaaggcacctcaggtctctttgctgtgcctccactatattgtcgtgtgggtgtgtgtctgcacccacatcctcacacattgatctagatctgcctttatccactcgaattataaacagctcggcttgtccttgtcccatgtgtttgtagacacacatgcatactgtccaaagattagggttggtggtggcagtgcagcaggggagggacaaacaaccaagctatgggtgacagaggctctctcctggtgcctgcacctgcactctagtgaccctgggtgccgccagacccttctcttctacaaagaccccagcaggagtgggagggtctgcaatggcatcgccctgtcctgccttggccagaagcctggagctttggtttgaggaggtagagatatgtgtatccataggaagagatctgtcagaacaggcagctgttgagctcggggtgtcttccccaaggcatgtggctcagcagcaagaaaggcaagttgctcctgctggggccctggactctgccttagctcccacctctcagccttgttattgggtttcatgcccctggaccagccttatctcagacctgcttacctgcatgatgcctttttgggggctggggattgagtcttgctgctctgcccagccctgttctattctgcagggtccctgtgttggaattctccctggggaacctactttctgctcagtgaggctccggccagaaacctggagtccttatcctcccctctgtaagtgttttagggtctggcttttgcaggcaccctctgacctcagcagagctcctgggcctgctgcctgcacaccacatcgcctacctacaatgccaaagcctcactgtcaccctttctgccttggtttccctagctgagccacgctgcccatgcagcagagggcagaaggcttgcacttgggccaaagggcctaaggtccactggacagttgggaaaacacctgaccaccatttaaggactctaagccagaatggaaaattcaccaggactccattcttaagcctatgcgagtcccctagagagaggcattgtactgatatataaatattatataatatatacatgagacatactgacagaatctgtaagctaataaaatgtaagaaaaggttaaaaaaagaataggtaaattgacaagaagtatttattgtttttccatattgctttattgccttccttggggataaaccaattcctatccttttttatatgtgtaagtaaagcctgaagtgtagggggcctttgttcttgaagcagccagggtctccttgccctggccttggccttccctagactgtgtggggctcagcattgggaggggttgcacatgtcccagcctttggcccccttacttttcagcaagccaggggcccagcagtcagctcccaggatgtgtggggagctgtccctgactctgcaggcctgagcgagtgtgtgagcatgcggggacatgggtgtgtatggcacacataggtgcgtgtgtgtcttttgtattttttctcctccaaggagctgtgtcagtgtggacgttctgtttcagggagttggaaaggagggtgtctgcagaaggtggagagcaggggcagaggccccactggccaccccctgcttcccagagtgaaaccttgtgcctggtgaccaaagtccctccaaagtgctcttccttctgggttattcaagccaaatatctgggtttccccctctcctcattccctagcaaaccccaattatcttccaagataggagatatttcccatccccttcctttgtaaatatctcatctcccactggagagcccaggagcctattcctggcatggatgttctgtccacacttgaggctgggcggtgtatcagacccttcaagcagcctggctggggcccaggactgagtctggggtcagctttcacggtcgcttttcccttcctcaccacccaccacagcccaccttgcatgcatggccagcccctccactccagcctgagccatgtgtgcccctgcgggaggacccattcatgccagaaagctggtaactccctcccagcatccctgcggaaggagtcagtttctgagagtgtgacttttcaaggcgaatgatggggaagggttccccagtccccacagtggccccacctctgggccctgcaccagagcccttctgtgtcacggcgggctgtgcacccatgcacacacctacgcacacacaacactccgcactgcagtatattcttgccaaagatttcctttaaaagcaagcacttttactaattattattttgtaaatgtttatcttcttctgtcttctccctccctgaatctattttactgttgtttattgttgaatctgtgtgtcagccaggagagcgctgtctggccttgaacatgggctgggatgggaaagggtctgggagaagatgggcaacaaagagccagggagtcatggacatcgcagcgacgcagaccccagcaggttcagtcccgtgctgccaccagctgtccagctgggtgtctggagggaagagggcagaggagggtcatgtcccttcagctgggggaggggcccagtgagctccacgtggctttttcccaaagggagcaagagggaaggattgggcgagaaaacaatggagaggggacctgcgaaggaaaacagggaggaagtgagcggtttgatcagcctgctatcacggtgttctggctctcttatttagccaggcgcttaagggacagatacatcacatcctaagtttgggaaaggcctttgacccatgtcatctgagcgtctcctccagtagctctgaaagctgtggacaccaatggccaggattccttctcccctggtttttgaggatccctgggtcttctgagactggccaggagagggatggtggggccagtggttgtgtgaaagcaggaggggcagccctcctggacaagtgtgatccccctataaacggctctcaggaggttagtgagtaggagattctgccttgttctgatgagcctgtgcaggggctccaggggagcatgctgtccagggggcacagaagggtggtgagtgtgatcaaatctagtctcactcccactttttagtctcactcctacttttgtccaccacccctgcctcctggatcttctcccactttttttttcagctttaggacctggggagatcctgtgagtcaaggcagacacccaatcctgcccccacactcggggtcctccaagaggttggggggcagagtcccagagcagccctttaccccaggtccaggccctggaatcctgagactcgcgtttccttggccagtggtaacacaggacgtgtgtgcgcatgtgcaagtgtggatgtatgtgtgtgcgtgtgttttgctcatttctttagggaacttgggagtcggggttggaggtgctgggcaatggaacttcaaattcaatgtcgcccagcagtgaggggagtcgggaggtgaggcctgtaggccaaccaattggtggagtctcagcgatagcccaggtgagaagtggttcacccagaggggcagggtgggggcctcgggcagatctgtccctcttggcccctctgtcctcaaatgtccaaaatgttggaggacctctgttcatatcccacgcctgggctcttgccagcagtggagttactgtagagggatgtcccaagcttgttttccaatcagtgttaagctgtttgaaactctcctgtgtctgtgttttgtttgtgcgtgtgtgtgagagcacatcagtgtgtgcaggctgtgtttccccatttctctcctcccttcagacccatcattgagaacaaatgtaagaaatcccttcccaccaccctccctgcctcccaggccctctgcgggggaaacaagatcacccagcatccttccccaccccagctgtgtatttatatagatggaaatatactttatattttgtatcatcgtgcctatagccgctgccaccgtgtataaatcctggtgtatgctccttatcctggacatgaatgtattgtacactgacgcgtccccactcctgtacagctgctttgtttctttgcaatgcattgtatggctttataaatgataaagttaagaaaaaactcagaaacgaaatcta

SEQ ID NO: 318041 - DNA, 6116 bp, Homo sapiens
atgaggaggccgaaggtcccttccactgtgtccgcatggtgttcgaggacatcagcttttgatgtcagtttcctggggctgccataacaaaggaccatgtgcttagtggcttataaatgacagaaatatgttctctcacagttctggaggctagaagtccaaaatcaaggtgttggcaaggttggctccttcctgatgttctaggggagaatctgtcccaggcctctctcccagtttcttgtggctgccagcatccttggtgtcccttggcatgtagacgcatcaccccagtctctgcctgcaccttccatggtgctctcccctgtgtgtatctctgtctcctctccttgtaaggacaccaggcatacaggcatactggattaaggctcaccctaatcctgtgtgacctcatcttaatttgtctacatctgcaaagaccctatttccaaataaggtcaaattcacaagcactgggggccaggactttgatgtatgttttgggtgaacacaatttaacccataacactttcttcccttctcctgctttagacaacagcccggagacgcgggctaaagtgaagtttgtccaggacacttctaagtattggtacaagcctgagatctccagggagcaggccatcgcgctcctcaaggaccaggagccgggggccttcatcatccgcgacagtcactccttccgaggcgcgtacgggctggccatgaaggtgtcttcgccacctccaaccatcatgcagcagaataaaaaaggagacatgacccatgagctggtcaggcattttctgatagagactggccccagaggagtcaagctcaagggctgccccaatgagccaaacttcggatcgctgtctgccctggtctaccagcactccatcatcccattggccctgccttgcaagctggtcattccaaaccgagaccccacagatgaatcgaaagatagctccggccctgccaactcaactgcagacctgctgaaacaaggggcagcctgcaatgtgctcttcatcaactctgtggacatggagtcactcactgggccacaggccatctctaaagccacatctgagacgttggctgcagaccccacgccagctgccaccatcgttcacttcaaagtctctgcccagggaatcactctgactgacaaccagagaaagctctttttcagacgccactaccctctcaacactgtcaccttctgtgacctggatccacaggaaagaaagtggatgaaaacagagggtggtgcccctgctaagctcttcggcttcgtggcccggaagcagggcagcaccacggacaacgcctgccacctctttgctgagcttgaccccaaccagccggcctctgccatcgtcaacttcgtctccaaggtcatgctgaatgccggccaaaagagatgaaccctgccccttgcccagggccagtgccatggggaaggggcttgtggggaggggacccatgaatcctgaccactcttgaacccagaaggaggactttgggccaatttcggaggagagaagaaagtgcaacgtggggagagggaagtgaattgcagaggggagggggaagagagagagagagagagagagagagagagagagagagagaaagatggaggagaagaacttggattcccctgggtagatggaaactgcaaaaacccaaagcctccaaaactaaccaggtccacctaacaccccctccctcccctaagaagatggatgtcctcaaaagagaaggaacaaacctccttgggaatccacattttttgggggaatggaaaagctctgtctccctaactcaactgctttgcaaggggaaatcaagctgggagaatctttttctggccacctgtagggtaggttgtcaaaccaaacagagccaccgtgggacatcaagtggaagaacttgtttgcttgaaagtatctcagacccaaggcacctcaggtctctttgctgtgcctccactatattgtcgtgtgggtgtgtgtctgcacccacatcctcacacattgatctagatctgcctttatccactcgaattataaacagctcggcttgtccttgtcccatgtgtttgtagacacacatgcatactgtccaaagattagggttggtggtggcagtgcagcaggggagggacaaacaaccaagctatgggtgacagaggctctctcctggtgcctgcacctgcactctagtgaccctgggtgccgccagacccttctcttctacaaagaccccagcaggagtgggagggtctgcaatggcatcgccctgtcctgccttggccagaagcctggagctttggtttgaggaggtagagatatgtgtatccataggaagagatctgtcagaacaggcagctgttgagctcggggtgtcttccccaaggcatgtggctcagcagcaagaaaggcaagttgctcctgctggggccctggactctgccttagctcccacctctcagccttgttattgggtttcatgcccctggaccagccttatctcagacctgcttacctgcatgatgcctttttgggggctggggattgagtcttgctgctctgcccagccctgttctattctgcagggtccctgtgttggaattctccctggggaacctactttctgctcagtgaggctccggccagaaacctggagtccttatcctcccctctgtaagtgttttagggtctggcttttgcaggcaccctctgacctcagcagagctcctgggcctgctgcctgcacaccacatcgcctacctacaatgccaaagcctcactgtcaccctttctgccttggtttccctagctgagccacgctgcccatgcagcagagggcagaaggcttgcacttgggccaaagggcctaaggtccactggacagttgggaaaacacctgaccaccatttaaggactctaagccagaatggaaaattcaccaggactccattcttaagcctatgcgagtcccctagagagaggcattgtactgatatataaatattatataatatatacatgagacatactgacagaatctgtaagctaataaaatgtaagaaaaggttaaaaaaagaataggtaaattgacaagaagtatttattgtttttccatattgctttattgccttccttggggataaaccaattcctatccttttttatatgtgtaagtaaagcctgaagtgtagggggcctttgttcttgaagcagccagggtctccttgccctggccttggccttccctagactgtgtggggctcagcattgggaggggttgcacatgtcccagcctttggcccccttacttttcagcaagccaggggcccagcagtcagctcccaggatgtgtggggagctgtccctgactctgcaggcctgagcgagtgtgtgagcatgcggggacatgggtgtgtatggcacacataggtgcgtgtgtgtcttttgtattttttctcctccaaggagctgtgtcagtgtggacgttctgtttcagggagttggaaaggagggtgtctgcagaaggtggagagcaggggcagaggccccactggccaccccctgcttcccagagtgaaaccttgtgcctggtgaccaaagtccctccaaagtgctcttccttctgggttattcaagccaaatatctgggtttccccctctcctcattccctagcaaaccccaattatcttccaagataggagatatttcccatccccttcctttgtaaatatctcatctcccactggagagcccaggagcctattcctggcatggatgttctgtccacacttgaggctgggcggtgtatcagacccttcaagcagcctggctggggcccaggactgagtctggggtcagctttcacggtcgcttttcccttcctcaccacccaccacagcccaccttgcatgcatggccagcccctccactccagcctgagccatgtgtgcccctgcgggaggacccattcatgccagaaagctggtaactccctcccagcatccctgcggaaggagtcagtttctgagagtgtgacttttcaaggcgaatgatggggaagggttccccagtccccacagtggccccacctctgggccctgcaccagagcccttctgtgtcacggcgggctgtgcacccatgcacacacctacgcacacacaacactccgcactgcagtatattcttgccaaagatttcctttaaaagcaagcacttttactaattattattttgtaaatgtttatcttcttctgtcttctccctccctgaatctattttactgttgtttattgttgaatctgtgtgtcagccaggagagcgctgtctggccttgaacatgggctgggatgggaaagggtctgggagaagatgggcaacaaagagccagggagtcatggacatcgcagcgacgcagaccccagcaggttcagtcccgtgctgccaccagctgtccagctgggtgtctggagggaagagggcagaggagggtcatgtcccttcagctgggggaggggcccagtgagctccacgtggctttttcccaaagggagcaagagggaaggattgggcgagaaaacaatggagaggggacctgcgaaggaaaacagggaggaagtgagcggtttgatcagcctgctatcacggtgttctggctctcttatttagccaggcgcttaagggacagatacatcacatcctaagtttgggaaaggcctttgacccatgtcatctgagcgtctcctccagtagctctgaaagctgtggacaccaatggccaggattccttctcccctggtttttgaggatccctgggtcttctgagactggccaggagagggatggtggggccagtggttgtgtgaaagcaggaggggcagccctcctggacaagtgtgatccccctataaacggctctcaggaggttagtgagtaggagattctgccttgttctgatgagcctgtgcaggggctccaggggagcatgctgtccagggggcacagaagggtggtgagtgtgatcaaatctagtctcactcccactttttagtctcactcctacttttgtccaccacccctgcctcctggatcttctcccactttttttttcagctttaggacctggggagatcctgtgagtcaaggcagacacccaatcctgcccccacactcggggtcctccaagaggttggggggcagagtcccagagcagccctttaccccaggtccaggccctggaatcctgagactcgcgtttccttggccagtggtaacacaggacgtgtgtgcgcatgtgcaagtgtggatgtatgtgtgtgcgtgtgttttgctcatttctttagggaacttgggagtcggggttggaggtgctgggcaatggaacttcaaattcaatgtcgcccagcagtgaggggagtcgggaggtgaggcctgtaggccaaccaattggtggagtctcagcgatagcccaggtgagaagtggttcacccagaggggcagggtgggggcctcgggcagatctgtccctcttggcccctctgtcctcaaatgtccaaaatgttggaggacctctgttcatatcccacgcctgggctcttgccagcagtggagttactgtagagggatgtcccaagcttgttttccaatcagtgttaagctgtttgaaactctcctgtgtctgtgttttgtttgtgcgtgtgtgtgagagcacatcagtgtgtgcaggctgtgtttccccatttctctcctcccttcagacccatcattgagaacaaatgtaagaaatcccttcccaccaccctccctgcctcccaggccctctgcgggggaaacaagatcacccagcatccttccccaccccagctgtgtatttatatagatggaaatatactttatattttgtatcatcgtgcctatagccgctgccaccgtgtataaatcctggtgtatgctccttatcctggacatgaatgtattgtacactgacgcgtccccactcctgtacagctgctttgtttctttgcaatgcattgtatggctttataaatgataaagttaagaaaaaactcagaaacgaaatcta

SEQ ID NO: 318042 - DNA, 9222 bp, Homo sapiens
  misc_feature (3737)..(3737): n is a, c, g, or t
  misc_feature (3848)..(3848): n is a, c, g, or t
ctgctccttgcaccccgctccctgcctggacacaggctcactcgctgccttcttctgggggaaaccagcttcttgccagccacagctgctgcctccgccactggccaccgcccctgtcctgggagtcccttggcccagacacccacctgacttagtggctcctctgcaggaaaggtggctgccccctgcgttcctccatccaaccatgagctggtgcccatcaccactgagaatgcaccaaagaatgtagtggacaagggagaaggaggctcccggggtggaaacacacggaaaagcctcgaggacaacggctccaccagggtcaccccgagtgtccagccccacctccagcccatcagaaacatgagtgtgagccggaccatggaggacagctgtgagctggacctggtgtacgtcacagagaggatcatcgctgtctccttccccagcacagccaatgaggagaacttccggagcaacctccgtgaggtggcgcagatgctcaagtccaaacatggaggcaactacctgctttcaacctctctgagcggagacctgacatcacgaagctccatgccaaggtactggaatttggctggcccgacctccacaccccagccctggagaagatctgcagcatctgtaaggccatggacacatggctcaatgcagaccctcacaatgtcgttgttctacacaacaagggaaaccgaggcaggataggagttgtcatcgcggcttacatgcactacagcaacatttctgccagtgcggaccaggctctggaccggtttgcaatgaagcggttctatgaggataagattgtgcccattggccagccatcccaaagaaggtacgtgcattacttcagtggcctgctctccggctccatcaaaatgaacaacaagcccttgtttctgcaccacgtgatcatgcacggcatccccaactttgagtctaaaggaggatgtcggccatttctccgcatctaccaggccatgcaacctgtgtacacatctggcatctacaacatcccaggagacagccagactagcgtctgcatcaccatcgagccaggactgctcttgaagggagacatcttgctgaagtgctaccacaagaagttccgaagcccagcccgagacgtcatcttccgtgtgcagttccacacctgtgccatccatgacctgggggttgtctttgggaaggaggaccttgatgatgctttcaaagatgatcgatttccagagtatggcaaagtggagtttgtattttcttatgggccagagaaaattcaaggcatggagcacctggagaacgggccgagcgtgtctgtggactataacacctctgaccccctcatccgctgggactcctacgacaacttcagtgggcatcgagatgacggcatggaggaggtggtgggacacacgcaggggccactagatgggagcctgtatgctaaggtgaagaagaaagactccctgcacggcagcaccggggctgttaatgccacacgtcctacactgtcggccacccccaaccacgtggaacacacgctttctgtgagcagcgactcgggcaactccacagcctccaccaagaccgacaagaccgacgagcctgtccccggggcctccagtgccactgctgccttgagtccccaggagaagcgggagctggaccgcctgctgagtggctttggcttagagcgagagaagcaaggcgccatgtaccacacccagcacctcaggtcccgcccagcagggggctcggctgtgccctcctctggacgccacgttgtcccagcccaggttcatgtcaatggtggggcgttagcatctgagcgggagacagacatcctggacgatgaattgccaaaccaggatggtcacagtgcgggcagcatgggcacactctcttctctggacggggtcaccaacaccagtgaggggggctacccagaggccctgtccccactgaccaacggtctggacaagtcctaccccatggagcctatggtcaatggaggaggctacccctacgagtctgccagccgggcggggcctgcccatgctggccacacggcccccatgcggccctcctactctgcacaggagggtttagctggctaccagagggaggggccccacccagcctggccacagccagtgaccacctcccactatgcccatgaccccagcggtatgttccgctctcaatccttttcggaagctgaaccccagctgcccccagctccggtccgagggggaagcagccgggaggctgtgcaaaggggactgaattcgtggcagcagcagcagcagcagcagcagcagcctcgcccacctccacgccagcaggaaagagcccacttggagagtcttgtagccagcaggcccagccctcagccattggcagagacccccatccccagtctccctgagttcccgcgagcagcctcccagcaggagattgaacagtccatcgaaacactcaatatgctgatgctggacctggagccagcctccgctgctgccccactacacaagtcccagagtgtccccggggcctggccaggggcttctccactctcctcccagcccctctctggatcctcccgtcagtcccatccactgacccagtccagatctggctatatccccagtgggcattcgttgggaacccctgagccagccccacgggcctctctggagtctgtccctcctggcaggtcttactcaccttatgactatcagccatgtttggctgggcctaaccaggatttccattcaaagagcccagcctcttcctccttgcctgccttccttccgaccacccacagccctccagggcctcagcaacccccagcctctctccctggcctcactgctcagcctctgctctcaccaaaggaagcgacttcagacccctcccggactccagaggaggagccattgaatttagaagggctggtggcccacagggtagcaggggtacaggctcgggagaagcagcctgcagagcccccagcccctctgcggaggcgggcggccagtgatggacagtatgagaaccagtctccagaagccacatcccctcgtagccctggggttcgctcccctgtccagtgtgtctccccggagctggctcttaccatcgctctcaatcctggagggcggcccaaagagccccatttgcacagctacaaggaggccttcgaggagatggagggaacctccccgagcagcccaccacccagtggggtgcggtcccccccgggtctggccaagacacccctgtctgctctgggcctgaaacctcacaacccagcggacatcctgttgcaccccacaggagttaccagaagacggatccagccagaggaagatgaggggaaggtggtggtcaggctgtcagaagagccccggagctatgtggagtctgtggcacggacagcggtggctggaccccgagctcaggactctgagcccaagagctttagtgctccagccacccaggcctatggccatgagatacccctgaggaacgggaccctgggtggctcctttgtctcccccagccccctctccaccagcagccccatcctcagtgctgacagcacttcagtggggagtttcccgtcgggagagagcagtgaccagggtccccggacgcccacccagcctctgttggagtctggcttccgctcaggcagcctgggacagcccagcccntctgcccagagaaactaccagagctcttctcctctcccgactgtgggcagtagctacagcagccccgactactcacttcagcatttcagctcctctccggaaagccaggcncgagctcagttcagtgtggctggcgtccacacggtgcctgggagccctcaggcgcgccacagaacagtgggcaccaacactccccctagtcctggcttcggccggcgggccatcaatcccagcatggctgcccccagcagtcccagtttgagccatcaccagatgatgggtccaccaggcactggcttccatggtagcactgtctccagcccccagagcagtgcagcgaccaccccggggagccccagcctgtgtcggcacccagcaggggtctaccaggtttctggcctccacaacaaagtggccaccaccccggggagtcccagcctgggccggcaccctggggctcaccaaggcaacctggcctccggtcttcatagcaatgcaatagccagccctggaagccccagcctgggccgtcacctcggagggtctggatctgtggttcccggcagcccctgcttggaccggcatgtggcctatggtggctattctaccccggaggatcggagacccacactgtcccggcagagcagtgcctctggctaccaggctccttccacgccctccttccctgtctcccctgcctactaccctggcctgagcagccctgccacctccccgtcaccagactccgcagccttccggcaagggagcccaacaccagccttgccagagaagcgaaggatgtcagtgggagaccgggcaggcagcctccccaactatgccaccatcaatgggaaggtgtcttcgcctgtcgccagcggcatgtccagtcccagtgggggcagcaccgtctccttctcccacactctgcccgacttctccaagtactccatgccagacaacagcccggagacgcgggctaaagtgaagtttgtccaggacacttctaagtattggtacaagcctgagatctccagggagcaggccatcgcgctcctcaaggaccaggagccgggggccttcatcatccgcgacagtcactccttccgaggcgcgtacgggctggccatgaaggtgtcttcgccacctccaaccatcatgcagcagaataaaaaaggagacatgacccatgagctggtcaggcattttctgatagagactggccccagaggagtcaagctcaagggctgccccaatgagccaaacttcggatcgctgtctgccctggtctaccagcactccatcatcccattggccctgccttgcaagctggtcattccaaaccgagaccccacagatgaatcgaaagatagctccggccctgccaactcaactgcagacctgctgaaacaaggggcagcctgcaatgtgctcttcatcaactctgtggacatggagtcactcactgggccacaggccatctctaaagccacatctgagacgttggctgcagaccccacgccagctgccaccatcgttcacttcaaagtctctgcccagggaatcactctgactgacaaccagagaaagctctttttcagacgccactaccctctcaacactgtcaccttctgtgacctggatccacaggaaagaaagtggatgaaaacagagggtggtgcccctgctaagctcttcggcttcgtggcccggaagcagggcagcaccacggacaacgcctgccacctctttgctgagcttgaccccaaccagccggcctctgccatcgtcaacttcgtctccaaggtcatgctgaatgccggccaaaagagatgaaccctgccccttgcccagggccagtgccatggggaaggggcttgtggggaggggacccatgaatcctgaccactcttgaacccagaaggaggactttgggccaatttcggaggagagaagaaagtgcaacgtggggagagggaagtgaattgcagaggggagggggaagagagagagagagagagagagagagagagagagagagagaaagatggaggagaagaacttggattcccctgggtagatggaaactgcaaaaacccaaagcctccaaaactaaccaggtccacctaacaccccctccctcccctaagaagatggatgtcctcaaaagagaaggaacaaacctccttgggaatccacattttttgggggaatggaaaagctctgtctccctaactcaactgctttgcaaggggaaatcaagctgggagaatctttttctggccacctgtagggtaggttgtcaaaccaaacagagccaccgtgggacatcaagtggaagaacttgtttgcttgaaagtatctcagacccaaggcacctcaggtctctttgctgtgcctccactatattgtcgtgtgggtgtgtgtctgcacccacatcctcacacattgatctagatctgcctttatccactcgaattataaacagctcggcttgtccttgtcccatgtgtttgtagacacacatgcatactgtccaaagattagggttggtggtggcagtgcagcaggggagggacaaacaaccaagctatgggtgacagaggctctctcctggtgcctgcacctgcactctagtgaccctgggtgccgccagacccttctcttctacaaagaccccagcaggagtgggagggtctgcaatggcatcgccctgtcctgccttggccagaagcctggagctttggtttgaggaggtagagatatgtgtatccataggaagagatctgtcagaacaggcagctgttgagctcggggtgtcttccccaaggcatgtggctcagcagcaagaaaggcaagttgctcctgctggggccctggactctgccttagctcccacctctcagccttgttattgggtttcatgcccctggaccagccttatctcagacctgcttacctgcatgatgcctttttgggggctggggattgagtcttgctgctctgcccagccctgttctattctgcagggtccctgtgttggaattctccctggggaacctactttctgctcagtgaggctccggccagaaacctggagtccttatcctcccctctgtaagtgttttagggtctggcttttgcaggcaccctctgacctcagcagagctcctgggcctgctgcctgcacaccacatcgcctacctacaatgccaaagcctcactgtcaccctttctgccttggtttccctagctgagccacgctgcccatgcagcagagggcagaaggcttgcacttgggccaaagggcctaaggtccactggacagttgggaaaacacctgaccaccatttaaggactctaagccagaatggaaaattcaccaggactccattcttaagcctatgcgagtcccctagagagaggcattgtactgatatataaatattatataatatatacatgagacatactgacagaatctgtaagctaataaaatgtaagaaaaggttaaaaaaagaataggtaaattgacaagaagtatttattgtttttccatattgctttattgccttccttggggataaaccaattcctatccttttttatatgtgtaagtaaagcctgaagtgtagggggcctttgttcttgaagcagccagggtctccttgccctggccttggccttccctagactgtgtggggctcagcattgggaggggttgcacatgtcccagcctttggcccccttacttttcagcaagccaggggcccagcagtcagctcccaggatgtgtggggagctgtccctgactctgcaggcctgagcgagtgtgtgagcatgcggggacatgggtgtgtatggcacacataggtgcgtgtgtgtcttttgtattttttctcctccaaggagctgtgtcagtgtggacgttctgtttcagggagttggaaaggagggtgtctgcagaaggtggagagcaggggcagaggccccactggccaccccctgcttcccagagtgaaaccttgtgcctggtgaccaaagtccctccaaagtgctcttccttctgggttattcaagccaaatatctgggtttccccctctcctcattccctagcaaaccccaattatcttccaagataggagatatttcccatccccttcctttgtaaatatctcatctcccactggagagcccaggagcctattcctggcatggatgttctgtccacacttgaggctgggcggtgtatcagacccttcaagcagcctggctggggcccaggactgagtctggggtcagctttcacggtcgcttttcccttcctcaccacccaccacagcccaccttgcatgcatggccagcccctccactccagcctgagccatgtgtgcccctgcgggaggacccattcatgccagaaagctggtaactccctcccagcatccctgcggaaggagtcagtttctgagagtgtgacttttcaaggcgaatgatggggaagggttccccagtccccacagtggccccacctctgggccctgcaccagagcccttctgtgtcacggcgggctgtgcacccatgcacacacctacgcacacacaacactccgcactgcagtatattcttgccaaagatttcctttaaaagcaagcacttttactaattattattttgtaaatgtttatcttcttctgtcttctccctccctgaatctattttactgttgtttattgttgaatctgtgtgtcagccaggagagcgctgtctggccttgaacatgggctgggatgggaaagggtctgggagaagatgggcaacaaagagccagggagtcatggacatcgcagcgacgcagaccccagcaggttcagtcccgtgctgccaccagctgtccagctgggtgtctggagggaagagggcagaggagggtcatgtcccttcagctgggggaggggcccagtgagaggacctctgttcatatcccacgcctgggctcttgccagcagtggagttactgtagagggatgtcccaagcttgttttccaatcagtgttaagctgtttgaaactctcctgtgtctgtgttttgtttgtgcgtgtgtgtgagagcacatcagtgtgtgcaggctgtgtttccccatttctctcctcccttcagacccatcattgagaacaaatgtaagaaatcccttcccaccaccctccctgcctcccaggccctctgcgggggaaacaagatcacccagcatccttccccaccccagctgtgtatttatatagatggaaatatactttatattttgtatcatcgtgcctatagccgctgccaccgtgtataaatcctggtgtatgctccttatcctggacatgaatgtattgtacactgacgcgtccccactcctgtacagctgctttgtttctttgcaatgcattgtatggctttataaatgataaagttaagaaaaaactcagaaacgaaatcta

SEQ ID NO: 318043 - DNA, 9339 bp, Homo sapiens
  misc_feature (3737)..(3737): n is a, c, g, or t
  misc_feature (3848)..(3848): n is a, c, g, or t
ctgctccttgcaccccgctccctgcctggacacaggctcactcgctgccttcttctgggggaaaccagcttcttgccagccacagctgctgcctccgccactggccaccgcccctgtcctgggagtcccttggcccagacacccacctgacttagtggctcctctgcaggaaaggtggctgccccctgcgttcctccatccaaccatgagctggtgcccatcaccactgagaatgcaccaaagaatgtagtggacaagggagaaggaggctcccggggtggaaacacacggaaaagcctcgaggacaacggctccaccagggtcaccccgagtgtccagccccacctccagcccatcagaaacatgagtgtgagccggaccatggaggacagctgtgagctggacctggtgtacgtcacagagaggatcatcgctgtctccttccccagcacagccaatgaggagaacttccggagcaacctccgtgaggtggcgcagatgctcaagtccaaacatggaggcaactacctgctttcaacctctctgagcggagacctgacatcacgaagctccatgccaaggtactggaatttggctggcccgacctccacaccccagccctggagaagatctgcagcatctgtaaggccatggacacatggctcaatgcagaccctcacaatgtcgttgttctacacaacaagggaaaccgaggcaggataggagttgtcatcgcggcttacatgcactacagcaacatttctgccagtgcggaccaggctctggaccggtttgcaatgaagcggttctatgaggataagattgtgcccattggccagccatcccaaagaaggtacgtgcattacttcagtggcctgctctccggctccatcaaaatgaacaacaagcccttgtttctgcaccacgtgatcatgcacggcatccccaactttgagtctaaaggaggatgtcggccatttctccgcatctaccaggccatgcaacctgtgtacacatctggcatctacaacatcccaggagacagccagactagcgtctgcatcaccatcgagccaggactgctcttgaagggagacatcttgctgaagtgctaccacaagaagttccgaagcccagcccgagacgtcatcttccgtgtgcagttccacacctgtgccatccatgacctgggggttgtctttgggaaggaggaccttgatgatgctttcaaagatgatcgatttccagagtatggcaaagtggagtttgtattttcttatgggccagagaaaattcaaggcatggagcacctggagaacgggccgagcgtgtctgtggactataacacctctgaccccctcatccgctgggactcctacgacaacttcagtgggcatcgagatgacggcatggaggaggtggtgggacacacgcaggggccactagatgggagcctgtatgctaaggtgaagaagaaagactccctgcacggcagcaccggggctgttaatgccacacgtcctacactgtcggccacccccaaccacgtggaacacacgctttctgtgagcagcgactcgggcaactccacagcctccaccaagaccgacaagaccgacgagcctgtccccggggcctccagtgccactgctgccttgagtccccaggagaagcgggagctggaccgcctgctgagtggctttggcttagagcgagagaagcaaggcgccatgtaccacacccagcacctcaggtcccgcccagcagggggctcggctgtgccctcctctggacgccacgttgtcccagcccaggttcatgtcaatggtggggcgttagcatctgagcgggagacagacatcctggacgatgaattgccaaaccaggatggtcacagtgcgggcagcatgggcacactctcttctctggacggggtcaccaacaccagtgaggggggctacccagaggccctgtccccactgaccaacggtctggacaagtcctaccccatggagcctatggtcaatggaggaggctacccctacgagtctgccagccgggcggggcctgcccatgctggccacacggcccccatgcggccctcctactctgcacaggagggtttagctggctaccagagggaggggccccacccagcctggccacagccagtgaccacctcccactatgcccatgaccccagcggtatgttccgctctcaatccttttcggaagctgaaccccagctgcccccagctccggtccgagggggaagcagccgggaggctgtgcaaaggggactgaattcgtggcagcagcagcagcagcagcagcagcagcctcgcccacctccacgccagcaggaaagagcccacttggagagtcttgtagccagcaggcccagccctcagccattggcagagacccccatccccagtctccctgagttcccgcgagcagcctcccagcaggagattgaacagtccatcgaaacactcaatatgctgatgctggacctggagccagcctccgctgctgccccactacacaagtcccagagtgtccccggggcctggccaggggcttctccactctcctcccagcccctctctggatcctcccgtcagtcccatccactgacccagtccagatctggctatatccccagtgggcattcgttgggaacccctgagccagccccacgggcctctctggagtctgtccctcctggcaggtcttactcaccttatgactatcagccatgtttggctgggcctaaccaggatttccattcaaagagcccagcctcttcctccttgcctgccttccttccgaccacccacagccctccagggcctcagcaacccccagcctctctccctggcctcactgctcagcctctgctctcaccaaaggaagcgacttcagacccctcccggactccagaggaggagccattgaatttagaagggctggtggcccacagggtagcaggggtacaggctcgggagaagcagcctgcagagcccccagcccctctgcggaggcgggcggccagtgatggacagtatgagaaccagtctccagaagccacatcccctcgtagccctggggttcgctcccctgtccagtgtgtctccccggagctggctcttaccatcgctctcaatcctggagggcggcccaaagagccccatttgcacagctacaaggaggccttcgaggagatggagggaacctccccgagcagcccaccacccagtggggtgcggtcccccccgggtctggccaagacacccctgtctgctctgggcctgaaacctcacaacccagcggacatcctgttgcaccccacaggagttaccagaagacggatccagccagaggaagatgaggggaaggtggtggtcaggctgtcagaagagccccggagctatgtggagtctgtggcacggacagcggtggctggaccccgagctcaggactctgagcccaagagctttagtgctccagccacccaggcctatggccatgagatacccctgaggaacgggaccctgggtggctcctttgtctcccccagccccctctccaccagcagccccatcctcagtgctgacagcacttcagtggggagtttcccgtcgggagagagcagtgaccagggtccccggacgcccacccagcctctgttggagtctggcttccgctcaggcagcctgggacagcccagcccntctgcccagagaaactaccagagctcttctcctctcccgactgtgggcagtagctacagcagccccgactactcacttcagcatttcagctcctctccggaaagccaggcncgagctcagttcagtgtggctggcgtccacacggtgcctgggagccctcaggcgcgccacagaacagtgggcaccaacactccccctagtcctggcttcggccggcgggccatcaatcccagcatggctgcccccagcagtcccagtttgagccatcaccagatgatgggtccaccaggcactggcttccatggtagcactgtctccagcccccagagcagtgcagcgaccaccccggggagccccagcctgtgtcggcacccagcaggggtctaccaggtttctggcctccacaacaaagtggccaccaccccggggagtcccagcctgggccggcaccctggggctcaccaaggcaacctggcctccggtcttcatagcaatgcaatagccagccctggaagccccagcctgggccgtcacctcggagggtctggatctgtggttcccggcagcccctgcttggaccggcatgtggcctatggtggctattctaccccggaggatcggagacccacactgtcccggcagagcagtgcctctggctaccaggctccttccacgccctccttccctgtctcccctgcctactaccctggcctgagcagccctgccacctccccgtcaccagactccgcagccttccggcaagggagcccaacaccagccttgccagagaagcgaaggatgtcagtgggagaccgggcaggcagcctccccaactatgccaccatcaatgggaaggtgtcttcgcctgtcgccagcggcatgtccagtcccagtgggggcagcaccgtctccttctcccacactctgcccgacttctccaagtactccatgccagacaacagcccggagacgcgggctaaagtgaagtttgtccaggacacttctaagtattggtacaagcctgagatctccagggagcaggccatcgcgctcctcaaggaccaggagccgggggccttcatcatccgcgacagtcactccttccgaggcgcgtacgggctggccatgaaggtgtcttcgccacctccaaccatcatgcagcagaataaaaaaggagacatgacccatgagctggtcaggcattttctgatagagactggccccagaggagtcaagctcaagggctgccccaatgagccaaacttcggatcgctgtctgccctggtctaccagcactccatcatcccattggccctgccttgcaagctggtcattccaaaccgagaccccacagatgaatcgaaagatagctccggccctgccaactcaactgcagacctgctgaaacaaggggcagcctgcaatgtgctcttcatcaactctgtggacatggagtcactcactgggccacaggccatctctaaagccacatctgagacgttggctgcagaccccacgccagctgccaccatcgttcacttcaaagtctctgcccagggaatcactctgactgacaaccagagaaagctctttttcagacgccactaccctctcaacactgtcaccttctgtgacctggatccacaggaaagaaagtggatgaaaacagagggtggtgcccctgctaagctcttcggcttcgtggcccggaagcagggcagcaccacggacaacgcctgccacctctttgctgagcttgaccccaaccagccggcctctgccatcgtcaacttcgtctccaaggtcatgctgaatgccggccaaaagagatgaaccctgccccttgcccagggccagtgccatggggaaggggcttgtggggaggggacccatgaatcctgaccactcttgaacccagaaggaggactttgggccaatttcggaggagagaagaaagtgcaacgtggggagagggaagtgaattgcagaggggagggggaagagagagagagagagagagagagagagagagagagagagaaagatggaggagaagaacttggattcccctgggtagatggaaactgcaaaaacccaaagcctccaaaactaaccaggtccacctaacaccccctccctcccctaagaagatggatgtcctcaaaagagaaggaacaaacctccttgggaatccacattttttgggggaatggaaaagctctgtctccctaactcaactgctttgcaaggggaaatcaagctgggagaatctttttctggccacctgtagggtaggttgtcaaaccaaacagagccaccgtgggacatcaagtggaagaacttgtttgcttgaaagtatctcagacccaaggcacctcaggtctctttgctgtgcctccactatattgtcgtgtgggtgtgtgtctgcacccacatcctcacacattgatctagatctgcctttatccactcgaattataaacagctcggcttgtccttgtcccatgtgtttgtagacacacatgcatactgtccaaagattagggttggtggtggcagtgcagcaggggagggacaaacaaccaagctatgggtgacagaggctctctcctggtgcctgcacctgcactctagtgaccctgggtgccgccagacccttctcttctacaaagaccccagcaggagtgggagggtctgcaatggcatcgccctgtcctgccttggccagaagcctggagctttggtttgaggaggtagagatatgtgtatccataggaagagatctgtcagaacaggcagctgttgagctcggggtgtcttccccaaggcatgtggctcagcagcaagaaaggcaagttgctcctgctggggccctggactctgccttagctcccacctctcagccttgttattgggtttcatgcccctggaccagccttatctcagacctgcttacctgcatgatgcctttttgggggctggggattgagtcttgctgctctgcccagccctgttctattctgcagggtccctgtgttggaattctccctggggaacctactttctgctcagtgaggctccggccagaaacctggagtccttatcctcccctctgtaagtgttttagggtctggcttttgcaggcaccctctgacctcagcagagctcctgggcctgctgcctgcacaccacatcgcctacctacaatgccaaagcctcactgtcaccctttctgccttggtttccctagctgagccacgctgcccatgcagcagagggcagaaggcttgcacttgggccaaagggcctaaggtccactggacagttgggaaaacacctgaccaccatttaaggactctaagccagaatggaaaattcaccaggactccattcttaagcctatgcgagtcccctagagagaggcattgtactgatatataaatattatataatatatacatgagacatactgacagaatctgtaagctaataaaatgtaagaaaaggttaaaaaaagaataggtaaattgacaagaagtatttattgtttttccatattgctttattgccttccttggggataaaccaattcctatccttttttatatgtgtaagtaaagcctgaagtgtagggggcctttgttcttgaagcagccagggtctccttgccctggccttggccttccctagactgtgtggggctcagcattgggaggggttgcacatgtcccagcctttggcccccttacttttcagcaagccaggggcccagcagtcagctcccaggatgtgtggggagctgtccctgactctgcaggcctgagcgagtgtgtgagcatgcggggacatgggtgtgtatggcacacataggtgcgtgtgtgtcttttgtattttttctcctccaaggagctgtgtcagtgtggacgttctgtttcagggagttggaaaggagggtgtctgcagaaggtggagagcaggggcagaggccccactggccaccccctgcttcccagagtgaaaccttgtgcctggtgaccaaagtccctccaaagtgctcttccttctgggttattcaagccaaatatctgggtttccccctctcctcattccctagcaaaccccaattatcttccaagataggagatatttcccatccccttcctttgtaaatatctcatctcccactggagagcccaggagcctattcctggcatggatgttctgtccacacttgaggctgggcggtgtatcagacccttcaagcagcctggctggggcccaggactgagtctggggtcagctttcacggtcgcttttcccttcctcaccacccaccacagcccaccttgcatgcatggccagcccctccactccagcctgagccatgtgtgcccctgcgggaggacccattcatgccagaaagctggtaactccctcccagcatccctgcggaaggagtcagtttctgagagtgtgacttttcaaggcgaatgatggggaagggttccccagtccccacagtggccccacctctgggccctgcaccagagcccttctgtgtcacggcgggctgtgcacccatgcacacacctacgcacacacaacactccgcactgcagtatattcttgccaaagatttcctttaaaagcaagcacttttactaattattattttgtaaatgtttatcttcttctgtcttctccctccctgaatctattttactgttgtttattgttgaatctgtgtgtcagccaggagagcgctgtctggccttgaacatgggctgggatgggaaagggtctgggagaagatgggcaacaaagagccagggagtcatggacatcgcagcgacgcagaccccagcaggttcagtcccgtgctgccaccagctgtccagctgggtgtctggagggaagagggcagaggagggtcatgtcccttcagctgggggaggggcccagtgagctccacgtggctttttcccaaagggagcaagagggaaggattgggcgagaaaacaatggagaggggacctgcgaaggaaaacagggaggaagtgagcggtttgatcagcctgctatcacggtgttctggctctcttatttagccaggcgcttaagggacagatacatcacatcctaagtttgggaaaggcctttgacccatgtcatctgagcgtctcctccagtagctctgaaagctgtggacaccaatggccaggattccttctcccctggtttttgaggatccctgggtcttctgagactggccaggagagggatggtggggccagtggttgtgtgaaagcaggaggggcagccctcctggacaagtgtgatccccctataaacggctctcaggaggttagtgagtaggagattctgccttgttctgatgagcctgtgcaggggctccaggggagcatgctgtccagggggcacagaagggtggtgagtgtgatcaaatctagtctcactcccactttttagtctcactcctacttttgcgtccccactcctgtacagctgctttgtttctttgcaatgcattgtatggctttataaatgataaagttaagaaaaaactcagaaacgaaatcta

SEQ ID NO: 318044 - DNA, 8088 bp, Homo sapiens
  misc_feature (3737)..(3737): n is a, c, g, or t
  misc_feature (3848)..(3848): n is a, c, g, or t
ctgctccttgcaccccgctccctgcctggacacaggctcactcgctgccttcttctgggggaaaccagcttcttgccagccacagctgctgcctccgccactggccaccgcccctgtcctgggagtcccttggcccagacacccacctgacttagtggctcctctgcaggaaaggtggctgccccctgcgttcctccatccaaccatgagctggtgcccatcaccactgagaatgcaccaaagaatgtagtggacaagggagaaggaggctcccggggtggaaacacacggaaaagcctcgaggacaacggctccaccagggtcaccccgagtgtccagccccacctccagcccatcagaaacatgagtgtgagccggaccatggaggacagctgtgagctggacctggtgtacgtcacagagaggatcatcgctgtctccttccccagcacagccaatgaggagaacttccggagcaacctccgtgaggtggcgcagatgctcaagtccaaacatggaggcaactacctgctttcaacctctctgagcggagacctgacatcacgaagctccatgccaaggtactggaatttggctggcccgacctccacaccccagccctggagaagatctgcagcatctgtaaggccatggacacatggctcaatgcagaccctcacaatgtcgttgttctacacaacaagggaaaccgaggcaggataggagttgtcatcgcggcttacatgcactacagcaacatttctgccagtgcggaccaggctctggaccggtttgcaatgaagcggttctatgaggataagattgtgcccattggccagccatcccaaagaaggtacgtgcattacttcagtggcctgctctccggctccatcaaaatgaacaacaagcccttgtttctgcaccacgtgatcatgcacggcatccccaactttgagtctaaaggaggatgtcggccatttctccgcatctaccaggccatgcaacctgtgtacacatctggcatctacaacatcccaggagacagccagactagcgtctgcatcaccatcgagccaggactgctcttgaagggagacatcttgctgaagtgctaccacaagaagttccgaagcccagcccgagacgtcatcttccgtgtgcagttccacacctgtgccatccatgacctgggggttgtctttgggaaggaggaccttgatgatgctttcaaagatgatcgatttccagagtatggcaaagtggagtttgtattttcttatgggccagagaaaattcaaggcatggagcacctggagaacgggccgagcgtgtctgtggactataacacctctgaccccctcatccgctgggactcctacgacaacttcagtgggcatcgagatgacggcatggaggaggtggtgggacacacgcaggggccactagatgggagcctgtatgctaaggtgaagaagaaagactccctgcacggcagcaccggggctgttaatgccacacgtcctacactgtcggccacccccaaccacgtggaacacacgctttctgtgagcagcgactcgggcaactccacagcctccaccaagaccgacaagaccgacgagcctgtccccggggcctccagtgccactgctgccttgagtccccaggagaagcgggagctggaccgcctgctgagtggctttggcttagagcgagagaagcaaggcgccatgtaccacacccagcacctcaggtcccgcccagcagggggctcggctgtgccctcctctggacgccacgttgtcccagcccaggttcatgtcaatggtggggcgttagcatctgagcgggagacagacatcctggacgatgaattgccaaaccaggatggtcacagtgcgggcagcatgggcacactctcttctctggacggggtcaccaacaccagtgaggggggctacccagaggccctgtccccactgaccaacggtctggacaagtcctaccccatggagcctatggtcaatggaggaggctacccctacgagtctgccagccgggcggggcctgcccatgctggccacacggcccccatgcggccctcctactctgcacaggagggtttagctggctaccagagggaggggccccacccagcctggccacagccagtgaccacctcccactatgcccatgaccccagcggtatgttccgctctcaatccttttcggaagctgaaccccagctgcccccagctccggtccgagggggaagcagccgggaggctgtgcaaaggggactgaattcgtggcagcagcagcagcagcagcagcagcagcctcgcccacctccacgccagcaggaaagagcccacttggagagtcttgtagccagcaggcccagccctcagccattggcagagacccccatccccagtctccctgagttcccgcgagcagcctcccagcaggagattgaacagtccatcgaaacactcaatatgctgatgctggacctggagccagcctccgctgctgccccactacacaagtcccagagtgtccccggggcctggccaggggcttctccactctcctcccagcccctctctggatcctcccgtcagtcccatccactgacccagtccagatctggctatatccccagtgggcattcgttgggaacccctgagccagccccacgggcctctctggagtctgtccctcctggcaggtcttactcaccttatgactatcagccatgtttggctgggcctaaccaggatttccattcaaagagcccagcctcttcctccttgcctgccttccttccgaccacccacagccctccagggcctcagcaacccccagcctctctccctggcctcactgctcagcctctgctctcaccaaaggaagcgacttcagacccctcccggactccagaggaggagccattgaatttagaagggctggtggcccacagggtagcaggggtacaggctcgggagaagcagcctgcagagcccccagcccctctgcggaggcgggcggccagtgatggacagtatgagaaccagtctccagaagccacatcccctcgtagccctggggttcgctcccctgtccagtgtgtctccccggagctggctcttaccatcgctctcaatcctggagggcggcccaaagagccccatttgcacagctacaaggaggccttcgaggagatggagggaacctccccgagcagcccaccacccagtggggtgcggtcccccccgggtctggccaagacacccctgtctgctctgggcctgaaacctcacaacccagcggacatcctgttgcaccccacaggagttaccagaagacggatccagccagaggaagatgaggggaaggtggtggtcaggctgtcagaagagccccggagctatgtggagtctgtggcacggacagcggtggctggaccccgagctcaggactctgagcccaagagctttagtgctccagccacccaggcctatggccatgagatacccctgaggaacgggaccctgggtggctcctttgtctcccccagccccctctccaccagcagccccatcctcagtgctgacagcacttcagtggggagtttcccgtcgggagagagcagtgaccagggtccccggacgcccacccagcctctgttggagtctggcttccgctcaggcagcctgggacagcccagcccntctgcccagagaaactaccagagctcttctcctctcccgactgtgggcagtagctacagcagccccgactactcacttcagcatttcagctcctctccggaaagccaggcncgagctcagttcagtgtggctggcgtccacacggtgcctgggagccctcaggcgcgccacagaacagtgggcaccaacactccccctagtcctggcttcggccggcgggccatcaatcccagcatggctgcccccagcagtcccagtttgagccatcaccagatgatgggtccaccaggcactggcttccatggtagcactgtctccagcccccagagcagtgcagcgaccaccccggggagccccagcctgtgtcggcacccagcaggggtctaccaggtttctggcctccacaacaaagtggccaccaccccggggagtcccagcctgggccggcaccctggggctcaccaaggcaacctggcctccggtcttcatagcaatgcaatagccagccctggaagccccagcctgggccgtcacctcggagggtctggatctgtggttcccggcagcccctgcttggaccggcatgtggcctatggtggctattctaccccggaggatcggagacccacactgtcccggcagagcagtgcctctggctaccaggctccttccacgccctccttccctgtctcccctgcctactaccctggcctgagcagccctgccacctccccgtcaccagactccgcagccttccggcaagggagcccaacaccagccttgccagagaagcgaaggatgtcagtgggagaccgggcaggcagcctccccaactatgccaccatcaatgggaaggtgtcttcgcctgtcgccagcggcatgtccagtcccagtgggggcagcaccgtctccttctcccacactctgcccgacttctccaagtactccatgccagacaacagcccggagacgcgggctaaagtgaagtttgtccaggacacttctaagtattggtacaagcctgagatctccagggagcaggccatcgcgctcctcaaggaccaggagccgggggccttcatcatccgcgacagtcactccttccgaggcgcgtacgggctggccatgaaggtgtcttcgccacctccaaccatcatgcagcagaataaaaaaggagacatgacccatgagctggtcaggcattttctgatagagactggccccagaggagtcaagctcaagggctgccccaatgagccaaacttcggatcgctgtctgccctggtctaccagcactccatcatcccattggccctgccttgcaagctggtcattccaaaccgagaccccacagatgaatcgaaagatagctccggccctgccaactcaactgcagacctgctgaaacaaggggcagcctgcaatgtgctcttcatcaactctgtggacatggagtcactcactgggccacaggccatctctaaagccacatctgagacgttggctgcagaccccacgccagctgccaccatcgttcacttcaaagtctctgcccagggaatcactctgactgacaaccagagaaagctctttttcagacgccactaccctctcaacactgtcaccttctgtgacctggatccacaggaaagaaagtggatgaaaacagagggtggtgcccctgctaagctcttcggcttcgtggcccggaagcagggcagcaccacggacaacgcctgccacctctttgctgagcttgaccccaaccagccggcctctgccatcgtcaacttcgtctccaaggtcatgctgaatgccggccaaaagagatgaaccctgccccttgcccagggccagtgccatggggaaggggcttgtggggaggggacccatgaatcctgaccactcttgaacccagaaggaggactttgggccaatttcggaggagagaagaaagtgcaacgtggggagagggaagtgaattgcagaggggagggggaagagagagagagagagagagagagagagagagagagagagaaagatggaggagaagaacttggattcccctgggtagatggaaactgcaaaaacccaaagcctccaaaactaaccaggtccacctaacaccccctccctcccctaagaagatggatgtcctcaaaagagaaggaacaaacctccttgggaatccacattttttgggggaatggaaaagctctgtctccctaactcaactgctttgcaaggggaaatcaagctgggagaatctttttctggccacctgtagggtaggttgtcaaaccaaacagagccaccgtgggacatcaagtggaagaacttgtttgcttgaaagtatctcagacccaaggcacctcaggtctctttgctgtgcctccactatattgtcgtgtgggtgtgtgtctgcacccacatcctcacacattgatctagatctgcctttatccactcgaattataaacagctcggcttgtccttgtcccatgtgtttgtagacacacatgcatactgtccaaagattagggttggtggtggcagtgcagcaggggagggacaaacaaccaagctatgggtgacagaggctctctcctggtgcctgcacctgcactctagtgaccctgggtgccgccagacccttctcttctacaaagaccccagcaggagtgggagggtctgcaatggcatcgccctgtcctgccttggccagaagcctggagctttggtttgaggaggtagagatatgtgtatccataggaagagatctgtcagaacaggcagctgttgagctcggggtgtcttccccaaggcatgtggctcagcagcaagaaaggcaagttgctcctgctggggccctggactctgccttagctcccacctctcagccttgttattgggtttcatgcccctggaccagccttatctcagacctgcttacctgcatgatgcctttttgggggctggggattgagtcttgctgctctgcccagccctgttctattctgcagggtccctgtgttggaattctccctggggaacctactttctgctcagtgaggctccggccagaaacctggagtccttatcctcccctctgtaagtgttttagggtctggcttttgcaggcaccctctgacctcagcagagctcctgggcctgctgcctgcacaccacatcgcctacctacaatgccaaagcctcactgtcaccctttctgccttggtttccctagctgagccacgctgcccatgcagcagagggcagaaggcttgcacttgggccaaagggcctaaggtccactggacagttgggaaaacacctgaccaccatttaaggactctaagccagaatggaaaattcaccaggactccattcttaagcctatgcgagtcccctagagagaggcattgtactgatatataaatattatataatatatacatgagacatactgacagaatctgtaagctaataaaatgtaagaaaaggttaaaaaaagaataggtaaattgacaagaagtatttattgtttttccatattgctttattgccttccttggggataaaccaattcctatccttttttatatgtgtaagtaaagcctgaagtgtagggggcctttgttcttgaagcagccagggtctccttgccctggccttggccttccctagactgtgtggggctcagcattgggaggggttgcacatgtcccagcctttggcccccttacttttcagcaagccaggggcccagcagtcagctcccaggatgtgtggggagctgtccctgactctgcaggcctgagcgagtgtgtgagcatgcggggacatgggtgtgtatggcacacataggtgcgtgtgtgtcttttgtattttttctcctccaaggagctgtgtcagtgtggacgttctgtttcagggagttggaaaggagggtgtctgcagaaggtggagagcaggggcagaggccccactggccaccccctgcttcccagagtgaaaccttgtgcctggtgaccaaagtccctccaaagtgctcttcccaccaccctccctgcctcccaggccctctgcgggggaaacaagatcacccagcatccttccccaccccagctgtgtatttatatagatggaaatatactttatattttgtatcatcgtgcctatagccgctgccaccgtgtataaatcctggtgtatgctccttatcctggacatgaatgtattgtacactgacgcgtccccactcctgtacagctgctttgtttctttgcaatgcattgtatggctttataaatgataaagttaagaaaaaactcagaaacgaaatcta

SEQ ID NO: 318045 - DNA, 8698 bp, Homo sapiens
  misc_feature (3737)..(3737): n is a, c, g, or t
  misc_feature (3848)..(3848): n is a, c, g, or t
ctgctccttgcaccccgctccctgcctggacacaggctcactcgctgccttcttctgggggaaaccagcttcttgccagccacagctgctgcctccgccactggccaccgcccctgtcctgggagtcccttggcccagacacccacctgacttagtggctcctctgcaggaaaggtggctgccccctgcgttcctccatccaaccatgagctggtgcccatcaccactgagaatgcaccaaagaatgtagtggacaagggagaaggaggctcccggggtggaaacacacggaaaagcctcgaggacaacggctccaccagggtcaccccgagtgtccagccccacctccagcccatcagaaacatgagtgtgagccggaccatggaggacagctgtgagctggacctggtgtacgtcacagagaggatcatcgctgtctccttccccagcacagccaatgaggagaacttccggagcaacctccgtgaggtggcgcagatgctcaagtccaaacatggaggcaactacctgctttcaacctctctgagcggagacctgacatcacgaagctccatgccaaggtactggaatttggctggcccgacctccacaccccagccctggagaagatctgcagcatctgtaaggccatggacacatggctcaatgcagaccctcacaatgtcgttgttctacacaacaagggaaaccgaggcaggataggagttgtcatcgcggcttacatgcactacagcaacatttctgccagtgcggaccaggctctggaccggtttgcaatgaagcggttctatgaggataagattgtgcccattggccagccatcccaaagaaggtacgtgcattacttcagtggcctgctctccggctccatcaaaatgaacaacaagcccttgtttctgcaccacgtgatcatgcacggcatccccaactttgagtctaaaggaggatgtcggccatttctccgcatctaccaggccatgcaacctgtgtacacatctggcatctacaacatcccaggagacagccagactagcgtctgcatcaccatcgagccaggactgctcttgaagggagacatcttgctgaagtgctaccacaagaagttccgaagcccagcccgagacgtcatcttccgtgtgcagttccacacctgtgccatccatgacctgggggttgtctttgggaaggaggaccttgatgatgctttcaaagatgatcgatttccagagtatggcaaagtggagtttgtattttcttatgggccagagaaaattcaaggcatggagcacctggagaacgggccgagcgtgtctgtggactataacacctctgaccccctcatccgctgggactcctacgacaacttcagtgggcatcgagatgacggcatggaggaggtggtgggacacacgcaggggccactagatgggagcctgtatgctaaggtgaagaagaaagactccctgcacggcagcaccggggctgttaatgccacacgtcctacactgtcggccacccccaaccacgtggaacacacgctttctgtgagcagcgactcgggcaactccacagcctccaccaagaccgacaagaccgacgagcctgtccccggggcctccagtgccactgctgccttgagtccccaggagaagcgggagctggaccgcctgctgagtggctttggcttagagcgagagaagcaaggcgccatgtaccacacccagcacctcaggtcccgcccagcagggggctcggctgtgccctcctctggacgccacgttgtcccagcccaggttcatgtcaatggtggggcgttagcatctgagcgggagacagacatcctggacgatgaattgccaaaccaggatggtcacagtgcgggcagcatgggcacactctcttctctggacggggtcaccaacaccagtgaggggggctacccagaggccctgtccccactgaccaacggtctggacaagtcctaccccatggagcctatggtcaatggaggaggctacccctacgagtctgccagccgggcggggcctgcccatgctggccacacggcccccatgcggccctcctactctgcacaggagggtttagctggctaccagagggaggggccccacccagcctggccacagccagtgaccacctcccactatgcccatgaccccagcggtatgttccgctctcaatccttttcggaagctgaaccccagctgcccccagctccggtccgagggggaagcagccgggaggctgtgcaaaggggactgaattcgtggcagcagcagcagcagcagcagcagcagcctcgcccacctccacgccagcaggaaagagcccacttggagagtcttgtagccagcaggcccagccctcagccattggcagagacccccatccccagtctccctgagttcccgcgagcagcctcccagcaggagattgaacagtccatcgaaacactcaatatgctgatgctggacctggagccagcctccgctgctgccccactacacaagtcccagagtgtccccggggcctggccaggggcttctccactctcctcccagcccctctctggatcctcccgtcagtcccatccactgacccagtccagatctggctatatccccagtgggcattcgttgggaacccctgagccagccccacgggcctctctggagtctgtccctcctggcaggtcttactcaccttatgactatcagccatgtttggctgggcctaaccaggatttccattcaaagagcccagcctcttcctccttgcctgccttccttccgaccacccacagccctccagggcctcagcaacccccagcctctctccctggcctcactgctcagcctctgctctcaccaaaggaagcgacttcagacccctcccggactccagaggaggagccattgaatttagaagggctggtggcccacagggtagcaggggtacaggctcgggagaagcagcctgcagagcccccagcccctctgcggaggcgggcggccagtgatggacagtatgagaaccagtctccagaagccacatcccctcgtagccctggggttcgctcccctgtccagtgtgtctccccggagctggctcttaccatcgctctcaatcctggagggcggcccaaagagccccatttgcacagctacaaggaggccttcgaggagatggagggaacctccccgagcagcccaccacccagtggggtgcggtcccccccgggtctggccaagacacccctgtctgctctgggcctgaaacctcacaacccagcggacatcctgttgcaccccacaggagttaccagaagacggatccagccagaggaagatgaggggaaggtggtggtcaggctgtcagaagagccccggagctatgtggagtctgtggcacggacagcggtggctggaccccgagctcaggactctgagcccaagagctttagtgctccagccacccaggcctatggccatgagatacccctgaggaacgggaccctgggtggctcctttgtctcccccagccccctctccaccagcagccccatcctcagtgctgacagcacttcagtggggagtttcccgtcgggagagagcagtgaccagggtccccggacgcccacccagcctctgttggagtctggcttccgctcaggcagcctgggacagcccagcccntctgcccagagaaactaccagagctcttctcctctcccgactgtgggcagtagctacagcagccccgactactcacttcagcatttcagctcctctccggaaagccaggcncgagctcagttcagtgtggctggcgtccacacggtgcctgggagccctcaggcgcgccacagaacagtgggcaccaacactccccctagtcctggcttcggccggcgggccatcaatcccagcatggctgcccccagcagtcccagtttgagccatcaccagatgatgggtccaccaggcactggcttccatggtagcactgtctccagcccccagagcagtgcagcgaccaccccggggagccccagcctgtgtcggcacccagcaggggtctaccaggtttctggcctccacaacaaagtggccaccaccccggggagtcccagcctgggccggcaccctggggctcaccaaggcaacctggcctccggtcttcatagcaatgcaatagccagccctggaagccccagcctgggccgtcacctcggagggtctggatctgtggttcccggcagcccctgcttggaccggcatgtggcctatggtggctattctaccccggaggatcggagacccacactgtcccggcagagcagtgcctctggctaccaggctccttccacgccctccttccctgtctcccctgcctactaccctggcctgagcagccctgccacctccccgtcaccagactccgcagccttccggcaagggagcccaacaccagccttgccagagaagcgaaggatgtcagtgggagaccgggcaggcagcctccccaactatgccaccatcaatgggaaggtgtcttcgcctgtcgccagcggcatgtccagtcccagtgggggcagcaccgtctccttctcccacactctgcccgacttctccaagtactccatgccagacaacagcccggagacgcgggctaaagtgaagtttgtccaggacacttctaagtattggtacaagcctgagatctccagggagcaggccatcgcgctcctcaaggaccaggagccgggggccttcatcatccgcgacagtcactccttccgaggcgcgtacgggctggccatgaaggtgtcttcgccacctccaaccatcatgcagcagaataaaaaaggagacatgacccatgagctggtcaggcattttctgatagagactggccccagaggagtcaagctcaagggctgccccaatgagccaaacttcggatcgctgtctgccctggtctaccagcactccatcatcccattggccctgccttgcaagctggtcattccaaaccgagaccccacagatgaatcgaaagatagctccggccctgccaactcaactgcagacctgctgaaacaaggggcagcctgcaatgtgctcttcatcaactctgtggacatggagtcactcactgggccacaggccatctctaaagccacatctgagacgttggctgcagaccccacgccagctgccaccatcgttcacttcaaagtctctgcccagggaatcactctgactgacaaccagagaaagctctttttcagacgccactaccctctcaacactgtcaccttctgtgacctggatccacaggaaagaaagtggatgaaaacagagggtggtgcccctgctaagctcttcggcttcgtggcccggaagcagggcagcaccacggacaacgcctgccacctctttgctgagcttgaccccaaccagccggcctctgccatcgtcaacttcgtctccaaggtcatgctgaatgccggccaaaagagatgaaccctgccccttgcccagggccagtgccatggggaaggggcttgtggggaggggacccatgaatcctgaccactcttgaacccagaaggaggactttgggccaatttcggaggagagaagaaagtgcaacgtggggagagggaagtgaattgcagaggggagggggaagagagagagagagagagagagagagagagagagagagagaaagatggaggagaagaacttggattcccctgggtagatggaaactgcaaaaacccaaagcctccaaaactaaccaggtccacctaacaccccctccctcccctaagaagatggatgtcctcaaaagagaaggaacaaacctccttgggaatccacattttttgggggaatggaaaagctctgtctccctaactcaactgctttgcaaggggaaatcaagctgggagaatctttttctggccacctgtagggtaggttgtcaaaccaaacagagccaccgtgggacatcaagtggaagaacttgtttgcttgaaagtatctcagacccaaggcacctcaggtctctttgctgtgcctccactatattgtcgtgtgggtgtgtgtctgcacccacatcctcacacattgatctagatctgcctttatccactcgaattataaacagctcggcttgtccttgtcccatgtgtttgtagacacacatgcatactgtccaaagattagggttggtggtggcagtgcagcaggggagggacaaacaaccaagctatgggtgacagaggctctctcctggtgcctgcacctgcactctagtgaccctgggtgccgccagacccttctcttctacaaagaccccagcaggagtgggagggtctgcaatggcatcgccctgtcctgccttggccagaagcctggagctttggtttgaggaggtagagatatgtgtatccataggaagagatctgtcagaacaggcagctgttgagctcggggtgtcttccccaaggcatgtggctcagcagcaagaaaggcaagttgctcctgctggggccctggactctgccttagctcccacctctcagccttgttattgggtttcatgcccctggaccagccttatctcagacctgcttacctgcatgatgcctttttgggggctggggattgagtcttgctgctctgcccagccctgttctattctgcagggtccctgtgttggaattctccctggggaacctactttctgctcagtgaggctccggccagaaacctggagtccttatcctcccctctgtaagtgttttagggtctggcttttgcaggcaccctctgacctcagcagagctcctgggcctgctgcctgcacaccacatcgcctacctacaatgccaaagcctcactgtcaccctttctgccttggtttccctagctgagccacgctgcccatgcagcagagggcagaaggcttgcacttgggccaaagggcctaaggtccactggacagttgggaaaacacctgaccaccatttaaggactctaagccagaatggaaaattcaccaggactccattcttaagcctatgcgagtcccctagagagaggcattgtactgatatataaatattatataatatatacatgagacatactgacagaatctgtaagctaataaaatgtaagaaaaggttaaaaaaagaataggtaaattgacaagaagtatttattgtttttccatattgctttattgccttccttggggataaaccaattcctatccttttttatatgtgtaagtaaagcctgaagtgtagggggcctttgttcttgaagcagccagggtctccttgccctggccttggccttccctagactgtgtggggctcagcattgggaggggttgcacatgtcccagcctttggcccccttacttttcagcaagccaggggcccagcagtcagctcccaggatgtgtggggagctgtccctgactctgcaggcctgagcgagtgtgtgagcatgcggggacatgggtgtgtatggcacacataggtgcgtgtgtgtcttttgtattttttctcctccaaggagctgtgtcagtgtggacgttctgtttcagggagttggaaaggagggtgtctgcagaaggtggagagcaggggcagaggccccactggccaccccctgcttcccagagtgaaaccttgtgcctggtgaccaaagtccctccaaagtgctcttccttctgggttattcaagccaaatatctgggtttccccctctcctcattccctagcaaaccccaattatcttccaagataggagatatttcccatccccttcctttgtaaatatctcatctcccactggagagcccaggagcctattcctggcatggatgttctgtccacacttgaggctgggcggtgtatcagacccttcaagcagcctggctggggcccaggactgagtctggggtcagctttcacggtcgcttttcccttcctcaccacccaccacagcccaccttgcatgcatggccagcccctccactccagcctgagccatgtgtgcccctgcgggaggacccattcatgccagaaagctggtaactccctcccagcatccctgcggaaggagtcagtttctgagagtgtgacttttcaaggcgaatgatggggaagggttccccagtccccacagtggccccacctctgggccctgcaccagagcccttctgtgtcacggcgggctgtgcacccatgcacacacctacgcacacacaacactccgcactgcagtatattcttgccaaagatttcctttaaaagcaagcacttttactaattattattttgtaaatgtttatcttcttctgtcttctccctccctgaatctattttactgttgtttattgttgaatctgtgtatttatatagatggaaatatactttatattttgtatcatcgtgcctatagccgctgccaccgtgtataaatcctggtgtatgctccttatcctggacatgaatgtattgtacactgacgcgtccccactcctgtacagctgctttgtttctttgcaatgcattgtatggctttataaatgataaagttaagaaaaaactcagaaacgaaatcta

SEQ ID NO: 318046 - DNA, 1385 bp, Homo sapiens
cagccgagacaaacaccaatcggctaggtacgaggctggtgggctcctccagtagctctgaaagctgtggacaccaatggccaggattccttctcccctggtttttgaggatccctgggtcttctgagactggccaggagagggatggtggggccagtggttgtgtgaaagcaggaggggcagccctcctggacaagtgtgatccccctataaacggctctcaggaggttagtgagtaggagattctgccttgttctgatgagcctgtgcaggggctccaggggagcatgctgtccagggggcacagaagggtggtgagtgtgatcaaatctagtctcactcccactttttagtctcactcctacttttgtccaccacccctgcctcctggatcttctcccactttttttttcagctttaggacctggggagatcctgtgagtcaaggcagacacccaatcctgcccccacactcggggtcctccaagaggttggggggcagagtcccagagcagccctttaccccaggtccaggccctggaatcctgagactcgcgtttccttggccagtggtaacacaggacgtgtgtgcgcatgtgcaagtgtggatgtatgtgtgtgcgtgtgttttgctcatttctttagggaacttgggagtcggggttggaggtgctgggcaatggaacttcaaattcaatgtcgcccagcagtgaggggagtcgggaggtgaggcctgtaggccaaccaattggtggagtctcagcgatagcccaggtgagaagtggttcacccagaggggcagggtgggggcctcgggcagatctgtccctcttggcccctctgtcctcaaatgtccaaaatgttggaggacctctgttcatatcccacgcctgggctcttgccagcagtggagttactgtagagggatgtcccaagcttgttttccaatcagtgttaagctgtttgaaactctcctgtgtctgtgttttgtttgtgcgtgtgtgtgagagcacatcagtgtgtgcaggctgtgtttccccatttctctcctcccttcagacccatcattgagaacaaatgtaagaaatcccttcccaccaccctccctgcctcccaggccctctgcgggggaaacaagatcacccagcatccttccccaccccagctgtgtatttatatagatggaaatatactttatattttgtatcatcgtgcctatagccgctgccaccgtgtataaatcctggtgtatgctccttatcctggacatgaatgtattgtacactgacgcgtccccactcctgtacagctgctttgtttctttgcaatgcattgtatggctttataaatgataaagttaagaaaaaactcagaaacgaaatcta

SEQ ID NO: 318047 - DNA, 609 bp, Homo sapiens
ttttttttttttaaaaaaaaattttccccggtacctcccttttttaggggattttgggcccttgagggccaaagtatttcggcccgtgggaggacctctgttcatatcccacgcctgggctcttgccagcagtggagttactgtagagggatgtcccaagcttgttttccaatcagtgttaagctgtttgaaactctcctgtgtctgtgttttgtttgtgcgtgtgtgtgagagcacatcagtgtgtgcaggctgtgtttccccatttctctcctcccttcagacccatcattgagaacaaatgtaagaaatcccttcccaccaccctccctgcctcccaggccctctgcgggggaaacaagatcacccagcatccttccccaccccagctgtgtatttatatagatggaaatatactttatattttgtatcatcgtgcctatagccgctgccaccgtgtataaatcctggtgtatgctccttatcctggacatgaatgtattgtacactgacgcgtccccactcctgtacagctgctttgtttctttgcaatgcattgtatggctttataaatgataaagttaagaaaaaactcagaaacgaaatcta

SEQ ID NO: 318048 - DNA, 5278 bp, Homo sapiens
  misc_feature (3577)..(3577): n is a, c, g, or t
  misc_feature (3688)..(3688): n is a, c, g, or t
ggagccacccagtagtgtctgagtggtgatccactcttgcctgcaatgaggaccaaggcaaaaagagttggctgaatctgcagcaggaaggatgagggttagataccaggaggaacttcctgacagtgagaaaagtaagacactctgtctgggaggctgtcgaatttcctttcatggtgccctttcagcaaaggaaggattgtgttttggagggctccaccagggtcaccccgagtgtccagccccacctccagcccatcagaaacatgagtgtgagccggaccatggaggacagctgtgagctggacctggtgtacgtcacagagaggatcatcgctgtctccttccccagcacagccaatgaggagaacttccggagcaacctccgtgaggtggcgcagatgctcaagtccaaacatggaggcaactacctgctttcaacctctctgagcggagacctgacatcacgaagctccatgccaaggtactggaatttggctggcccgacctccacaccccagccctggagaagatctgcagcatctgtaaggccatggacacatggctcaatgcagaccctcacaatgtcgttgttctacacaacaagggaaaccgaggcaggataggagttgtcatcgcggcttacatgcactacagcaacatttctgccagtgcggaccaggctctggaccggtttgcaatgaagcggttctatgaggataagattgtgcccattggccagccatcccaaagaaggtacgtgcattacttcagtggcctgctctccggctccatcaaaatgaacaacaagcccttgtttctgcaccacgtgatcatgcacggcatccccaactttgagtctaaaggaggatgtcggccatttctccgcatctaccaggccatgcaacctgtgtacacatctggcatctacaacatcccaggagacagccagactagcgtctgcatcaccatcgagccaggactgctcttgaagggagacatcttgctgaagtgctaccacaagaagttccgaagcccagcccgagacgtcatcttccgtgtgcagttccacacctgtgccatccatgacctgggggttgtctttgggaaggaggaccttgatgatgctttcaaagatgatcgatttccagagtatggcaaagtggagtttgtattttcttatgggccagagaaaattcaaggcatggagcacctggagaacgggccgagcgtgtctgtggactataacacctctgaccccctcatccgctgggactcctacgacaacttcagtgggcatcgagatgacggcatggaggaggtggtgggacacacgcaggggccactagatgggagcctgtatgctaaggtgaagaagaaagactccctgcacggcagcaccggggctgttaatgccacacgtcctacactgtcggccacccccaaccacgtggaacacacgctttctgtgagcagcgactcgggcaactccacagcctccaccaagaccgacaagaccgacgagcctgtccccggggcctccagtgccactgctgccttgagtccccaggagaagcgggagctggaccgcctgctgagtggctttggcttagagcgagagaagcaaggcgccatgtaccacacccagcacctcaggtcccgcccagcagggggctcggctgtgccctcctctggacgccacgttgtcccagcccaggttcatgtcaatggtggggcgttagcatctgagcgggagacagacatcctggacgatgaattgccaaaccaggatggtcacagtgcgggcagcatgggcacactctcttctctggacggggtcaccaacaccagtgaggggggctacccagaggccctgtccccactgaccaacggtctggacaagtcctaccccatggagcctatggtcaatggaggaggctacccctacgagtctgccagccgggcggggcctgcccatgctggccacacggcccccatgcggccctcctactctgcacaggagggtttagctggctaccagagggaggggccccacccagcctggccacagccagtgaccacctcccactatgcccatgaccccagcggtatgttccgctctcaatccttttcggaagctgaaccccagctgcccccagctccggtccgagggggaagcagccgggaggctgtgcaaaggggactgaattcgtggcagcagcagcagcagcagcagcagcagcctcgcccacctccacgccagcaggaaagagcccacttggagagtcttgtagccagcaggcccagccctcagccattggcagagacccccatccccagtctccctgagttcccgcgagcagcctcccagcaggagattgaacagtccatcgaaacactcaatatgctgatgctggacctggagccagcctccgctgctgccccactacacaagtcccagagtgtccccggggcctggccaggggcttctccactctcctcccagcccctctctggatcctcccgtcagtcccatccactgacccagtccagatctggctatatccccagtgggcattcgttgggaacccctgagccagccccacgggcctctctggagtctgtccctcctggcaggtcttactcaccttatgactatcagccatgtttggctgggcctaaccaggatttccattcaaagagcccagcctcttcctccttgcctgccttccttccgaccacccacagccctccagggcctcagcaacccccagcctctctccctggcctcactgctcagcctctgctctcaccaaaggaagcgacttcagacccctcccggactccagaggaggagccattgaatttagaagggctggtggcccacagggtagcaggggtacaggctcgggagaagcagcctgcagagcccccagcccctctgcggaggcgggcggccagtgatggacagtatgagaaccagtctccagaagccacatcccctcgtagccctggggttcgctcccctgtccagtgtgtctccccggagctggctcttaccatcgctctcaatcctggagggcggcccaaagagccccatttgcacagctacaaggaggccttcgaggagatggagggaacctccccgagcagcccaccacccagtggggtgcggtcccccccgggtctggccaagacacccctgtctgctctgggcctgaaacctcacaacccagcggacatcctgttgcaccccacaggagagccccggagctatgtggagtctgtggcacggacagcggtggctggaccccgagctcaggactctgagcccaagagctttagtgctccagccacccaggcctatggccatgagatacccctgaggaacgggaccctgggtggctcctttgtctcccccagccccctctccaccagcagccccatcctcagtgctgacagcacttcagtggggagtttcccgtcgggagagagcagtgaccagggtccccggacgcccacccagcctctgttggagtctggcttccgctcaggcagcctgggacagcccagcccntctgcccagagaaactaccagagctcttctcctctcccgactgtgggcagtagctacagcagccccgactactcacttcagcatttcagctcctctccggaaagccaggcncgagctcagttcagtgtggctggcgtccacacggtgcctgggagccctcaggcgcgccacagaacagtgggcaccaacactccccctagtcctggcttcggccggcgggccatcaatcccagcatggctgcccccagcagtcccagtttgagccatcaccagatgatgggtccaccaggcactggcttccatggtagcactgtctccagcccccagagcagtgcagcgaccaccccggggagccccagcctgtgtcggcacccagcaggggtctaccaggtttctggcctccacaacaaagtggccaccaccccggggagtcccagcctgggccggcaccctggggctcaccaaggcaacctggcctccggtcttcatagcaatgcaatagccagccctggaagccccagcctgggccgtcacctcggagggtctggatctgtggttcccggcagcccctgcttggaccggcatgtggcctatggtggctattctaccccggaggatcggagacccacactgtcccggcagagcagtgcctctggctaccaggctccttccacgccctccttccctgtctcccctgcctactaccctggcctgagcagccctgccacctccccgtcaccagactccgcagccttccggcaagggagcccaacaccagccttgccagagaagcgaaggatgtcagtgggagaccgggcaggcagcctccccaactatgccaccatcaatgggaaggtgtcttcgcctgtcgccagcggcatgtccagtcccagtgggggcagcaccgtctccttctcccacactctgcccgacttctccaagtactccatgccagacaacagcccggagacgcgggctaaagtgaagtttgtccaggacacttctaagtattggtacaagcctgagatctccagggagcaggccatcgcgctcctcaaggaccaggagccgggggccttcatcatccgcgacagtcactccttccgaggcgcgtacgggctggccatgaaggtgtcttcgccacctccaaccatcatgcagcagaataaaaaaggagacatgacccatgagctggtcaggcattttctgatagagactggccccagaggagtcaagctcaagggctgccccaatgagccaaacttcggatcgctgtctgccctggtctaccagcactccatcatcccattggccctgccttgcaagctggtcattccaaaccgagaccccacagatgaatcgaaagatagctccggccctgccaactcaactgcagacctgctgaaacaaggggcagcctgcaatgtgctcttcatcaactctgtggacatggagtcactcactgggccacaggccatctctaaagccacatctgagacgttggctgcagaccccacgccagctgccaccatcgttcacttcaaagtctctgcccagggaatcactctgactgacaaccagagaaagtaagactcccctgcctgctcctcggtggggttctccttcctgtgactcatctattcatccgtgtacccacacatttaccacttgattgattccttgcacccaactgctcatcta

SEQ ID NO: 318049 - DNA, 3536 bp, Homo sapiens
ggagccacccagtagtgtctgagtggtgatccactcttgcctgcaatgaggaccaaggcaaaaagagttggctgaatctgcagcaggaaggatgagggttagataccaggaggaacttcctgacagtgagaaaagtaagacactctgtctgggaggctgtcgaatttcctttcatggtgccctttcagcaaaggaaggattgtgttttggagggctccaccagggtcaccccgagtgtccagccccacctccagcccatcagaaacatgagtgtgagccggaccatggaggacagctgtgagctggacctggtgtacgtcacagagaggatcatcgctgtctccttccccagcacagccaatgaggagaacttccggagcaacctccgtgaggtggcgcagatgctcaagtccaaacatggaggcaactacctgctttcaacctctctgagcggagacctgacatcacgaagctccatgccaaggtactggaatttggctggcccgacctccacaccccagccctggagaagatctgcagcatctgtaaggccatggacacatggctcaatgcagaccctcacaatgtcgttgttctacacaacaagggaaaccgaggcaggataggagttgtcatcgcggcttacatgcactacagcaacatttctgccagtgcggaccaggctctggaccggtttgcaatgaagcggttctatgaggataagattgtgcccattggccagccatcccaaagaaggtacgtgcattacttcagtggcctgctctccggctccatcaaaatgaacaacaagcccttgtttctgcaccacgtgatcatgcacggcatccccaactttgagtctaaaggaggatgtcggccatttctccgcatctaccaggccatgcaacctgtgtacacatctggcatctacaacatcccaggagacagccagactagcgtctgcatcaccatcgagccaggactgctcttgaagggagacatcttgctgaagtgctaccacaagaagttccgaagcccagcccgagacgtcatcttccgtgtgcagttccacacctgtgccatccatgacctgggggttgtctttgggaaggaggaccttgatgatgctttcaaagatgatcgatttccagagtatggcaaagtggagtttgtattttcttatgggccagagaaaattcaaggcatggagcacctggagaacgggccgagcgtgtctgtggactataacacctctgaccccctcatccgctgggactcctacgacaacttcagtgggcatcgagatgacggcatggaggaggtggtgggacacacgcaggggccactagatgggagcctgtatgctaaggtgaagaagaaagactccctgcacggcagcaccggggctgttaatgccacacgtcctacactgtcggccacccccaaccacgtggaacacacgctttctgtgagcagcgactcgggcaactccacagcctccaccaagaccgacaagaccgacgagcctgtccccggggcctccagtgccactgctgccttgagtccccaggagaagcgggagctggaccgcctgctgagtggctttggcttagagcgagagaagcaaggcgccatgtaccacacccagcacctcaggtcccgcccagcagggggctcggctgtgccctcctctggacgccacgttgtcccagcccaggttcatgtcaatggtggggcgttagcatctgagcgggagacagacatcctggacgatgaattgccaaaccaggatggtcacagtgcgggcagcatgggcacactctcttctctggacggggtcaccaacaccagtgaggggggctacccagaggccctgtccccactgaccaacggtctggacaagtcctaccccatggagcctatggtcaatggaggaggctacccctacgagtctgccagccgggcggggcctgcccatgctggccacacggcccccatgcggccctcctactctgcacaggagggtttagctggctaccagagggaggggccccacccagcctggccacagccagtgaccacctcccactatgcccatgaccccagcggtatgttccgctctcaatccttttcggaagctgaaccccagctgcccccagctccggtccgagggggaagcagccgggaggctgtgcaaaggggactgaattcgtggcagcagcagcagcagcagcagcagcagcctcgcccacctccacgccagcaggaaagagcccacttggagagtcttgtagccagcaggcccagccctcagccattggcagagacccccatccccagtctccctgagttcccgcgagcagcctcccagcaggagattgaacagtccatcgaaacactcaatatgctgatgctggacctggagccagcctccgctgctgccccactacacaagtcccagagtgtccccggggcctggccaggggcttctccactctcctcccagcccctctctggatcctcccgtcagtcccatccactgacccagtccagatctggctatatccccagtgggcattcgttgggaacccctgagccagccccacgggcctctctggagtctgtccctcctggcaggtcttactcaccttatgactatcagccatgtttggctgggcctaaccaggatttccattcaaagagcccagcctcttcctccttgcctgccttccttccgaccacccacagccctccagggcctcagcaacccccagcctctctccctggcctcactgctcagcctctgctctcaccaaaggaagcgacttcagacccctcccggactccagaggaggagccattgaatttagaagggctggtggcccacagggtagcaggggtacaggctcgggagaagcagcctgcagagcccccagcccctctgcggaggcgggcggccagtgatggacagtatgagaaccagtctccagaagccacatcccctcgtagccctggggttcgctcccctgtccagtgtgtctccccggagctggctcttaccatcgctctcaatcctggagggcggcccaaagagccccatttgcacagctacaaggaggccttcgaggagatggagggaacctccccgagcagcccaccacccagtggggtgcggtcccccccgggtctggccaagacacccctgtctgctctgggcctgaaacctcacaacccagcggacatcctgttgcaccccacaggaggtgagttgggaagagggaagatggggaggggggccagggggaggaggactcctgtggttctggacagaaacccgggtctcagaatctggtcagcagccagctttgtgcccacactgaggtcaggcctgggttggggctctctgtgtaggggttgggggtgacagatttccttgcagccttcctgtctgttgacttgtggagtttgcacaactcccagcctcctctagcttgaggctttggaggcctggtctcagtttccttggtggtgttgag

SEQ ID NO: 318050 - DNA, 356 bp, Homo sapiens
ctccttccccttcctaccccgtcttcccccatttcttccttcctttctctctttctcccttcactgtctcctctgcccctcctgcctgccagtttctgctgtcttagctaacacccaccccacttttacaggatgtcggccatttctccgcatctaccaggccatgcaacctgtgtacacatctggcatctagtaagtattacatgggcgtgagaggccagagaagcccaaggcccagggctaaggaccaggtcagaaggttggggagaggagagaatattctcaagagggctgaaaggacagagtcagagaggtttcccactaaccctgtggcgtaggggcagcagggagaaaat

SEQ ID NO: 318051 - DNA, 290 bp, Homo sapiens
tctttccagctctagggttttaattcctactgaatttttgtcttagaccccacagatgaatcgaaagatagctccggccctgccaactcaactgcagacctgctgaaacaaggggcaggtgagtggtcacctgaaactgtacccatgcccaggcctctctttctgccttcctgccctgacccctcctgcacgtgcaggctggaggtctctccaggcccaaatgtctctgggaagatcacatttctatgtgcagatgccttggctcaaggctagcctgaaatttatctgct

SEQ ID NO: 318052 - DNA, 420 bp, Homo sapiens
tgggaatcttctctgttggatcttgttcaacaagagggtgtgaattttcagctttggtggtgggttgaggtagaggtaataaagaagtggaagattgtgtgtatcggtgtaagggtagaggtggaggtttcccttctggcttccagtatcactgcccatgacatgccgtctgcctccctacaggatcgctgtctgccctggtctaccagcactccatcatcccattggccctgccttgcaagctggtcattccaaaccgaggtaggaacgtgagactcctggctcaccacccacacccttgagctggcccttgtcatgtcttgatcctgccagccactccggacatgggccagggctggaggacacatgtcattttgccagtctggagaaactcaaaactactctccttttcttcctatt

SEQ ID NO: 318053 - DNA, 350 bp, Homo sapiens
tcctgatttacccctatgacccggcatgagccttttcaagaatgtgagaaactagactcccagttctcagtccagcttaagccactggtcccgcccaccacgctcaagaaaatgagaagtccctcagggagcctcttttggggagcttgtgggctttctctgtttttccagctgctgatctcttttccctctctgcactgtctccccgactgccgctgcctttcccatcccacttaggcatggagcacctggagaacgggccgagcgtgtctgtggactataacacctctgaccccctcatccgctgggactcctacgacaacttcagtgggcatcgagatgacggcatg

SEQ ID NO: 318054 - DNA, 396 bp, Homo sapiens
caaaaatgctcattgtcctctacaccctgctttcctcccaggggtacaggctcgggagaagcagcctgcagagcccccagcccctctgcggaggcgggcggccagtgatggacagtatgagaaccagtctccagaagccacatcccctcgtagccctggggttcgctcccctgtccagtgtgtctccccggagctggctcttaccatcgctctcaatcctggagggcggcccaaagaggtgagtccttaagctgtatcttggggctatggagggtagtggtgcccactttaaatctccagaaacctgatggtcaacttggcactgatatcagtatactcagtgatttgtctccccctacgtcctcacccaaactctcttctctgacatgtggagtc

SEQ ID NO: 318055 - DNA, 1613 bp, Homo sapiens
gtctcgccctcttgcagtctgcagcttctcctgtcatcggaaatgccaggccaaggtggctgccccctgcgttcctccatccaaccatgagctggtgcccatcaccactgagaatgcaccaaagaatgtagtggacaagggagaaggaggctcccggggtggaaacacacggaaaagcctcgaggacaacggctccaccagggtcaccccgagtgtccagccccacctccagcccatcagaaacatgagtgtgagccggaccatggaggacagctgtgagctggacctggtgtacgtcacagagaggatcatcgctgtctccttccccagcacagccaatgaggagaacttccggagcaacctttcaacctctctgagcggagacctgacatcacgaagctccatgccaaggtactggaatttggctggcccgacctccacaccccagccctggagaagatctgcagcatctgtaaggccatggacacatggctcaatgcagaccctcacaatgtcgttgttctacacaacaagggaaaccgaggcaggataggagttgtcatcgcggcttacatgcactacagcaacatttctgccagtgcggaccaggctctggaccggtttgcaatgaagcggttctatgaggataagattgtgcccattggccagccatcccaaagaaggtacgtgcattacttcagtggcctgctctccggctccatcaaaatgaacaacaagcccttgtttctgcaccacgtgatcatgcacggcatccccaactttgagtctaaaggaggatgtcggccatttctccgcatctaccaggccatgcaacctgtgtacacatctggcatctacaacatcccaggagacagccagactagcgtctgcatcaccatcgagccaggactgctcttgaagggagacatcttgctgaagtgctaccacaagaagttccgaagcccagcccgagacgtcatcttccgtgtgcagttccacacctgtgccatccatgacctgggggttgtctttgggaaggaggaccttgatgatgctttcaaagatgatcgatttccagagtatggcaaagtggagtttgtattttcttatgggccagagaaaattcaaggcatggagcacctggagaacgggccgagcgtgtctgtggactataacacctctgaccccctcatccgctgggactcctacgacaacttcagtgggcatcgagatgacggcatggaggaggtggtgggacacacgcaggggccactagatgggagcctgtatgctaaggtgaagaagaaagactccctgcacggcagcaccggggctgttaatgccacacgtcctacactgtcggccacccccaaccacgtggaacacacgctttctgtgtatttatatagatggaaatatactttatattttgtatcatcgtgcctatagccgctgccaccgtgtataaatcctggtgtatgctccttatcctggacatgaatgtattgtacactgacgcgtccccactcctgtacagctgctttgtttctttgcaatgcattgtatggctttataaatgataaagttaagaaaaaactcagaaacgaaatcta

SEQ ID NO: 318056 - DNA, 642 bp, Homo sapiens
tgtactcacagggatgggatagctgtgcctaggtgggggtgtaccaggcgcaagttttcagatgccagcctgcagtggtgtgagctcaggcacacaggagagcccgggagccagcctgtggtgtgtgcccgcagattggcacagcacttgactctgaggcctgtgctagagagcagtgcaaccttcatggggaagcatgagtctggggataagaaggcgctggtctaggaaggcatgtgctgttcttggccctggaagcaggattgcttcagtgcttggatgagtctacgggagactgcatcactgccccctgctgtgggaggtcagacactcatgataagggtcaccttctgttgggagagtttagacagttttactgagagctttcaaccacatggtctcattggagtctcacaatagcccaggcaggaaacagggcagggatggatttattcattcagcaaaatttaaatcatctactatggctccaagcactgagatatctgggtgaacaggaaaaagtcctttcccttggtgagctgatacctaatgagagagatggacatgaaacaaataaccatacaaacaagacagtgtcagacagcaatgaggctaggaaggaaagagggcactgcagacacg

SEQ ID NO: 318057 - DNA, 10099 bp, Homo sapiens
  misc_feature (3577)..(3577): n is a, c, g, or t
  misc_feature (3688)..(3688): n is a, c, g, or t
ggagccacccagtagtgtctgagtggtgatccactcttgcctgcaatgaggaccaaggcaaaaagagttggctgaatctgcagcaggaaggatgagggttagataccaggaggaacttcctgacagtgagaaaagtaagacactctgtctgggaggctgtcgaatttcctttcatggtgccctttcagcaaaggaaggattgtgttttggagggctccaccagggtcaccccgagtgtccagccccacctccagcccatcagaaacatgagtgtgagccggaccatggaggacagctgtgagctggacctggtgtacgtcacagagaggatcatcgctgtctccttccccagcacagccaatgaggagaacttccggagcaacctccgtgaggtggcgcagatgctcaagtccaaacatggaggcaactacctgctttcaacctctctgagcggagacctgacatcacgaagctccatgccaaggtactggaatttggctggcccgacctccacaccccagccctggagaagatctgcagcatctgtaaggccatggacacatggctcaatgcagaccctcacaatgtcgttgttctacacaacaagggaaaccgaggcaggataggagttgtcatcgcggcttacatgcactacagcaacatttctgccagtgcggaccaggctctggaccggtttgcaatgaagcggttctatgaggataagattgtgcccattggccagccatcccaaagaaggtacgtgcattacttcagtggcctgctctccggctccatcaaaatgaacaacaagcccttgtttctgcaccacgtgatcatgcacggcatccccaactttgagtctaaaggaggatgtcggccatttctccgcatctaccaggccatgcaacctgtgtacacatctggcatctacaacatcccaggagacagccagactagcgtctgcatcaccatcgagccaggactgctcttgaagggagacatcttgctgaagtgctaccacaagaagttccgaagcccagcccgagacgtcatcttccgtgtgcagttccacacctgtgccatccatgacctgggggttgtctttgggaaggaggaccttgatgatgctttcaaagatgatcgatttccagagtatggcaaagtggagtttgtattttcttatgggccagagaaaattcaaggcatggagcacctggagaacgggccgagcgtgtctgtggactataacacctctgaccccctcatccgctgggactcctacgacaacttcagtgggcatcgagatgacggcatggaggaggtggtgggacacacgcaggggccactagatgggagcctgtatgctaaggtgaagaagaaagactccctgcacggcagcaccggggctgttaatgccacacgtcctacactgtcggccacccccaaccacgtggaacacacgctttctgtgagcagcgactcgggcaactccacagcctccaccaagaccgacaagaccgacgagcctgtccccggggcctccagtgccactgctgccttgagtccccaggagaagcgggagctggaccgcctgctgagtggctttggcttagagcgagagaagcaaggcgccatgtaccacacccagcacctcaggtcccgcccagcagggggctcggctgtgccctcctctggacgccacgttgtcccagcccaggttcatgtcaatggtggggcgttagcatctgagcgggagacagacatcctggacgatgaattgccaaaccaggatggtcacagtgcgggcagcatgggcacactctcttctctggacggggtcaccaacaccagtgaggggggctacccagaggccctgtccccactgaccaacggtctggacaagtcctaccccatggagcctatggtcaatggaggaggctacccctacgagtctgccagccgggcggggcctgcccatgctggccacacggcccccatgcggccctcctactctgcacaggagggtttagctggctaccagagggaggggccccacccagcctggccacagccagtgaccacctcccactatgcccatgaccccagcggtatgttccgctctcaatccttttcggaagctgaaccccagctgcccccagctccggtccgagggggaagcagccgggaggctgtgcaaaggggactgaattcgtggcagcagcagcagcagcagcagcagcagcctcgcccacctccacgccagcaggaaagagcccacttggagagtcttgtagccagcaggcccagccctcagccattggcagagacccccatccccagtctccctgagttcccgcgagcagcctcccagcaggagattgaacagtccatcgaaacactcaatatgctgatgctggacctggagccagcctccgctgctgccccactacacaagtcccagagtgtccccggggcctggccaggggcttctccactctcctcccagcccctctctggatcctcccgtcagtcccatccactgacccagtccagatctggctatatccccagtgggcattcgttgggaacccctgagccagccccacgggcctctctggagtctgtccctcctggcaggtcttactcaccttatgactatcagccatgtttggctgggcctaaccaggatttccattcaaagagcccagcctcttcctccttgcctgccttccttccgaccacccacagccctccagggcctcagcaacccccagcctctctccctggcctcactgctcagcctctgctctcaccaaaggaagcgacttcagacccctcccggactccagaggaggagccattgaatttagaagggctggtggcccacagggtagcaggggtacaggctcgggagaagcagcctgcagagcccccagcccctctgcggaggcgggcggccagtgatggacagtatgagaaccagtctccagaagccacatcccctcgtagccctggggttcgctcccctgtccagtgtgtctccccggagctggctcttaccatcgctctcaatcctggagggcggcccaaagagccccatttgcacagctacaaggaggccttcgaggagatggagggaacctccccgagcagcccaccacccagtggggtgcggtcccccccgggtctggccaagacacccctgtctgctctgggcctgaaacctcacaacccagcggacatcctgttgcaccccacaggagagccccggagctatgtggagtctgtggcacggacagcggtggctggaccccgagctcaggactctgagcccaagagctttagtgctccagccacccaggcctatggccatgagatacccctgaggaacgggaccctgggtggctcctttgtctcccccagccccctctccaccagcagccccatcctcagtgctgacagcacttcagtggggagtttcccgtcgggagagagcagtgaccagggtccccggacgcccacccagcctctgttggagtctggcttccgctcaggcagcctgggacagcccagcccntctgcccagagaaactaccagagctcttctcctctcccgactgtgggcagtagctacagcagccccgactactcacttcagcatttcagctcctctccggaaagccaggcncgagctcagttcagtgtggctggcgtccacacggtgcctgggagccctcaggcgcgccacagaacagtgggcaccaacactccccctagtcctggcttcggccggcgggccatcaatcccagcatggctgcccccagcagtcccagtttgagccatcaccagatgatgggtccaccaggcactggcttccatggtagcactgtctccagcccccagagcagtgcagcgaccaccccggggagccccagcctgtgtcggcacccagcaggggtctaccaggtttctggcctccacaacaaagtggccaccaccccggggagtcccagcctgggccggcaccctggggctcaccaaggcaacctggcctccggtcttcatagcaatgcaatagccagccctggaagccccagcctgggccgtcacctcggagggtctggatctgtggttcccggcagcccctgcttggaccggcatgtggcctatggtggctattctaccccggaggatcggagacccacactgtcccggcagagcagtgcctctggctaccaggctccttccacgccctccttccctgtctcccctgcctactaccctggcctgagcagccctgccacctccccgtcaccagactccgcagccttccggcaagggagcccaacaccagccttgccagagaagcgaaggatgtcagtgggagaccgggcaggcagcctccccaactatgccaccatcaatgggaaggtgtcttcgcctgtcgccagcggcatgtccagtcccagtgggggcagcaccgtctccttctcccacactctgcccgacttctccaagtactccatgccagacaacagcccggagacgcgggctaaagtgaagtttgtccaggacacttctaagtattggtacaagcctgagatctccagggagcaggccatcgcgctcctcaaggaccaggagccgggggccttcatcatccgcgacagtcactccttccgaggcgcgtacgggctggccatgaaggtgtcttcgccacctccaaccatcatgcagcagaataaaaaaggagacatgacccatgagctggtcaggcattttctgatagagactggccccagaggagtcaagctcaagggctgccccaatgagccaaacttcggatcgctgtctgccctggtctaccagcactccatcatcccattggccctgccttgcaagctggtcattccaaaccgagaccccacagatgaatcgaaagatagctccggccctgccaactcaactgcagacctgctgaaacaaggggcagcctgcaatgtgctcttcatcaactctgtggacatggagtcactcactgggccacaggccatctctaaagccacatctgagacgttggctgcagaccccacgccagctgccaccatcgttcacttcaaagtctctgcccagggaatcactctgactgacaaccagagaaagctctttttcagacgccactaccctctcaacactgtcaccttctgtgacctggatccacaggaaagaaagtggatgaaaacagagggtggtgcccctgctaagctcttcggcttcgtggcccggaagcagggcagcaccacggacaacgcctgccacctctttgctgagcttgaccccaaccagccggcctctgccatcgtcaacttcgtctccaaggtcatgctgaatgccggccaaaagagatgaaccctgccccttgcccagggccagtgccatggggaaggggcttgtggggaggggacccatgaatcctgaccactcttgaacccagaaggaggactttgggccaatttcggaggagagaagaaagtgcaacgtggggagagggaagtgaattgcagaggggagggggaagagagagagagagagagagagagagagagagagagagagaaagatggaggagaagaacttggattcccctgggtagatggaaactgcaaaaacccaaagcctccaaaactaaccaggtccacctaacaccccctccctcccctaagaagatggatgtcctcaaaagagaaggaacaaacctccttgggaatccacattttttgggggaatggaaaagctctgtctccctaactcaactgctttgcaaggggaaatcaagctgggagaatctttttctggccacctgtagggtaggttgtcaaaccaaacagagccaccgtgggacatcaagtggaagaacttgtttgcttgaaagtatctcagacccaaggcacctcaggtctctttgctgtgcctccactatattgtcgtgtgggtgtgtgtctgcacccacatcctcacacattgatctagatctgcctttatccactcgaattataaacagctcggcttgtccttgtcccatgtgtttgtagacacacatgcatactgtccaaagattagggttggtggtggcagtgcagcaggggagggacaaacaaccaagctatgggtgacagaggctctctcctggtgcctgcacctgcactctagtgaccctgggtgccgccagacccttctcttctacaaagaccccagcaggagtgggagggtctgcaatggcatcgccctgtcctgccttggccagaagcctggagctttggtttgaggaggtagagatatgtgtatccataggaagagatctgtcagaacaggcagctgttgagctcggggtgtcttccccaaggcatgtggctcagcagcaagaaaggcaagttgctcctgctggggccctggactctgccttagctcccacctctcagccttgttattgggtttcatgcccctggaccagccttatctcagacctgcttacctgcatgatgcctttttgggggctggggattgagtcttgctgctctgcccagccctgttctattctgcagggtccctgtgttggaattctccctggggaacctactttctgctcagtgaggctccggccagaaacctggagtccttatcctcccctctgtaagtgttttagggtctggcttttgcaggcaccctctgacctcagcagagctcctgggcctgctgcctgcacaccacatcgcctacctacaatgccaaagcctcactgtcaccctttctgccttggtttccctagctgagccacgctgcccatgcagcagagggcagaaggcttgcacttgggccaaagggcctaaggtccactggacagttgggaaaacacctgaccaccatttaaggactctaagccagaatggaaaattcaccaggactccattcttaagcctatgcgagtcccctagagagaggcattgtactgatatataaatattatataatatatacatgagacatactgacagaatctgtaagctaataaaatgtaagaaaaggttaaaaaaagaataggtaaattgacaagaagtatttattgtttttccatattgctttattgccttccttggggataaaccaattcctatccttttttatatgtgtaagtaaagcctgaagtgtagggggcctttgttcttgaagcagccagggtctccttgccctggccttggccttccctagactgtgtggggctcagcattgggaggggttgcacatgtcccagcctttggcccccttacttttcagcaagccaggggcccagcagtcagctcccaggatgtgtggggagctgtccctgactctgcaggcctgagcgagtgtgtgagcatgcggggacatgggtgtgtatggcacacataggtgcgtgtgtgtcttttgtattttttctcctccaaggagctgtgtcagtgtggacgttctgtttcagggagttggaaaggagggtgtctgcagaaggtggagagcaggggcagaggccccactggccaccccctgcttcccagagtgaaaccttgtgcctggtgaccaaagtccctccaaagtgctcttccttctgggttattcaagccaaatatctgggtttccccctctcctcattccctagcaaaccccaattatcttccaagataggagatatttcccatccccttcctttgtaaatatctcatctcccactggagagcccaggagcctattcctggcatggatgttctgtccacacttgaggctgggcggtgtatcagacccttcaagcagcctggctggggcccaggactgagtctggggtcagctttcacggtcgcttttcccttcctcaccacccaccacagcccaccttgcatgcatggccagcccctccactccagcctgagccatgtgtgcccctgcgggaggacccattcatgccagaaagctggtaactccctcccagcatccctgcggaaggagtcagtttctgagagtgtgacttttcaaggcgaatgatggggaagggttccccagtccccacagtggccccacctctgggccctgcaccagagcccttctgtgtcacggcgggctgtgcacccatgcacacacctacgcacacacaacactccgcactgcagtatattcttgccaaagatttcctttaaaagcaagcacttttactaattattattttgtaaatgtttatcttcttctgtcttctccctccctgaatctattttactgttgtttattgttgaatctgtgtgtcagccaggagagcgctgtctggccttgaacatgggctgggatgggaaagggtctgggagaagatgggcaacaaagagccagggagtcatggacatcgcagcgacgcagaccccagcaggttcagtcccgtgctgccaccagctgtccagctgggtgtctggagggaagagggcagaggagggtcatgtcccttcagctgggggaggggcccagtgagctccacgtggctttttcccaaagggagcaagagggaaggattgggcgagaaaacaatggagaggggacctgcgaaggaaaacagggaggaagtgagcggtttgatcagcctgctatcacggtgttctggctctcttatttagccaggcgcttaagggacagatacatcacatcctaagtttgggaaaggcctttgacccatgtcatctgagcgtctcctccagtagctctgaaagctgtggacaccaatggccaggattccttctcccctggtttttgaggatccctgggtcttctgagactggccaggagagggatggtggggccagtggttgtgtgaaagcaggaggggcagccctcctggacaagtgtgatccccctataaacggctctcaggaggttagtgagtaggagattctgccttgttctgatgagcctgtgcaggggctccaggggagcatgctgtccagggggcacagaagggtggtgagtgtgatcaaatctagtctcactcccactttttagtctcactcctacttttgtccaccacccctgcctcctggatcttctcccactttttttttcagctttaggacctggggagatcctgtgagtcaaggcagacacccaatcctgcccccacactcggggtcctccaagaggttggggggcagagtcccagagcagccctttaccccaggtccaggccctggaatcctgagactcgcgtttccttggccagtggtaacacaggacgtgtgtgcgcatgtgcaagtgtggatgtatgtgtgtgcgtgtgttttgctcatttctttagggaacttgggagtcggggttggaggtgctgggcaatggaacttcaaattcaatgtcgcccagcagtgaggggagtcgggaggtgaggcctgtaggccaaccaattggtggagtctcagcgatagcccaggtgagaagtggttcacccagaggggcagggtgggggcctcgggcagatctgtccctcttggcccctctgtcctcaaatgtccaaaatgttggaggacctctgttcatatcccacgcctgggctcttgccagcagtggagttactgtagagggatgtcccaagcttgttttccaatcagtgttaagctgtttgaaactctcctgtgtctgtgttttgtttgtgcgtgtgtgtgagagcacatcagtgtgtgcaggctgtgtttccccatttctctcctcccttcagacccatcattgagaacaaatgtaagaaatcccttcccaccaccctccctgcctcccaggccctctgcgggggaaacaagatcacccagcatccttccccaccccagctgtgtatttatatagatggaaatatactttatattttgtatcatcgtgcctatagccgctgccaccgtgtataaatcctggtgtatgctccttatcctggacatgaatgtattgtacactgacgcgtccccactcctgtacagctgctttgtttctttgcaatgcattgtatggctttataaatgataaagttaagaaaaaactcagaaacgaaatcta

SEQ ID NO: 318058 - DNA, 10026 bp, Homo sapiens
  misc_feature (3504)..(3504): n is a, c, g, or t
  misc_feature (3615)..(3615): n is a, c, g, or t
gtctcgccctcttgcagtctgcagcttctcctgtcatcggaaatgccaggccaaggtggctgccccctgcgttcctccatccaaccatgagctggtgcccatcaccactgagaatgcaccaaagaatgtagtggacaagggagaaggaggctcccggggtggaaacacacggaaaagcctcgaggacaacggctccaccagggtcaccccgagtgtccagccccacctccagcccatcagaaacatgagtgtgagccggaccatggaggacagctgtgagctggacctggtgtacgtcacagagaggatcatcgctgtctccttccccagcacagccaatgaggagaacttccggagcaacctttcaacctctctgagcggagacctgacatcacgaagctccatgccaaggtactggaatttggctggcccgacctccacaccccagccctggagaagatctgcagcatctgtaaggccatggacacatggctcaatgcagaccctcacaatgtcgttgttctacacaacaagggaaaccgaggcaggataggagttgtcatcgcggcttacatgcactacagcaacatttctgccagtgcggaccaggctctggaccggtttgcaatgaagcggttctatgaggataagattgtgcccattggccagccatcccaaagaaggtacgtgcattacttcagtggcctgctctccggctccatcaaaatgaacaacaagcccttgtttctgcaccacgtgatcatgcacggcatccccaactttgagtctaaaggaggatgtcggccatttctccgcatctaccaggccatgcaacctgtgtacacatctggcatctacaacatcccaggagacagccagactagcgtctgcatcaccatcgagccaggactgctcttgaagggagacatcttgctgaagtgctaccacaagaagttccgaagcccagcccgagacgtcatcttccgtgtgcagttccacacctgtgccatccatgacctgggggttgtctttgggaaggaggaccttgatgatgctttcaaagatgatcgatttccagagtatggcaaagtggagtttgtattttcttatgggccagagaaaattcaaggcatggagcacctggagaacgggccgagcgtgtctgtggactataacacctctgaccccctcatccgctgggactcctacgacaacttcagtgggcatcgagatgacggcatggaggaggtggtgggacacacgcaggggccactagatgggagcctgtatgctaaggtgaagaagaaagactccctgcacggcagcaccggggctgttaatgccacacgtcctacactgtcggccacccccaaccacgtggaacacacgctttctgtgagcagcgactcgggcaactccacagcctccaccaagaccgacaagaccgacgagcctgtccccggggcctccagtgccactgctgccttgagtccccaggagaagcgggagctggaccgcctgctgagtggctttggcttagagcgagagaagcaaggcgccatgtaccacacccagcacctcaggtcccgcccagcagggggctcggctgtgccctcctctggacgccacgttgtcccagcccaggttcatgtcaatggtggggcgttagcatctgagcgggagacagacatcctggacgatgaattgccaaaccaggatggtcacagtgcgggcagcatgggcacactctcttctctggacggggtcaccaacaccagtgaggggggctacccagaggccctgtccccactgaccaacggtctggacaagtcctaccccatggagcctatggtcaatggaggaggctacccctacgagtctgccagccgggcggggcctgcccatgctggccacacggcccccatgcggccctcctactctgcacaggagggtttagctggctaccagagggaggggccccacccagcctggccacagccagtgaccacctcccactatgcccatgaccccagcggtatgttccgctctcaatccttttcggaagctgaaccccagctgcccccagctccggtccgagggggaagcagccgggaggctgtgcaaaggggactgaattcgtggcagcagcagcagcagcagcagcagcagcctcgcccacctccacgccagcaggaaagagcccacttggagagtcttgtagccagcaggcccagccctcagccattggcagagacccccatccccagtctccctgagttcccgcgagcagcctcccagcaggagattgaacagtccatcgaaacactcaatatgctgatgctggacctggagccagcctccgctgctgccccactacacaagtcccagagtgtccccggggcctggccaggggcttctccactctcctcccagcccctctctggatcctcccgtcagtcccatccactgacccagtccagatctggctatatccccagtgggcattcgttgggaacccctgagccagccccacgggcctctctggagtctgtccctcctggcaggtcttactcaccttatgactatcagccatgtttggctgggcctaaccaggatttccattcaaagagcccagcctcttcctccttgcctgccttccttccgaccacccacagccctccagggcctcagcaacccccagcctctctccctggcctcactgctcagcctctgctctcaccaaaggaagcgacttcagacccctcccggactccagaggaggagccattgaatttagaagggctggtggcccacagggtagcaggggtacaggctcgggagaagcagcctgcagagcccccagcccctctgcggaggcgggcggccagtgatggacagtatgagaaccagtctccagaagccacatcccctcgtagccctggggttcgctcccctgtccagtgtgtctccccggagctggctcttaccatcgctctcaatcctggagggcggcccaaagagccccatttgcacagctacaaggaggccttcgaggagatggagggaacctccccgagcagcccaccacccagtggggtgcggtcccccccgggtctggccaagacacccctgtctgctctgggcctgaaacctcacaacccagcggacatcctgttgcaccccacaggagagccccggagctatgtggagtctgtggcacggacagcggtggctggaccccgagctcaggactctgagcccaagagctttagtgctccagccacccaggcctatggccatgagatacccctgaggaacgggaccctgggtggctcctttgtctcccccagccccctctccaccagcagccccatcctcagtgctgacagcacttcagtggggagtttcccgtcgggagagagcagtgaccagggtccccggacgcccacccagcctctgttggagtctggcttccgctcaggcagcctgggacagcccagcccntctgcccagagaaactaccagagctcttctcctctcccgactgtgggcagtagctacagcagccccgactactcacttcagcatttcagctcctctccggaaagccaggcncgagctcagttcagtgtggctggcgtccacacggtgcctgggagccctcaggcgcgccacagaacagtgggcaccaacactccccctagtcctggcttcggccggcgggccatcaatcccagcatggctgcccccagcagtcccagtttgagccatcaccagatgatgggtccaccaggcactggcttccatggtagcactgtctccagcccccagagcagtgcagcgaccaccccggggagccccagcctgtgtcggcacccagcaggggtctaccaggtttctggcctccacaacaaagtggccaccaccccggggagtcccagcctgggccggcaccctggggctcaccaaggcaacctggcctccggtcttcatagcaatgcaatagccagccctggaagccccagcctgggccgtcacctcggagggtctggatctgtggttcccggcagcccctgcttggaccggcatgtggcctatggtggctattctaccccggaggatcggagacccacactgtcccggcagagcagtgcctctggctaccaggctccttccacgccctccttccctgtctcccctgcctactaccctggcctgagcagccctgccacctccccgtcaccagactccgcagccttccggcaagggagcccaacaccagccttgccagagaagcgaaggatgtcagtgggagaccgggcaggcagcctccccaactatgccaccatcaatgggaaggtgtcttcgcctgtcgccagcggcatgtccagtcccagtgggggcagcaccgtctccttctcccacactctgcccgacttctccaagtactccatgccagacaacagcccggagacgcgggctaaagtgaagtttgtccaggacacttctaagtattggtacaagcctgagatctccagggagcaggccatcgcgctcctcaaggaccaggagccgggggccttcatcatccgcgacagtcactccttccgaggcgcgtacgggctggccatgaaggtgtcttcgccacctccaaccatcatgcagcagaataaaaaaggagacatgacccatgagctggtcaggcattttctgatagagactggccccagaggagtcaagctcaagggctgccccaatgagccaaacttcggatcgctgtctgccctggtctaccagcactccatcatcccattggccctgccttgcaagctggtcattccaaaccgagaccccacagatgaatcgaaagatagctccggccctgccaactcaactgcagacctgctgaaacaaggggcagcctgcaatgtgctcttcatcaactctgtggacatggagtcactcactgggccacaggccatctctaaagccacatctgagacgttggctgcagaccccacgccagctgccaccatcgttcacttcaaagtctctgcccagggaatcactctgactgacaaccagagaaagctctttttcagacgccactaccctctcaacactgtcaccttctgtgacctggatccacaggaaagaaagtggatgaaaacagagggtggtgcccctgctaagctcttcggcttcgtggcccggaagcagggcagcaccacggacaacgcctgccacctctttgctgagcttgaccccaaccagccggcctctgccatcgtcaacttcgtctccaaggtcatgctgaatgccggccaaaagagatgaaccctgccccttgcccagggccagtgccatggggaaggggcttgtggggaggggacccatgaatcctgaccactcttgaacccagaaggaggactttgggccaatttcggaggagagaagaaagtgcaacgtggggagagggaagtgaattgcagaggggagggggaagagagagagagagagagagagagagagagagagagagagaaagatggaggagaagaacttggattcccctgggtagatggaaactgcaaaaacccaaagcctccaaaactaaccaggtccacctaacaccccctccctcccctaagaagatggatgtcctcaaaagagaaggaacaaacctccttgggaatccacattttttgggggaatggaaaagctctgtctccctaactcaactgctttgcaaggggaaatcaagctgggagaatctttttctggccacctgtagggtaggttgtcaaaccaaacagagccaccgtgggacatcaagtggaagaacttgtttgcttgaaagtatctcagacccaaggcacctcaggtctctttgctgtgcctccactatattgtcgtgtgggtgtgtgtctgcacccacatcctcacacattgatctagatctgcctttatccactcgaattataaacagctcggcttgtccttgtcccatgtgtttgtagacacacatgcatactgtccaaagattagggttggtggtggcagtgcagcaggggagggacaaacaaccaagctatgggtgacagaggctctctcctggtgcctgcacctgcactctagtgaccctgggtgccgccagacccttctcttctacaaagaccccagcaggagtgggagggtctgcaatggcatcgccctgtcctgccttggccagaagcctggagctttggtttgaggaggtagagatatgtgtatccataggaagagatctgtcagaacaggcagctgttgagctcggggtgtcttccccaaggcatgtggctcagcagcaagaaaggcaagttgctcctgctggggccctggactctgccttagctcccacctctcagccttgttattgggtttcatgcccctggaccagccttatctcagacctgcttacctgcatgatgcctttttgggggctggggattgagtcttgctgctctgcccagccctgttctattctgcagggtccctgtgttggaattctccctggggaacctactttctgctcagtgaggctccggccagaaacctggagtccttatcctcccctctgtaagtgttttagggtctggcttttgcaggcaccctctgacctcagcagagctcctgggcctgctgcctgcacaccacatcgcctacctacaatgccaaagcctcactgtcaccctttctgccttggtttccctagctgagccacgctgcccatgcagcagagggcagaaggcttgcacttgggccaaagggcctaaggtccactggacagttgggaaaacacctgaccaccatttaaggactctaagccagaatggaaaattcaccaggactccattcttaagcctatgcgagtcccctagagagaggcattgtactgatatataaatattatataatatatacatgagacatactgacagaatctgtaagctaataaaatgtaagaaaaggttaaaaaaagaataggtaaattgacaagaagtatttattgtttttccatattgctttattgccttccttggggataaaccaattcctatccttttttatatgtgtaagtaaagcctgaagtgtagggggcctttgttcttgaagcagccagggtctccttgccctggccttggccttccctagactgtgtggggctcagcattgggaggggttgcacatgtcccagcctttggcccccttacttttcagcaagccaggggcccagcagtcagctcccaggatgtgtggggagctgtccctgactctgcaggcctgagcgagtgtgtgagcatgcggggacatgggtgtgtatggcacacataggtgcgtgtgtgtcttttgtattttttctcctccaaggagctgtgtcagtgtggacgttctgtttcagggagttggaaaggagggtgtctgcagaaggtggagagcaggggcagaggccccactggccaccccctgcttcccagagtgaaaccttgtgcctggtgaccaaagtccctccaaagtgctcttccttctgggttattcaagccaaatatctgggtttccccctctcctcattccctagcaaaccccaattatcttccaagataggagatatttcccatccccttcctttgtaaatatctcatctcccactggagagcccaggagcctattcctggcatggatgttctgtccacacttgaggctgggcggtgtatcagacccttcaagcagcctggctggggcccaggactgagtctggggtcagctttcacggtcgcttttcccttcctcaccacccaccacagcccaccttgcatgcatggccagcccctccactccagcctgagccatgtgtgcccctgcgggaggacccattcatgccagaaagctggtaactccctcccagcatccctgcggaaggagtcagtttctgagagtgtgacttttcaaggcgaatgatggggaagggttccccagtccccacagtggccccacctctgggccctgcaccagagcccttctgtgtcacggcgggctgtgcacccatgcacacacctacgcacacacaacactccgcactgcagtatattcttgccaaagatttcctttaaaagcaagcacttttactaattattattttgtaaatgtttatcttcttctgtcttctccctccctgaatctattttactgttgtttattgttgaatctgtgtgtcagccaggagagcgctgtctggccttgaacatgggctgggatgggaaagggtctgggagaagatgggcaacaaagagccagggagtcatggacatcgcagcgacgcagaccccagcaggttcagtcccgtgctgccaccagctgtccagctgggtgtctggagggaagagggcagaggagggtcatgtcccttcagctgggggaggggcccagtgagctccacgtggctttttcccaaagggagcaagagggaaggattgggcgagaaaacaatggagaggggacctgcgaaggaaaacagggaggaagtgagcggtttgatcagcctgctatcacggtgttctggctctcttatttagccaggcgcttaagggacagatacatcacatcctaagtttgggaaaggcctttgacccatgtcatctgagcgtctcctccagtagctctgaaagctgtggacaccaatggccaggattccttctcccctggtttttgaggatccctgggtcttctgagactggccaggagagggatggtggggccagtggttgtgtgaaagcaggaggggcagccctcctggacaagtgtgatccccctataaacggctctcaggaggttagtgagtaggagattctgccttgttctgatgagcctgtgcaggggctccaggggagcatgctgtccagggggcacagaagggtggtgagtgtgatcaaatctagtctcactcccactttttagtctcactcctacttttgtccaccacccctgcctcctggatcttctcccactttttttttcagctttaggacctggggagatcctgtgagtcaaggcagacacccaatcctgcccccacactcggggtcctccaagaggttggggggcagagtcccagagcagccctttaccccaggtccaggccctggaatcctgagactcgcgtttccttggccagtggtaacacaggacgtgtgtgcgcatgtgcaagtgtggatgtatgtgtgtgcgtgtgttttgctcatttctttagggaacttgggagtcggggttggaggtgctgggcaatggaacttcaaattcaatgtcgcccagcagtgaggggagtcgggaggtgaggcctgtaggccaaccaattggtggagtctcagcgatagcccaggtgagaagtggttcacccagaggggcagggtgggggcctcgggcagatctgtccctcttggcccctctgtcctcaaatgtccaaaatgttggaggacctctgttcatatcccacgcctgggctcttgccagcagtggagttactgtagagggatgtcccaagcttgttttccaatcagtgttaagctgtttgaaactctcctgtgtctgtgttttgtttgtgcgtgtgtgtgagagcacatcagtgtgtgcaggctgtgtttccccatttctctcctcccttcagacccatcattgagaacaaatgtaagaaatcccttcccaccaccctccctgcctcccaggccctctgcgggggaaacaagatcacccagcatccttccccaccccagctgtgtatttatatagatggaaatatactttatattttgtatcatcgtgcctatagccgctgccaccgtgtataaatcctggtgtatgctccttatcctggacatgaatgtattgtacactgacgcgtccccactcctgtacagctgctttgtttctttgcaatgcattgtatggctttataaatgataaagttaagaaaaaactcagaaacgaaatcta

SEQ ID NO: 318059 - DNA, 7681 bp, Homo sapiens
  misc_feature (1159)..(1159): n is a, c, g, or t
  misc_feature (1270)..(1270): n is a, c, g, or t
accatttgcaagatgatgcaatttagccctttccaagagttcttccccacaggcttgatgttgctggttggttgatgcagttgccttggagactgtcttttccctccacctcccctcccttgtctggaagctctggccctccgcctccaggggttggaagtagttgacatctgtttcttgtatcagtcctttgtgttcttggtctcagctctgtgtggagagattcctggtgaagtctgagccaatctaagcagatcccctctcctgcagagaaaacctggggtgtgaacagagttggacccaggagggctgaggggaagacaatgggggatgacaggcgagccccagcatggcctctgagctaggaggcactgccttctctgatgggattaggccgattgatcatttcttacacaaaaatgctcattgtcctctacaccctgctttcctcccaggggtacaggctcgggagaagcagcctgcagagcccccagcccctctgcggaggcgggcggccagtgatggacagtatgagaaccagtctccagaagccacatcccctcgtagccctggggttcgctcccctgtccagtgtgtctccccggagctggctcttaccatcgctctcaatcctggagggcggcccaaagagccccatttgcacagctacaaggaggccttcgaggagatggagggaacctccccgagcagcccaccacccagtggggtgcggtcccccccgggtctggccaagacacccctgtctgctctgggcctgaaacctcacaacccagcggacatcctgttgcaccccacaggagttaccagaagacggatccagccagagccccggagctatgtggagtctgtggcacggacagcggtggctggaccccgagctcaggactctgagcccaagagctttagtgctccagccacccaggcctatggccatgagatacccctgaggaacgggaccctgggtggctcctttgtctcccccagccccctctccaccagcagccccatcctcagtgctgacagcacttcagtggggagtttcccgtcgggagagagcagtgaccagggtccccggacgcccacccagcctctgttggagtctggcttccgctcaggcagcctgggacagcccagcccntctgcccagagaaactaccagagctcttctcctctcccgactgtgggcagtagctacagcagccccgactactcacttcagcatttcagctcctctccggaaagccaggcncgagctcagttcagtgtggctggcgtccacacggtgcctgggagccctcaggcgcgccacagaacagtgggcaccaacactccccctagtcctggcttcggccggcgggccatcaatcccagcatggctgcccccagcagtcccagtttgagccatcaccagatgatgggtccaccaggcactggcttccatggtagcactgtctccagcccccagagcagtgcagcgaccaccccggggagccccagcctgtgtcggcacccagcaggggtctaccaggtttctggcctccacaacaaagtggccaccaccccggggagtcccagcctgggccggcaccctggggctcaccaaggcaacctggcctccggtcttcatagcaatgcaatagccagccctggaagccccagcctgggccgtcacctcggagggtctggatctgtggttcccggcagcccctgcttggaccggcatgtggcctatggtggctattctaccccggaggatcggagacccacactgtcccggcagagcagtgcctctggctaccaggctccttccacgccctccttccctgtctcccctgcctactaccctggcctgagcagccctgccacctccccgtcaccagactccgcagccttccggcaagggagcccaacaccagccttgccagagaagcgaaggatgtcagtgggagaccgggcaggcagcctccccaactatgccaccatcaatgggaaggtgtcttcgcctgtcgccagcggcatgtccagtcccagtgggggcagcaccgtctccttctcccacactctgcccgacttctccaagtactccatgccagacaacagcccggagacgcgggctaaagtgaagtttgtccaggacacttctaagtattggtacaagcctgagatctccagggagcaggccatcgcgctcctcaaggaccaggagccgggggccttcatcatccgcgacagtcactccttccgaggcgcgtacgggctggccatgaaggtgtcttcgccacctccaaccatcatgcagcagaataaaaaaggagacatgacccatgagctggtcaggcattttctgatagagactggccccagaggagtcaagctcaagggctgccccaatgagccaaacttcggatcgctgtctgccctggtctaccagcactccatcatcccattggccctgccttgcaagctggtcattccaaaccgagaccccacagatgaatcgaaagatagctccggccctgccaactcaactgcagacctgctgaaacaaggggcagcctgcaatgtgctcttcatcaactctgtggacatggagtcactcactgggccacaggccatctctaaagccacatctgagacgttggctgcagaccccacgccagctgccaccatcgttcacttcaaagtctctgcccagggaatcactctgactgacaaccagagaaagctctttttcagacgccactaccctctcaacactgtcaccttctgtgacctggatccacaggaaagaaagtggatgaaaacagagggtggtgcccctgctaagctcttcggcttcgtggcccggaagcagggcagcaccacggacaacgcctgccacctctttgctgagcttgaccccaaccagccggcctctgccatcgtcaacttcgtctccaaggtcatgctgaatgccggccaaaagagatgaaccctgccccttgcccagggccagtgccatggggaaggggcttgtggggaggggacccatgaatcctgaccactcttgaacccagaaggaggactttgggccaatttcggaggagagaagaaagtgcaacgtggggagagggaagtgaattgcagaggggagggggaagagagagagagagagagagagagagagagagagagagagaaagatggaggagaagaacttggattcccctgggtagatggaaactgcaaaaacccaaagcctccaaaactaaccaggtccacctaacaccccctccctcccctaagaagatggatgtcctcaaaagagaaggaacaaacctccttgggaatccacattttttgggggaatggaaaagctctgtctccctaactcaactgctttgcaaggggaaatcaagctgggagaatctttttctggccacctgtagggtaggttgtcaaaccaaacagagccaccgtgggacatcaagtggaagaacttgtttgcttgaaagtatctcagacccaaggcacctcaggtctctttgctgtgcctccactatattgtcgtgtgggtgtgtgtctgcacccacatcctcacacattgatctagatctgcctttatccactcgaattataaacagctcggcttgtccttgtcccatgtgtttgtagacacacatgcatactgtccaaagattagggttggtggtggcagtgcagcaggggagggacaaacaaccaagctatgggtgacagaggctctctcctggtgcctgcacctgcactctagtgaccctgggtgccgccagacccttctcttctacaaagaccccagcaggagtgggagggtctgcaatggcatcgccctgtcctgccttggccagaagcctggagctttggtttgaggaggtagagatatgtgtatccataggaagagatctgtcagaacaggcagctgttgagctcggggtgtcttccccaaggcatgtggctcagcagcaagaaaggcaagttgctcctgctggggccctggactctgccttagctcccacctctcagccttgttattgggtttcatgcccctggaccagccttatctcagacctgcttacctgcatgatgcctttttgggggctggggattgagtcttgctgctctgcccagccctgttctattctgcagggtccctgtgttggaattctccctggggaacctactttctgctcagtgaggctccggccagaaacctggagtccttatcctcccctctgtaagtgttttagggtctggcttttgcaggcaccctctgacctcagcagagctcctgggcctgctgcctgcacaccacatcgcctacctacaatgccaaagcctcactgtcaccctttctgccttggtttccctagctgagccacgctgcccatgcagcagagggcagaaggcttgcacttgggccaaagggcctaaggtccactggacagttgggaaaacacctgaccaccatttaaggactctaagccagaatggaaaattcaccaggactccattcttaagcctatgcgagtcccctagagagaggcattgtactgatatataaatattatataatatatacatgagacatactgacagaatctgtaagctaataaaatgtaagaaaaggttaaaaaaagaataggtaaattgacaagaagtatttattgtttttccatattgctttattgccttccttggggataaaccaattcctatccttttttatatgtgtaagtaaagcctgaagtgtagggggcctttgttcttgaagcagccagggtctccttgccctggccttggccttccctagactgtgtggggctcagcattgggaggggttgcacatgtcccagcctttggcccccttacttttcagcaagccaggggcccagcagtcagctcccaggatgtgtggggagctgtccctgactctgcaggcctgagcgagtgtgtgagcatgcggggacatgggtgtgtatggcacacataggtgcgtgtgtgtcttttgtattttttctcctccaaggagctgtgtcagtgtggacgttctgtttcagggagttggaaaggagggtgtctgcagaaggtggagagcaggggcagaggccccactggccaccccctgcttcccagagtgaaaccttgtgcctggtgaccaaagtccctccaaagtgctcttccttctgggttattcaagccaaatatctgggtttccccctctcctcattccctagcaaaccccaattatcttccaagataggagatatttcccatccccttcctttgtaaatatctcatctcccactggagagcccaggagcctattcctggcatggatgttctgtccacacttgaggctgggcggtgtatcagacccttcaagcagcctggctggggcccaggactgagtctggggtcagctttcacggtcgcttttcccttcctcaccacccaccacagcccaccttgcatgcatggccagcccctccactccagcctgagccatgtgtgcccctgcgggaggacccattcatgccagaaagctggtaactccctcccagcatccctgcggaaggagtcagtttctgagagtgtgacttttcaaggcgaatgatggggaagggttccccagtccccacagtggccccacctctgggccctgcaccagagcccttctgtgtcacggcgggctgtgcacccatgcacacacctacgcacacacaacactccgcactgcagtatattcttgccaaagatttcctttaaaagcaagcacttttactaattattattttgtaaatgtttatcttcttctgtcttctccctccctgaatctattttactgttgtttattgttgaatctgtgtgtcagccaggagagcgctgtctggccttgaacatgggctgggatgggaaagggtctgggagaagatgggcaacaaagagccagggagtcatggacatcgcagcgacgcagaccccagcaggttcagtcccgtgctgccaccagctgtccagctgggtgtctggagggaagagggcagaggagggtcatgtcccttcagctgggggaggggcccagtgagctccacgtggctttttcccaaagggagcaagagggaaggattgggcgagaaaacaatggagaggggacctgcgaaggaaaacagggaggaagtgagcggtttgatcagcctgctatcacggtgttctggctctcttatttagccaggcgcttaagggacagatacatcacatcctaagtttgggaaaggcctttgacccatgtcatctgagcgtctcctccagtagctctgaaagctgtggacaccaatggccaggattccttctcccctggtttttgaggatccctgggtcttctgagactggccaggagagggatggtggggccagtggttgtgtgaaagcaggaggggcagccctcctggacaagtgtgatccccctataaacggctctcaggaggttagtgagtaggagattctgccttgttctgatgagcctgtgcaggggctccaggggagcatgctgtccagggggcacagaagggtggtgagtgtgatcaaatctagtctcactcccactttttagtctcactcctacttttgtccaccacccctgcctcctggatcttctcccactttttttttcagctttaggacctggggagatcctgtgagtcaaggcagacacccaatcctgcccccacactcggggtcctccaagaggttggggggcagagtcccagagcagccctttaccccaggtccaggccctggaatcctgagactcgcgtttccttggccagtggtaacacaggacgtgtgtgcgcatgtgcaagtgtggatgtatgtgtgtgcgtgtgttttgctcatttctttagggaacttgggagtcggggttggaggtgctgggcaatggaacttcaaattcaatgtcgcccagcagtgaggggagtcgggaggtgaggcctgtaggccaaccaattggtggagtctcagcgatagcccaggtgagaagtggttcacccagaggggcagggtgggggcctcgggcagatctgtccctcttggcccctctgtcctcaaatgtccaaaatgttggaggacctctgttcatatcccacgcctgggctcttgccagcagtggagttactgtagagggatgtcccaagcttgttttccaatcagtgttaagctgtttgaaactctcctgtgtctgtgttttgtttgtgcgtgtgtgtgagagcacatcagtgtgtgcaggctgtgtttccccatttctctcctcccttcagacccatcattgagaacaaatgtaagaaatcccttcccaccaccctccctgcctcccaggccctctgcgggggaaacaagatcacccagcatccttccccaccccagctgtgtatttatatagatggaaatatactttatattttgtatcatcgtgcctatagccgctgccaccgtgtataaatcctggtgtatgctccttatcctggacatgaatgtattgtacactgacgcgtccccactcctgtacagctgctttgtttctttgcaatgcattgtatggctttataaatgataaagttaagaaaaaactcagaaacgaaatcta

SEQ ID NO: 318060 - DNA, 6289 bp, Homo sapiens
tctgtctgcctgatgtgggaggtttttgcattttacagggagagagaacaaagttgggaataggggaatgattctcaggggaaggctgggtgtgggacaggggtcagcaacggcagcccatgggtcaaatctggatgctgcctgcttttgtaaatgaagttttactggggcgcccccacacctgctggcttgcatcctccctgtgctgctgtcctgctgcagtggcagagtggagtagttgtagcagaggctgcatggcctgcgaagcctgaaatatttactctccggccatttacagagtaagtttgccagccaggtgtggtggtgcacacctataatcccagcacttcaggaggccaaggcagggggatcacttggggccaggagttcgagaccagccagggcaacatagtgagatcctgaatctacaaaaaacaaaaagaaaatgagccaggcaaaatggcacacactgaatagtggcctgtggtcccagctactggagaggctgaggtgggaggatcacttgagcccaggaggttgaggctgcagtgagccatgattgtgccactgcatgccagcctgagtgacagagtgaggcccggtctcacaaaaacaaacataaaaacccaacagaataagtttgccaacctgagtacaggaagacccgtaggagtagttaaattttaactttaaagaaaatttgtctcacctaagaaagaacgaaggtcggtaggctcaatgagacttaagtaaaactagcgccaccgaggtcttgcttcctcctctctccttgtcccttccccatgcagccatcgcgctcctcaaggaccaggagccgggggccttcatcatccgcgacagtcactccttccgaggcgcgtacgggctggccatgaaggtgtcttcgccacctccaaccatcatgcagcagaataaaaaaggagacatgacccatgagctggtcaggcattttctgatagagactggccccagaggagtcaagctcaagggctgccccaatgagccaaacttcggatcgctgtctgccctggtctaccagcactccatcatcccattggccctgccttgcaagctggtcattccaaaccgagaccccacagatgaatcgaaagatagctccggccctgccaactcaactgcagacctgctgaaacaaggggcagcctgcaatgtgctcttcatcaactctgtggacatggagtcactcactgggccacaggccatctctaaagccacatctgagacgttggctgcagaccccacgccagctgccaccatcgttcacttcaaagtctctgcccagggaatcactctgactgacaaccagagaaagctctttttcagacgccactaccctctcaacactgtcaccttctgtgacctggatccacaggaaagaaagtggatgaaaacagagggtggtgcccctgctaagctcttcggcttcgtggcccggaagcagggcagcaccacggacaacgcctgccacctctttgctgagcttgaccccaaccagccggcctctgccatcgtcaacttcgtctccaaggtcatgctgaatgccggccaaaagagatgaaccctgccccttgcccagggccagtgccatggggaaggggcttgtggggaggggacccatgaatcctgaccactcttgaacccagaaggaggactttgggccaatttcggaggagagaagaaagtgcaacgtggggagagggaagtgaattgcagaggggagggggaagagagagagagagagagagagagagagagagagagagagaaagatggaggagaagaacttggattcccctgggtagatggaaactgcaaaaacccaaagcctccaaaactaaccaggtccacctaacaccccctccctcccctaagaagatggatgtcctcaaaagagaaggaacaaacctccttgggaatccacattttttgggggaatggaaaagctctgtctccctaactcaactgctttgcaaggggaaatcaagctgggagaatctttttctggccacctgtagggtaggttgtcaaaccaaacagagccaccgtgggacatcaagtggaagaacttgtttgcttgaaagtatctcagacccaaggcacctcaggtctctttgctgtgcctccactatattgtcgtgtgggtgtgtgtctgcacccacatcctcacacattgatctagatctgcctttatccactcgaattataaacagctcggcttgtccttgtcccatgtgtttgtagacacacatgcatactgtccaaagattagggttggtggtggcagtgcagcaggggagggacaaacaaccaagctatgggtgacagaggctctctcctggtgcctgcacctgcactctagtgaccctgggtgccgccagacccttctcttctacaaagaccccagcaggagtgggagggtctgcaatggcatcgccctgtcctgccttggccagaagcctggagctttggtttgaggaggtagagatatgtgtatccataggaagagatctgtcagaacaggcagctgttgagctcggggtgtcttccccaaggcatgtggctcagcagcaagaaaggcaagttgctcctgctggggccctggactctgccttagctcccacctctcagccttgttattgggtttcatgcccctggaccagccttatctcagacctgcttacctgcatgatgcctttttgggggctggggattgagtcttgctgctctgcccagccctgttctattctgcagggtccctgtgttggaattctccctggggaacctactttctgctcagtgaggctccggccagaaacctggagtccttatcctcccctctgtaagtgttttagggtctggcttttgcaggcaccctctgacctcagcagagctcctgggcctgctgcctgcacaccacatcgcctacctacaatgccaaagcctcactgtcaccctttctgccttggtttccctagctgagccacgctgcccatgcagcagagggcagaaggcttgcacttgggccaaagggcctaaggtccactggacagttgggaaaacacctgaccaccatttaaggactctaagccagaatggaaaattcaccaggactccattcttaagcctatgcgagtcccctagagagaggcattgtactgatatataaatattatataatatatacatgagacatactgacagaatctgtaagctaataaaatgtaagaaaaggttaaaaaaagaataggtaaattgacaagaagtatttattgtttttccatattgctttattgccttccttggggataaaccaattcctatccttttttatatgtgtaagtaaagcctgaagtgtagggggcctttgttcttgaagcagccagggtctccttgccctggccttggccttccctagactgtgtggggctcagcattgggaggggttgcacatgtcccagcctttggcccccttacttttcagcaagccaggggcccagcagtcagctcccaggatgtgtggggagctgtccctgactctgcaggcctgagcgagtgtgtgagcatgcggggacatgggtgtgtatggcacacataggtgcgtgtgtgtcttttgtattttttctcctccaaggagctgtgtcagtgtggacgttctgtttcagggagttggaaaggagggtgtctgcagaaggtggagagcaggggcagaggccccactggccaccccctgcttcccagagtgaaaccttgtgcctggtgaccaaagtccctccaaagtgctcttccttctgggttattcaagccaaatatctgggtttccccctctcctcattccctagcaaaccccaattatcttccaagataggagatatttcccatccccttcctttgtaaatatctcatctcccactggagagcccaggagcctattcctggcatggatgttctgtccacacttgaggctgggcggtgtatcagacccttcaagcagcctggctggggcccaggactgagtctggggtcagctttcacggtcgcttttcccttcctcaccacccaccacagcccaccttgcatgcatggccagcccctccactccagcctgagccatgtgtgcccctgcgggaggacccattcatgccagaaagctggtaactccctcccagcatccctgcggaaggagtcagtttctgagagtgtgacttttcaaggcgaatgatggggaagggttccccagtccccacagtggccccacctctgggccctgcaccagagcccttctgtgtcacggcgggctgtgcacccatgcacacacctacgcacacacaacactccgcactgcagtatattcttgccaaagatttcctttaaaagcaagcacttttactaattattattttgtaaatgtttatcttcttctgtcttctccctccctgaatctattttactgttgtttattgttgaatctgtgtgtcagccaggagagcgctgtctggccttgaacatgggctgggatgggaaagggtctgggagaagatgggcaacaaagagccagggagtcatggacatcgcagcgacgcagaccccagcaggttcagtcccgtgctgccaccagctgtccagctgggtgtctggagggaagagggcagaggagggtcatgtcccttcagctgggggaggggcccagtgagctccacgtggctttttcccaaagggagcaagagggaaggattgggcgagaaaacaatggagaggggacctgcgaaggaaaacagggaggaagtgagcggtttgatcagcctgctatcacggtgttctggctctcttatttagccaggcgcttaagggacagatacatcacatcctaagtttgggaaaggcctttgacccatgtcatctgagcgtctcctccagtagctctgaaagctgtggacaccaatggccaggattccttctcccctggtttttgaggatccctgggtcttctgagactggccaggagagggatggtggggccagtggttgtgtgaaagcaggaggggcagccctcctggacaagtgtgatccccctataaacggctctcaggaggttagtgagtaggagattctgccttgttctgatgagcctgtgcaggggctccaggggagcatgctgtccagggggcacagaagggtggtgagtgtgatcaaatctagtctcactcccactttttagtctcactcctacttttgtccaccacccctgcctcctggatcttctcccactttttttttcagctttaggacctggggagatcctgtgagtcaaggcagacacccaatcctgcccccacactcggggtcctccaagaggttggggggcagagtcccagagcagccctttaccccaggtccaggccctggaatcctgagactcgcgtttccttggccagtggtaacacaggacgtgtgtgcgcatgtgcaagtgtggatgtatgtgtgtgcgtgtgttttgctcatttctttagggaacttgggagtcggggttggaggtgctgggcaatggaacttcaaattcaatgtcgcccagcagtgaggggagtcgggaggtgaggcctgtaggccaaccaattggtggagtctcagcgatagcccaggtgagaagtggttcacccagaggggcagggtgggggcctcgggcagatctgtccctcttggcccctctgtcctcaaatgtccaaaatgttggaggacctctgttcatatcccacgcctgggctcttgccagcagtggagttactgtagagggatgtcccaagcttgttttccaatcagtgttaagctgtttgaaactctcctgtgtctgtgttttgtttgtgcgtgtgtgtgagagcacatcagtgtgtgcaggctgtgtttccccatttctctcctcccttcagacccatcattgagaacaaatgtaagaaatcccttcccaccaccctccctgcctcccaggccctctgcgggggaaacaagatcacccagcatccttccccaccccagctgtgtatttatatagatggaaatatactttatattttgtatcatcgtgcctatagccgctgccaccgtgtataaatcctggtgtatgctccttatcctggacatgaatgtattgtacactgacgcgtccccactcctgtacagctgctttgtttctttgcaatgcattgtatggctttataaatgataaagttaagaaaaaactcagaaacgaaatcta

SEQ ID NO: 318061 - DNA, 7247 bp, Homo sapiens
  misc_feature (3737)..(3737): n is a, c, g, or t
  misc_feature (3848)..(3848): n is a, c, g, or t
ctgctccttgcaccccgctccctgcctggacacaggctcactcgctgccttcttctgggggaaaccagcttcttgccagccacagctgctgcctccgccactggccaccgcccctgtcctgggagtcccttggcccagacacccacctgacttagtggctcctctgcaggaaaggtggctgccccctgcgttcctccatccaaccatgagctggtgcccatcaccactgagaatgcaccaaagaatgtagtggacaagggagaaggaggctcccggggtggaaacacacggaaaagcctcgaggacaacggctccaccagggtcaccccgagtgtccagccccacctccagcccatcagaaacatgagtgtgagccggaccatggaggacagctgtgagctggacctggtgtacgtcacagagaggatcatcgctgtctccttccccagcacagccaatgaggagaacttccggagcaacctccgtgaggtggcgcagatgctcaagtccaaacatggaggcaactacctgctttcaacctctctgagcggagacctgacatcacgaagctccatgccaaggtactggaatttggctggcccgacctccacaccccagccctggagaagatctgcagcatctgtaaggccatggacacatggctcaatgcagaccctcacaatgtcgttgttctacacaacaagggaaaccgaggcaggataggagttgtcatcgcggcttacatgcactacagcaacatttctgccagtgcggaccaggctctggaccggtttgcaatgaagcggttctatgaggataagattgtgcccattggccagccatcccaaagaaggtacgtgcattacttcagtggcctgctctccggctccatcaaaatgaacaacaagcccttgtttctgcaccacgtgatcatgcacggcatccccaactttgagtctaaaggaggatgtcggccatttctccgcatctaccaggccatgcaacctgtgtacacatctggcatctacaacatcccaggagacagccagactagcgtctgcatcaccatcgagccaggactgctcttgaagggagacatcttgctgaagtgctaccacaagaagttccgaagcccagcccgagacgtcatcttccgtgtgcagttccacacctgtgccatccatgacctgggggttgtctttgggaaggaggaccttgatgatgctttcaaagatgatcgatttccagagtatggcaaagtggagtttgtattttcttatgggccagagaaaattcaaggcatggagcacctggagaacgggccgagcgtgtctgtggactataacacctctgaccccctcatccgctgggactcctacgacaacttcagtgggcatcgagatgacggcatggaggaggtggtgggacacacgcaggggccactagatgggagcctgtatgctaaggtgaagaagaaagactccctgcacggcagcaccggggctgttaatgccacacgtcctacactgtcggccacccccaaccacgtggaacacacgctttctgtgagcagcgactcgggcaactccacagcctccaccaagaccgacaagaccgacgagcctgtccccggggcctccagtgccactgctgccttgagtccccaggagaagcgggagctggaccgcctgctgagtggctttggcttagagcgagagaagcaaggcgccatgtaccacacccagcacctcaggtcccgcccagcagggggctcggctgtgccctcctctggacgccacgttgtcccagcccaggttcatgtcaatggtggggcgttagcatctgagcgggagacagacatcctggacgatgaattgccaaaccaggatggtcacagtgcgggcagcatgggcacactctcttctctggacggggtcaccaacaccagtgaggggggctacccagaggccctgtccccactgaccaacggtctggacaagtcctaccccatggagcctatggtcaatggaggaggctacccctacgagtctgccagccgggcggggcctgcccatgctggccacacggcccccatgcggccctcctactctgcacaggagggtttagctggctaccagagggaggggccccacccagcctggccacagccagtgaccacctcccactatgcccatgaccccagcggtatgttccgctctcaatccttttcggaagctgaaccccagctgcccccagctccggtccgagggggaagcagccgggaggctgtgcaaaggggactgaattcgtggcagcagcagcagcagcagcagcagcagcctcgcccacctccacgccagcaggaaagagcccacttggagagtcttgtagccagcaggcccagccctcagccattggcagagacccccatccccagtctccctgagttcccgcgagcagcctcccagcaggagattgaacagtccatcgaaacactcaatatgctgatgctggacctggagccagcctccgctgctgccccactacacaagtcccagagtgtccccggggcctggccaggggcttctccactctcctcccagcccctctctggatcctcccgtcagtcccatccactgacccagtccagatctggctatatccccagtgggcattcgttgggaacccctgagccagccccacgggcctctctggagtctgtccctcctggcaggtcttactcaccttatgactatcagccatgtttggctgggcctaaccaggatttccattcaaagagcccagcctcttcctccttgcctgccttccttccgaccacccacagccctccagggcctcagcaacccccagcctctctccctggcctcactgctcagcctctgctctcaccaaaggaagcgacttcagacccctcccggactccagaggaggagccattgaatttagaagggctggtggcccacagggtagcaggggtacaggctcgggagaagcagcctgcagagcccccagcccctctgcggaggcgggcggccagtgatggacagtatgagaaccagtctccagaagccacatcccctcgtagccctggggttcgctcccctgtccagtgtgtctccccggagctggctcttaccatcgctctcaatcctggagggcggcccaaagagccccatttgcacagctacaaggaggccttcgaggagatggagggaacctccccgagcagcccaccacccagtggggtgcggtcccccccgggtctggccaagacacccctgtctgctctgggcctgaaacctcacaacccagcggacatcctgttgcaccccacaggagttaccagaagacggatccagccagaggaagatgaggggaaggtggtggtcaggctgtcagaagagccccggagctatgtggagtctgtggcacggacagcggtggctggaccccgagctcaggactctgagcccaagagctttagtgctccagccacccaggcctatggccatgagatacccctgaggaacgggaccctgggtggctcctttgtctcccccagccccctctccaccagcagccccatcctcagtgctgacagcacttcagtggggagtttcccgtcgggagagagcagtgaccagggtccccggacgcccacccagcctctgttggagtctggcttccgctcaggcagcctgggacagcccagcccntctgcccagagaaactaccagagctcttctcctctcccgactgtgggcagtagctacagcagccccgactactcacttcagcatttcagctcctctccggaaagccaggcncgagctcagttcagtgtggctggcgtccacacggtgcctgggagccctcaggcgcgccacagaacagtgggcaccaacactccccctagtcctggcttcggccggcgggccatcaatcccagcatggctgcccccagcagtcccagtttgagccatcaccagatgatgggtccaccaggcactggcttccatggtagcactgtctccagcccccagagcagtgcagcgaccaccccggggagccccagcctgtgtcggcacccagcaggggtctaccaggtttctggcctccacaacaaagtggccaccaccccggggagtcccagcctgggccggcaccctggggctcaccaaggcaacctggcctccggtcttcatagcaatgcaatagccagccctggaagccccagcctgggccgtcacctcggagggtctggatctgtggttcccggcagcccctgcttggaccggcatgtggcctatggtggctattctaccccggaggatcggagacccacactgtcccggcagagcagtgcctctggctaccaggctccttccacgccctccttccctgtctcccctgcctactaccctggcctgagcagccctgccacctccccgtcaccagactccgcagccttccggcaagggagcccaacaccagccttgccagagaagcgaaggatgtcagtgggagaccgggcaggcagcctccccaactatgccaccatcaatgggaaggtgtcttcgcctgtcgccagcggcatgtccagtcccagtgggggcagcaccgtctccttctcccacactctgcccgacttctccaagtactccatgccagacaacagcccggagacgcgggctaaagtgaagtttgtccaggacacttctaagtattggtacaagcctgagatctccagggagcaggccatcgcgctcctcaaggaccaggagccgggggccttcatcatccgcgacagtcactccttccgaggcgcgtacgggctggccatgaaggtgtcttcgccacctccaaccatcatgcagcagaataaaaaaggagacatgacccatgagctggtcaggcattttctgatagagactggccccagaggagtcaagctcaagggctgccccaatgagccaaacttcggatcgctgtctgccctggtctaccagcactccatcatcccattggccctgccttgcaagctggtcattccaaaccgagaccccacagatgaatcgaaagatagctccggccctgccaactcaactgcagacctgctgaaacaaggggcagcctgcaatgtgctcttcatcaactctgtggacatggagtcactcactgggccacaggccatctctaaagccacatctgagacgttggctgcagaccccacgccagctgccaccatcgttcacttcaaagtctctgcccagggaatcactctgactgacaaccagagaaagctctttttcagacgccactaccctctcaacactgtcaccttctgtgacctggatccacaggaaagaaagtggatgaaaacagagggtggtgcccctgctaagctcttcggcttcgtggcccggaagcagggcagcaccacggacaacgcctgccacctctttgctgagcttgaccccaaccagccggcctctgccatcgtcaacttcgtctccaaggtcatgctgaatgccggccaaaagagatgaaccctgccccttgcccagggccagtgccatggggaaggggcttgtggggaggggacccatgaatcctgaccactcttgaacccagaaggaggactttgggccaatttcggaggagagaagaaagtgcaacgtggggagagggaagtgaattgcagaggggagggggaagagagagagagagagagagagagagagagagagagagagaaagatggaggagaagaacttggattcccctgggtagatggaaactgcaaaaacccaaagcctccaaaactaaccaggtccacctaacaccccctccctcccctaagaagatggatgtcctcaaaagagaaggaacaaacctccttgggaatccacattttttgggggaatggaaaagctctgtctccctaactcaactgctttgcaaggggaaatcaagctgggagaatctttttctggccacctgtagggtaggttgtcaaaccaaacagagccaccgtgggacatcaagtggaagaacttgtttgcttgaaagtatctcagacccaaggcacctcaggtctctttgctgtgcctccactatattgtcgtgtgggtgtgtgtctgcacccacatcctcacacattgatctagatctgcctttatccactcgaattataaacagctcggcttgtccttgtcccatgtgtttgtagacacacatgcatactgtccaaagattagggttggtggtggcagtgcagcaggggagggacaaacaaccaagctatgggtgacagaggctctctcctggtgcctgcacctgcactctagtgaccctgggtgccgccagacccttctcttctacaaagaccccagcaggagtgggagggtctgcaatggcatcgccctgtcctgccttggccagaagcctggagctttggtttgaggaggtagagatatgtgtatccataggaagagatctgtcagaacaggcagctgttgagctcggggtgtcttccccaaggcatgtggctcagcagcaagaaaggcaagttgctcctgctggggccctggactctgccttagctcccacctctcagccttgttattgggtttcatgcccctggaccagccttatctcagacctgcttacctgcatgatgcctttttgggggctggggattgagtcttgctgctctgcccagccctgttctattctgcagggtccctgtgttggaattctccctggggaacctactttctgctcagtgaggctccggccagaaacctggagtccttatcctcccctctgtaagtgttttagggtctggcttttgcaggcaccctctgacctcagcagagctcctgggcctgctgcctgcacaccacatcgcctacctacaatgccaaagcctcactgtcaccctttctgccttggtttccctagctgagccacgctgcccatgcagcagagggcagaaggcttgcacttgggccaaagggcctaaggtccactggacagttgggaaaacacctgaccaccatttaaggactctaagccagaatggaaaattcaccaggactccattcttaagcctatgcgagtcccctagagagaggcattgtactgatatataaatattatataatatatacatgagacatactgacagaatctgtaagctaataaaatgtaagaaaaggtta

SEQ ID NO: 318062 - DNA, 8791 bp, Homo sapiens
  misc_feature (3737)..(3737): n is a, c, g, or t
  misc_feature (3848)..(3848): n is a, c, g, or t
  misc_feature (8759)..(8759): n is a, c, g, or t
  misc_feature (8771)..(8771): n is a, c, g, or t
  misc_feature (8778)..(8778): n is a, c, g, or t
  misc_feature (8781)..(8781): n is a, c, g, or t
ctgctccttgcaccccgctccctgcctggacacaggctcactcgctgccttcttctgggggaaaccagcttcttgccagccacagctgctgcctccgccactggccaccgcccctgtcctgggagtcccttggcccagacacccacctgacttagtggctcctctgcaggaaaggtggctgccccctgcgttcctccatccaaccatgagctggtgcccatcaccactgagaatgcaccaaagaatgtagtggacaagggagaaggaggctcccggggtggaaacacacggaaaagcctcgaggacaacggctccaccagggtcaccccgagtgtccagccccacctccagcccatcagaaacatgagtgtgagccggaccatggaggacagctgtgagctggacctggtgtacgtcacagagaggatcatcgctgtctccttccccagcacagccaatgaggagaacttccggagcaacctccgtgaggtggcgcagatgctcaagtccaaacatggaggcaactacctgctttcaacctctctgagcggagacctgacatcacgaagctccatgccaaggtactggaatttggctggcccgacctccacaccccagccctggagaagatctgcagcatctgtaaggccatggacacatggctcaatgcagaccctcacaatgtcgttgttctacacaacaagggaaaccgaggcaggataggagttgtcatcgcggcttacatgcactacagcaacatttctgccagtgcggaccaggctctggaccggtttgcaatgaagcggttctatgaggataagattgtgcccattggccagccatcccaaagaaggtacgtgcattacttcagtggcctgctctccggctccatcaaaatgaacaacaagcccttgtttctgcaccacgtgatcatgcacggcatccccaactttgagtctaaaggaggatgtcggccatttctccgcatctaccaggccatgcaacctgtgtacacatctggcatctacaacatcccaggagacagccagactagcgtctgcatcaccatcgagccaggactgctcttgaagggagacatcttgctgaagtgctaccacaagaagttccgaagcccagcccgagacgtcatcttccgtgtgcagttccacacctgtgccatccatgacctgggggttgtctttgggaaggaggaccttgatgatgctttcaaagatgatcgatttccagagtatggcaaagtggagtttgtattttcttatgggccagagaaaattcaaggcatggagcacctggagaacgggccgagcgtgtctgtggactataacacctctgaccccctcatccgctgggactcctacgacaacttcagtgggcatcgagatgacggcatggaggaggtggtgggacacacgcaggggccactagatgggagcctgtatgctaaggtgaagaagaaagactccctgcacggcagcaccggggctgttaatgccacacgtcctacactgtcggccacccccaaccacgtggaacacacgctttctgtgagcagcgactcgggcaactccacagcctccaccaagaccgacaagaccgacgagcctgtccccggggcctccagtgccactgctgccttgagtccccaggagaagcgggagctggaccgcctgctgagtggctttggcttagagcgagagaagcaaggcgccatgtaccacacccagcacctcaggtcccgcccagcagggggctcggctgtgccctcctctggacgccacgttgtcccagcccaggttcatgtcaatggtggggcgttagcatctgagcgggagacagacatcctggacgatgaattgccaaaccaggatggtcacagtgcgggcagcatgggcacactctcttctctggacggggtcaccaacaccagtgaggggggctacccagaggccctgtccccactgaccaacggtctggacaagtcctaccccatggagcctatggtcaatggaggaggctacccctacgagtctgccagccgggcggggcctgcccatgctggccacacggcccccatgcggccctcctactctgcacaggagggtttagctggctaccagagggaggggccccacccagcctggccacagccagtgaccacctcccactatgcccatgaccccagcggtatgttccgctctcaatccttttcggaagctgaaccccagctgcccccagctccggtccgagggggaagcagccgggaggctgtgcaaaggggactgaattcgtggcagcagcagcagcagcagcagcagcagcctcgcccacctccacgccagcaggaaagagcccacttggagagtcttgtagccagcaggcccagccctcagccattggcagagacccccatccccagtctccctgagttcccgcgagcagcctcccagcaggagattgaacagtccatcgaaacactcaatatgctgatgctggacctggagccagcctccgctgctgccccactacacaagtcccagagtgtccccggggcctggccaggggcttctccactctcctcccagcccctctctggatcctcccgtcagtcccatccactgacccagtccagatctggctatatccccagtgggcattcgttgggaacccctgagccagccccacgggcctctctggagtctgtccctcctggcaggtcttactcaccttatgactatcagccatgtttggctgggcctaaccaggatttccattcaaagagcccagcctcttcctccttgcctgccttccttccgaccacccacagccctccagggcctcagcaacccccagcctctctccctggcctcactgctcagcctctgctctcaccaaaggaagcgacttcagacccctcccggactccagaggaggagccattgaatttagaagggctggtggcccacagggtagcaggggtacaggctcgggagaagcagcctgcagagcccccagcccctctgcggaggcgggcggccagtgatggacagtatgagaaccagtctccagaagccacatcccctcgtagccctggggttcgctcccctgtccagtgtgtctccccggagctggctcttaccatcgctctcaatcctggagggcggcccaaagagccccatttgcacagctacaaggaggccttcgaggagatggagggaacctccccgagcagcccaccacccagtggggtgcggtcccccccgggtctggccaagacacccctgtctgctctgggcctgaaacctcacaacccagcggacatcctgttgcaccccacaggagttaccagaagacggatccagccagaggaagatgaggggaaggtggtggtcaggctgtcagaagagccccggagctatgtggagtctgtggcacggacagcggtggctggaccccgagctcaggactctgagcccaagagctttagtgctccagccacccaggcctatggccatgagatacccctgaggaacgggaccctgggtggctcctttgtctcccccagccccctctccaccagcagccccatcctcagtgctgacagcacttcagtggggagtttcccgtcgggagagagcagtgaccagggtccccggacgcccacccagcctctgttggagtctggcttccgctcaggcagcctgggacagcccagcccntctgcccagagaaactaccagagctcttctcctctcccgactgtgggcagtagctacagcagccccgactactcacttcagcatttcagctcctctccggaaagccaggcncgagctcagttcagtgtggctggcgtccacacggtgcctgggagccctcaggcgcgccacagaacagtgggcaccaacactccccctagtcctggcttcggccggcgggccatcaatcccagcatggctgcccccagcagtcccagtttgagccatcaccagatgatgggtccaccaggcactggcttccatggtagcactgtctccagcccccagagcagtgcagcgaccaccccggggagccccagcctgtgtcggcacccagcaggggtctaccaggtttctggcctccacaacaaagtggccaccaccccggggagtcccagcctgggccggcaccctggggctcaccaaggcaacctggcctccggtcttcatagcaatgcaatagccagccctggaagccccagcctgggccgtcacctcggagggtctggatctgtggttcccggcagcccctgcttggaccggcatgtggcctatggtggctattctaccccggaggatcggagacccacactgtcccggcagagcagtgcctctggctaccaggctccttccacgccctccttccctgtctcccctgcctactaccctggcctgagcagccctgccacctccccgtcaccagactccgcagccttccggcaagggagcccaacaccagccttgccagagaagcgaaggatgtcagtgggagaccgggcaggcagcctccccaactatgccaccatcaatgggaaggtgtcttcgcctgtcgccagcggcatgtccagtcccagtgggggcagcaccgtctccttctcccacactctgcccgacttctccaagtactccatgccagacaacagcccggagacgcgggctaaagtgaagtttgtccaggacacttctaagtattggtacaagcctgagatctccagggagcaggccatcgcgctcctcaaggaccaggagccgggggccttcatcatccgcgacagtcactccttccgaggcgcgtacgggctggccatgaaggtgtcttcgccacctccaaccatcatgcagcagaataaaaaaggagacatgacccatgagctggtcaggcattttctgatagagactggccccagaggagtcaagctcaagggctgccccaatgagccaaacttcggatcgctgtctgccctggtctaccagcactccatcatcccattggccctgccttgcaagctggtcattccaaaccgagaccccacagatgaatcgaaagatagctccggccctgccaactcaactgcagacctgctgaaacaaggggcagcctgcaatgtgctcttcatcaactctgtggacatggagtcactcactgggccacaggccatctctaaagccacatctgagacgttggctgcagaccccacgccagctgccaccatcgttcacttcaaagtctctgcccagggaatcactctgactgacaaccagagaaagctctttttcagacgccactaccctctcaacactgtcaccttctgtgacctggatccacaggaaagaaagtggatgaaaacagagggtggtgcccctgctaagctcttcggcttcgtggcccggaagcagggcagcaccacggacaacgcctgccacctctttgctgagcttgaccccaaccagccggcctctgccatcgtcaacttcgtctccaaggtcatgctgaatgccggccaaaagagatgaaccctgccccttgcccagggccagtgccatggggaaggggcttgtggggaggggacccatgaatcctgaccactcttgaacccagaaggaggactttgggccaatttcggaggagagaagaaagtgcaacgtggggagagggaagtgaattgcagaggggagggggaagagagagagagagagagagagagagagagagagagagagaaagatggaggagaagaacttggattcccctgggtagatggaaactgcaaaaacccaaagcctccaaaactaaccaggtccacctaacaccccctccctcccctaagaagatggatgtcctcaaaagagaaggaacaaacctccttgggaatccacattttttgggggaatggaaaagctctgtctccctaactcaactgctttgcaaggggaaatcaagctgggagaatctttttctggccacctgtagggtaggttgtcaaaccaaacagagccaccgtgggacatcaagtggaagaacttgtttgcttgaaagtatctcagacccaaggcacctcaggtctctttgctgtgcctccactatattgtcgtgtgggtgtgtgtctgcacccacatcctcacacattgatctagatctgcctttatccactcgaattataaacagctcggcttgtccttgtcccatgtgtttgtagacacacatgcatactgtccaaagattagggttggtggtggcagtgcagcaggggagggacaaacaaccaagctatgggtgacagaggctctctcctggtgcctgcacctgcactctagtgaccctgggtgccgccagacccttctcttctacaaagaccccagcaggagtgggagggtctgcaatggcatcgccctgtcctgccttggccagaagcctggagctttggtttgaggaggtagagatatgtgtatccataggaagagatctgtcagaacaggcagctgttgagctcggggtgtcttccccaaggcatgtggctcagcagcaagaaaggcaagttgctcctgctggggccctggactctgccttagctcccacctctcagccttgttattgggtttcatgcccctggaccagccttatctcagacctgcttacctgcatgatgcctttttgggggctggggattgagtcttgctgctctgcccagccctgttctattctgcagggtccctgtgttggaattctccctggggaacctactttctgctcagtgaggctccggccagaaacctggagtccttatcctcccctctgtaagtgttttagggtctggcttttgcaggcaccctctgacctcagcagagctcctgggcctgctgcctgcacaccacatcgcctacctacaatgccaaagcctcactgtcaccctttctgccttggtttccctagctgagccacgctgcccatgcagcagagggcagaaggcttgcacttgggccaaagggcctaaggtccactggacagttgggaaaacacctgaccaccatttaaggactctaagccagaatggaaaattcaccaggactccattcttaagcctatgcgagtcccctagagagaggcattgtactgatatataaatattatataatatatacatgagacatactgacagaatctgtaagctaataaaatgtaagaaaaggttaaaaaaagaataggtaaattgacaagaagtatttattgtttttccatattgctttattgccttccttggggataaaccaattcctatccttttttatatgtgtaagtaaagcctgaagtgtagggggcctttgttcttgaagcagccagggtctccttgccctggccttggccttccctagactgtgtggggctcagcattgggaggggttgcacatgtcccagcctttggcccccttacttttcagcaagccaggggcccagcagtcagctcccaggatgtgtggggagctgtccctgactctgcaggcctgagcgagtgtgtgagcatgcggggacatgggtgtgtatggcacacataggtgcgtgtgtgtcttttgtattttttctcctccaaggagctgtgtcagtgtggacgttctgtttcagggagttggaaaggagggtgtctgcagaaggtggagagcaggggcagaggccccactggccaccccctgcttcccagagtgaaaccttgtgcctggtgaccaaagtccctccaaagtgctcttccttctgggttattcaagccaaatatctgggtttccccctctcctcattccctagcaaaccccaattatcttccaagataggagatatttcccatccccttcctttgtaaatatctcatctcccactggagagcccaggagcctattcctggcatggatgttctgtccacacttgaggctgggcggtgtatcagacccttcaagcagcctggctggggcccaggactgagtctggggtcagctttcacggtcgcttttcccttcctcaccacccaccacagcccaccttgcatgcatggccagcccctccactccagcctgagccatgtgtgcccctgcgggaggacccattcatgccagaaagctggtaactccctcccagcatccctgcggaaggagtcagtttctgagagtgtgacttttcaaggcgaatgatggggaagggttccccagtccccacagtggccccacctctgggccctgcaccagagcccttctgtgtcacggcgggctgtgcacccatgcacacacctacgcacacacaacactccgcactgcagtatattcttgccaaagatttcctttaaaagcaagcacttttactaattattattttgtaaatgtttatcttcttctgtcttctccctccctgaatctattttactgttgtttattgttgaatctgtgtgtcagccaggagagcgctgtctggccttgaacatgggctgggatgggaaagggtctgggagaagatgggcaacaaagagccagggagtcatggacatcgcagcgacgcagaccccagcaggttcagtcccgtgctgccaccagctgtccagctgggtgtctggagggaagagggcagaggagggtcatgtcccttcagctgggggaggggcccagtgagagcggggtgccatgtggcgttgggccccaagtcagccatagaaggagttttgttcncctcccaagtgncggttgnttncccaaataat

SEQ ID NO: 318063 - DNA, 6237 bp, Homo sapiens
  misc_feature (3737)..(3737): n is a, c, g, or t
  misc_feature (3848)..(3848): n is a, c, g, or t
ctgctccttgcaccccgctccctgcctggacacaggctcactcgctgccttcttctgggggaaaccagcttcttgccagccacagctgctgcctccgccactggccaccgcccctgtcctgggagtcccttggcccagacacccacctgacttagtggctcctctgcaggaaaggtggctgccccctgcgttcctccatccaaccatgagctggtgcccatcaccactgagaatgcaccaaagaatgtagtggacaagggagaaggaggctcccggggtggaaacacacggaaaagcctcgaggacaacggctccaccagggtcaccccgagtgtccagccccacctccagcccatcagaaacatgagtgtgagccggaccatggaggacagctgtgagctggacctggtgtacgtcacagagaggatcatcgctgtctccttccccagcacagccaatgaggagaacttccggagcaacctccgtgaggtggcgcagatgctcaagtccaaacatggaggcaactacctgctttcaacctctctgagcggagacctgacatcacgaagctccatgccaaggtactggaatttggctggcccgacctccacaccccagccctggagaagatctgcagcatctgtaaggccatggacacatggctcaatgcagaccctcacaatgtcgttgttctacacaacaagggaaaccgaggcaggataggagttgtcatcgcggcttacatgcactacagcaacatttctgccagtgcggaccaggctctggaccggtttgcaatgaagcggttctatgaggataagattgtgcccattggccagccatcccaaagaaggtacgtgcattacttcagtggcctgctctccggctccatcaaaatgaacaacaagcccttgtttctgcaccacgtgatcatgcacggcatccccaactttgagtctaaaggaggatgtcggccatttctccgcatctaccaggccatgcaacctgtgtacacatctggcatctacaacatcccaggagacagccagactagcgtctgcatcaccatcgagccaggactgctcttgaagggagacatcttgctgaagtgctaccacaagaagttccgaagcccagcccgagacgtcatcttccgtgtgcagttccacacctgtgccatccatgacctgggggttgtctttgggaaggaggaccttgatgatgctttcaaagatgatcgatttccagagtatggcaaagtggagtttgtattttcttatgggccagagaaaattcaaggcatggagcacctggagaacgggccgagcgtgtctgtggactataacacctctgaccccctcatccgctgggactcctacgacaacttcagtgggcatcgagatgacggcatggaggaggtggtgggacacacgcaggggccactagatgggagcctgtatgctaaggtgaagaagaaagactccctgcacggcagcaccggggctgttaatgccacacgtcctacactgtcggccacccccaaccacgtggaacacacgctttctgtgagcagcgactcgggcaactccacagcctccaccaagaccgacaagaccgacgagcctgtccccggggcctccagtgccactgctgccttgagtccccaggagaagcgggagctggaccgcctgctgagtggctttggcttagagcgagagaagcaaggcgccatgtaccacacccagcacctcaggtcccgcccagcagggggctcggctgtgccctcctctggacgccacgttgtcccagcccaggttcatgtcaatggtggggcgttagcatctgagcgggagacagacatcctggacgatgaattgccaaaccaggatggtcacagtgcgggcagcatgggcacactctcttctctggacggggtcaccaacaccagtgaggggggctacccagaggccctgtccccactgaccaacggtctggacaagtcctaccccatggagcctatggtcaatggaggaggctacccctacgagtctgccagccgggcggggcctgcccatgctggccacacggcccccatgcggccctcctactctgcacaggagggtttagctggctaccagagggaggggccccacccagcctggccacagccagtgaccacctcccactatgcccatgaccccagcggtatgttccgctctcaatccttttcggaagctgaaccccagctgcccccagctccggtccgagggggaagcagccgggaggctgtgcaaaggggactgaattcgtggcagcagcagcagcagcagcagcagcagcctcgcccacctccacgccagcaggaaagagcccacttggagagtcttgtagccagcaggcccagccctcagccattggcagagacccccatccccagtctccctgagttcccgcgagcagcctcccagcaggagattgaacagtccatcgaaacactcaatatgctgatgctggacctggagccagcctccgctgctgccccactacacaagtcccagagtgtccccggggcctggccaggggcttctccactctcctcccagcccctctctggatcctcccgtcagtcccatccactgacccagtccagatctggctatatccccagtgggcattcgttgggaacccctgagccagccccacgggcctctctggagtctgtccctcctggcaggtcttactcaccttatgactatcagccatgtttggctgggcctaaccaggatttccattcaaagagcccagcctcttcctccttgcctgccttccttccgaccacccacagccctccagggcctcagcaacccccagcctctctccctggcctcactgctcagcctctgctctcaccaaaggaagcgacttcagacccctcccggactccagaggaggagccattgaatttagaagggctggtggcccacagggtagcaggggtacaggctcgggagaagcagcctgcagagcccccagcccctctgcggaggcgggcggccagtgatggacagtatgagaaccagtctccagaagccacatcccctcgtagccctggggttcgctcccctgtccagtgtgtctccccggagctggctcttaccatcgctctcaatcctggagggcggcccaaagagccccatttgcacagctacaaggaggccttcgaggagatggagggaacctccccgagcagcccaccacccagtggggtgcggtcccccccgggtctggccaagacacccctgtctgctctgggcctgaaacctcacaacccagcggacatcctgttgcaccccacaggagttaccagaagacggatccagccagaggaagatgaggggaaggtggtggtcaggctgtcagaagagccccggagctatgtggagtctgtggcacggacagcggtggctggaccccgagctcaggactctgagcccaagagctttagtgctccagccacccaggcctatggccatgagatacccctgaggaacgggaccctgggtggctcctttgtctcccccagccccctctccaccagcagccccatcctcagtgctgacagcacttcagtggggagtttcccgtcgggagagagcagtgaccagggtccccggacgcccacccagcctctgttggagtctggcttccgctcaggcagcctgggacagcccagcccntctgcccagagaaactaccagagctcttctcctctcccgactgtgggcagtagctacagcagccccgactactcacttcagcatttcagctcctctccggaaagccaggcncgagctcagttcagtgtggctggcgtccacacggtgcctgggagccctcaggcgcgccacagaacagtgggcaccaacactccccctagtcctggcttcggccggcgggccatcaatcccagcatggctgcccccagcagtcccagtttgagccatcaccagatgatgggtccaccaggcactggcttccatggtagcactgtctccagcccccagagcagtgcagcgaccaccccggggagccccagcctgtgtcggcacccagcaggggtctaccaggtttctggcctccacaacaaagtggccaccaccccggggagtcccagcctgggccggcaccctggggctcaccaaggcaacctggcctccggtcttcatagcaatgcaatagccagccctggaagccccagcctgggccgtcacctcggagggtctggatctgtggttcccggcagcccctgcttggaccggcatgtggcctatggtggctattctaccccggaggatcggagacccacactgtcccggcagagcagtgcctctggctaccaggctccttccacgccctccttccctgtctcccctgcctactaccctggcctgagcagccctgccacctccccgtcaccagactccgcagccttccggcaagggagcccaacaccagccttgccagagaagcgaaggatgtcagtgggagaccgggcaggcagcctccccaactatgccaccatcaatgggaaggtgtcttcgcctgtcgccagcggcatgtccagtcccagtgggggcagcaccgtctccttctcccacactctgcccgacttctccaagtactccatgccagacaacagcccggagacgcgggctaaagtgaagtttgtccaggacacttctaagtattggtacaagcctgagatctccagggagcaggccatcgcgctcctcaaggaccaggagccgggggccttcatcatccgcgacagtcactccttccgaggcgcgtacgggctggccatgaaggtgtcttcgccacctccaaccatcatgcagcagaataaaaaaggagacatgacccatgagctggtcaggcattttctgatagagactggccccagaggagtcaagctcaagggctgccccaatgagccaaacttcggatcgctgtctgccctggtctaccagcactccatcatcccattggccctgccttgcaagctggtcattccaaaccgagaccccacagatgaatcgaaagatagctccggccctgccaactcaactgcagacctgctgaaacaaggggcagcctgcaatgtgctcttcatcaactctgtggacatggagtcactcactgggccacaggccatctctaaagccacatctgagacgttggctgcagaccccacgccagctgccaccatcgttcacttcaaagtctctgcccagggaatcactctgactgacaaccagagaaagctctttttcagacgccactaccctctcaacactgtcaccttctgtgacctggatccacaggaaagaaagtggatgaaaacagagggtggtgcccctgctaagctcttcggcttcgtggcccggaagcagggcagcaccacggacaacgcctgccacctctttgctgagcttgaccccaaccagccggcctctgccatcgtcaacttcgtctccaaggtcatgctgaatgccggccaaaagagatgaaccctgccccttgcccagggccagtgccatggggaaggggcttgtggggaggggacccatgaatcctgaccactcttgaacccagaaggaggactttgggccaatttcggaggagagaagaaagtgcaacgtggggagagggaagtgaattgcagaggggagggggaagagagagagagagagagagagagagagagagagagagagaaagatggaggagaagaacttggattcccctgggtagatggaaactgcaaaaacccaaagcctccaaaactaaccaggtccacctaacaccccctccctcccctaagaagatggatgtcctcaaaagagaaggaacaaacctccttgggaatccacattttttgggggaatggaaaagctctgtctccctaactcaactgctttgcaaggggaaatcaagctgggagaatctttttctggccacctgtagggtaggttgtcaaaccaaacagagccaccgtgggacatcaagtggaagaacttgtttgcttgaaagtatctcagacccaaggcacctcaggtctctttgctgtgcctccactatattgtcgtgtgggtgtgtgtctgcacccacatcctcacacattgatctagatctgcctttatccactcgaattataaacagctcggcttgtccttg

SEQ ID NO: 318064 - DNA, 586 bp, Homo sapiens
cgcggacgcaagacccgctggggtgcgtctcctcttggccgtggagggcagcaggctggccggtgctcacttggctgggccaggagcaaccctccactcccagcctatcctctgggtgtgcatgtgtgtgtgtctgtggttgtgtttctgtgtgtatgtgtctatggatgtgtgtttcagtctgtgttttgtttgtgcgtgtgtgtgagagcacatcagtgtgtgcaggctgtgtttccccatttctctcctcccttcagacccatcattgagaacaaatgtaagaaatcccttcccaccaccctccctgcctcccaggccctctgcgggggaaacaagatcacccagcatccttccccaccccagctgtgtatttatatagatggaaatatactttatattttgtatcatcgtgcctatagccgctgccaccgtgtataaatcctggtgtatgctccttatcctggacatgaatgtattgtacactgacgcgtccccactcctgtacagctgctttgtttctttgcaatgcattgtatggctttataaatgataaagttaagaaaaaactcagaaacgaaatcta

SEQ ID NO: 318065 - DNA, 552 bp, Homo sapiens
ccctgcacagttggagagatgctgaaacactcttttcctgaaagcttctcggcacaggatggcagggggaagaggcttgtcttccctccaggacaaaggtgctctttggccagagtgctctgcaggtctgagggagcaggggtggggaaaacaagcggctcttggatgcaggagttgcctcttttgaccacctgtctctccctgcagtgcggaccaggctctggaccggtttgcaatgaagcggttctatgaggataagattgtgcccattggccagccatcccaaagaaggtgggtctctggggctcacagccccttgcatgtatgtgtgcactcactctatgtggggactagacttgtgtactcacagggatgggatagctgtgcctaggtgggggtgtaccaggcgcaagttttcagatgccagcctgcagtggtgtgagctcaggcacacaggagagcccgggagccagcctgtggtgtgtgcccgcagattggcacagcacttgactctgaggcctgtgctagagagcagtgcaaccttcatgggga

SEQ ID NO: 318066 - DNA, 441 bp, Homo sapiens
cttctgcacctctctgagtccctgatgctgaggcctgctggagggatggggaagagaggttggcctgagaccagcttgctcacctgggctgctgtccacctcctggggttccacttgcccttccctcatgcccgttgccctctcccgcctgcaggctcttcggcttcgtggcccggaagcagggcagcaccacggacaacgcctgccacctctttgctgagcttgaccccaaccagccggcctctgccatcgtcaacttcgtctccaaggtcatgctgaatgccggccaaaagagatgaaccctgccccttgcccagggccagtgccatggggaaggggcttgtggggaggggacccatgaatcctgaccactcttgaacccagaaggaggactttgggccaatttcggaggagagaagaaagtgcaacgtggggagaggg

SEQ ID NO: 318067 - DNA, 5530 bp, Homo sapiens
agaagccggcggcgcgcggacagccagtcggcgccgcgcggagctggccgctggattggctgcaacactcgcgtgtcaggcggttgctaggctccggccgcgcgccccgcccttgcgctcagcgccctctcaccgcccggtacgtgctcgcgcgaaggctgcggcgcggcgctcgcgcctcttaggcttggcggtggcggcggcggcagcttcgcgccgaatccccggggagcggcggtggcggcgtcctggggccaggaggagcgaacacctgccgcggtcctcccgccggcgctgggctctgtgtgctccgggatggagcaggtgtgcagagggtgagaacccagctctgggaccaagtcacttgcttccttacttagcaagactatcgacttgagcaaacttggacctgggatgaggatgtctgtgggcctctcgctgctgctgcccctctgggggaggacctttctcctcctgctctctgtggttatggctcagtcccactggcccagtgaaccctcagaggctgtcagggactgggaaaaccagcttgaggcatccatgcactcagtgctctcagacctccacgaggctgttcccacagtggttggcattcctgatggcacggctgtcgtcgggcgctcatttcgagtgaccattccaacagatttgattgcctccagtggagatatcatcaaggtatcagcggcagggaaggaggctttgccatcttggctgcactgggactcacagagccacaccctggagggcctcccccttgacactgataagggtgtgcattacatttcagtgagcgctacacggctgggggccaacgggagccacatcccccagacctccagtgtgttctccatcgaggtctaccctgaagaccacagtgagctgcagtcggtgaggacagcctccccagaccctggtgaggtggtatcatctgcctgtgctgcggatgaacctgtgactgttttgacggtgattttggatgccgacctcaccaagatgaccccaaagcaaaggattgacctcctgcacaggatgcggagcttctcagaagtagagcttcacaacatgaaattagtgccggtggtgaataacagactatttgacatgtcggccttcatggctggcccgggaaatgcaaaaaaggtggtggagaatggggcccttctctcctggaagctgggctgctccctgaaccagaacagtgtgcctgacattcatggtgtagaggcccctgccagggagggcgcaatgtctgctcagcttggctaccctgtggtgggttggcacatcgccaataagaagccccctcttcccaaacgcgtccggaggcagatccatgctacacccacacctgtcactgccattgggcccccaaccacggctatccaggagcccccatccaggatcgtgccaacccccacatctccagccattgctcctccaacagagaccatggctcctccagtcagggatcctgttcctgggaaacccacggtcaccatccggactcgaggcgccattattcaaaccccaaccctaggccccatccagcctactcgggtgtcagaagctggcaccacagttcctggccagattcgcccaacgatgaccattcctggctatgtggagcctactgcagttgctacccctcccacaaccaccaccaagaagccacgagtatccacaccaaaaccagcaacgccttcaactgactccaccaccaccacgactcgcaggccaaccaagaaaccacggacaccccggccagtgccccgggtcaccaccaaagtttccatcaccagattggaaactgcctcaccgcctactcgtattcgcaccaccaccagtggagtgccccgtggcggagaacccaaccagcgcccagagctcaagaaccatattgacagggtagatgcctgggttggcacctactttgaggtgaagatcccgtcagacactttctatgaccatgaggacaccaccactgacaagctgaagctgaccctgaaactgcgggagcagcagctggtgggcgagaagtcctgggtacagttcaacagcaacagccagctcatgtatggccttcccgacagcagccacgtgggcaaacacgagtatttcatgcatgccacagacaaggggggcctgtcggctgtggatgccttcgagatccacgtccacaggcgcccccaaggggatagggctcctgcaaggttcaaggccaagtttgtgggtgacccggcactggtgttgaatgacatccacaagaagattgccttggtaaagaaactggccttcgcctttggagaccgaaactgtagcaccatcaccctgcagaatatcacccggggctccatcgtggtggaatggaccaacaacacactgcccttggagccctgccccaaggagcagatcgctgggctgagccgccggatcgctgaggatgatggaaaacctcggcctgccttctccaacgccctagagcctgactttaaggccacaagcatcactgtgacgggctctggcagttgtcggcacctacagtttatccctgtggtaccacccaggagagtgccctcagaggcgccgcccacagaagtgcctgacagggaccctgagaagagcagtgaggatgatgtctacctgcacacagtcattccggccgtggtggtcgcagccatcctgctcattgctggcatcattgccatgatctgctaccgcaagaagcggaagggcaagcttacccttgaggaccaggccaccttcatcaagaagggggtgcctatcatctttgcagacgaactggacgactccaagcccccaccctcctccagcatgccactcattctgcaggaggagaaggctcccctaccccctcctgagtaccccaaccagagtgtgcccgagaccactcctctgaaccaggacaccatgggagagtacacgcccctgcgggatgaggatcccaatgcgcctccctaccagcccccaccgcccttcacagcacccatggagggcaagggctcccgtcccaagaacatgaccccataccggtcacctcctccctatgtcccaccttaacccgcaagcgcctgggtggaggcagggtagggcaggggcctggagacgacatggtgttgtctgtggagaccggtggcctgcagaccattgcccaccgggagccgacacctgacctagcacacactgacacaggggcctggacaagcccgccctctctggtcctcccaaaccccaaagcagctggagagactttggggacttttttatttttattttttgcctaacagcttttggtttgttcatagagaactcttcgcttcatttttgatggctggctctgaaagcaccatgtggagtggaggtggagggagcgaggaaccatgaatgaactcgcaggcagtgccgggcggccccctggctctctgcgttttgcctttaacactaactgtactgttttttctattcacgtgtgtctagctgcaggatgtaacatggaaaacagtaactaaagattaaattcaaaggactttcagaagttaaggttaagtttttacgtttaatctgctgtttacctaaacttgtatgtataatttttgggtgggtatggggaattgctttgctaaaaataagctcccagggtgtttcaaacttagagaagaccaagggacagtattttttatcaaaggaatactattttttcacactacgtcaacttggttgctctgataccccagagcctgattgggggcctcccggccctggctcacgccaagtccctggtgctgggtttgctctcccgctgttgccaggggctggaagctggaggggtctcttgggccatggacatccccacttccagcccatgtacactagtggcccacgaccaaggggtcttcatttccatgaaaaagggactccaagaggcagtggtggctgtggcccccaactttggtgctccagggtgggccagctgcttgtgggggcacctgggaggtcaaaggtctccaccacatcaacctattttgttttaccctttttctgtgcattgtttttttttttcctcctaaaaggaatatcacggttttttgaaacactcagtgggggacattttggtgaagatgcaatatttttatgtcatgtgatgctctttcctcacttgaccttggccgctttgtcctaacagtccacagtcctgccccgacccaccccatcccttttctctggcactccagtcccaggccttgggcctgaactactggaaaaggtctggcggctggggaggagtgccagcaatagttcataataaaaatctgttagctctcaaagctaattttttactaaagtttttatacagcctcaaattgttttattaaaaaaaagatttaaaatggtgatgcttacagcagtttgtacgagctcttaagtgttgattccatggaactgacggctttgcttgttttgattcttttccccctacttttcctaatggtttaaattctggaattacactggggttcttttgccttttttagcagaacatccgtccgtccatctgcatctctgtcccatgactcaggggcgcccactctgcttcgattctcctcctgtggaagaaaccattttgagcatgacttttcttgatgtctgaagcgttattttgggtactttttagggaggaatgcctttcgcaataatgtatccattccctgattgagggtgggtgggtggacccaggctccctttgcacacagagcagctacttctaagccatatcgactgttttgcagaggatttgtgtgtgctgcctcaggaggggagggctggtaggagggggggagaggtctctgtcctactgctctccagagggcatttccccttgcgccttctcccacagggcccagcccctctcccctgccccagtccccagggggtactctggagtgagcagtgcccctgtgggggagcctgtaaatgcgggctcagtggaccactggtgactgggctcatgcctccaagtcagagtttccctggtgccccagagacaggagcacaagtgggatctgacctggtgagattatttctgatgacctcatcaaaaaataaacaattcccaatgttccaggtgagggctttgaaaggccttccaaacagctccgtcgcccctagcaactccaccattgggcactgccatgcagagacgtggctggcccagaatggcctgttgccatagcaactggaggcgatggggcagtgaacagaataacaacagcaacaatgcctttgcaggcagcctgctcccctgagcgctgggctggtgatggccgttggactctgtgagatggagagccaatctcacattcaagtgttcaccaaccactgatgtgtttttatttccttctatatgattttaagatgtgttttctgcattctgtaaagaaacatatcaaactaaataaaagcagtgtctttattacaaaaaaagtcgacg

SEQ ID NO: 318068 - DNA, 4414 bp, Homo sapiens
agaagccggcggcgcgcggacagccagtcggcgccgcgcggagctggccgctggattggctgcaacactcgcgtgtcaggcggttgctaggctccggccgcgcgccccgcccttgcgctcagcgccctctcaccgcccggtacgtgctcgcgcgaaggctgcggcgcggcgctcgcgcctcttaggcttggcggtggcggcggcggcagcttcgcgccgaatccccggggagcggcggtggcggcgtcctggggccaggaggagcgaacacctgccgcggtcctcccgccggcgctgggctctgtgtgctccgggatggagcaggtgtgcagagggtgagaacccagctctgggaccaagtcacttgcttccttacttagcaagactatcgacttgagcaaacttggacctgggatgaggatgtctgtgggcctctcgctgctgctgcccctctgggggaggacctttctcctcctgctctctgtggttatggctcagtcccactggcccagtgaaccctcagaggctgtcagggactgggaaaaccagcttgaggcatccatgcactcagtgctctcagacctccacgaggctgttcccacagtggttggcattcctgatggcacggctgtcgtcgggcgctcatttcgagtgaccattccaacagatttgattgcctccagtggagatatcatcaaggtatcagcggcagggaaggaggctttgccatcttggctgcactgggactcacagagccacaccctggagggcctcccccttgacactgataagggtgtgcattacatttcagtgagcgctacacggctgggggccaacgggagccacatcccccagacctccagtgtgttctccatcgaggtctaccctgaagaccacagtgagctgcagtcggtgaggacagcctccccagaccctggtgaggtggtatcatctgcctgtgctgcggatgaacctgtgactgttttgacggtgattttggatgccgacctcaccaagatgaccccaaagcaaaggattgacctcctgcacaggatgcggagcttctcagaagtagagcttcacaacatgaaattagtgccggtggtgaataacagactatttgacatgtcggccttcatggctggcccgggaaatgcaaaaaaggtggtggagaatggggcccttctctcctggaagctgggctgctccctgaaccagaacagtgtgcctgacattcatggtgtagaggcccctgccagggagggcgcaatgtctgctcagcttggctaccctgtggtgggttggcacatcgccaataagaagccccctcttcccaaacgcgtccggaggcagatccatgctacacccacacctgtcactgccattgggcccccaaccacggctatccaggagcccccatccaggatcgtgccaacccccacatctccagccattgctcctccaacagagaccatggctcctccagtcagggatcctgttcctgggaaacccacggtcaccatccggactcgaggcgccattattcaaaccccaaccctaggccccatccagcctactcgggtgtcagaagctggcaccacagttcctggccagattcgcccaacgatgaccattcctggctatgtggagcctactgcagttgctacccctcccacaaccaccaccaagaagccacgagtatccacaccaaaaccagcaacgccttcaactgactccaccaccaccacgactcgcaggccaaccaagaaaccacggacaccccggccagtgccccgggtcaccaccaaagtttccatcaccagattggaaactgcctcaccgcctactcgtattcgcaccaccaccagtggagtgccccgtggcggagaacccaaccagcgcccagagctcaagaaccatattgacagggtagatgcctgggttggcacctactttgaggtgaagatcccgtcagacactttctatgaccatgaggacaccaccactgacaagctgaagctgaccctgaaactgcgggagcagcagctggtgggcgagaagtcctgggtacagttcaacagcaacagccagctcatgtatggccttcccgacagcagccacgtgggcaaacacgagtatttcatgcatgccacagacaaggggggcctgtcggctgtggatgccttcgagatccacgtccacaggcgcccccaaggggatagggctcctgcaaggttcaaggccaagtttgtgggtgacccggcactggtgttgaatgacatccacaagaagattgccttggtaaagaaactggccttcgcctttggagaccgaaactgtagcaccatcaccctgcagaatatcacccggggctccatcgtggtggaatggaccaacaacacactgcccttggagccctgccccaaggagcagatcgctgggctgagccgccggatcgctgaggatgatggaaaacctcggcctgccttctccaacgccctagagcctgactttaaggccacaagcatcactgtgacgggctctggcagttgtcggcacctacagtttatccctgtggtaccacccaggagagtgccctcagaggcgccgcccacagaagtgcctgacagggaccctgagaagagcagtgaggatgatgtctacctgcacacagtcattccggccgtggtggtcgcagccatcctgctcattgctggcatcattgccatgatctgctaccgcaagaagcggaagggcaagcttacccttgaggaccaggccaccttcatcaagaagggggtgcctatcatctttgcagacgaactggacgactccaagcccccaccctcctccagcatgccactcattctgcaggaggagaaggctcccctaccccctcctgagtaccccaaccagagtgtgcccgagaccactcctctgaaccaggacaccatgggagagtacacgcccctgcgggatgaggatcccaatgcgcctccctaccagcccccaccgcccttcacagcacccatggagggcaagggctcccgtcccaagaacatgaccccataccggtcacctcctccctatgtcccaccttaacccgcaagcgcctgggtggaggcagggtagggcaggggcctggagacgacatggtgttgtctgtggagaccggtggcctgcagaccattgcccaccgggagccgacacctgacctagcacacactgacacaggggcctggacaagcccgccctctctggtcctcccaaaccccaaagcagctggagagactttggggacttttttatttttattttttgcctaacagcttttggtttgttcatagagaactcttcgcttcatttttgatggctggctctgaaagcaccatgtggagtggaggtggagggagcgaggaaccatgaatgaactcgcaggcagtgccgggcggccccctggctctctgcgttttgcctttaacactaactgtactgttttttctattcacgtgtgtctagctgcaggatgtaacatggaaaacagtaactaaagattaaattcaaaggactttcagaagttaaggttaagtttttacgtttaatctgctgtttacctaaacttgtatgtataatttttgggtgggtatggggaattgctttgctaaaaataagctcccagggtgtttcaaacttagagaagaccaagggacagtattttttatcaaaggaatactattttttcacactacgtcaacttggttgctctgataccccagagcctgattgggggcctcccggccctggctcacgccaagtccctggtgctgggtttgctctcccgctgttgccaggggctggaagctggaggggtctcttgggccatggacatccccacttccagcccatgtacactagtggcccacgaccaaggggtcttcatttccatgaaaaagggactccaagaggcagtggtggctgtggcccccaactttggtgctccagggtgggccagctgcttgtgggggcacctgggaggtcaaaggtctccaccacatcaacctattttgttttaccctttttctgtgcattgtttttttttttcctcctaaaaggaatatcacggttttttgaaacactcagtgggggacattttggtgaagatgcaatatttttatgtcatgtgatgctctttcctcacttgaccttggccgctttgtcctaacagtccacagtcctgccccgacccaccccatcccttttctctggcactccagtcccaggccttgggcctgaactactggaaaaggtctggcggctggggaggagtgccagcaatagttcataataaaaatctgttagctctcaaagctaattttttactaaagtttttatacagcctcaaattgttttatta

SEQ ID NO: 318069 - DNA, 5427 bp, Homo sapiens
tatatttaatggatcagctacatttccagtgctaaggagttgcacgaaactgttggtttctgtataagagaccatgggggtaagaggcttgatccaactcggggtagatgtttttgacagtaactcctggaggatagtatgtgactgaaccactggaattgctcaagtctaaacctgcttttctttttttttcaggctctgtgtgctccgggatggagcaggtgtgcagagggtgagaacccagctctgggaccaagtcacttgcttccttacttagcaagactatcgacttgagcaaacttggacctgggatgaggatgtctgtgggcctctcgctgctgctgcccctctgggggaggacctttctcctcctgctctctgtggttatggctcagtcccactggcccagtgaaccctcagaggctgtcagggactgggaaaaccagcttgaggcatccatgcactcagtgctctcagacctccacgaggctgttcccacagtggttggcattcctgatggcacggctgtcgtcgggcgctcatttcgagtgaccattccaacagatttgattgcctccagtggagatatcatcaaggtatcagcggcagggaaggaggctttgccatcttggctgcactgggactcacagagccacaccctggagggcctcccccttgacactgataagggtgtgcattacatttcagtgagcgctacacggctgggggccaacgggagccacatcccccagacctccagtgtgttctccatcgaggtctaccctgaagaccacagtgagctgcagtcggtgaggacagcctccccagaccctggtgaggtggtatcatctgcctgtgctgcggatgaacctgtgactgttttgacggtgattttggatgccgacctcaccaagatgaccccaaagcaaaggattgacctcctgcacaggatgcggagcttctcagaagtagagcttcacaacatgaaattagtgccggtggtgaataacagactatttgacatgtcggccttcatggctggcccgggaaatgcaaaaaaggtggtggagaatggggcccttctctcctggaagctgggctgctccctgaaccagaacagtgtgcctgacattcatggtgtagaggcccctgccagggagggcgcaatgtctgctcagcttggctaccctgtggtgggttggcacatcgccaataagaagccccctcttcccaaacgcgtccggaggcagatccatgctacacccacacctgtcactgccattgggcccccaaccacggctatccaggagcccccatccaggatcgtgccaacccccacatctccagccattgctcctccaacagagaccatggctcctccagtcagggatcctgttcctgggaaacccacggtcaccatccggactcgaggcgccattattcaaaccccaaccctaggccccatccagcctactcgggtgtcagaagctggcaccacagttcctggccagattcgcccaacgatgaccattcctggctatgtggagcctactgcagttgctacccctcccacaaccaccaccaagaagccacgagtatccacaccaaaaccagcaacgccttcaactgactccaccaccaccacgactcgcaggccaaccaagaaaccacggacaccccggccagtgccccgggtcaccaccaaagtttccatcaccagattggaaactgcctcaccgcctactcgtattcgcaccaccaccagtggagtgccccgtggcggagaacccaaccagcgcccagagctcaagaaccatattgacagggtagatgcctgggttggcacctactttgaggtgaagatcccgtcagacactttctatgaccatgaggacaccaccactgacaagctgaagctgaccctgaaactgcgggagcagcagctggtgggcgagaagtcctgggtacagttcaacagcaacagccagctcatgtatggccttcccgacagcagccacgtgggcaaacacgagtatttcatgcatgccacagacaaggggggcctgtcggctgtggatgccttcgagatccacgtccacaggcgcccccaaggggatagggctcctgcaaggttcaaggccaagtttgtgggtgacccggcactggtgttgaatgacatccacaagaagattgccttggtaaagaaactggccttcgcctttggagaccgaaactgtagcaccatcaccctgcagaatatcacccggggctccatcgtggtggaatggaccaacaacacactgcccttggagccctgccccaaggagcagatcgctgggctgagccgccggatcgctgaggatgatggaaaacctcggcctgccttctccaacgccctagagcctgactttaaggccacaagcatcactgtgacgggctctggcagttgtcggcacctacagtttatccctgtggtaccacccaggagagtgccctcagaggcgccgcccacagaagtgcctgacagggaccctgagaagagcagtgaggatgatgtctacctgcacacagtcattccggccgtggtggtcgcagccatcctgctcattgctggcatcattgccatgatctgctaccgcaagaagcggaagggcaagcttacccttgaggaccaggccaccttcatcaagaagggggtgcctatcatctttgcagacgaactggacgactccaagcccccaccctcctccagcatgccactcattctgcaggaggagaaggctcccctaccccctcctgagtaccccaaccagagtgtgcccgagaccactcctctgaaccaggacaccatgggagagtacacgcccctgcgggatgaggatcccaatgcgcctccctaccagcccccaccgcccttcacagcacccatggagggcaagggctcccgtcccaagaacatgaccccataccggtcacctcctccctatgtcccaccttaacccgcaagcgcctgggtggaggcagggtagggcaggggcctggagacgacatggtgttgtctgtggagaccggtggcctgcagaccattgcccaccgggagccgacacctgacctagcacacactgacacaggggcctggacaagcccgccctctctggtcctcccaaaccccaaagcagctggagagactttggggacttttttatttttattttttgcctaacagcttttggtttgttcatagagaactcttcgcttcatttttgatggctggctctgaaagcaccatgtggagtggaggtggagggagcgaggaaccatgaatgaactcgcaggcagtgccgggcggccccctggctctctgcgttttgcctttaacactaactgtactgttttttctattcacgtgtgtctagctgcaggatgtaacatggaaaacagtaactaaagattaaattcaaaggactttcagaagttaaggttaagtttttacgtttaatctgctgtttacctaaacttgtatgtataatttttgggtgggtatggggaattgctttgctaaaaataagctcccagggtgtttcaaacttagagaagaccaagggacagtattttttatcaaaggaatactattttttcacactacgtcaacttggttgctctgataccccagagcctgattgggggcctcccggccctggctcacgccaagtccctggtgctgggtttgctctcccgctgttgccaggggctggaagctggaggggtctcttgggccatggacatccccacttccagcccatgtacactagtggcccacgaccaaggggtcttcatttccatgaaaaagggactccaagaggcagtggtggctgtggcccccaactttggtgctccagggtgggccagctgcttgtgggggcacctgggaggtcaaaggtctccaccacatcaacctattttgttttaccctttttctgtgcattgtttttttttttcctcctaaaaggaatatcacggttttttgaaacactcagtgggggacattttggtgaagatgcaatatttttatgtcatgtgatgctctttcctcacttgaccttggccgctttgtcctaacagtccacagtcctgccccgacccaccccatcccttttctctggcactccagtcccaggccttgggcctgaactactggaaaaggtctggcggctggggaggagtgccagcaatagttcataataaaaatctgttagctctcaaagctaattttttactaaagtttttatacagcctcaaattgttttattaaaaaaaagatttaaaatggtgatgcttacagcagtttgtacgagctcttaagtgttgattccatggaactgacggctttgcttgttttgattcttttccccctacttttcctaatggtttaaattctggaattacactggggttcttttgccttttttagcagaacatccgtccgtccatctgcatctctgtcccatgactcaggggcgcccactctgcttcgattctcctcctgtggaagaaaccattttgagcatgacttttcttgatgtctgaagcgttattttgggtactttttagggaggaatgcctttcgcaataatgtatccattccctgattgagggtgggtgggtggacccaggctccctttgcacacagagcagctacttctaagccatatcgactgttttgcagaggatttgtgtgtgctgcctcaggaggggagggctggtaggagggggggagaggtctctgtcctactgctctccagagggcatttccccttgcgccttctcccacagggcccagcccctctcccctgccccagtccccagggggtactctggagtgagcagtgcccctgtgggggagcctgtaaatgcgggctcagtggaccactggtgactgggctcatgcctccaagtcagagtttccctggtgccccagagacaggagcacaagtgggatctgacctggtgagattatttctgatgacctcatcaaaaaataaacaattcccaatgttccaggtgagggctttgaaaggccttccaaacagctccgtcgcccctagcaactccaccattgggcactgccatgcagagacgtggctggcccagaatggcctgttgccatagcaactggaggcgatggggcagtgaacagaataacaacagcaacaatgcctttgcaggcagcctgctcccctgagcgctgggctggtgatggccgttggactctgtgagatggagagccaatctcacattcaagtgttcaccaaccactgatgtgtttttatttccttctatatgattttaagatgtgttttctgcattctgtaaagaaacatatcaaactaaataaaagcagtgtctttattacaaaaaaagtcgacg

SEQ ID NO: 318070 - DNA, 3491 bp, Homo sapiens
  misc_feature (16)..(16): n is a, c, g, or t
tctgaggatcccttanaggcgatcctgggtacagttcaacagcaacagccagctcatgtatggccttcccgacagcagccacgtgggcaaacacgagtatttcatgcatgccacagacaaggggggcctgtcggctgtggatgccttcgagatccacgtccacaggcgcccccaaggggatagggctcctgcaaggttcaaggccaagtttgtgggtgacccggcactggtgttgaatgacatccacaagaagattgccttggtaaagaaactggccttcgcctttggagaccgaaactgtagcaccatcaccctgcagaatatcacccggggctccatcgtggtggaatggaccaacaacacactgcccttggagccctgccccaaggagcagatcgctgggctgagccgccggatcgctgaggatgatggaaaacctcggcctgccttctccaacgccctagagcctgactttaaggccacaagcatcactgtgacgggctctggcagttgtcggcacctacagtttatccctgtggtaccacccaggagagtgccctcagaggcgccgcccacagaagtgcctgacagggaccctgagaagagcagtgaggatgatgtctacctgcacacagtcattccggccgtggtggtcgcagccatcctgctcattgctggcatcattgccatgatctgctaccgcaagaagcggaagggcaagcttacccttgaggaccaggccaccttcatcaagaagggggtgcctatcatctttgcagacgaactggacgactccaagcccccaccctcctccagcatgccactcattctgcaggaggagaaggctcccctaccccctcctgagtaccccaaccagagtgtgcccgagaccactcctctgaaccaggacaccatgggagagtacacgcccctgcgggatgaggatcccaatgcgcctccctaccagcccccaccgcccttcacagcacccatggagggcaagggctcccgtcccaagaacatgaccccataccggtcacctcctccctatgtcccaccttaacccgcaagcgcctgggtggaggcagggtagggcaggggcctggagacgacatggtgttgtctgtggagaccggtggcctgcagaccattgcccaccgggagccgacacctgacctagcacacactgacacaggggcctggacaagcccgccctctctggtcctcccaaaccccaaagcagctggagagactttggggacttttttatttttattttttgcctaacagcttttggtttgttcatagagaactcttcgcttcatttttgatggctggctctgaaagcaccatgtggagtggaggtggagggagcgaggaaccatgaatgaactcgcaggcagtgccgggcggccccctggctctctgcgttttgcctttaacactaactgtactgttttttctattcacgtgtgtctagctgcaggatgtaacatggaaaacagtaactaaagattaaattcaaaggactttcagaagttaaggttaagtttttacgtttaatctgctgtttacctaaacttgtatgtataatttttgggtgggtatggggaattgctttgctaaaaataagctcccagggtgtttcaaacttagagaagaccaagggacagtattttttatcaaaggaatactattttttcacactacgtcaacttggttgctctgataccccagagcctgattgggggcctcccggccctggctcacgccaagtccctggtgctgggtttgctctcccgctgttgccaggggctggaagctggaggggtctcttgggccatggacatccccacttccagcccatgtacactagtggcccacgaccaaggggtcttcatttccatgaaaaagggactccaagaggcagtggtggctgtggcccccaactttggtgctccagggtgggccagctgcttgtgggggcacctgggaggtcaaaggtctccaccacatcaacctattttgttttaccctttttctgtgcattgtttttttttttcctcctaaaaggaatatcacggttttttgaaacactcagtgggggacattttggtgaagatgcaatatttttatgtcatgtgatgctctttcctcacttgaccttggccgctttgtcctaacagtccacagtcctgccccgacccaccccatcccttttctctggcactccagtcccaggccttgggcctgaactactggaaaaggtctggcggctggggaggagtgccagcaatagttcataataaaaatctgttagctctcaaagctaattttttactaaagtttttatacagcctcaaattgttttattaaaaaaaagatttaaaatggtgatgcttacagcagtttgtacgagctcttaagtgttgattccatggaactgacggctttgcttgttttgattcttttccccctacttttcctaatggtttaaattctggaattacactggggttcttttgccttttttagcagaacatccgtccgtccatctgcatctctgtcccatgactcaggggcgcccactctgcttcgattctcctcctgtggaagaaaccattttgagcatgacttttcttgatgtctgaagcgttattttgggtactttttagggaggaatgcctttcgcaataatgtatccattccctgattgagggtgggtgggtggacccaggctccctttgcacacagagcagctacttctaagccatatcgactgttttgcagaggatttgtgtgtgctgcctcaggaggggagggctggtaggagggggggagaggtctctgtcctactgctctccagagggcatttccccttgcgccttctcccacagggcccagcccctctcccctgccccagtccccagggggtactctggagtgagcagtgcccctgtgggggagcctgtaaatgcgggctcagtggaccactggtgactgggctcatgcctccaagtcagagtttccctggtgccccagagacaggagcacaagtgggatctgacctggtgagattatttctgatgacctcatcaaaaaataaacaattcccaatgttccaggtgagggctttgaaaggccttccaaacagctccgtcgcccctagcaactccaccattgggcactgccatgcagagacgtggctggcccagaatggcctgttgccatagcaactggaggcgatggggcagtgaacagaataacaacagcaacaatgcctttgcaggcagcctgctcccctgagcgctgggctggtgatggccgttggactctgtgagatggagagccaatctcacattcaagtgttcaccaaccactgatgtgtttttatttccttctatatgattttaagatgtgttttctgcattctgtaaagaaacatatcaaactaaataaaagcagtgtctttattacaaaaaaagtcgacg

SEQ ID NO: 318071 - DNA, 4606 bp, Homo sapiens
agaagccggcggcgcgcggacagccagtcggcgccgcgcggagctggccgctggattggctgcaacactcgcgtgtcaggcggttgctaggctccggccgcgcgccccgcccttgcgctcagcgccctctcaccgcccggtacgtgctcgcgcgaaggctgcggcgcggcgctcgcgcctcttaggcttggcggtggcggcggcggcagcttcgcgccgaatccccggggagcggcggtggcggcgtcctggggccaggaggagcgaacacctgccgcggtcctcccgccggcgctgggctctgtgtgctccgggatggagcaggtgtgcagagggtgagaacccagctctgggaccaagtcacttgcttccttacttagcaagactatcgacttgagcaaacttggacctgggatgaggatgtctgtgggcctctcgctgctgctgcccctctgggggaggacctttctcctcctgctctctgtggttatggctcagtcccactggcccagtgaaccctcagaggctgtcagggactgggaaaaccagcttgaggcatccatgcactcagtgctctcagacctccacgaggctgttcccacagtggttggcattcctgatggcacggctgtcgtcgggcgctcatttcgagtgaccattccaacagatttgattgcctccagtggagatatcatcaaggtatcagcggcagggaaggaggctttgccatcttggctgcactgggactcacagagccacaccctggagggcctcccccttgacactgataagggtgtgcattacatttcagtgagcgctacacggctgggggccaacgggagccacatcccccagacctccagtgtgttctccatcgaggtctaccctgaagaccacagtgagctgcagtcggtgaggacagcctccccagaccctggtgaggtggtatcatctgcctgtgctgcggatgaacctgtgactgttttgacggtgattttggatgccgacctcaccaagatgaccccaaagcaaaggattgacctcctgcacaggatgcggagcttctcagaagtagagcttcacaacatgaaattagtgccggtggtgaataacagactatttgacatgtcggccttcatggctggcccgggaaatgcaaaaaaggtggtggagaatggggcccttctctcctggaagctgggctgctccctgaaccagaacagtgtgcctgacattcatggtgtagaggcccctgccagggagggcgcaatgtctgctcagcttggctaccctgtggtgggttggcacatcgccaataagaagccccctcttcccaaacgcgtccggaggcagatccatgctacacccacacctgtcactgccattgggcccccaaccacggctatccaggagcccccatccaggatcgtgccaacccccacatctccagccattgctcctccaacagagaccatggctcctccagtcagggatcctgttcctgggaaacccacggtcaccatccggactcgaggcgccattattcaaaccccaaccctaggccccatccagcctactcgggtgtcagaagctggcaccacagttcctggccagattcgcccaacgatgaccattcctggctatgtggagcctactgcagttgctacccctcccacaaccaccaccaagaagccacgagtatccacaccaaaaccagcaacgccttcaactgactccaccaccaccacgactcgcaggccaaccaagaaaccacggacaccccggccagtgccccgggtcaccaccaaagtttccatcaccagattggaaactgcctcaccgcctactcgtattcgcaccaccaccagtggagtgccccgtggcggagaacccaaccagcgcccagagctcaagaaccatattgacagggtagatgcctgggttggcacctactttgaggtgaagatcccgtcagacactttctatgaccatgaggacaccaccactgacaagctgaagctgaccctgaaactgcgggagcagcagctggtgggcgagaagtcctgggtacagttcaacagcaacagccagctcatgtatggccttcccgacagcagccacgtgggcaaacacgagtatttcatgcatgccacagacaaggggggcctgtcggctgtggatgccttcgagatccacgtccacaggcgcccccaaggggatagggctcctgcaaggttcaaggccaagtttgtgggtgacccggcactggtgttgaatgacatccacaagaagattgccttggtaaagaaactggccttcgcctttggagaccgaaactgtagcaccatcaccctgcagaatatcacccggggctccatcgtggtggaatggaccaacaacacactgcccttggagccctgccccaaggagcagatcgctgggctgagccgccggatcgctgaggatgatggaaaacctcggcctgccttctccaacgccctagagcctgactttaaggccacaagcatcactgtgacgggctctggcagttgtcggcacctacagtttatccctgtggtaccacccaggagagtgccctcagaggcgccgcccacagaagtgcctgacagggaccctgagaagagcagtgaggatgatgtctacctgcacacagtcattccggccgtggtggtcgcagccatcctgctcattgctggcatcattgccatgatctgctaccgcaagaagcggaagggcaagcttacccttgaggaccaggccaccttcatcaagaagggggtgcctatcatctttgcagacgaactggacgactccaagcccccaccctcctccagcatgccactcattctgcaggaggagaaggctcccctaccccctcctgagtaccccaaccagagtgtgcccgagaccactcctctgaaccaggacaccatgggagagtacacgcccctgcgggatgaggatcccaatgcgcctccctaccagcccccaccgcccttcacagcacccatggagggcaagggctcccgtcccaagaacatgaccccataccggtcacctcctccctatgtcccaccttaacccgcaagcgcctgggtggaggcagggtagggcaggggcctggagacgacatggtgttgtctgtggagaccggtggcctgcagaccattgcccaccgggagccgacacctgacctagcacacactgacacaggggcctggacaagcccgccctctctggtcctcccaaaccccaaagcagctggagagactttggggacttttttatttttattttttgcctaacagcttttggtttgttcatagagaactcttcgcttcatttttgatggctggctctgaaagcaccatgtggagtggaggtggagggagcgaggaaccatgaatgaactcgcaggcagtgccgggcggccccctggctctctgcgttttgcctttaacactaactgtactgttttttctattcacgtgtgtctagagcagtttgtacgagctcttaagtgttgattccatggaactgacggctttgcttgttttgattcttttccccctacttttcctaatggtttaaattctggaattacactggggttcttttgccttttttagcagaacatccgtccgtccatctgcatctctgtcccatgactcaggggcgcccactctgcttcgattctcctcctgtggaagaaaccattttgagcatgacttttcttgatgtctgaagcgttattttgggtactttttagggaggaatgcctttcgcaataatgtatccattccctgattgagggtgggtgggtggacccaggctccctttgcacacagagcagctacttctaagccatatcgactgttttgcagaggatttgtgtgtgctgcctcaggaggggagggctggtaggagggggggagaggtctctgtcctactgctctccagagggcatttccccttgcgccttctcccacagggcccagcccctctcccctgccccagtccccagggggtactctggagtgagcagtgcccctgtgggggagcctgtaaatgcgggctcagtggaccactggtgactgggctcatgcctccaagtcagagtttccctggtgccccagagacaggagcacaagtgggatctgacctggtgagattatttctgatgacctcatcaaaaaataaacaattcccaatgttccaggtgagggctttgaaaggccttccaaacagctccgtcgcccctagcaactccaccattgggcactgccatgcagagacgtggctggcccagaatggcctgttgccatagcaactggaggcgatggggcagtgaacagaataacaacagcaacaatgcctttgcaggcagcctgctcccctgagcgctgggctggtgatggccgttggactctgtgagatggagagccaatctcacattcaagtgttcaccaaccactgatgtgtttttatttccttctatatgattttaagatgtgttttctgcattctgtaaagaaacatatcaaactaaataaaagcagtgtctttattacaaaaaaagtcgacg

SEQ ID NO: 318072 - DNA, 4680 bp, Homo sapiens
  misc_feature (4619)..(4619): n is a, c, g, or t
  misc_feature (4621)..(4621): n is a, c, g, or t
agaagccggcggcgcgcggacagccagtcggcgccgcgcggagctggccgctggattggctgcaacactcgcgtgtcaggcggttgctaggctccggccgcgcgccccgcccttgcgctcagcgccctctcaccgcccggtacgtgctcgcgcgaaggctgcggcgcggcgctcgcgcctcttaggcttggcggtggcggcggcggcagcttcgcgccgaatccccggggagcggcggtggcggcgtcctggggccaggaggagcgaacacctgccgcggtcctcccgccggcgctgggctctgtgtgctccgggatggagcaggtgtgcagagggtgagaacccagctctgggaccaagtcacttgcttccttacttagcaagactatcgacttgagcaaacttggacctgggatgaggatgtctgtgggcctctcgctgctgctgcccctctgggggaggacctttctcctcctgctctctgtggttatggctcagtcccactggcccagtgaaccctcagaggctgtcagggactgggaaaaccagcttgaggcatccatgcactcagtgctctcagacctccacgaggctgttcccacagtggttggcattcctgatggcacggctgtcgtcgggcgctcatttcgagtgaccattccaacagatttgattgcctccagtggagatatcatcaaggtatcagcggcagggaaggaggctttgccatcttggctgcactgggactcacagagccacaccctggagggcctcccccttgacactgataagggtgtgcattacatttcagtgagcgctacacggctgggggccaacgggagccacatcccccagacctccagtgtgttctccatcgaggtctaccctgaagaccacagtgagctgcagtcggtgaggacagcctccccagaccctggtgaggtggtatcatctgcctgtgctgcggatgaacctgtgactgttttgacggtgattttggatgccgacctcaccaagatgaccccaaagcaaaggattgacctcctgcacaggatgcggagcttctcagaagtagagcttcacaacatgaaattagtgccggtggtgaataacagactatttgacatgtcggccttcatggctggcccgggaaatgcaaaaaaggtggtggagaatggggcccttctctcctggaagctgggctgctccctgaaccagaacagtgtgcctgacattcatggtgtagaggcccctgccagggagggcgcaatgtctgctcagcttggctaccctgtggtgggttggcacatcgccaataagaagccccctcttcccaaacgcgtccggaggcagatccatgctacacccacacctgtcactgccattgggcccccaaccacggctatccaggagcccccatccaggatcgtgccaacccccacatctccagccattgctcctccaacagagaccatggctcctccagtcagggatcctgttcctgggaaacccacggtcaccatccggactcgaggcgccattattcaaaccccaaccctaggccccatccagcctactcgggtgtcagaagctggcaccacagttcctggccagattcgcccaacgatgaccattcctggctatgtggagcctactgcagttgctacccctcccacaaccaccaccaagaagccacgagtatccacaccaaaaccagcaacgccttcaactgactccaccaccaccacgactcgcaggccaaccaagaaaccacggacaccccggccagtgccccgggtcaccaccaaagtttccatcaccagattggaaactgcctcaccgcctactcgtattcgcaccaccaccagtggagtgccccgtggcggagaacccaaccagcgcccagagctcaagaaccatattgacagggtagatgcctgggttggcacctactttgaggtgaagatcccgtcagacactttctatgaccatgaggacaccaccactgacaagctgaagctgaccctgaaactgcgggagcagcagctggtgggcgagaagtcctgggtacagttcaacagcaacagccagctcatgtatggccttcccgacagcagccacgtgggcaaacacgagtatttcatgcatgccacagacaaggggggcctgtcggctgtggatgccttcgagatccacgtccacaggcgcccccaaggggatagggctcctgcaaggttcaaggccaagtttgtgggtgacccggcactggtgttgaatgacatccacaagaagattgccttggtaaagaaactggccttcgcctttggagaccgaaactgtagcaccatcaccctgcagaatatcacccggggctccatcgtggtggaatggaccaacaacacactgcccttggagccctgccccaaggagcagatcgctgggctgagccgccggatcgctgaggatgatggaaaacctcggcctgccttctccaacgccctagagcctgactttaaggccacaagcatcactgtgacgggctctggcagttgtcggcacctacagtttatccctgtggtaccacccaggagagtgccctcagaggcgccgcccacagaagtgcctgacagggaccctgagaagagcagtgaggatgatgtctacctgcacacagtcattccggccgtggtggtcgcagccatcctgctcattgctggcatcattgccatgatctgctaccgcaagaagcggaagggcaagcttacccttgaggaccaggccaccttcatcaagaagggggtgcctatcatctttgcagacgaactggacgactccaagcccccaccctcctccagcatgccactcattctgcaggaggagaaggctcccctaccccctcctgagtaccccaaccagagtgtgcccgagaccactcctctgaaccaggacaccatgggagagtacacgcccctgcgggatgaggatcccaatgcgcctccctaccagcccccaccgcccttcacagcacccatggagggcaagggctcccgtcccaagaacatgaccccataccggtcacctcctccctatgtcccaccttaacccgcaagcgcctgggtggaggcagggtagggcaggggcctggagacgacatggtgttgtctgtggagaccggtggcctgcagaccattgcccaccgggagccgacacctgacctagcacacactgacacaggggcctggacaagcccgccctctctggtcctcccaaaccccaaagcagctggagagactttggggacttttttatttttattttttgcctaacagcttttggtttgttcatagagaactcttcgcttcatttttgatggctggctctgaaagcaccatgtggagtggaggtggagggagcgaggaaccatgaatgaactcgcaggcagtgccgggcggccccctggctctctgcgttttgcctttaacactaactgtactgttttttctattcacgtgtgtctagctgcaggatgtaacatggaaaacagtaactaaagattaaattcaaaggactttcagaagttaaggttaagtttttacgtttaatctgctgtttacctaaacttgtatgtataatttttgggtgggtatggggaattgctttgctaaaaataagctcccagggtgtttcaaacttagagaagaccaagggacagtattttttatcaaaggaatactattttttcacactacgtcaacttggttgctctgataccccagagcctgattgggggcctcccggccctggctcacgccaagtccctggtgctgggtttgctctcccgctgttgccaggggctggaagctggaggggtctcttgggccatggacatccccacttccagcccatgtacactagtggcccacgaccaaggggtcttcatttccatgaaaaagggactccaagaggcagtggtggctgtggcccccaactttggtgctccagggtgggccagctgcttgtgggggcacctgggaggtcaaaggtctccaccacatcaacctattttgttttaccctttttctgtgcattgtttttttttttcctcctaaaaggaatatcacggttttttgaaacactcagtgggggacattttggtgaagatgcaatatttttatgtcatgtgatgctctttcctcacttgaccttggccgctttgtcctaacagtccacagtcctgccccgacccaccccatcccttttctctggcactccagtcccaggccttgggcctgaactactggaaaaggtctggcggctggggaggagtgccagcaatagttcataataaaaatctgttagctctcaaagctaattttttactaaagtttttatacagcctcaaattgttttattaaaaaaaagatttaaaatggtgatgcttacagcagtttgtacgagctcttaagtgttgattccatggaactgacggctttgcttgttttgattcttttccccctacttttcctaatggtttaaattctggaattacactggggttcttttgccttttttagcagaacatccgtccgtccatctgcatctctgtcccaccttaaccngnaagcgcctgggtggaggcagggtagggcaggggcctggagaccactcctctgaaccagg

SEQ ID NO: 318073 - DNA, 450 bp, Homo sapiens
cgaggctgttcccacagtggttggcattcctgatggcacggctgtcgtcgggcgctcatttcgagtgaccattccaacagatttgattgcctccagtggagatatcatcaaggtgagactggatataaagcataaatgaggaagagttctcattttccattttagttttggtggcttttccttttcaagtctaagcttcaccaattctgagctcagttcttccagtacccccttagaagagggacagccactgatgttcataagagaatccctatatactcagaatagcatcctaaactgtattcttgttcctattctgagggcatcaccatgtaatagcctttactctggaagttctactgaacactgatttagggatttgttggaaaggtctgtcacgtgtatagggaaaggttacctttaataaaacacagagttaaaccccaaaaa

SEQ ID NO: 318074 - DNA, 585 bp, Homo sapiens
agaagccggcggcgcgcggacagccagtcggcgccgcgcggagctggccgctggattggctgcaacactcgcgtgtcaggcggttgctaggctccggccgcgcgccccgcccttgcgctcagcgccctctcaccgcccggtacgtgctcgcgcgaaggctgcggcgcggcgctcgcgcctcttaggcttggcggtggcggcggcggcagcttcgcgccgaatccccggggagcggcggtggcggcgtcctggggccaggaggagcgaacacctgccgcggtcctcccgccggcgctggggccactgctctccaggaagataaggcttttaaagcagcctagcactagaagagatggggttcttcctctttgcctaggcacacgactgtctatcccagatggctgcactggcctaggacagacggttcttcccccagtacgtcaagaccctggagggtgcaagctacagaacagctgggctcctgcattcctcccagaccctgtcttcagtaggacaacaggcaacaaacttaaatttgggattctcattctgcactccagcctgggtgatcaagtgaaactgtct

SEQ ID NO: 318075 - DNA, 4023 bp, Homo sapiens
  misc_feature (13)..(13): n is a, c, g, or t
  misc_feature (22)..(22): n is a, c, g, or t
cctgggtctagcnagctccatncacagcctacagtgcctcaaccccaaccctaggccccatccagcctactcgggtgtcagaagctggcaccacagttcctggccagattcgcccaacgatgaccattcctggctatgtggagcctactgcagttgctacccctcccacaaccaccaccaagaagccacgagtatccacaccaaaaccagcaacgccttcaactgactccaccaccaccacgactcgcaggccaaccaagaaaccacggacaccccggccagtgccccgggtcaccaccaaagtttccatcaccagattggaaactgcctcaccgcctactcgtattcgcaccaccaccagtggagtgccccgtggcggagaacccaaccagcgcccagagctcaagaaccatattgacagggtagatgcctgggttggcacctactttgaggtgaagatcccgtcagacactttctatgaccatgaggacaccaccactgacaagctgaagctgaccctgaaactgcgggagcagcagctggtgggcgagaagtcctgggtacagttcaacagcaacagccagctcatgtatggccttcccgacagcagccacgtgggcaaacacgagtatttcatgcatgccacagacaaggggggcctgtcggctgtggatgccttcgagatccacgtccacaggcgcccccaaggggatagggctcctgcaaggttcaaggccaagtttgtgggtgacccggcactggtgttgaatgacatccacaagaagattgccttggtaaagaaactggccttcgcctttggagaccgaaactgtagcaccatcaccctgcagaatatcacccggggctccatcgtggtggaatggaccaacaacacactgcccttggagccctgccccaaggagcagatcgctgggctgagccgccggatcgctgaggatgatggaaaacctcggcctgccttctccaacgccctagagcctgactttaaggccacaagcatcactgtgacgggctctggcagttgtcggcacctacagtttatccctgtggtaccacccaggagagtgccctcagaggcgccgcccacagaagtgcctgacagggaccctgagaagagcagtgaggatgatgtctacctgcacacagtcattccggccgtggtggtcgcagccatcctgctcattgctggcatcattgccatgatctgctaccgcaagaagcggaagggcaagcttacccttgaggaccaggccaccttcatcaagaagggggtgcctatcatctttgcagacgaactggacgactccaagcccccaccctcctccagcatgccactcattctgcaggaggagaaggctcccctaccccctcctgagtaccccaaccagagtgtgcccgagaccactcctctgaaccaggacaccatgggagagtacacgcccctgcgggatgaggatcccaatgcgcctccctaccagcccccaccgcccttcacagcacccatggagggcaagggctcccgtcccaagaacatgaccccataccggtcacctcctccctatgtcccaccttaacccgcaagcgcctgggtggaggcagggtagggcaggggcctggagacgacatggtgttgtctgtggagaccggtggcctgcagaccattgcccaccgggagccgacacctgacctagcacacactgacacaggggcctggacaagcccgccctctctggtcctcccaaaccccaaagcagctggagagactttggggacttttttatttttattttttgcctaacagcttttggtttgttcatagagaactcttcgcttcatttttgatggctggctctgaaagcaccatgtggagtggaggtggagggagcgaggaaccatgaatgaactcgcaggcagtgccgggcggccccctggctctctgcgttttgcctttaacactaactgtactgttttttctattcacgtgtgtctagctgcaggatgtaacatggaaaacagtaactaaagattaaattcaaaggactttcagaagttaaggttaagtttttacgtttaatctgctgtttacctaaacttgtatgtataatttttgggtgggtatggggaattgctttgctaaaaataagctcccagggtgtttcaaacttagagaagaccaagggacagtattttttatcaaaggaatactattttttcacactacgtcaacttggttgctctgataccccagagcctgattgggggcctcccggccctggctcacgccaagtccctggtgctgggtttgctctcccgctgttgccaggggctggaagctggaggggtctcttgggccatggacatccccacttccagcccatgtacactagtggcccacgaccaaggggtcttcatttccatgaaaaagggactccaagaggcagtggtggctgtggcccccaactttggtgctccagggtgggccagctgcttgtgggggcacctgggaggtcaaaggtctccaccacatcaacctattttgttttaccctttttctgtgcattgtttttttttttcctcctaaaaggaatatcacggttttttgaaacactcagtgggggacattttggtgaagatgcaatatttttatgtcatgtgatgctctttcctcacttgaccttggccgctttgtcctaacagtccacagtcctgccccgacccaccccatcccttttctctggcactccagtcccaggccttgggcctgaactactggaaaaggtctggcggctggggaggagtgccagcaatagttcataataaaaatctgttagctctcaaagctaattttttactaaagtttttatacagcctcaaattgttttattaaaaaaaagatttaaaatggtgatgcttacagcagtttgtacgagctcttaagtgttgattccatggaactgacggctttgcttgttttgattcttttccccctacttttcctaatggtttaaattctggaattacactggggttcttttgccttttttagcagaacatccgtccgtccatctgcatctctgtcccatgactcaggggcgcccactctgcttcgattctcctcctgtggaagaaaccattttgagcatgacttttcttgatgtctgaagcgttattttgggtactttttagggaggaatgcctttcgcaataatgtatccattccctgattgagggtgggtgggtggacccaggctccctttgcacacagagcagctacttctaagccatatcgactgttttgcagaggatttgtgtgtgctgcctcaggaggggagggctggtaggagggggggagaggtctctgtcctactgctctccagagggcatttccccttgcgccttctcccacagggcccagcccctctcccctgccccagtccccagggggtactctggagtgagcagtgcccctgtgggggagcctgtaaatgcgggctcagtggaccactggtgactgggctcatgcctccaagtcagagtttccctggtgccccagagacaggagcacaagtgggatctgacctggtgagattatttctgatgacctcatcaaaaaataaacaattcccaatgttccaggtgagggctttgaaaggccttccaaacagctccgtcgcccctagcaactccaccattgggcactgccatgcagagacgtggctggcccagaatggcctgttgccatagcaactggaggcgatggggcagtgaacagaataacaacagcaacaatgcctttgcaggcagcctgctcccctgagcgctgggctggtgatggccgttggactctgtgagatggagagccaatctcacattcaagtgttcaccaaccactgatgtgtttttatttccttctatatgattttaagatgtgttttctgcattctgtaaagaaacatatcaaactaaataaaagcagtgtctttattacaaaaaaagtcgacg

SEQ ID NO: 318076 - DNA, 5425 bp, Homo sapiens
agaagccggcggcgcgcggacagccagtcggcgccgcgcggagctggccgctggattggctgcaacactcgcgtgtcaggcggttgctaggctccggccgcgcgccccgcccttgcgctcagcgccctctcaccgcccggtacgtgctcgcgcgaaggctgcggcgcggcgctcgcgcctcttaggcttggcggtggcggcggcggcagcttcgcgccgaatccccggggagcggcggtggcggcgtcctggggccaggaggagcgaacacctgccgcggtcctcccgccggcgctgggctctgtgtgctccgggatggagcaggtgtgcagagggtgagaacccagctctgggaccaagtcacttgcttccttacttagcaagactatcgacttgagcaaacttggacctgggatgaggatgtctgtgggcctctcgctgctgctgcccctctgggggaggacctttctcctcctgctctctgtggttatggctcagtcccactggcccagtgaaccctcagaggctgtcagggactgggaaaaccagcttgaggcatccatgcactcagtgctctcagacctccacgaggctgttcccacagtggttggcattcctgatggcacggctgtcgtcgggcgctcatttcgagtgaccattccaacagatttgattgcctccagtggagatatcatcaaggtatcagcggcagggaaggaggctttgccatcttggctgcactgggactcacagagccacaccctggagggcctcccccttgacactgataagggtgtgcattacatttcagtgagcgctacacggctgggggccaacgggagccacatcccccagacctccagtgtgttctccatcgaggtctaccctgaagaccacagtgagctgcagtcggtgaggacagcctccccagaccctggtgaggtggtatcatctgcctgtgctgcggatgaacctgtgactgttttgacggtgattttggatgccgacctcaccaagatgaccccaaagcaaaggattgacctcctgcacaggatgcggagcttctcagaagtagagcttcacaacatgaaattagtgccggtggtgaataacagactatttgacatgtcggccttcatggctggcccgggaaatgcaaaaaaggtggtggagaatggggcccttctctcctggaagctgggctgctccctgaaccagaacagtgtgcctgacattcatggtgtagaggcccctgccagggagggcgcaatgtctgctcagcttggctaccctgtggtgggttggcacatcgccaataagaagccccctcttcccaaacgcgtccggaggcagatccatgctacacccacacctgtcactgccattgggcccccaaccacggctatccaggagcccccatccaggatcgtgccaacccccacatctccagccattgctcctccaacagagaccatggctcctccagtcagggatcctgttcctgggaaacccacggtcaccatccggactcgaggcgccattattcaaaccccaaccctaggccccatccagcctactcgggtgtcagaagctggcaccacagttcctggccagattcgcccaacgatgaccattcctggctatgtggagcctactgcagttgctacccctcccacaaccaccaccaagaagccacgagtatccacaccaaaaccagcaacgccttcaactgactccaccaccaccacgactcgcaggccaaccaagaaaccacggacaccccggccagtgccccgggtcaccaccaaagtttccatcaccagattggaaactgcctcaccgcctactcgtattcgcaccaccaccagtggagtgccccgtggcggagaacccaaccagcgcccagagctcaagaaccatattgacagggtagatgcctgggttggcacctactttgaggtgaagatcccgtcagacactttctatgaccatgaggacaccaccactgacaagctgaagctgaccctgaaactgcgggagcagcagctggtgggcgagaagtcctgggtacagttcaacagcaacagccagctcatgtatggccttcccgacagcagccacgtgggcaaacacgagtatttcatgcatgccacagacaaggggggcctgtcggctgtggatgccttcgagatccacgtccacaggcgcccccaaggggatagggctcctgcaaggttcaaggccaagtttgtgggtgacccggcactggtgttgaatgacatccacaagaagattgccttggtaaagaaactggccttcgcctttggagaccgaaactgtagcaccatcaccctgcagaatatcacccggggctccatcgtggtggaatggaccaacaacacactgcccttggagccctgccccaaggagcagatcgctgggctgagccgccggatcgctgaggatgatggaaaacctcggcctgccttctccaacgccctagagcctgactttaaggccacaagcatcactgtgacgggctctggcagttgtcggcacctacagtttatccctgtggtaccacccaggagagtgccctcagaggcgccgcccacagaagtgcctgacagggaccctgagaagagcagtgaggatgatgtctacctgcacacagtcattccggccgtggtggtcgcagccatcctgctcattgctggcatcattgccatgatctgctaccgcaagaagcggaagggcaagcttacccttgaggaccaggccaccttcatcaagaagggggtgcctatcatctttgcagacgaactggacgactccaagcccccaccctcctccagcatgccactcattctgcaggaggagaaggctcccctaccccctcctgagtaccccaaccagagtgtgcccgagaccactcctctgaaccaggacaccatgggagagtacacgcccctgcgggatgaggatcccaatgcgcctccctaccagcccccaccgcccttcacagcacccatggagggcaagggctcccgtcccaagaacatgaccccataccggtcacctcctccctatgtcccaccttaacccgcaagcgcctgggtggaggcagggtagggcaggggcctggagacgacatggtgttgtctgtggagaccggtggcctgcagaccattgcccaccgggagccgacacctgacctagcacacactgacacaggggcctggacaagcccgccctctctggtcctcccaaaccccaaagcagctggagagactttggggacttttttatttttattttttgcctaacagcttttggtttgttcatagagaactcttcgcttcatttttgatggctggctctgaaagcaccatgtggagtggaggtggagggagcgaggaaccatgaatgaactcgcaggcagtgccgggcggccccctggctctctgcgttttgcctttaacactaactgtactgttttttctattcacgtgtgtctagctgcaggatgtaacatggaaaacagtaactaaagattaaattcaaaggactttcagaagttaaggttaagtttttacgtttaatctgctgtttacctaaacttgtatgtataatttttgggtgggtatggggaattgctttgctaaaaataagctcccagggtgtttcaaacttagagaagaccaagggacagtattttttatcaaaggaatactattttttcacactacgtcaacttggttgctctgataccccagagcctgattgggggcctcccggccctggctcacgccaagtccctggtgctgggtttgctctcccgctgttgccaggggctggaagctggaggggtctcttgggccatggacatccccacttccagcccatgtacactagtggcccacgaccaaggggtcttcatttccatgaaaaagggactccaagaggcagtggtggctgtggcccccaactttggtgctccagggtgggccagctgcttgtgggggcacctgggaggtcaaaggtctccaccacatcaacctattttgttttaccctttttctgtgcattgtttttttttttcctcctaaaaggaatatcacggttttttgaaacactcagtgggggacattttggtgaagatgcaatatttttatgtcatgtgatgctctttcctcacttgaccttggccgctttgtcctaacagtccacagtcctgccccgacccaccccatcccttttctctggcactccagtcccaggccttgggcctgaactactggaaaaggtctggcggctggggaggagtgccagcaatagttcataataaaaatctgttagctctcaaagctaattttttactaaagtttttatacagcctcaaattgttttattaaaaaaaagatttaaaatggtgatgcttacagcagtttgtacgagctcttaagtgttgattccatggaactgacggctttgcttgttttgattcttttccccctacttttcctaatggtttaaattctggaattacactggggttcttttgccttttttagcagaacatccgtccgtccatctgcatctctgtcccatgactcaggggcgcccactctgcttcgattctcctcctgtggaagaaaccattttgagcatgacttttcttgatgtctgaagcgttattttgggtactttttagggaggaatgcctttcgcaataatgtatccattccctgattgagggtgggtgggtggacccaggctccctttgcacacagagcagctacttctaagccatatcgactgttttgcagaggatttgtgtgtgctgcctcaggaggggagggctggtaggagggggggagaggtctctgtcctactgctctccagagggcatttccccttgcgccttctcccacagggcccagcccctctcccctgccccagtccccagggggtactctggagtgagcagtgcccctgtgggggagcctgtaaatgcgggctcagtggaccactggtgactgggctcatgcctccaagtcagagtttccctggtgccccagagacaggagcacaagtgggatctgacctggtgagattatttctgatgacctcatcaaaaaataaacaattcccaatgttccaggtgagggctttgaaaggccttccaaacagctccgtcgcccctagcaactccaccattgggcactgccatgcagagacgtggctggcccagaatggcctgttgccatagcaactggaggcgatggggcagtgaacagaataacaacagcaacaatgcctttgcaggcagcctgctcccctgagcgctgggctggtgatggccgttggactctgtgagatggtatagcctggggataatctcaggcgacctgcagcatcaggg

SEQ ID NO: 318077 - DNA, 2582 bp, Homo sapiens
cgccgcccctcctcctcgccgcgcagagccgcgctgcgccgcgcgctcccgccgcccctccccacgcgagctccacccaggtcgcaggcagcgcggtcggcggcggctatttcccgccattgtgcgaagtgaaggctaggggcccgtacgcgcccgcctgactgtcgccagcagctcctcggcggccccaccgcagccgccgctccctgaggcgcgggaggcccgcgccccgcggctcgctgtgcgtgggagggcgcgagcgaacgcgggcgaggagcggccgagccgctgaagaggagctgggcgccggccgcccggccgcgctcggcccgcggatcgcctccgcccggtcttcgccggccccggcccctggcgagatgccgtgtggggaggattggctcagccacccgctgggaatcgtgcagggattcttcgcccaaaatggagttaatcctgactgggagaagaaagtaattgagtattttaaggaaaagctgaaggaaaataatgctcctaagtgggtaccatcactgaacgaagttccccttcattatttgaaacctaatagttttgtgaaatttcgttgcatgattcaggatatgtttgaccctgagttttacatgggagtttatgaaacggttaaccaaaacacaaaagcacatgttcttcattttggaaaatatagagatgtagcagagtgtgggcctcaacaagaacttgatttaaactctccacgaaataccactttggaaagacagactttctattgtgttccggtgcctggggaatctacgtgggtaaaagaagcctatgttaatgcaaaccaagctcgagtcagtccctcaacatcctacactcctagtcgccacaagaggagttatgaagatgatgacgatatggacctacagcccaataagcagaaagaccaacatgcaggtgccagacaagcagggagtgttggtggtcttcaatggtgtggagagccaaaacgtttagaaactgaagcttctactgggcaacagctgaactctctgaacttgtcttctccttttgatttgaattttccattgccaggagagaagggccctgcatgccttgtgaaggtttatgaagattgggattgtttcaaagtaaatgacattcttgagctatatggcatactgtctgtggatcctgtgctgagtatactgaataatgatgaaagggatgcctctgcactgctggatccgatggagtgcacagacacagcagaggagcagagagtacacagtcctcctgcttcattagtgccgagaattcatgtgatcttagcccagaagttgcaacacatcaacccattattgcctgcctgccttaacaaagaggagagcaaaacctgtaagtttgtttcaagtttcatgtccgaattgtctccagtcagagcagaacttcttgggttccttactcatgcccttctgggggatagtttggctgctgaataccttatattacatctcatctccacagtatatacaagaagagatgtccttccactaggaaaatttacagttaacttgagtggttgcccacggaatagtaccttcacagaacacttgtatcgaattattcaacatcttgttccagcatcttttcgtctgcagatgactatagagaacatgaaccatttgaaattcattccccacaaagactacacagccaatcgcttggtcagtgggctcctccagctgcccagcaatacttcccttgtaatcgatgagactctcctggaacaggggcagctggataccccaggtgttcataatgtgacagccctgagcaacctcataacgtggcagaaggtggattatgacttcagctaccatcagatggaattcccctgcaatattaacgttttcattacttcggaggggaggtcactcctcccggcagactgccagattcacttacagccccagctaattccaccaaacatggaggagtacatgaacagccttctctcagcggtgctgccttccgtgctgaacaaattccgcatttatctaactcttttgagattcttggaatatagcatatctgatgaaataaccaaggcagttgaagatgactttgtggaaatgcggaagaacgaccctcagagcatcactgctgatgatcttcaccagctgctcgtggtggctcggtgtctgtctctcagtgctggtcagacaacgctgtcaagagaacgatggctgagagcaaagcagctagagtctttaagaagaacgaggcttcagcagcaaaaatgtgtgaatggaaatgaactttaaagatgtaatacctatgaagagtaatgggcaaactgtagccacataattgtaaaattcagatattcatttataccacattgttttataggtaatttctatcacaaaccagtgacatttcctgaaatcaagcctggtaacacctgatgtttatatgatattcagtaaggacttttaccttactgatttcatggagcttttgaagtttgttttataataattatataaattagtaatgatgtaaaaaaagtatttgatattaaaagtttaatattgata

SEQ ID NO: 318078 - DNA, 1945 bp, Homo sapiens
gtcacacatggacagcctcatctattttattgacccatttccagatgctgggattaccgagttacattaatacacagctttttatggtatacagtaatgtaatatattagcctaatgtgttaggactccttaaacaagggatactgtaatcattaatacagttgatccattaggcttggcacagtgtttattttatggaaacactctaaaagaaaaacagacctgaagttcatcatgtgtaaggttacacaaatctatctttcaaatgagttcattactctaaataattgtcagaagttacatttttgtttaatataatctttgcagtaaccttccaaattagggcaatttttctgtccagatctgcctactgaactagaatatttaatgagcaacaacttctgttgtgaattaacggactgatattggggtttgataaatcagtttcctaaggtttggataagccaagagttagactctaagaatataaaaaggcctagataacatcataaaagtaaggttctagatccacaaagcagagaactagacccagattataagtcactccagaggtcccatttttctggatttgagggaggaagtgtttgatgacagtatttgaagtgattttatatccattttcttttaaaaagtaatagtttggaattagttacttgttaattaatctgtaaaatatttgctgtggtgttataatgtgaaaatgtggttgctaattttaaaataaattttgggttttttaaagtaaatttttaaaaacactttttatgtatatcacagcctcaacaagaacttgatttaaactctccacgaaataccactttggaaagacagactttctattgtgttccggtgcctggggaatctacgtgggtaaaagaagcctatgttaatgcaaaccaagctcgagtcagtccctcaacatcctacactcctagtcgccacaagaggagttatgaagatgatgacgatatggacctacagcccaataagcagaaagaccaacatgcaggtgccagacaagcagggagtgttggtggtcttcaatggtgtggagagccaaaacgtttagaaactgaagcttctactgggcaacagctgaactctctgaacttgtcttctccttttgatttgaattttccattgccaggagagaagggccctgcatgccttgtgaaggtttatgaagattgggattgtttcaaagtaaatgacattcttgagctatatggcatactgtctgtggatcctgtgctgagtatactgaataatgatgaaagggatgcctctgcactgctggatccgatggagtgcacagacacagcagaggagcagagagtacacagtcctcctgcttcattagtgccgagaattcatgtgatcttagcccagaagttgcaacacatcaacccattattgcctgcctgccttaacaaagaggagagcaaaacctgtgtaagtgtaagtgttacagcctagtcaactatcgactgttagcctcagtgtgtccagagctgcctgtaacgtgctcatagtggaattgagagtcaggtcttcattcctcacaataagtgttttcagtaatctctctctcgttgccccatttttctcttacattaattctcttcactgaaatgaggacaaaagagtatacaaggctgggtgcagtggctcacgcctgtaatcttagcactttaggaggccaaggtgggtggatcacctgaggtcaggagttcgagactagcctggccaatatagtgaaaccctggctctactaaaaatacaaaattagccaggtgtggtggcgtgtgcctgtaatcccagctactcgggaggctgaggcaggagaactggaggcagaggttgcggtgagctgagatggcaccattgcactccaggctaggcaaaaagagcaaaacttggtctc

SEQ ID NO: 318079 - DNA, 790 bp, Homo sapiens
ctgagaaataatagatcaaatggtttgcactaacctcagttgcggaatatattataaaatcacaagaaagcagattgtttaccagtgctcaaatgaagacaattaagaatacactgctggcgatcagctcaagaggtaaaggtagaagaaaaaatgaggtagactgggcatgtttaaggcaaaggggaatataaaatctgtaaaattcactaggctgatctatgtatgacggtagttttagtgtttccttggtttagccctgtaaatacaccacttagaaataatcatacttgggaactattttatgtctaggtgcataccagatgctaggtattagatttgcgggggtatcgcctgcccccagaaagttctaccttgaccaagactgttgtaagcctacacacttagtgacgtttagcttagtaaactggacagcgcctcataccctttattaaaagtggtagaaacttcatggctcatcatcggtgtcagcaaaactgatgtgtttagatgattaaagtcaaatgactgaaagtgttttcctgcctttgtaggtgttcataatgtgacagccctgagcaacctcataacgtggcagaaggtggattatgacttcagctaccatcagatggaattcccctgcaatattaacgttttcattacttcggaggggaggtcactcctcccggtatgatgagtcatttttaaatggagggaggttgacattggaaaaatacctacatttttgctgtttcttggtaccgcttattaataagttacatttgttgta

SEQ ID NO: 318080 - DNA, 777 bp, Homo sapiens
tttcggcccctcacttttgcttgatcttgttgaagtgacagatagactgtctctggggcctcccagatggttcagtggaacttctggtgtcttcctggtccccaagactcattcgccattgcgtcatgggtccctccttgagaggctgtaagtgtacatacacgtatagtttgtcccccgggcccacgttatggagaaggaattgcacgacgcctgccggccgcactgtcaaacgccaccatcgtgggctcggacaccgcctccgtccggcctcagcgccacggcccctaggagcagcgcggcccacaagctcgcgccgacctcgttccaccctccgcctgggcgccgccatgttggactagggtcctccctcgtccgaattcggcacgaggcctgtgctgagtatactgaataatgatgaaagggatgcctctgcactgctggatccgatggagtgcacagacacagcagaggagcagagagtacacagtcctcctgcttcattagtgccgagaattcatgtgatcttagcccagaagttgcaacacatcaacccattattgcctgcctgccttaacaaagaggagagcaaaacctgtaagtttgtttcaagtttcatgtccgaattgtctccagtcagagcagaacttcttgggttccttactcatgcccttctgggggatagtttggctgctgaataattcgatacaagtgttctgtgaaggtactattccgtgggcaaccactcaagttaactgtaaattttcctagtggaac

SEQ ID NO: 318081 - DNA, 3990 bp, Homo sapiens
cgccgcccctcctcctcgccgcgcagagccgcgctgcgccgcgcgctcccgccgcccctccccacgcgagctccacccaggtcgcaggcagcgcggtcggcggcggctatttcccgccattgtgcgaagtgaaggctaggggcccgtacgcgcccgcctgactgtcgccagcagctcctcggcggccccaccgcagccgccgctccctgaggcgcgggaggcccgcgccccgcggctcgctgtgcgtgggagggcgcgagcgaacgcgggcgaggagcggccgagccgctgaagaggagctgggcgccggccgcccggccgcgctcggcccgcggatcgcctccgcccggtcttcgccggccccggcccctggcgagatgccgtgtggggaggattggctcagccacccgctgggaatcgtgcagggattcttcgcccaaaatggagttaatcctgactgggagaagaaagtaattgagtattttaaggaaaagctgaaggaaaataatgctcctaagtgggtaccatcactgaacgaagttccccttcattatttgaaacctaatagttttgtgaaatttcgttgcatgattcaggatatgtttgaccctgagttttacatgggagtttatgaaacggttaaccaaaacacaaaagcacatgttcttcattttggaaaatatagagatgtagcagagtgtgggcctcaacaagaacttgatttaaactctccacgaaataccactttggaaagacagactttctattgtgttccggtgcctggggaatctacgtgggtaaaagaagcctatgttaatgcaaaccaagctcgagtcagtccctcaacatcctacactcctagtcgccacaagaggagttatgaagatgatgacgatatggacctacagcccaataagcagaaagaccaacatgcaggtgccagacaagcagggagtgttggtggtcttcaatggtgtggagagccaaaacgtttagaaactgaagcttctactgggcaacagctgaactctctgaacttgtcttctccttttgatttgaattttccattgccaggagagaagggccctgcatgccttgtgaaggtttatgaagattgggattgtttcaaagtaaatgacattcttgagctatatggcatactgtctgtggatcctgtgctgagtatactgaataatgatgaaagggatgcctctgcactgctggatccgatggagtgcacagacacagcagaggagcagagagtacacagtcctcctgcttcattagtgccgagaattcatgtgatcttagcccagaagttgcaacacatcaacccattattgcctgcctgccttaacaaagaggagagcaaaacctgtaagtttgtttcaagtttcatgtccgaattgtctccagtcagagcagaacttcttgggttccttactcatgcccttctgggggatagtttggctgctgaataccttatattacatctcatctccacagtatatacaagaagagatgtccttccactaggaaaatttacagttaacttgagtggttgcccacggaatagtaccttcacagaacacttgtatcgaattattcaacatcttgttccagcatcttttcgtctgcagatgactatagagaacatgaaccatttgaaattcattccccacaaagactacacagccaatcgcttggtcagtgggctcctccagctgcccagcaatacttcccttgtaatcgatgagactctcctggaacaggggcagctggataccccaggtgttcataatgtgacagccctgagcaacctcataacgtggcagaaggtggattatgacttcagctaccatcagatggaattcccctgcaatattaacgttttcattacttcggaggggaggtcactcctcccggcagactgccagattcacttacagccccagctaattccaccaaacatggaggagtacatgaacagccttctctcagcggtgctgccttccgtgctgaacaaattccgcatttatctaactcttttgagattcttggaatatagcatatctgatgaaataaccaaggcagttgaagatgactttgtggaaatgcggaagaacgaccctcagagcatcactgctgatgatcttcaccagctgctcgtggtggctcggtgtctgtctctcagtgctggtcagacaacgctgtcaagagaacgatggctgagagcaaagcagctagagtctttaagaagaacgaggcttcagcagcaaaaatgtgtgaatggaaatgaactttaaagatgtaatacctatgaagagtaatgggcaaactgtagccacataattgtaaaattcagatattcatttataccacattgttttataggtaatttctatcacaaaccagtgacatttcctgaaatcaagcctggtaacacctgatgtttatatgatattcagtaaggacttttaccttactgatttcatggagcttttgaagtttgttttataataattatataaattagtaatgatgtaaaaaaagtatttgatattaaaagtttaatattgataatgttgctgattgtaccatttccttagcttcagctgagtcataggccagactgttgaaatgctgaaatgaagaaggttgttgcagtttcaaagtcagaggaatcgtgcttcggatttcttatgttttctagttctctgtttttccagttcacagtgggttggggtgcattcagtagtccatctttggggaacggaggcgtacttgccattgattcacatgactacatgaaattctgtactgtcatttcccagatgtttggccacagaaactttttcccacttaacatttgttaacagcctgcaaaactaaacttgtacatggcagtggttcccagacttttgtattttatggaccggtagtaatatttccaaaaatctggggtactataaggttgccaatttaccttgccaagtaatccgaataaatcactgtattatcaccatttttttcataaaaggaaaggacaatctatctctgaataagaggagtcctttaaacggaatgaatgtggcttttgggggcaaaagaaaccaagacactacattgtctttattttctcctatcccagtgcatttgagaaccatgcataagggaatgctgtgctacaaagctgtgcccaaatatgaaaacaaaataggaaacttaaaaagcaataccccctttagaaagtttttattttcttaaatgtcattgagttgctttgattctattggatttttggcattttttatgggatcatcagttggttccaagtatgttagatcagctaacatctgctactccagtaacagcctcgtacaactgcaggtaggttttctccagaccaattagttttaatagagcaaactaacaacagactgtagtagcatggttatggcaaccagaatcttcagaaaggttaggacattactttttaagctgtcagtggtatcaaataacttacctagttggaggcagataaaggatcccttacgttttttcctataaggcctaaattgaaattgttaaccaaggaaacagggtcagccttgaaaaatcaaggaattcattgtacctaataactgaagtaaaaataactagttgttcaacttttcctaaactcaaatctatttttataaacaaatgtaaataatgtttatattagagttgaactggttttcatttttataactggtagactagaccttccttaaacttttagaaataaaatgaaggcttcactggatttgtgaggataaaatacattttctttaattgtcctagagcaaagtacattagtcaccatgtgttttttgtgccaatgtaacttgtaatttaccaaagaaaaatacatacattgcttggtcttgcagaaaagttcccttgaaagaacctttccaataaataaaacgtcccaaattagcagta

SEQ ID NO: 318082 - DNA, 2858 bp, Homo sapiens
cccttgggtttaccccgccccccccgagtatgggatatcgtcaccacggtccgatctgaataatgatgaaagggatgcctctgcactgctggatccgatggagtgcacagacacagcagaggagcagagagtacacagtcctcctgcttcattagtgccgagaattcatgtgatcttagcccagaagttgcaacacatcaacccattattgcctgcctgccttaacaaagaggagagcaaaacctgtaagtttgtttcaagtttcatgtccgaattgtctccagtcagagcagaacttcttgggttccttactcatgcccttctgggggatagtttggctgctgaataccttatattacatctcatctccacagtatatacaagaagagatgtccttccactaggaaaatttacagttaacttgagtggttgcccacggaatagtaccttcacagaacacttgtatcgaattattcaacatcttgttccagcatcttttcgtctgcagatgactatagagaacatgaaccatttgaaattcattccccacaaagactacacagccaatcgcttggtcagtgggctcctccagctgcccagcaatacttcccttgtaatcgatgagactctcctggaacaggggcagctggataccccaggtgttcataatgtgacagccctgagcaacctcataacgtggcagaaggtggattatgacttcagctaccatcagatggaattcccctgcaatattaacgttttcattacttcggaggggaggtcactcctcccggcagactgccagattcacttacagccccagctaattccaccaaacatggaggagtacatgaacagccttctctcagcggtgctgccttccgtgctgaacaaattccgcatttatctaactcttttgagattcttggaatatagcatatctgatgaaataaccaaggcagttgaagatgactttgtggaaatgcggaagaacgaccctcagagcatcactgctgatgatcttcaccagctgctcgtggtggctcggtgtctgtctctcagtgctggtcagacaacgctgtcaagagaacgatggctgagagcaaagcagctagagtctttaagaagaacgaggcttcagcagcaaaaatgtgtgaatggaaatgaactttaaagatgtaatacctatgaagagtaatgggcaaactgtagccacataattgtaaaattcagatattcatttataccacattgttttataggtaatttctatcacaaaccagtgacatttcctgaaatcaagcctggtaacacctgatgtttatatgatattcagtaaggacttttaccttactgatttcatggagcttttgaagtttgttttataataattatataaattagtaatgatgtaaaaaaagtatttgatattaaaagtttaatattgataatgttgctgattgtaccatttccttagcttcagctgagtcataggccagactgttgaaatgctgaaatgaagaaggttgttgcagtttcaaagtcagaggaatcgtgcttcggatttcttatgttttctagttctctgtttttccagttcacagtgggttggggtgcattcagtagtccatctttggggaacggaggcgtacttgccattgattcacatgactacatgaaattctgtactgtcatttcccagatgtttggccacagaaactttttcccacttaacatttgttaacagcctgcaaaactaaacttgtacatggcagtggttcccagacttttgtattttatggaccggtagtaatatttccaaaaatctggggtactataaggttgccaatttaccttgccaagtaatccgaataaatcactgtattatcaccatttttttcataaaaggaaaggacaatctatctctgaataagaggagtcctttaaacggaatgaatgtggcttttgggggcaaaagaaaccaagacactacattgtctttattttctcctatcccagtgcatttgagaaccatgcataagggaatgctgtgctacaaagctgtgcccaaatatgaaaacaaaataggaaacttaaaaagcaataccccctttagaaagtttttattttcttaaatgtcattgagttgctttgattctattggatttttggcattttttatgggatcatcagttggttccaagtatgttagatcagctaacatctgctactccagtaacagcctcgtacaactgcaggtaggttttctccagaccaattagttttaatagagcaaactaacaacagactgtagtagcatggttatggcaaccagaatcttcagaaaggttaggacattactttttaagctgtcagtggtatcaaataacttacctagttggaggcagataaaggatcccttacgttttttcctataaggcctaaattgaaattgttaaccaaggaaacagggtcagccttgaaaaatcaaggaattcattgtacctaataactgaagtaaaaataactagttgttcaacttttcctaaactcaaatctatttttataaacaaatgtaaataatgtttatattagagttgaactggttttcatttttataactggtagactagaccttccttaaacttttagaaataaaatgaaggcttcactggatttgtgaggataaaatacattttctttaattgtcctagagcaaagtacattagtcaccatgtgttttttgtgccaatgtaacttgtaatttaccaaagaaaaatacatacattgcttggtcttgcagaaaagttcccttgaaagaacctttccaataaataaaacgtcccaaattagcagta

SEQ ID NO: 318083 - DNA, 2753 bp, Homo sapiens
ctgagaaataatagatcaaatggtttgcactaacctcagttgcggaatatattataaaatcacaagaaagcagattgtttaccagtgctcaaatgaagacaattaagaatacactgctggcgatcagctcaagaggtaaaggtagaagaaaaaatgaggtagactgggcatgtttaaggcaaaggggaatataaaatctgtaaaattcactaggctgatctatgtatgacggtagttttagtgtttccttggtttagccctgtaaatacaccacttagaaataatcatacttgggaactattttatgtctaggtgcataccagatgctaggtattagatttgcgggggtatcgcctgcccccagaaagttctaccttgaccaagactgttgtaagcctacacacttagtgacgtttagcttagtaaactggacagcgcctcataccctttattaaaagtggtagaaacttcatggctcatcatcggtgtcagcaaaactgatgtgtttagatgattaaagtcaaatgactgaaagtgttttcctgcctttgtaggtgttcataatgtgacagccctgagcaacctcataacgtggcagaaggtggattatgacttcagctaccatcagatggaattcccctgcaatattaacgttttcattacttcggaggggaggtcactcctcccggcagactgccagattcacttacagccccagctaattccaccaaacatggaggagtacatgaacagccttctctcagcggtgctgccttccgtgctgaacaaattccgcatttatctaactcttttgagattcttggaatatagcatatctgatgaaataaccaaggcagttgaagatgactttgtggaaatgcggaagaacgaccctcagagcatcactgctgatgatcttcaccagctgctcgtggtggctcggtgtctgtctctcagtgctggtcagacaacgctgtcaagagaacgatggctgagagcaaagcagctagagtctttaagaagaacgaggcttcagcagcaaaaatgtgtgaatggaaatgaactttaaagatgtaatacctatgaagagtaatgggcaaactgtagccacataattgtaaaattcagatattcatttataccacattgttttataggtaatttctatcacaaaccagtgacatttcctgaaatcaagcctggtaacacctgatgtttatatgatattcagtaaggacttttaccttactgatttcatggagcttttgaagtttgttttataataattatataaattagtaatgatgtaaaaaaagtatttgatattaaaagtttaatattgataatgttgctgattgtaccatttccttagcttcagctgagtcataggccagactgttgaaatgctgaaatgaagaaggttgttgcagtttcaaagtcagaggaatcgtgcttcggatttcttatgttttctagttctctgtttttccagttcacagtgggttggggtgcattcagtagtccatctttggggaacggaggcgtacttgccattgattcacatgactacatgaaattctgtactgtcatttcccagatgtttggccacagaaactttttcccacttaacatttgttaacagcctgcaaaactaaacttgtacatggcagtggttcccagacttttgtattttatggaccggtagtaatatttccaaaaatctggggtactataaggttgccaatttaccttgccaagtaatccgaataaatcactgtattatcaccatttttttcataaaaggaaaggacaatctatctctgaataagaggagtcctttaaacggaatgaatgtggcttttgggggcaaaagaaaccaagacactacattgtctttattttctcctatcccagtgcatttgagaaccatgcataagggaatgctgtgctacaaagctgtgcccaaatatgaaaacaaaataggaaacttaaaaagcaataccccctttagaaagtttttattttcttaaatgtcattgagttgctttgattctattggatttttggcattttttatgggatcatcagttggttccaagtatgttagatcagctaacatctgctactccagtaacagcctcgtacaactgcaggtaggttttctccagaccaattagttttaatagagcaaactaacaacagactgtagtagcatggttatggcaaccagaatcttcagaaaggttaggacattactttttaagctgtcagtggtatcaaataacttacctagttggaggcagataaaggatcccttacgttttttcctataaggcctaaattgaaattgttaaccaaggaaacagggtcagccttgaaaaatcaaggaattcattgtacctaataactgaagtaaaaataactagttgttcaacttttcctaaactcaaatctatttttataaacaaatgtaaataatgtttatattagagttgaactggttttcatttttataactggtagactagaccttccttaaacttttagaaataaaatgaaggcttcactggatttgtgaggataaaatacattttctttaattgtcctagagcaaagtacattagtcaccatgtgttttttgtgccaatgtaacttgtaatttaccaaagaaaaatacatacattgcttggtcttgcagaaaagttcccttgaaagaacctttccaataaataaaacgtcccaaattagcagta

SEQ ID NO: 318084 - DNA, 2125 bp, Homo sapiens
cgagctgtatacttcaatatgttgtatctcagggaatggagaagcaaggagcgtgagagagcgataggggtatggctagttggtggagcactcagaacacacacacacttatcaattcaggtttgttgtctcatatgggcattgttagtggtgtcccgaaacaattacaatagtaacatcaaagatcactgatcacagctcaccatatctgatgaaataaccaaggcagttgaagatgactttgtggaaatgcggaagaacgaccctcagagcatcactgctgatgatcttcaccagctgctcgtggtggctcggtgtctgtctctcagtgctggtcagacaacgctgtcaagagaacgatggctgagagcaaagcagctagagtctttaagaagaacgaggcttcagcagcaaaaatgtgtgaatggaaatgaactttaaagatgtaatacctatgaagagtaatgggcaaactgtagccacataattgtaaaattcagatattcatttataccacattgttttataggtaatttctatcacaaaccagtgacatttcctgaaatcaagcctggtaacacctgatgtttatatgatattcagtaaggacttttaccttactgatttcatggagcttttgaagtttgttttataataattatataaattagtaatgatgtaaaaaaagtatttgatattaaaagtttaatattgataatgttgctgattgtaccatttccttagcttcagctgagtcataggccagactgttgaaatgctgaaatgaagaaggttgttgcagtttcaaagtcagaggaatcgtgcttcggatttcttatgttttctagttctctgtttttccagttcacagtgggttggggtgcattcagtagtccatctttggggaacggaggcgtacttgccattgattcacatgactacatgaaattctgtactgtcatttcccagatgtttggccacagaaactttttcccacttaacatttgttaacagcctgcaaaactaaacttgtacatggcagtggttcccagacttttgtattttatggaccggtagtaatatttccaaaaatctggggtactataaggttgccaatttaccttgccaagtaatccgaataaatcactgtattatcaccatttttttcataaaaggaaaggacaatctatctctgaataagaggagtcctttaaacggaatgaatgtggcttttgggggcaaaagaaaccaagacactacattgtctttattttctcctatcccagtgcatttgagaaccatgcataagggaatgctgtgctacaaagctgtgcccaaatatgaaaacaaaataggaaacttaaaaagcaataccccctttagaaagtttttattttcttaaatgtcattgagttgctttgattctattggatttttggcattttttatgggatcatcagttggttccaagtatgttagatcagctaacatctgctactccagtaacagcctcgtacaactgcaggtaggttttctccagaccaattagttttaatagagcaaactaacaacagactgtagtagcatggttatggcaaccagaatcttcagaaaggttaggacattactttttaagctgtcagtggtatcaaataacttacctagttggaggcagataaaggatcccttacgttttttcctataaggcctaaattgaaattgttaaccaaggaaacagggtcagccttgaaaaatcaaggaattcattgtacctaataactgaagtaaaaataactagttgttcaacttttcctaaactcaaatctatttttataaacaaatgtaaataatgtttatattagagttgaactggttttcatttttataactggtagactagaccttccttaaacttttagaaataaaatgaaggcttcactggatttgtgaggataaaatacattttctttaattgtcctagagcaaagtacattagtcaccatgtgttttttgtgccaatgtaacttgtaatttaccaaagaaaaatacatacattgcttggtcttgcagaaaagttcccttgaaagaacctttccaataaataaaacgtcccaaattagcagta

SEQ ID NO: 318085 - DNA, 1979 bp, Homo sapiens
cgccgcccctcctcctcgccgcgcagagccgcgctgcgccgcgcgctcccgccgcccctccccacgcgagctccacccaggtcgcaggcagcgcggtcggcggcggctatttcccgccattgtgcgaagtgaaggctaggggcccgtacgcgcccgcctgactgtcgccagcagctcctcggcggccccaccgcagccgccgctccctgaggcgcgggaggcccgcgccccgcggctcgctgtgcgtgggagggcgcgagcgaacgcgggcgaggagcggccgagccgctgaagaggagctgggcgccggccgcccggccgcgctcggcccgcggatcgcctccgcccggtcttcgccggccccggcccctggcgagatgccgtgtggggaggattggctcagccacccgctgggaatcgtgcagggattcttcgcccaaaatggagttaatcctgactgggagaagaaagtaattgagtattttaaggaaaagctgaaggaaaataatgctcctaagtgggtaccatcactgaacgaagttccccttcattatttgaaacctaatagttttgtgaaatttcgttgcatgattcaggatatgtttgaccctgagttttacatgggagtttatgaaacggttaaccaaaacacaaaagcacatgttcttcattttggaaaatatagagatgtagcagagtgtgggcctcaacaagaacttgatttaaactctccacgaaataccactttggaaagacagactttctattgtgttccggtgcctggggaatctacgtgggtaaaagaagcctatgttaatgcaaaccaagctcgagtcagtccctcaacatcctacactcctagtcgccacaagaggagttatgaagatgatgacgatatggacctacagcccaataagcagaaagaccaacatgcaggtgccagacaagcagggagtgttggtggtcttcaatggtgtggagagccaaaacgtttagaaactgaagcttctactgggcaacagctgaactctctgaacttgtcttctccttttgatttgaattttccattgccaggagagaagggccctgcatgccttgtgaaggtttatgaagattgggattgtttcaaagtaaatgacattcttgagctatatggcatactgtctgtggatcctgtgctgagtatactgaataatgatgaaagggatgcctctgcactgctggatccgatggagtgcacagacacagcagaggagcagagagtacacagtcctcctgcttcattagtgccgagaattcatgtgatcttagcccagaagttgcaacacatcaacccattattgcctgcctgccttaacaaagaggagagcaaaacctgtaagtttgtttcaagtttcatgtccgaattgtctccagtcagagcagaacttcttgggttccttactcatgcccttctgggggatagtttggctgctgaataccttatattacatctcatctccacagtatatacaagaagagatgtccttccactaggaaaatttacagttaacttgagtggttgcccacggaatagtaccttcacagaacacttgtatcgaattattcaacatcttgttccagcatcttttcgtctgcagatgactatagagaacatgaaccatttgaaattcattccccacaaagactacacagccaatcgcttggtcagtgggctcctccagctgcccagcaatacttcccttgtaatcgatgagactctcctggaacaggggcagctggataccccaggtgttcataatgtgacagccctgagcaacctcataacgtggcagaaggtggattatgacttcagctaccatcagatggaattcccctgcaatattaacgttttcattacttcggaggggaggtcactcctcccgcagactgccagattcacttacagccccaaccttgcatgcctggggtaccgagct

SEQ ID NO: 318086 - DNA, 330 bp, Homo sapiens
aggctgacatgcaccttactacatcagtcaaggaaccatgttaattttcttttccttacaaaaatgcacatcatttacatttactcttttgataaaggcagttgaagatgactttgtggaaatgcggaagaacgaccctcagagcatcactgctgatgatcttcaccagctgctcgtggtggctcggtaagtggcgcacgtccattattgctgtttcggtaagcttgtgtatatgtcttctgagttattcagcagtaactgaggcagaattctaaaaacggaaatgaacttttccttttaaaaacgctgttgacaaaggctcattgaggg

SEQ ID NO: 318087 - DNA, 4375 bp, Homo sapiens
cgccgcccctcctcctcgccgcgcagagccgcgctgcgccgcgcgctcccgccgcccctccccacgcgagctccacccaggtcgcaggcagcgcggtcggcggcggctatttcccgccattgtgcgaagtgaaggctaggggcccgtacgcgcccgcctgactgtcgccagcagctcctcggcggccccaccgcagccgccgctccctgaggcgcgggaggcccgcgccccgcggctcgctgtgcgtgggagggcgcgagcgaacgcgggcgaggagcggccgagccgctgaagaggagctgggcgccggccgcccggccgcgctcggcccgcggatcgcctccgcccggtcttcgccggccccggcccctggcgagatgccgtgtggggaggattggctcagccacccgctgggaatcgtgcagggattcttcgcccaaaatggagttaatcctgactgggagaagaaagtaattgagtattttaaggaaaagctgaaggaaaataatgctcctaagtgggtaccatcactgaacgaagttccccttcattatttgaaacctaatagttttgtgaaatttcgttgcatgattcaggatatgtttgaccctgagttttacatgggagtttatgaaacggttaaccaaaacacaaaagcacatgttcttcattttggaaaatatagagatgtagcagagtgtgggcctcaacaagaacttgatttaaactctccacgaaataccactttggaaagacagactttctattgtgttccggtgcctggggaatctacgtgggtaaaagaagcctatgttaatgcaaaccaagctcgagtcagtccctcaacatcctacactcctagtcgccacaagaggagttatgaagatgatgacgatatggacctacagcccaataagcagaaagaccaacatgcaggtgccagacaagcagggagtgttggtggtcttcaatggtgtggagagccaaaacgtttagaaactgaagcttctactgggcaacagctgaactctctgaacttgtcttctccttttgatttgaattttccattgccaggagagaagggccctgcatgccttgtgaaggtttatgaagattgggattgtttcaaagtaaatgacattcttgagctatatggcatactgtctgtggatcctgtgctgagtatactgaataatgatgaaagggatgcctctgcactgctggatccgatggagtgcacagacacagcagaggagcagagagtacacagtcctcctgcttcattagtgccgagaattcatgtgatcttagcccagaagttgcaacacatcaacccattattgcctgcctgccttaacaaagaggagagcaaaacctgtaagtttgtttcaagtttcatgtccgaattgtctccagtcagagcagaacttcttgggttccttactcatgcccttctgggggatagtttggctgctgaataccttatattacatctcatctccacagtatatacaagaagagatgtccttccactaggaaaatttacagttaacttgagtggttgcccacggaatagtaccttcacagaacacttgtatcgaattattcaacatcttgttccagcatcttttcgtctgcagatgactatagagaacatgaaccatttgaaattcattccccacaaagactacacagccaatcgcttggtcagtgggctcctccagctgcccagcaatacttcccttgtaatcgatgagactctcctggaacaggggcagctggataccccaggtgttcataatgtgacagccctgagcaacctcataacgtggcagaaggtggattatgacttcagctaccatcagatggaattcccctgcaatattaacgttttcattacttcggaggggaggtcactcctcccggcagactgccagattcacttacagccccagctaattccaccaaacatggaggagtacatgaacagccttctctcagcggtgctgccttccgtgctgaacaaattccgcatttatctaactcttttgagattcttggaatatagcatatctgatgaaataaccaaggcagttgaagatgactttgtggaaatgcggaagaacgaccctcagagcatcactgctgatgatcttcaccagctgctcgtggtggctcggtgtctgtctctcagtgctggtcagacaacgctgtcaagagaacgatggctgagagcaaagcagctagagtctttaagaagaacgaggcttcagcagcaaaaatgtgtgaatggaaatgaactttaaagatgtaatacctatgaagagtaatgggcaaactgtagccacataattgtaaaattcagatattcatttataccacattgttttataggtaatttctatcacaaaccagtgacatttcctgaaatcaagcctggtaacacctgatgtttatatgatattcagtaaggacttttaccttactgatttcatggagcttttgaagtttgttttataataattatataaattagtaatgatgtaaaaaaagtatttgatattaaaagtttaatattgataatgttgctgattgtaccatttccttagcttcagctgagtcataggccagactgttgaaatgctgaaatgaagaaggttgttgcagtttcaaagtcagaggaatcgtgcttcggatttcttatgttttctagttctctgtttttccagttcacagtgggttggggtgcattcagtagtccatctttggggaacggaggcgtacttgccattgattcacatgactacatgaaattctgtactgtcatttcccagatgtttggccacagaaactttttcccacttaacatttgttaacagcctgcaaaactaaacttgtacatggcagtggttcccagacttttgtattttatggaccggtagtaatatttccaaaaatctggggtactataaggttgccaatttaccttgccaagtaatccgaataaatcactgtattatcaccatttttttcataaaaggaaaggacaatctatctctgaataagaggagtcctttaaacggaatgaatgtggcttttgggggcaaaagaaaccaagacactacattgtctttattttctcctatcccagtgcatttgagaaccatgcataagggaatgctgtgctacaaagctgtgcccaaatatgaaaacaaaataggaaacttaaaaagcaataccccctttagaaagtttttattttcttaaatgtcattgagttgctttgattctattggatttttggcattttttatgggatcatcagttggttccaagtatgttagatcagctaacatctgctactccagtaacagcctcgtacaactgcaggtaggttttctccagaccaattagttttaatagagcaaactaacaacagactgtagtagcatggttatggcaaccagaatcttcagaaaggttaggacattactttttaagctgtcagtggtatcaaataacttacctagttggaggcagataaaggatcccttacgttttttcctataaggcctaaattgaaattgttaaccaaggaaacagggtcagccttgaaaaatcaaggaattcattgtacctaataactgaagtaaaaataactagttgttcaacttttcctaaactcaaatctatttttataaacaaatgtaaataatgtttatattagagttgaactggttttcatttttataactggtagactagaccttccttaaacttttagaaataaaatgaaggcttcactggatttgtgaggataaaatacattttctttaattgtcctagagcaaagtacattagtcaccatgtgttttttgtgccaatgtaacttgtaatttaccaaagaaaaatacatacattgcttggtcttgcagaaaagttcccttgaaagaacctttccaataaataaaacgtcccaaattagcagtaccttgggctgtttttcatgagtaagaagattcaccatcccatgtgatctgtgtggaaaaagaccatgtcctcttggtggaagacatgagagagctgaactgaagtggaggaggtggtgcaagagggaccttcctgctcaaggcccgcccaggcagcggaatggagtgcagtgcttggctgcagaaaccctttgtccctcacctatatatacacggacagtcaagtttgttgctctaacgtaaggcacagcgttaatcctgtatggccaggaaactgagtagactcctgtgtaaccctgtttggaactttgccttcttaaaatgatttttcaaagatctctttcgaactaatttctgtagagtttaaacgtgtattttatcaccta

SEQ ID NO: 318088 - DNA, 466 bp, Homo sapiens
  misc_feature (20)..(20): n is a, c, g, or t
  misc_feature (32)..(32): n is a, c, g, or t
  misc_feature (36)..(37): n is a, c, g, or t
  misc_feature (59)..(59): n is a, c, g, or t
gcgtctagaggatcccttanacgtatcagaanactnntatcgaattacaacatctgttncagcatcttttcgtctgcagatgactatagagaacatgaaccatttgaaattcattccccacaaagactacacagccaatcgcttggtcagtgggctcctccagctgcccagcaatacttcccttgtaatcgatgagactctcctggaacaggggcagctggataccccaggtgttcataatgtgacagccctgagcaacctcataacgtggcagaaggtggattatgacttcagctaccatcagatggaattcccctgcaatattaacgttttcattacttcggaggggaggtcactcctcccggtatgatgagtcatttttaaatggagggaggttgacattggaaaaatacctacatttttgctgtttcttggtaccgcttattaataagttacatttgttgta

SEQ ID NO: 318089 - DNA, 4084 bp, Homo sapiens
gtcacacatggacagcctcatctattttattgacccatttccagatgctgggattaccgagttacattaatacacagctttttatggtatacagtaatgtaatatattagcctaatgtgttaggactccttaaacaagggatactgtaatcattaatacagttgatccattaggcttggcacagtgtttattttatggaaacactctaaaagaaaaacagacctgaagttcatcatgtgtaaggttacacaaatctatctttcaaatgagttcattactctaaataattgtcagaagttacatttttgtttaatataatctttgcagtaaccttccaaattagggcaatttttctgtccagatctgcctactgaactagaatatttaatgagcaacaacttctgttgtgaattaacggactgatattggggtttgataaatcagtttcctaaggtttggataagccaagagttagactctaagaatataaaaaggcctagataacatcataaaagtaaggttctagatccacaaagcagagaactagacccagattataagtcactccagaggtcccatttttctggatttgagggaggaagtgtttgatgacagtatttgaagtgattttatatccattttcttttaaaaagtaatagtttggaattagttacttgttaattaatctgtaaaatatttgctgtggtgttataatgtgaaaatgtggttgctaattttaaaataaattttgggttttttaaagtaaatttttaaaaacactttttatgtatatcacagcctcaacaagaacttgatttaaactctccacgaaataccactttggaaagacagactttctattgtgttccggtgcctggggaatctacgtgggtaaaagaagcctatgttaatgcaaaccaagctcgagtcagtccctcaacatcctacactcctagtcgccacaagaggagttatgaagatgatgacgatatggacctacagcccaataagcagaaagaccaacatgcaggtgccagacaagcagggagtgttggtggtcttcaatggtgtggagagccaaaacgtttagaaactgaagcttctactgggcaacagctgaactctctgaacttgtcttctccttttgatttgaattttccattgccaggagagaagggccctgcatgccttgtgaaggtttatgaagattgggattgtttcaaagtaaatgacattcttgagctatatggcatactgtctgtggatcctgtgctgagtatactgaataatgatgaaagggatgcctctgcactgctggatccgatggagtgcacagacacagcagaggagcagagagtacacagtcctcctgcttcattagtgccgagaattcatgtgatcttagcccagaagttgcaacacatcaacccattattgcctgcctgccttaacaaagaggagagcaaaacctgtaagtttgtttcaagtttcatgtccgaattgtctccagtcagagcagaacttcttgggttccttactcatgcccttctgggggatagtttggctgctgaataccttatattacatctcatctccacagtatatacaagaagagatgtccttccactaggaaaatttacagttaacttgagtggttgcccacggaatagtaccttcacagaacacttgtatcgaattattcaacatcttgttccagcatcttttcgtctgcagatgactatagagaacatgaaccatttgaaattcattccccacaaagactacacagccaatcgcttggtcagtgggctcctccagctgcccagcaatacttcccttgtaatcgatgagactctcctggaacaggggcagctggataccccaggtgttcataatgtgacagccctgagcaacctcataacgtggcagaaggtggattatgacttcagctaccatcagatggaattcccctgcaatattaacgttttcattacttcggaggggaggtcactcctcccggcagactgccagattcacttacagccccagctaattccaccaaacatggaggagtacatgaacagccttctctcagcggtgctgccttccgtgctgaacaaattccgcatttatctaactcttttgagattcttggaatatagcatatctgatgaaataaccaaggcagttgaagatgactttgtggaaatgcggaagaacgaccctcagagcatcactgctgatgatcttcaccagctgctcgtggtggctcggtgtctgtctctcagtgctggtcagacaacgctgtcaagagaacgatggctgagagcaaagcagctagagtctttaagaagaacgaggcttcagcagcaaaaatgtgtgaatggaaatgaactttaaagatgtaatacctatgaagagtaatgggcaaactgtagccacataattgtaaaattcagatattcatttataccacattgttttataggtaatttctatcacaaaccagtgacatttcctgaaatcaagcctggtaacacctgatgtttatatgatattcagtaaggacttttaccttactgatttcatggagcttttgaagtttgttttataataattatataaattagtaatgatgtaaaaaaagtatttgatattaaaagtttaatattgataatgttgctgattgtaccatttccttagcttcagctgagtcataggccagactgttgaaatgctgaaatgaagaaggttgttgcagtttcaaagtcagaggaatcgtgcttcggatttcttatgttttctagttctctgtttttccagttcacagtgggttggggtgcattcagtagtccatctttggggaacggaggcgtacttgccattgattcacatgactacatgaaattctgtactgtcatttcccagatgtttggccacagaaactttttcccacttaacatttgttaacagcctgcaaaactaaacttgtacatggcagtggttcccagacttttgtattttatggaccggtagtaatatttccaaaaatctggggtactataaggttgccaatttaccttgccaagtaatccgaataaatcactgtattatcaccatttttttcataaaaggaaaggacaatctatctctgaataagaggagtcctttaaacggaatgaatgtggcttttgggggcaaaagaaaccaagacactacattgtctttattttctcctatcccagtgcatttgagaaccatgcataagggaatgctgtgctacaaagctgtgcccaaatatgaaaacaaaataggaaacttaaaaagcaataccccctttagaaagtttttattttcttaaatgtcattgagttgctttgattctattggatttttggcattttttatgggatcatcagttggttccaagtatgttagatcagctaacatctgctactccagtaacagcctcgtacaactgcaggtaggttttctccagaccaattagttttaatagagcaaactaacaacagactgtagtagcatggttatggcaaccagaatcttcagaaaggttaggacattactttttaagctgtcagtggtatcaaataacttacctagttggaggcagataaaggatcccttacgttttttcctataaggcctaaattgaaattgttaaccaaggaaacagggtcagccttgaaaaatcaaggaattcattgtacctaataactgaagtaaaaataactagttgttcaacttttcctaaactcaaatctatttttataaacaaatgtaaataatgtttatattagagttgaactggttttcatttttataactggtagactagaccttccttaaacttttagaaataaaatgaaggcttcactggatttgtgaggataaaatacattttctttaattgtcctagagcaaagtacattagtcaccatgtgttttttgtgccaatgtaacttgtaatttaccaaagaaaaatacatacattgcttggtcttgcagaaaagttcccttgaaagaacctttccaataaataaaacgtcccaaattagcagta

SEQ ID NO: 318090 - DNA, 3825 bp, Homo sapiens
cgccgcccctcctcctcgccgcgcagagccgcgctgcgccgcgcgctcccgccgcccctccccacgcgagctccacccaggtcgcaggcagcgcggtcggcggcggctatttcccgccattgtgcgaagtgaaggctaggggcccgtacgcgcccgcctgactgtcgccagcagctcctcggcggccccaccgcagccgccgctccctgaggcgcgggaggcccgcgccccgcggctcgctgtgcgtgggagggcgcgagcgaacgcgggcgaggagcggccgagccgctgaagaggagctgggcgccggccgcccggccgcgctcggcccgcggatcgcctccgcccggtcttcgccggccccggcccctggcgagatgccgtgtggggaggattggctcagccacccgctgggaatcgtgcagggattcttcgcccaaaatggagttaatcctgactgggagaagaaagtaattgagtattttaaggaaaagctgaaggaaaataatgctcctaagtgggtaccatcactgaacgaagttccccttcattatttgaaacctaatagttttgtgaaatttcgttgcatgattcaggatatgtttgaccctgagttttacatgggagtttatgaaacggttaaccaaaacacaaaagcacatgttcttcattttggaaaatatagagatgtagcagagtgtgggcctcaacaagaacttgatttaaactctccacgaaataccactttggaaagacagactttctattgtgttccggtgcctggggaatctacgtgggtaaaagaagcctatgttaatgcaaaccaagctcgagtcagtccctcaacatcctacactcctagtcgccacaagaggagttatgaagatgatgacgatatggacctacagcccaataagcagaaagaccaacatgcaggtgccagacaagcagggagtgttggtggtcttcaatggtgtggagagccaaaacgtttagaaactgaagcttctactgggcaacagctgaactctctgaacttgtcttctccttttgatttgaattttccattgccaggagagaagggccctgcatgccttgtgaaggtttatgaagattgggattgtttcaaagtaaatgacattcttgagctatatggcatactgtctgtggatcctgtgctgagtatactgaataatgatgaaagggatgcctctgcactgctggatccgatggagtgcacagacacagcagaggagcagagagtacacagtcctcctgcttcattagtgccgagaattcatgtgatcttagcccagaagttgcaacacatcaacccattattgcctgcctgccttaacaaagaggagagcaaaacctgtaagtttgtttcaagtttcatgtccgaattgtctccagtcagagcagaacttcttgggttccttactcatgcccttctgggggatagtttggctgctgaataccttatattacatctcatctccacagtatatacaagaagagatgtccttccactaggaaaatttacagttaacttgagtggttgcccacggaatagtaccttcacagaacacttgtatcgaattattcaacatcttgttccagcatcttttcgtctgcagatgactatagagaacatgaaccatttgaaattcattccccacaaagactacacagccaatcgcttggtcagtgggctcctccagctgcccagcaatacttcccttgtaatcgatgagactctcctggaacaggggcagctggataccccaggtgttcataatgtgacagccctgagcaacctcataacgtggcagaaggtggattatgacttcagctaccatcagatggaattcccctgcaatattaacgttttcattacttcggaggggaggtcactcctcccggcagttgaagatgactttgtggaaatgcggaagaacgaccctcagagcatcactgctgatgatcttcaccagctgctcgtggtggctcggtgtctgtctctcagtgctggtcagacaacgctgtcaagagaacgatggctgagagcaaagcagctagagtctttaagaagaacgaggcttcagcagcaaaaatgtgtgaatggaaatgaactttaaagatgtaatacctatgaagagtaatgggcaaactgtagccacataattgtaaaattcagatattcatttataccacattgttttataggtaatttctatcacaaaccagtgacatttcctgaaatcaagcctggtaacacctgatgtttatatgatattcagtaaggacttttaccttactgatttcatggagcttttgaagtttgttttataataattatataaattagtaatgatgtaaaaaaagtatttgatattaaaagtttaatattgataatgttgctgattgtaccatttccttagcttcagctgagtcataggccagactgttgaaatgctgaaatgaagaaggttgttgcagtttcaaagtcagaggaatcgtgcttcggatttcttatgttttctagttctctgtttttccagttcacagtgggttggggtgcattcagtagtccatctttggggaacggaggcgtacttgccattgattcacatgactacatgaaattctgtactgtcatttcccagatgtttggccacagaaactttttcccacttaacatttgttaacagcctgcaaaactaaacttgtacatggcagtggttcccagacttttgtattttatggaccggtagtaatatttccaaaaatctggggtactataaggttgccaatttaccttgccaagtaatccgaataaatcactgtattatcaccatttttttcataaaaggaaaggacaatctatctctgaataagaggagtcctttaaacggaatgaatgtggcttttgggggcaaaagaaaccaagacactacattgtctttattttctcctatcccagtgcatttgagaaccatgcataagggaatgctgtgctacaaagctgtgcccaaatatgaaaacaaaataggaaacttaaaaagcaataccccctttagaaagtttttattttcttaaatgtcattgagttgctttgattctattggatttttggcattttttatgggatcatcagttggttccaagtatgttagatcagctaacatctgctactccagtaacagcctcgtacaactgcaggtaggttttctccagaccaattagttttaatagagcaaactaacaacagactgtagtagcatggttatggcaaccagaatcttcagaaaggttaggacattactttttaagctgtcagtggtatcaaataacttacctagttggaggcagataaaggatcccttacgttttttcctataaggcctaaattgaaattgttaaccaaggaaacagggtcagccttgaaaaatcaaggaattcattgtacctaataactgaagtaaaaataactagttgttcaacttttcctaaactcaaatctatttttataaacaaatgtaaataatgtttatattagagttgaactggttttcatttttataactggtagactagaccttccttaaacttttagaaataaaatgaaggcttcactggatttgtgaggataaaatacattttctttaattgtcctagagcaaagtacattagtcaccatgtgttttttgtgccaatgtaacttgtaatttaccaaagaaaaatacatacattgcttggtcttgcagaaaagttcccttgaaagaacctttccaataaataaaacgtcccaaattagcagta

SEQ ID NO: 318091 - DNA, 2137 bp, Homo sapiens
tttttaagagtcaacaacacaccctttaagccaagaaaaaaaatacatcaggaggggaggtcactcctcccggcagactgccagattcacttacagccccagctaattccaccaaacatggaggagtacatgaacagccttctctcagcggtgctgccttccgtgctgaacaaattccgcatttatctaactcttttgagattcttggaatatagcatatctgatgaaataaccaaggcagttgaagatgactttgtggaaatgcggaagaacgaccctcagagcatcactgctgatgatcttcaccagctgctcgtggtggctcggtgtctgtctctcagtgctggtcagacaacgctgtcaagagaacgatggctgagagcaaagcagctagagtctttaagaagaacgaggcttcagcagcaaaaatgtgtgaatggaaatgaactttaaagatgtaatacctatgaagagtaatgggcaaactgtagccacataattgtaaaattcagatattcatttataccacattgttttataggtaatttctatcacaaaccagtgacatttcctgaaatcaagcctggtaacacctgatgtttatatgatattcagtaaggacttttaccttactgatttcatggagcttttgaagtttgttttataataattatataaattagtaatgatgtaaaaaaagtatttgatattaaaagtttaatattgataatgttgctgattgtaccatttccttagcttcagctgagtcataggccagactgttgaaatgctgaaatgaagaaggttgttgcagtttcaaagtcagaggaatcgtgcttcggatttcttatgttttctagttctctgtttttccagttcacagtgggttggggtgcattcagtagtccatctttggggaacggaggcgtacttgccattgattcacatgactacatgaaattctgtactgtcatttcccagatgtttggccacagaaactttttcccacttaacatttgttaacagcctgcaaaactaaacttgtacatggcagtggttcccagacttttgtattttatggaccggtagtaatatttccaaaaatctggggtactataaggttgccaatttaccttgccaagtaatccgaataaatcactgtattatcaccatttttttcataaaaggaaaggacaatctatctctgaataagaggagtcctttaaacggaatgaatgtggcttttgggggcaaaagaaaccaagacactacattgtctttattttctcctatcccagtgcatttgagaaccatgcataagggaatgctgtgctacaaagctgtgcccaaatatgaaaacaaaataggaaacttaaaaagcaataccccctttagaaagtttttattttcttaaatgtcattgagttgctttgattctattggatttttggcattttttatgggatcatcagttggttccaagtatgttagatcagctaacatctgctactccagtaacagcctcgtacaactgcaggtaggttttctccagaccaattagttttaatagagcaaactaacaacagactgtagtagcatggttatggcaaccagaatcttcagaaaggttaggacattactttttaagctgtcagtggtatcaaataacttacctagttggaggcagataaaggatcccttacgttttttcctataaggcctaaattgaaattgttaaccaaggaaacagggtcagccttgaaaaatcaaggaattcattgtacctaataactgaagtaaaaataactagttgttcaacttttcctaaactcaaatctatttttataaacaaatgtaaataatgtttatattagagttgaactggttttcatttttataactggtagactagaccttccttaaacttttagaaataaaatgaaggcttcactggatttgtgaggataaaatacattttctttaattgtcctagagcaaagtacattagtcaccatgtgttttttgtgccaatgtaacttgtaatttaccaaagaaaaatacatacattgcttggtcttgcagaaaagttcccttgaaagaacctttccaataaataaaacgtcccaaattagcagta

SEQ ID NO: 318092 - DNA, 625 bp, Homo sapiens
ctcaaaaaaaaaaaaaaggaggatgcaaactgccttatttttaagattagcatcacttactgacggatatgttaagctttacctactgtcgactgaattgtgctttgctcacgtagttatttttttacctaagacacttgagaggaactggagtgtgtgtcctgactcaggtcttcctttctccttcagaagtttgtttcaagtttcatgtccgaattgtctccagtcagagcagaacttcttgggttccttactcatgcccttctgggggatagtttggctgctgaataccttatattacatctcatctccacagtgtaagtgctgtatcctggtgggaattaggggagtttggtgtgtgtggaagtggaagagcgggaagattgctggtgtcatttgtgtgttttccttattgggcttcatcacatggtttttatctgtccagtgttaactgttataccaaatcacagacaaattccttttctcacagttcacatttagcattttgattatgtccccttaaattttagagccaaaatcagataaagcagtggtccccaaccttttaggcaccaaggacccatttcatggaagaccatttttccatggaccggagtggggatgg

SEQ ID NO: 318093 - DNA, 4332 bp, Homo sapiens
ctgcccggcccggcccgcccggctccgcgccgcagtctccctccctcccgctccgtccccgctcgggctcccaccatccccgcccgcgaggagagcactcggcccggcggcgcgagcagagccactccagggagggggggagaccgcgagcggccggctcagcccccgccacccggggcgggaccccgaggccccggagggaccccaactccagccacgtcttgctgcgcgcccgcccggcgcggccactgccagcacgctccgggcccgccgcccgcgcgcgcggcacagacgcggggccacacttggcgccgccgcccggtgccccgcacgctcgcatgggcccgcgctgagggccccgacgaggagtcccgcgcggagtatcggcgtccacccgcccagggagagtcagacctgggggggcgagggccccccaaactcagttcggatcctacccgagtgaggcggcgccatggagctccgggtgctgctctgctgggcttcgttggccgcagctttggaagagaccctgctgaacacaaaattggaaactgctgatctgaagtgggtgacattccctcaggtggacgggcagtgggaggaactgagcggcctggatgaggaacagcacagcgtgcgcacctacgaagtgtgtgacgtgcagcgtgccccgggccaggcccactggcttcgcacaggttgggtcccacggcggggcgccgtccacgtgtacgccacgctgcgcttcaccatgctcgagtgcctgtccctgcctcgggctgggcgctcctgcaaggagaccttcaccgtcttctactatgagagcgatgcggacacggccacggccctcacgccagcctggatggagaacccctacatcaaggtggacacggtggccgcggagcatctcacccggaagcgccctggggccgaggccaccgggaaggtgaatgtcaagacgctgcgtctgggaccgctcagcaaggctggcttctacctggccttccaggaccagggtgcctgcatggccctgctatccctgcacctcttctacaaaaagtgcgcccagctgactgtgaacctgactcgattcccggagactgtgcctcgggagctggttgtgcccgtggccggtagctgcgtggtggatgccgtccccgcccctggccccagccccagcctctactgccgtgaggatggccagtgggccgaacagccggtcacgggctgcagctgtgctccggggttcgaggcagctgaggggaacaccaagtgccgagcctgtgcccagggcaccttcaagcccctgtcaggagaagggtcctgccagccatgcccagccaatagccactctaacaccattggatcagccgtctgccagtgccgcgtcgggtacttccgggcacgcacagacccccggggtgcaccctgcaccacccctccttcggctccgcggagcgtggtttcccgcctgaacggctcctccctgcacctggaatggagtgcccccctggagtctggtggccgagaggacctcacctacgccctccgctgccgggagtgccgacccggaggctcctgtgcgccctgcgggggagacctgacttttgaccccggcccccgggacctggtggagccctgggtggtggttcgagggctacgtcctgacttcacctatacctttgaggtcactgcattgaacggggtatcctccttagccacggggcccgtcccatttgagcctgtcaatgtcaccactgaccgagaggtacctcctgcagtgtctgacatccgggtgacgcggtcctcacccagcagcttgagcctggcctgggctgttccccgggcacccagtggggctgtgctggactacgaggtcaaataccatgagaagggcgccgagggtcccagcagcgtgcggttcctgaagacgtcagaaaaccgggcagagctgcgggggctgaagcggggagccagctacctggtgcaggtacgggcgcgctctgaggccggctacgggcccttcggccaggaacatcacagccagacccaactggatgagagcgagggctggcgggagcagctggccctgattgcgggcacggcagtcgtgggtgtggtcctggtcctggtggtcattgtggtcgcagttctctgcctcaggaagcagagcaatgggagagaagcagaatattcggacaaacacggacagtatctcatcggacatggtactaaggtctacatcgaccccttcacttatgaagaccctaatgaggctgtgagggaatttgcaaaagagatcgatgtctcctacgtcaagattgaagaggtgattggtgcaggtgagtttggcgaggtgtgccgggggcggctcaaggccccagggaagaaggagagctgtgtggcaatcaagaccctgaagggtggctacacggagcggcagcggcgtgagtttctgagcgaggcctccatcatgggccagttcgagcaccccaatatcatccgcctggagggcgtggtcaccaacagcatgcccgtcatgattctcacagagttcatggagaacggcgccctggactccttcctgcggctaaacgacggacagttcacagtcatccagctcgtgggcatgctgcggggcatcgcctcgggcatgcggtaccttgccgagatgagctacgtccaccgagacctggctgctcgcaacatcctagtcaacagcaacctcgtctgcaaagtgtctgactttggcctttcccgattcctggaggagaactcttccgatcccacctacacgagctccctgggaggaaagattcccatccgatggactgccccggaggccattgccttccggaagttcacttccgccagtgatgcctggagttacgggattgtgatgtgggaggtgatgtcatttggggagaggccgtactgggacatgagcaatcaggacgtgatcaatgccattgaacaggactaccggctgcccccgcccccagactgtcccacctccctccaccagctcatgctggactgttggcagaaagaccggaatgcccggccccgcttcccccaggtggtcagcgccctggacaagatgatccggaaccccgccagcctcaaaatcgtggcccgggagaatggcggggcctcacaccctctcctggaccagcggcagcctcactactcagcttttggctctgtgggcgagtggcttcgggccatcaaaatgggaagatacgaagaaagtttcgcagccgctggctttggctccttcgagctggtcagccagatctctgctgaggacctgctccgaatcggagtcactctggcgggacaccagaagaaaatcttggccagtgtccagcacatgaagtcccaggccaagccgggaaccccgggtgggacaggaggaccggccccgcagtactgacctgcaggaactccccaccccagggacaccgcctccccattttccggggcagagtggggactcacagaggcccccagccctgtgccccgctggattgcactttgagcccgtggggtgaggagttggcaatttggagagacaggatttgggggttctgccataataggaggggaaaatcaccccccagccacctcggggaactccagaccaagggtgagggcgcctttccctcaggactgggtgtgaccagaggaaaaggaagtgcccaacatctcccagcctccccaggtgcccccctcaccttgatgggtgcgttcccgcagaccaaagagagtgtgactcccttgccagctccagagtgggggggctgtcccagggggcaagaaggggtgtcagggcccagtgacaaaatcattggggtttgtagtcccaacttgctgctgtcaccaccaaactcaatcatttttttcccttgtaaatgcccctcccccagctgctgccttcatattgaaggtttttgagttttgtttttggtcttaatttttctccccgttccctttttgtttcttcgttttgtttttctaccgtccttgtcataactttgtgttggagggaacctgtttcactatggcctcctttgcccaagttgaaacaggggcccatcatcatgtctgtttccagaacagtgccttggtcatcccacatccccggaccccgcctgggacccccaagctgtgtcctatgaaggggtgtggggtgaggtagtgaaaagggcggtagttggtggtggaacccagaaacggacgccggtgcttggaggggttcttaaattatatttaaaaaagtaactttttgtataaataaaagaaaatgggacgtgtcccagctccaggggt

SEQ ID NO: 318094 - DNA, 4176 bp, Homo sapiens
ctgcccggcccggcccgcccggctccgcgccgcagtctccctccctcccgctccgtccccgctcgggctcccaccatccccgcccgcgaggagagcactcggcccggcggcgcgagcagagccactccagggagggggggagaccgcgagcggccggctcagcccccgccacccggggcgggaccccgaggccccggagggaccccaactccagccacgtcttgctgcgcgcccgcccggcgcggccactgccagcacgctccgggcccgccgcccgcgcgcgcggcacagacgcggggccacacttggcgccgccgcccggtgccccgcacgctcgcatgggcccgcgctgagggccccgacgaggagtcccgcgcggagtatcggcgtccacccgcccagggagagtcagacctgggggggcgagggccccccaaactcagttcggatcctacccgagtgaggcggcgccatggagctccgggtgctgctctgctgggcttcgttggccgcagctttggaagagaccctgctgaacacaaaattggaaactgctgatctgaagtgggtgacattccctcaggtggacgggcagtgggaggaactgagcggcctggatgaggaacagcacagcgtgcgcacctacgaagtgtgtgacgtgcagcgtgccccgggccaggcccactggcttcgcacaggttgggtcccacggcggggcgccgtccacgtgtacgccacgctgcgcttcaccatgctcgagtgcctgtccctgcctcgggctgggcgctcctgcaaggagaccttcaccgtcttctactatgagagcgatgcggacacggccacggccctcacgccagcctggatggagaacccctacatcaaggtggacacggtggccgcggagcatctcacccggaagcgccctggggccgaggccaccgggaaggtgaatgtcaagacgctgcgtctgggaccgctcagcaaggctggcttctacctggccttccaggaccagggtgcctgcatggccctgctatccctgcacctcttctacaaaaagtgcgcccagctgactgtgaacctgactcgattcccggagactgtgcctcgggagctggttgtgcccgtggccggtagctgcgtggtggatgccgtccccgcccctggccccagccccagcctctactgccgtgaggatggccagtgggccgaacagccggtcacgggctgcagctgtgctccggggttcgaggcagctgaggggaacaccaagtgccgagcctgtgcccagggcaccttcaagcccctgtcaggagaagggtcctgccagccatgcccagccaatagccactctaacaccattggatcagccgtctgccagtgccgcgtcgggtacttccgggcacgcacagacccccggggtgcaccctgcaccacccctccttcggctccgcggagcgtggtttcccgcctgaacggctcctccctgcacctggaatggagtgcccccctggagtctggtggccgagaggacctcacctacgccctccgctgccgggagtgccgacccggaggctcctgtgcgccctgcgggggagacctgacttttgaccccggcccccgggacctggtggagccctgggtggtggttcgagggctacgtcctgacttcacctatacctttgaggtcactgcattgaacggggtatcctccttagccacggggcccgtcccatttgagcctgtcaatgtcaccactgaccgagaggtacctcctgcagtgtctgacatccgggtgacgcggtcctcacccagcagcttgagcctggcctgggctgttccccgggcacccagtggggctgtgctggactacgaggtcaaataccatgagaagggcgccgagggtcccagcagcgtgcggttcctgaagacgtcagaaaaccgggcagagctgcgggggctgaagcggggagccagctacctggtgcaggtacgggcgcgctctgaggccggctacgggcccttcggccaggaacatcacagccagacccaactggatgagagcgagggctggcgggagcagctggccctgattgcgggcacggcagtcgtgggtgtggtcctggtcctggtggtcattgtggtcgcagttctctgcctcaggaagcagagcaatgggagagaagcagaatattcggacaaacacggacagtatctcatcggacatggtactaaggtctacatcgaccccttcacttatgaagaccctaatgaggctgtgagggaatttgcaaaagagatcgatgtctcctacgtcaagattgaagaggtgattggtgcaggtgagtttggcgaggtgtgccgggggcggctcaaggccccagggaagaaggagagctgtgtggcaatcaagaccctgaagggtggctacacggagcggcagcggcgtgagtttctgagcgaggcctccatcatgggccagttcgagcaccccaatatcatccgcctggagggcgtggtcaccaacagcatgcccgtcatgattctcacagagttcatggagaacggcgccctggactccttcctgcggctaaacgacggacagttcacagtcatccagctcgtgggcatgctgcggggcatcgcctcgggcatgcggtaccttgccgagatgagctacgtccaccgagacctggctgctcgcaacatcctagtcaacagcaacctcgtctgcaaagtgtctgactttggcctttcccgattcctggaggagaactcttccgatcccacctacacgagctccctgggaggaaagattcccatccgatggactgccccggaggccattgccttccggaagttcacttccgccagtgatgcctggagttacgggattgtgatgtgggaggtgatgtcatttggggagaggccgtactgggacatgagcaatcaggacgtgatcaatgccattgaacaggactaccggctgcccccgcccccagactgtcccacctccctccaccagctcatgctggactgttggcagaaagaccggaatgcccggccccgcttcccccaggtggtcagcgccctggacaagatgatccggaaccccgccagcctcaaaatcgtggcccgggagaatggcggggacctgctccgaatcggagtcactctggcgggacaccagaagaaaatcttggccagtgtccagcacatgaagtcccaggccaagccgggaaccccgggtgggacaggaggaccggccccgcagtactgacctgcaggaactccccaccccagggacaccgcctccccattttccggggcagagtggggactcacagaggcccccagccctgtgccccgctggattgcactttgagcccgtggggtgaggagttggcaatttggagagacaggatttgggggttctgccataataggaggggaaaatcaccccccagccacctcggggaactccagaccaagggtgagggcgcctttccctcaggactgggtgtgaccagaggaaaaggaagtgcccaacatctcccagcctccccaggtgcccccctcaccttgatgggtgcgttcccgcagaccaaagagagtgtgactcccttgccagctccagagtgggggggctgtcccagggggcaagaaggggtgtcagggcccagtgacaaaatcattggggtttgtagtcccaacttgctgctgtcaccaccaaactcaatcatttttttcccttgtaaatgcccctcccccagctgctgccttcatattgaaggtttttgagttttgtttttggtcttaatttttctccccgttccctttttgtttcttcgttttgtttttctaccgtccttgtcataactttgtgttggagggaacctgtttcactatggcctcctttgcccaagttgaaacaggggcccatcatcatgtctgtttccagaacagtgccttggtcatcccacatccccggaccccgcctgggacccccaagctgtgtcctatgaaggggtgtggggtgaggtagtgaaaagggcggtagttggtggtggaacccagaaacggacgccggtgcttggaggggttcttaaattatatttaaaaaagtaactttttgtataaataaaagaaaatgggacgtgtcccagctccaggggt

SEQ ID NO: 318095 - DNA, 2425 bp, Homo sapiens
tccctgaccttgcctgcttgtgtcctctccctccacctgtcccctgtactggggacctgttctcaggagatcacagttcattgctcaaagccggggctggggcctcctacaggaccatcagtttctcctgatcagcagcctttccttccgcagagagcgagggctggcgggagcagctggccctgattgcgggcacggcagtcgtgggtgtggtcctggtcctggtggtcattgtggtcgcagttctctgcctcaggaagcagagcaatgggagagaagcagaatattcggacaaacacggacagtatctcatcggacatggtactaaggtctacatcgaccccttcacttatgaagaccctaatgaggctgtgagggaatttgcaaaagagatcgatgtctcctacgtcaagattgaagaggtgattggtgcaggtgagtttggcgaggtgtgccgggggcggctcaaggccccagggaagaaggagagctgtgtggcaatcaagaccctgaagggtggctacacggagcggcagcggcgtgagtttctgagcgaggcctccatcatgggccagttcgagcaccccaatatcatccgcctggagggcgtggtcaccaacagcatgcccgtcatgattctcacagagttcatggagaacggcgccctggactccttcctgcggctaaacgacggacagttcacagtcatccagctcgtgggcatgctgcggggcatcgcctcgggcatgcggtaccttgccgagatgagctacgtccaccgagacctggctgctcgcaacatcctagtcaacagcaacctcgtctgcaaagtgtctgactttggcctttcccgattcctggaggagaactcttccgatcccacctacacgagctccctgggaggaaagattcccatccgatggactgccccggaggccattgccttccggaagttcacttccgccagtgatgcctggagttacgggattgtgatgtgggaggtgatgtcatttggggagaggccgtactgggacatgagcaatcaggacgtgatcaatgccattgaacaggactaccggctgcccccgcccccagactgtcccacctccctccaccagctcatgctggactgttggcagaaagaccggaatgcccggccccgcttcccccaggtggtcagcgccctggacaagatgatccggaaccccgccagcctcaaaatcgtggcccgggagaatggcggggcctcacaccctctcctggaccagcggcagcctcactactcagcttttggctctgtgggcgagtggcttcgggccatcaaaatgggaagatacgaagaaagtttcgcagccgctggctttggctccttcgagctggtcagccagatctctgctgaggacctgctccgaatcggagtcactctggcgggacaccagaagaaaatcttggccagtgtccagcacatgaagtcccaggccaagccgggaaccccgggtgggacaggaggaccggccccgcagtactgacctgcaggaactccccaccccagggacaccgcctccccattttccggggcagagtggggactcacagaggcccccagccctgtgccccgctggattgcactttgagcccgtggggtgaggagttggcaatttggagagacaggatttgggggttctgccataataggaggggaaaatcaccccccagccacctcggggaactccagaccaagggtgagggcgcctttccctcaggactgggtgtgaccagaggaaaaggaagtgcccaacatctcccagcctccccaggtgcccccctcaccttgatgggtgcgttcccgcagaccaaagagagtgtgactcccttgccagctccagagtgggggggctgtcccagggggcaagaaggggtgtcagggcccagtgacaaaatcattggggtttgtagtcccaacttgctgctgtcaccaccaaactcaatcatttttttcccttgtaaatgcccctcccccagctgctgccttcatattgaaggtttttgagttttgtttttggtcttaatttttctccccgttccctttttgtttcttcgttttgtttttctaccgtccttgtcataactttgtgttggagggaacctgtttcactatggcctcctttgcccaagttgaaacaggggcccatcatcatgtctgtttccagaacagtgccttggtcatcccacatccccggaccccgcctgggacccccaagctgtgtcctatgaaggggtgtggggtgaggtagtgaaaagggcggtagttggtggtggaacccagaaacggacgccggtgcttggaggggttcttaaattatatttaaaaaagtaactttttgtataaataaaagaaaatgggacgtgtcccagctccaggggt

SEQ ID NO: 318096 - DNA, 3988 bp, Homo sapiens
ctgcccggcccggcccgcccggctccgcgccgcagtctccctccctcccgctccgtccccgctcgggctcccaccatccccgcccgcgaggagagcactcggcccggcggcgcgagcagagccactccagggagggggggagaccgcgagcggccggctcagcccccgccacccggggcgggaccccgaggccccggagggaccccaactccagccacgtcttgctgcgcgcccgcccggcgcggccactgccagcacgctccgggcccgccgcccgcgcgcgcggcacagacgcggggccacacttggcgccgccgcccggtgccccgcacgctcgcatgggcccgcgctgagggccccgacgaggagtcccgcgcggagtatcggcgtccacccgcccagggagagtcagacctgggggggcgagggccccccaaactcagttcggatcctacccgagtgaggcggcgccatggagctccgggtgctgctctgctgggcttcgttggccgcagctttggaagagaccctgctgaacacaaaattggaaactgctgatctgaagtgggtgacattccctcaggtggacgggcagtgggaggaactgagcggcctggatgaggaacagcacagcgtgcgcacctacgaagtgtgtgacgtgcagcgtgccccgggccaggcccactggcttcgcacaggttgggtcccacggcggggcgccgtccacgtgtacgccacgctgcgcttcaccatgctcgagtgcctgtccctgcctcgggctgggcgctcctgcaaggagaccttcaccgtcttctactatgagagcgatgcggacacggccacggccctcacgccagcctggatggagaacccctacatcaaggtggacacggtggccgcggagcatctcacccggaagcgccctggggccgaggccaccgggaaggtgaatgtcaagacgctgcgtctgggaccgctcagcaaggctggcttctacctggccttccaggaccagggtgcctgcatggccctgctatccctgcacctcttctacaaaaagtgcgcccagctgactgtgaacctgactcgattcccggagactgtgcctcgggagctggttgtgcccgtggccggtagctgcgtggtggatgccgtccccgcccctggccccagccccagcctctactgccgtgaggatggccagtgggccgaacagccggtcacgggctgcagctgtgctccggggttcgaggcagctgaggggaacaccaagtgccgagcctgtgcccagggcaccttcaagcccctgtcaggagaagggtcctgccagccatgcccagccaatagccactctaacaccattggatcagccgtctgccagtgccgcgtcgggtacttccgggcacgcacagacccccggggtgcaccctgcaccacccctccttcggctccgcggagcgtggtttcccgcctgaacggctcctccctgcacctggaatggagtgcccccctggagtctggtggccgagaggacctcacctacgccctccgctgccgggagtgccgacccggaggctcctgtgcgccctgcgggggagacctgacttttgaccccggcccccgggacctggtggagccctgggtggtggttcgagggctacgtcctgacttcacctatacctttgaggtcactgcattgaacggggtatcctccttagccacggggcccgtcccatttgagcctgtcaatgtcaccactgaccgagaggtacctcctgcagtgtctgacatccgggtgacgcggtcctcacccagcagcttgagcctggcctgggctgttccccgggcacccagtggggctgtgctggactacgaggtcaaataccatgagaagggcgccgagggtcccagcagcgtgcggttcctgaagacgtcagaaaaccgggcagagctgcgggggctgaagcggggagccagctacctggtgcaggtacgggcgcgctctgaggccggctacgggcccttcggccaggaacatcacagccagacccaactggatgagagcgagggctggcgggagcagctggccctgattgcgggcacggcagtcgtgggtgtggtcctggtcctggtggtcattgtggtcgcagttctctgcctcaggaagcagagcaatgggagagaagcagaatattcggacaaacacggacagtatctcatcggacatggtactaaggtctacatcgaccccttcacttatgaagaccctaatgaggctgtgagggaatttgcaaaagagatcgatgtctcctacgtcaagattgaagaggtgattggtgcaggtgagtttggcgaggtgtgccgggggcggctcaaggccccagggaagaaggagagctgtgtggcaatcaagaccctgaagggtggctacacggagcggcagcggcgtgagtttctgagcgaggcctccatcatgggccagttcgagcaccccaatatcatccgcctggagggcgtggtcaccaacagcatgcccgtcatgattctcacagagttcatggagaacggcgccctggactccttcctgcggctaaacgacggacagttcacagtcatccagctcgtgggcatgctgcggggcatcgcctcgggcatgcggtaccttgccgagatgagctacgtccaccgagacctggctgctcgcaacatcctagtcaacagcaacctcgtctgcaaagtgtctgactttggcctttcccgattcctggaggagaactcttccgatcccacctacacgagctccctgggaggaaagattcccatccgatggactgccccggaggccattgccttccggaagttcacttccgccagtgatgcctggagttacgggattgtgatgtgggaggtgatgtcatttggggagaggccgtactgggacatgagcaatcaggacgtgatcaatgccattgaacaggactaccggctgcccccgcccccagactgtcccacctccctccaccagctcatgctggactgttggcagaaagaccggaatgcccggccccgcttcccccaggtggtcagcgccctggacaagatgatccggaaccccgccagcctcaaaatcgtggcccgggagaatggcggggcctcacaccctctcctggaccagcggcagcctcactactcagcttttggctctgtgggcgagtggcttcgggccatcaaaatgggaagatacgaagaaagtttcgcagccgctggctttggctccttcgagctggtcagccagatctctgctgaggacctgctccgaatcggagtcactctggcgggacaccagaagaaaatcttggccagtgtccagcacatgaagtcccaggccaagccgggaaccccgggtgggacaggaggaccggccccgcagtactgacctgcaggaactccccaccccagggacaccgcctccccattttccggggcagagtggggactcacagaggcccccagccctgtgccccgctggattgcactttgagcccgtggggtgaggagttggcaatttggagagacaggatttgggggttctgccataataggaggggaaaatcaccccccagccacctcggggaactccagaccaagggtgagggcgcctttccctcaggactgggtgtgaccagaggaaaaggaagtgcccaacatctcccagcctccccaggtgcccccctcaccttgatgggtgcgttcccgcagaccaaagagagtgtgactcccttgccagctccagagtgggggggctgtcccagggggcaagaaggggtgtcagggcccagtgacaaaatcattggggtttgtagtcccaacttgctgctgtcaccaccaaactcaatcatttttgcttggaggggttcttaaattatatttaaaaaagtaactttttgtataaataaaagaaaatgggacgtgtcccagctccaggggt

SEQ ID NO: 318097 - DNA, 348 bp, Homo sapiens
ccgagatgagctacgtccaccgagacctggctgctcgcaacatcctagtcaacagcaacctcgtctgcaaagtgtctgactttggcctttcccgattcctggaggagaactcttccgatcccacctacacgagctccctggtaatgctgggggtaatactgggtgtgagcttcttagggccaggtgggcagggcaggttggaaaggtgggaggctgagggtttggcagccctgctccagggagaggatacaggagcaggctgtgggtggggggacagtcagctccaggaagccgacttccagatgtctaggaaaataacagttggataacctgggcaacatagcaaga

SEQ ID NO: 318098 - DNA, 759 bp, Homo sapiens
aagcctgtaatcccagcactttgggaggccaaggtgggcagatcacctaaggttaggagttcaagaccagcctggccaacatggtgaaaccccgtctctaaaaaaatacaaaaaattagcccagcatgatgggcgggtgcctgtaatcccagctactcaggaggctgagacaggataatcgcttgaacccaggaacagaggttgcagtgagctgagatcacgccattgctttccagcctgggcaactgagcgagactctgtcttaataaataaataaaagagttgggtacagcatatttgggtcgcagaaggatgcagagatggagggcagggttgagaggtaacatgtctgtatcatagcccaagagctgctggggccttcagccacagagagcttcaactccggctaggaggattcctggatctgttattttttggggggctgtggctcctatcctaccatcttccaagtcaccatttcctgggcctgttagcatctttgcttttcctggacagcctcacccagagcttcttcccctctttccaggtgatcaatgccattgaacaggactaccggctgcccccgcccccagactgtcccacctccctccaccagctcatgctggactgttggcagaaagaccggaatgcccggccccgcttcccccaggtggtcagcgccctggacaagatgatccggaaccccgccagcctcaaaatcgtggcccgggagaatggcgggtgaggatgcaggaatgg

SEQ ID NO: 318099 - DNA, 3222 bp, Homo sapiens
tggagatgggatctcgatatgttgcccaggctggtcttgaaccccttggctcaagcgatcctccagcctcagcctcccaaagtgctgggattcgaggcatgagccaccgagcccaccgtgcagatggatgtttttgtgcatgcttttgatgaatgctttctctctctcagcctgtgcccagggcaccttcaagcccctgtcaggagaagggtcctgccagccatgcccagccaatagccactctaacaccattggatcagccgtctgccagtgccgcgtcgggtacttccgggcacgcacagacccccggggtgcaccctgcaccacccctccttcggctccgcggagcgtggtttcccgcctgaacggctcctccctgcacctggaatggagtgcccccctggagtctggtggccgagaggacctcacctacgccctccgctgccgggagtgccgacccggaggctcctgtgcgccctgcgggggagacctgacttttgaccccggcccccgggacctggtggagccctgggtggtggttcgagggctacgtcctgacttcacctatacctttgaggtcactgcattgaacggggtatcctccttagccacggggcccgtcccatttgagcctgtcaatgtcaccactgaccgagaggtacctcctgcagtgtctgacatccgggtgacgcggtcctcacccagcagcttgagcctggcctgggctgttccccgggcacccagtggggctgtgctggactacgaggtcaaataccatgagaagggcgccgagggtcccagcagcgtgcggttcctgaagacgtcagaaaaccgggcagagctgcgggggctgaagcggggagccagctacctggtgcaggtacgggcgcgctctgaggccggctacgggcccttcggccaggaacatcacagccagacccaactggatgagagcgagggctggcgggagcagctggccctgattgcgggcacggcagtcgtgggtgtggtcctggtcctggtggtcattgtggtcgcagttctctgcctcaggaagcagagcaatgggagagaagcagaatattcggacaaacacggacagtatctcatcggacatggtactaaggtctacatcgaccccttcacttatgaagaccctaatgaggctgtgagggaatttgcaaaagagatcgatgtctcctacgtcaagattgaagaggtgattggtgcaggtgagtttggcgaggtgtgccgggggcggctcaaggccccagggaagaaggagagctgtgtggcaatcaagaccctgaagggtggctacacggagcggcagcggcgtgagtttctgagcgaggcctccatcatgggccagttcgagcaccccaatatcatccgcctggagggcgtggtcaccaacagcatgcccgtcatgattctcacagagttcatggagaacggcgccctggactccttcctgcggctaaacgacggacagttcacagtcatccagctcgtgggcatgctgcggggcatcgcctcgggcatgcggtaccttgccgagatgagctacgtccaccgagacctggctgctcgcaacatcctagtcaacagcaacctcgtctgcaaagtgtctgactttggcctttcccgattcctggaggagaactcttccgatcccacctacacgagctccctgggaggaaagattcccatccgatggactgccccggaggccattgccttccggaagttcacttccgccagtgatgcctggagttacgggattgtgatgtgggaggtgatgtcatttggggagaggccgtactgggacatgagcaatcaggacgtgatcaatgccattgaacaggactaccggctgcccccgcccccagactgtcccacctccctccaccagctcatgctggactgttggcagaaagaccggaatgcccggccccgcttcccccaggtggtcagcgccctggacaagatgatccggaaccccgccagcctcaaaatcgtggcccgggagaatggcggggcctcacaccctctcctggaccagcggcagcctcactactcagcttttggctctgtgggcgagtggcttcgggccatcaaaatgggaagatacgaagaaagtttcgcagccgctggctttggctccttcgagctggtcagccagatctctgctgaggacctgctccgaatcggagtcactctggcgggacaccagaagaaaatcttggccagtgtccagcacatgaagtcccaggccaagccgggaaccccgggtgggacaggaggaccggccccgcagtactgacctgcaggaactccccaccccagggacaccgcctccccattttccggggcagagtggggactcacagaggcccccagccctgtgccccgctggattgcactttgagcccgtggggtgaggagttggcaatttggagagacaggatttgggggttctgccataataggaggggaaaatcaccccccagccacctcggggaactccagaccaagggtgagggcgcctttccctcaggactgggtgtgaccagaggaaaaggaagtgcccaacatctcccagcctccccaggtgcccccctcaccttgatgggtgcgttcccgcagaccaaagagagtgtgactcccttgccagctccagagtgggggggctgtcccagggggcaagaaggggtgtcagggcccagtgacaaaatcattggggtttgtagtcccaacttgctgctgtcaccaccaaactcaatcatttttttcccttgtaaatgcccctcccccagctgctgccttcatattgaaggtttttgagttttgtttttggtcttaatttttctccccgttccctttttgtttcttcgttttgtttttctaccgtccttgtcataactttgtgttggagggaacctgtttcactatggcctcctttgcccaagttgaaacaggggcccatcatcatgtctgtttccagaacagtgccttggtcatcccacatccccggaccccgcctgggacccccaagctgtgtcctatgaaggggtgtggggtgaggtagtgaaaagggcggtagttggtggtggaacccagaaacggacgccggtgcttggaggggttcttaaattatatttaaaaaagtaactttttgtataaataaaagaaaatgggacgtgtcccagctccaggggt

SEQ ID NO: 318100 - DNA, 4271 bp, Homo sapiens
ctgcccggcccggcccgcccggctccgcgccgcagtctccctccctcccgctccgtccccgctcgggctcccaccatccccgcccgcgaggagagcactcggcccggcggcgcgagcagagccactccagggagggggggagaccgcgagcggccggctcagcccccgccacccggggcgggaccccgaggccccggagggaccccaactccagccacgtcttgctgcgcgcccgcccggcgcggccactgccagcacgctccgggcccgccgcccgcgcgcgcggcacagacgcggggccacacttggcgccgccgcccggtgccccgcacgctcgcatgggcccgcgctgagggccccgacgaggagtcccgcgcggagtatcggcgtccacccgcccagggagagtcagacctgggggggcgagggccccccaaactcagttcggatcctacccgagtgaggcggcgccatggagctccgggtgctgctctgctgggcttcgttggccgcagctttggaagagaccctgctgaacacaaaattggaaactgctgatctgaagtgggtgacattccctcaggtggacgggcagtgggaggaactgagcggcctggatgaggaacagcacagcgtgcgcacctacgaagtgtgtgacgtgcagcgtgccccgggccaggcccactggcttcgcacaggttgggtcccacggcggggcgccgtccacgtgtacgccacgctgcgcttcaccatgctcgagtgcctgtccctgcctcgggctgggcgctcctgcaaggagaccttcaccgtcttctactatgagagcgatgcggacacggccacggccctcacgccagcctggatggagaacccctacatcaaggtggacacggtggccgcggagcatctcacccggaagcgccctggggccgaggccaccgggaaggtgaatgtcaagacgctgcgtctgggaccgctcagcaaggctggcttctacctggccttccaggaccagggtgcctgcatggccctgctatccctgcacctcttctacaaaaagtgcgcccagctgactgtgaacctgactcgattcccggagactgtgcctcgggagctggttgtgcccgtggccggtagctgcgtggtggatgccgtccccgcccctggccccagccccagcctctactgccgtgaggatggccagtgggccgaacagccggtcacgggctgcagctgtgctccggggttcgaggcagctgaggggaacaccaagtgccgagcctgtgcccagggcaccttcaagcccctgtcaggagaagggtcctgccagccatgcccagccaatagccactctaacaccattggatcagccgtctgccagtgccgcgtcgggtacttccgggcacgcacagacccccggggtgcaccctgcaccacccctccttcggctccgcggagcgtggtttcccgcctgaacggctcctccctgcacctggaatggagtgcccccctggagtctggtggccgagaggacctcacctacgccctccgctgccgggagtgccgacccggaggctcctgtgcgccctgcgggggagacctgacttttgaccccggcccccgggacctggtggagccctgggtggtggttcgagggctacgtcctgacttcacctatacctttgaggtcactgcattgaacggggtatcctccttagccacggggcccgtcccatttgagcctgtcaatgtcaccactgaccgagaggtacctcctgcagtgtctgacatccgggtgacgcggtcctcacccagcagcttgagcctggcctgggctgttccccgggcacccagtggggctgtgctggactacgaggtcaaataccatgagaagggcgccgagggtcccagcagcgtgcggttcctgaagacgtcagaaaaccgggcagagctgcgggggctgaagcggggagccagctacctggtgcaggtacgggcgcgctctgaggccggctacgggcccttcggccaggaacatcacagccagacccaactggatgagagcgagggctggcgggagcagctggccctgattgcgggcacggcagtcgtgggtgtggtcctggtcctggtggtcattgtggtcgcagttctctgcctcaggaagcagagcaatgggagagaagcagaatattcggacaaacacggacagtatctcatcggacatggtactaaggtctacatcgaccccttcacttatgaagaccctaatgaggctgtgagggaatttgcaaaagagatcgatgtctcctacgtcaagattgaagaggtgattggtgcaggtgagtttggcgaggtgtgccgggggcggctcaaggccccagggaagaaggagagctgtgtggcaatcaagaccctgaagggtggctacacggagcggcagcggcgtgagtttctgagcgaggcctccatcatgggccagttcgagcaccccaatatcatccgcctggagggcgtggtcaccaacagcatgcccgtcatgattctcacagagttcatggagaacggcgccctggactccttcctgcggctaaacgacggacagttcacagtcatccagctcgtgggcatgctgcggggcatcgcctcgggcatgcggtaccttgccgagatgagctacgtccaccgagacctggctgctcgcaacatcctagtcaacagcaacctcgtctgcaaagtgtctgactttggcctttcccgattcctggaggagaactcttccgatcccacctacacgagctccctgggaggaaagattcccatccgatggactgccccggaggccattgccttccggaagttcacttccgccagtgatgcctggagttacgggattgtgatgtgggaggtgatgtcatttggggagaggccgtactgggacatgagcaatcaggacgtgatcaatgccattgaacaggactaccggctgcccccgcccccagactgtcccacctccctccaccagctcatgctggactgttggcagaaagaccggaatgcccggccccgcttcccccaggtggtcagcgccctggacaagatgatccggaaccccgccagcctcaaaatcgtggcccgggagaatggcggggcctcacaccctctcctggaccagcggcagcctcactactcagcttttggctctgtgggcgagtggcttcgggccatcaaaatgggaagatacgaagaaagtttcgcagccgctggctttggctccttcgagctggtcagccagatctctgctgaggacctgctccgaatcggagtcactctggcgggacaccagaagaaaatcttggccagtgtccagcacatgaagtcccaggccaagccgggaaccccgggtgggacaggaggaccggccccgcagtactgacctgcaggaactccccaccccagggacaccgcctccccattttccggggcagagtggggactcacagaggcccccagccctgtgccccgctggattgcactttgagcccgtggggtgaggagttggcaatttggagagacaggatttgggggttctgccataataggaggggaaaatcaccccccagccacctcggggaactccagaccaagggtgagggcgcctttccctcaggactgggtgtgaccagaggaaaaggaagtgcccaacatctcccagcctccccaggtgcccccctcaccttgatgggtgcgttcccgcagaccaaagagagtgtgactcccttgccagctccagagtgggggggctgtcccagggggcaagaaggggtgtcagggcccagtgattcccttgtaaatgcccctcccccagctgctgccttcatattgaaggtttttgagttttgtttttggtcttaatttttctccccgttccctttttgtttcttcgttttgtttttctaccgtccttgtcataactttgtgttggagggaacctgtttcactatggcctcctttgcccaagttgaaacaggggcccatcatcatgtctgtttccagaacagtgccttggtcatcccacatccccggaccccgcctgggacccccaagctgtgtcctatgaaggggtgtggggtgaggtagtgaaaagggcggtagttggtggtggaacccagaaacggacgccggtgcttggaggggttcttaaattatatttaaaaaagtaactttttgtataaataaaagaaaatgggacgtgtcccagctccaggggt

SEQ ID NO: 318101 - DNA, 3168 bp, Homo sapiens
ctgcccggcccggcccgcccggctccgcgccgcagtctccctccctcccgctccgtccccgctcgggctcccaccatccccgcccgcgaggagagcactcggcccggcggcgcgagcagagccactccagggagggggggagaccgcgagcggccggctcagcccccgccacccggggcgggaccccgaggccccggagggaccccaactccagccacgtcttgctgcgcgcccgcccggcgcggccactgccagcacgctccgggcccgccgcccgcgcgcgcggcacagacgcggggccacacttggcgccgccgcccggtgccccgcacgctcgcatgggcccgcgctgagggccccgacgaggagtcccgcgcggagtatcggcgtccacccgcccagggagagtcagacctgggggggcgagggccccccaaactcagttcggatcctacccgagtgaggcggcgccatggagctccgggtgctgctctgctgggcttcgttggccgcagctttggaagagaccctgctgaacacaaaattggaaactgctgatctgaagtgggtgacattccctcaggtggacgggcagtgggaggaactgagcggcctggatgaggaacagcacagcgtgcgcacctacgaagtgtgtgacgtgcagcgtgccccgggccaggcccactggcttcgcacaggttgggtcccacggcggggcgccgtccacgtgtacgccacgctgcgcttcaccatgctcgagtgcctgtccctgcctcgggctgggcgctcctgcaaggagaccttcaccgtcttctactatgagagcgatgcggacacggccacggccctcacgccagcctggatggagaacccctacatcaaggtggacacggtggccgcggagcatctcacccggaagcgccctggggccgaggccaccgggaaggtgaatgtcaagacgctgcgtctgggaccgctcagcaaggctggcttctacctggccttccaggaccagggtgcctgcatggccctgctatccctgcacctcttctacaaaaagtgcgcccagctgactgtgaacctgactcgattcccggagactgtgcctcgggagctggttgtgcccgtggccggtagctgcgtggtggatgccgtccccgcccctggccccagccccagcctctactgccgtgaggatggccagtgggccgaacagccggtcacgggctgcagctgtgctccggggttcgaggcagctgaggggaacaccaagtgccgagcctgtgcccagggcaccttcaagcccctgtcaggagaagggtcctgccagccatgcccagccaatagccactctaacaccattggatcagccgtctgccagtgccgcgtcgggtacttccgggcacgcacagacccccggggtgcaccctgcaccacccctccttcggctccgcggagcgtggtttcccgcctgaacggctcctccctgcacctggaatggagtgcccccctggagtctggtggccgagaggacctcacctacgccctccgctgccgggagtgccgacccggaggctcctgtgcgccctgcgggggagacctgacttttgaccccggcccccgggacctggtggagccctgggtggtggttcgagggctacgtcctgacttcacctatacctttgaggtcactgcattgaacggggtatcctccttagccacggggcccgtcccatttgagcctgtcaatgtcaccactgaccgagaggtacctcctgcagtgtctgacatccgggtgacgcggtcctcacccagcagcttgagcctggcctgggctgttccccgggcacccagtggggctgtgctggactacgaggtcaaataccatgagaagggcgccgagggtcccagcagcgtgcggttcctgaagacgtcagaaaaccgggcagagctgcgggggctgaagcggggagccagctacctggtgcaggtacgggcgcgctctgaggccggctacgggcccttcggccaggaacatcacagccagacccaactggatgagagcgagggctggcgggagcagctggccctgattgcgggcacggcagtcgtgggtgtggtcctggtcctggtggtcattgtggtcgcagttctctgcctcaggaagcagagcaatgggagagaagcagaatattcggacaaacacggacagtatctcatcggacatggtactaaggtctacatcgaccccttcacttatgaagaccctaatgaggctgtgagggaatttgcaaaagagatcgatgtctcctacgtcaagattgaagaggtgattggtgcaggtgagtttggcgaggtgtgccgggggcggctcaaggccccagggaagaaggagagctgtgtggcaatcaagaccctgaagggtggctacacggagcggcagcggcgtgagtttctgagcgaggcctccatcatgggccagttcgagcaccccaatatcatccgcctggagggcgtggtcaccaacagcatgcccgtcatgattctcacagagttcatggagaacggcgccctggactccttcctgcggctaaacgacggacagttcacagtcatccagctcgtgggcatgctgcggggcatcgcctcgggcatgcggtaccttgccgagatgagctacgtccaccgagacctggctgctcgcaacatcctagtcaacagcaacctcgtctgcaaagtgtctgactttggcctttcccgattcctggaggagaactcttccgatcccacctacacgagctccctgggaggaaagattcccatccgatggactgccccggaggccattgccttccggaagttcacttccgccagtgatgcctggagttacgggattgtgatgtgggaggtgatgtcatttggggagaggccgtactgggacatgagcaatcaggacgtgatcaatgccattgaacaggactaccggctgcccccgcccccagactgtcccacctccctccaccagctcatgctggactgttggcagaaagaccggaatgcccggccccgcttcccccaggtggtcagcgccctggacaagatgatccggaaccccgccagcctcaaaatcgtggcccgggagaatggcgggtgaggatgcaggaatgg

SEQ ID NO: 318102 - DNA, 1277 bp, Homo sapiens
ccacagtacagggagaaggaacccaggtggggtcccaagccagttagagtatttaaggtagagtattggagagtgcttcagagtattggagtatttttgaaaattcaaaaatatacagcacccaacaaagtaaaattcacaatgttgggcatctactcaaagattaccagacaagcaaagaagcaaaataagatgaaaatcagtaaaaccaacccacactgacagatgccagaattagcagacaaaaacattaaaacagttataactgtttaagatgcttaacaagttgagatatggaaggtataaaaaaggcccaagtcaaacttctagagatgaaaaccacagtgtctgatggaattaacaaaggatgaaattagcagatgattaaatactgagtgagctttggatggaattaacaaaggaattaacaaaggatgttaattaacatgtgtctgatggaattatcaaaggatgaaattagcagatgattaaatattgcaaaaaacgtatatttgaatttgagggcatagaggtggaaaatattcaaaatgaaacatggaaagaaaaagtaattttttataagtgaagagtatcattaagctgtaggacaatttcaagtggcctaatatggatataattggtgtccttgaagggacaacagaagaaaaagggacaaaaatgagaaaaaaaaaaaagagagagaatgaagagacaaagagaaaaaagggaaacgaaagagaaaagggagacaaactgaaaaggggagatggctgaaaattgtccatacttgatgataactattaatatgggcccacagatccaaagtgctcaacaaaccctgagcacaaaaaacaacaacaacaaaaacaaaaaaaacgaaaaaaaactacactaagacacatgaatcaaattgcttatttgattagaacatcttagaagcattcagaacaggactcatgatatacaaaagaacaaagacaaggaatatttattgttagaaataagtgagaagacagtggaaaatctttaaagtactgaaaaaaaattgtcaacctaaaattctattcctagagaaaatctctttcaaaaacaaaggcaaaatagagtttttcagacttacaaacactgaaagaacaagtcaccagcagacctatcctacaagaaatgtttaagaaagtccaacattatgctcaaagaaaatgctcattggagcattttgtattttctgttttctgattagggatgtttaaccagtatatattctgcaagtactaaaa

SEQ ID NO: 318103 - DNA, 139 bp, Homo sapiens
cattttagatagggatattcagcctgtacttatagggaaatttatagcactaaacagaagctctcaaaatcagtatcctcagcttccacctaagaagctagaaaaagatgagcaaatataatgcaaagtaagcagagaa

SEQ ID NO: 318104 - DNA, 422 bp, Homo sapiens
acctaaaattctattcctagagaaaatctctttcaaaaacaaaggcaaaatagagtttttcagacttacaaacactgaaagaacaagtcaccagcagacctatcctacaagaaatgtttaagaaagtccaacattatgctcaaagaaaatgctcattggagcattttgtattttctgttttctgattagggatgtttaaccagtatatattctgcaagtactaaaaaatctgaaatctgaaatatgtctggtcccaagcattttagatagggatattcagcctgtacttatagggaaatttatagcactaaacagaagctctcaaaatcagtatcctcagcttccacctaagaagctagaaaaagatgagcaaatataatgcaaagtaagcagagaaaggaaataaagatcagaataaaaat

SEQ ID NO: 318105 - DNA, 90 bp, Homo sapiens
tggacttcacagctgttaaaatgttgatgtactgtttacagtgtgaatctccaacaaggcaggagattccacattcccttcttagggcaa

SEQ ID NO: 318106 - DNA, 324 bp, Homo sapiens
ctgcttcctgtcactgccaacagagtatggatgtggtcagtaaggtgtggatagtacaggtcaccctgatttccttccttgatctgtgcagaaatgcatgctgtactttctccacttaaagatgagtggatagggacagagaatgacaaaaaaaccaaaacagatcaaaaaccccaccatactggacaagtgtctgagagtatacaaatattctaaaagaggcattttgaatttaaattttcttcacaattaatgcaactctgcaaaagttaaagaggaatagcctgaggagaaaaaatatggtcataatataacccccagcct

SEQ ID NO: 318107 - DNA, 3925 bp, Homo sapiens
tctttgagatgctgtttggcgactcgtcgccattcccggagcaggtcggcctcggcccaggggcgagtatccgttgctgtgtcggagacactagtccccgacaccgagacagccagccctctcccctgcctcgcggcgggagagcgtgtccggccggccggccggcggggctcgcgcaacctccctcgcctccccttcccccgcagcctccgccccgccaggcccggcccggactcccgagccccggcctcctcgtcctcggtcgccgctgccgccgggcttaacagccccgtccgccgcttctcttcctagtttgagaagccaaggaaggaaacagggaaaaatgtcgccatgaaggccgagaaccgctgccgccgccgacccccgccggccctgaacgccatgagcctgggtccccgccgcgcccgctccgctccgactgccgtcgccgccgaggcccccgttgatgccgctgagctcccccaacgccgccgccaccgcctccgacatggacaagaacagcggctccaacagctcctccgcctcttcgggcagcagcaaagggcaacagccgccccgctccgcctcggcggggccagccggcgagtctaaacccaagagcgaattactaatttcagctggattcaatttgttgtcagttgattctgtagtaaggccatatgttgcccctctggaggtgcttgtcaactactctggatgatggatggaaagaactccagtggatccaagcgttataatcgcaaacgtgaactttcctaccccaaaaatgaaagttttaacaaccagtcccgtcgctccagttcacagaaaagcaagacttttaacaagatgcctcctcaaaggggcggcggcagcagcaaactctttagctcttcttttaatggtggaagacgagatgaggtagcagaggctcaacgggcagagtttagccctgcccagttctctggtcctaagaagatcaacctgaaccacttgttgaatttcacttttgaaccccgtggccagacgggtcactttgaaggcagtggacatggtagctggggaaagaggaacaagtggggacataagccttttaacaaggaactctttttacaggccaactgccaatttgtggtgtctgaagaccaagactacacagctcattttgctgatcctgatacattagttaactgggactttgtggaacaagtgcgcatttgtagccatgaagtgccatcttgcccaatatgcctctatccacctactgcagccaagataacccgttgtggacacatcttctgctgggcatgcatcctgcactatctttcactgagtgagaagacgtggagtaaatgtcccatctgttacagttctgtgcataagaaggatctcaagagtgttgttgccacagagtcacatcagtatgttgttggtgataccattacgatgcagctgatgaagagggagaaaggggtgttggtggctttgcccaaatccaaatggatgaatgtagaccatcccattcatctaggagatgaacagcacagccagtactccaagttgctgctggcctctaaggagcaggtgctgcaccgggtagttctggaggagaaagtagcactagagcagcagctggcagaggagaagcacactcccgagtcctgctttattgaggcagctatccaggagctcaagactcgggaagaggctctgtcgggattggccggaagcagaagggaggtcactggtgttgtggctgctctggaacaactggtgctgatggctcccttggcgaaggagtctgtttttcaacccaggaagggtgtgctggagtatctgtctgccttcgatgaagaaaccacggaagtttgttctctggacactccttctagacctcttgctctccctctggtagaagaggaggaagcagtgtctgaaccagagcctgaggggttgccagaggcctgtgatgacttggagttagcagatgacaatcttaaagaggggaccatttgcactgagtccagccagcaggaacccatcaccaagtcaggcttcacacgcctcagcagctctccttgttactacttttaccaagcggaagatggacagcatatgttcctgcaccctgtgaatgtgcgctgcctcgtgcgggagtacggcagcctggagaggagccccgagaagatctcagcaactgtggtggagattgctggctactccatgtctgaggatgttcgacagcgtcacagatatctctctcacttgccactcacctgtgagttcagcatctgtgaactggctttgcaacctcctgtggtctctaaggaaaccctagagatgttctcagatgacattgagaagaggaaacgtcagcgccaaaagaaggctcgggaggaacgccgccgagagcgcaggattgagatagaggagaacaagaaacagggcaagtacccagaagtccacattcccctcgagaatctacagcagtttcctgccttcaattcttatacctgctcctctgattctgctttgggtcccaccagcaccgagggccatggggccctctccatttctcctctcagcagaagtccaggttcccatgcagactttctgctgacccctctgtcacccactgccagtcagggcagtccctcattctgcgttgggagtctggaagaagactctcccttcccttcctttgcccagatgctgagggttggaaaagcaaaagcagatgtgtggcccaaaactgctccaaagaaagatgagaacagcttagttcctcctgcccctgtggacagcgacggggagagtgataattcagaccgtgttcctgtgcccagttttcaaaattccttcagccaagctattgaagcagccttcatgaaactggacacaccagctacttcagatcccctctctgaagagaaaggaggaaagaaaagaaaaaaacagaaacagaagctcctgttcagcacctcagtcgtccacaccaagtgacactactggcccaggctaccttctccatctggtttttgtttttgtttttttttcccccatgcttttgtttggctgctgtaatttttaagtatttgagtttgaacagattagctctggggggagggggtttccacaatgtgagggggaaccaagaaaattttaaatacagtgtattttccagcttcctgtctttacaccaaaataaagtattgacacaagagatctcttcctgccaaggtttttagttcattgccagtttagtctttttgacccatgtgtaattaatttttctcaacccaaagtaagattgagtcccctttgagatgcattagagcagtccaacccagaatggcacacactgctctgctgtagcatcatgtcagggcttcctggactcagtacacctctcagtttgtcttttaaaaaacagctgaatctttactacctatttagttctccttgttaaagaaacaggggtgggaataaaatggatttaggacacccagtttgaattgcagtttttttttttctgacacatggccaggctgtggtgccagcttaatggagtaggctgtccttggcacttgcatgtgtgaaaggagggttttgcctcttcttgagcatggcttgagttggtaaggaaagctgtaactcacgaagccctgagacctgctacccctaagatcgagcttgttttcagtgactggcttgagtcataggaggaggagtctggtacagctgcaggagagcagggccatctgaagcggtagcattgccaccatctccctctcatctagagcagttttcttatgccttggtttgagctgaatttgatgtgaattcttttgctgcttaataaagtgacctctaggtgcattagaatgcgaaggcaaatagttgcaataaatcacctgcacaagca

SEQ ID NO: 318108 - DNA, 3935 bp, Homo sapiens
cggctggtacagcctcggagttacgggatcgactcgtcgccattcccggagcaggtcggcctcggcccaggggcgagtatccgttgctgtgtcggagacactagtccccgacaccgagacagccagccctctcccctgcctcgcggcgggagagcgtgtccggccggccggccggcggggctcgcgcaacctccctcgcctccccttcccccgcagcctccgccccgccaggcccggcccggactcccgagccccggcctcctcgtcctcggtcgccgctgccgccgggcttaacagccccgtccgccgcttctcttcctagtttgagaagccaaggaaggaaacagggaaaaatgtcgccatgaaggccgagaaccgctgccgccgccgacccccgccggccctgaacgccatgagcctgggtccccgccgcgcccgctccgctccgactgccgtcgccgccgaggcccccgttgatgccgctgagctcccccaacgccgccgccaccgcctccgacatggacaagaacagcggctccaacagctcctccgcctcttcgggcagcagcaaagggcaacagccgccccgctccgcctcggcggggccagccggcgagtctaaacccaagagcgaattactaatttcagctggattcaatttgttgtcagttgattctgtagtaaggccatatgttgcccctctggaggtgcttgtcaactactctggatgatggatggaaagaactccagtggatccaagcgttataatcgcaaacgtgaactttcctaccccaaaaatgaaagttttaacaaccagtcccgtcgctccagttcacagaaaagcaagacttttaacaagatgcctcctcaaaggggcggcggcagcagcaaactctttagctcttcttttaatggtggaagacgagatgaggtagcagaggctcaacgggcagagtttagccctgcccagttctctggtcctaagaagatcaacctgaaccacttgttgaatttcacttttgaaccccgtggccagacgggtcactttgaaggcagtggacatggtagctggggaaagaggaacaagtggggacataagccttttaacaaggaactctttttacaggccaactgccaatttgtggtgtctgaagaccaagactacacagctcattttgctgatcctgatacattagttaactgggactttgtggaacaagtgcgcatttgtagccatgaagtgccatcttgcccaatatgcctctatccacctactgcagccaagataacccgttgtggacacatcttctgctgggcatgcatcctgcactatctttcactgagtgagaagacgtggagtaaatgtcccatctgttacagttctgtgcataagaaggatctcaagagtgttgttgccacagagtcacatcagtatgttgttggtgataccattacgatgcagctgatgaagagggagaaaggggtgttggtggctttgcccaaatccaaatggatgaatgtagaccatcccattcatctaggagatgaacagcacagccagtactccaagttgctgctggcctctaaggagcaggtgctgcaccgggtagttctggaggagaaagtagcactagagcagcagctggcagaggagaagcacactcccgagtcctgctttattgaggcagctatccaggagctcaagactcgggaagaggctctgtcgggattggccggaagcagaagggaggtcactggtgttgtggctgctctggaacaactggtgctgatggctcccttggcgaaggagtctgtttttcaacccaggaagggtgtgctggagtatctgtctgccttcgatgaagaaaccacggaagtttgttctctggacactccttctagacctcttgctctccctctggtagaagaggaggaagcagtgtctgaaccagagcctgaggggttgccagaggcctgtgatgacttggagttagcagatgacaatcttaaagaggggaccatttgcactgagtccagccagcaggaacccatcaccaagtcaggcttcacacgcctcagcagctctccttgttactacttttaccaagcggaagatggacagcatatgttcctgcaccctgtgaatgtgcgctgcctcgtgcgggagtacggcagcctggagaggagccccgagaagatctcagcaactgtggtggagattgctggctactccatgtctgaggatgttcgacagcgtcacagatatctctctcacttgccactcacctgtgagttcagcatctgtgaactggctttgcaacctcctgtggtctctaaggaaaccctagagatgttctcagatgacattgagaagaggaaacgtcagcgccaaaagaaggctcgggaggaacgccgccgagagcgcaggattgagatagaggagaacaagaaacagggcaagtacccagaagtccacattcccctcgagaatctacagcagtttcctgccttcaattcttatacctgctcctctgattctgctttgggtcccaccagcaccgagggccatggggccctctccatttctcctctcagcagaagtccaggttcccatgcagactttctgctgacccctctgtcacccactgccagtcagggcagtccctcattctgcgttgggagtctggaagaagactctcccttcccttcctttgcccagatgctgagggttggaaaagcaaaagcagatgtgtggcccaaaactgctccaaagaaagatgagaacagcttagttcctcctgcccctgtggacagcgacggggagagtgataattcagaccgtgttcctgtgcccagttttcaaaattccttcagccaagctattgaagcagccttcatgaaactggacacaccagctacttcagatcccctctctgaagagaaaggaggaaagaaaagaaaaaaacagaaacagaagctcctgttcagcacctcagtcgtccacaccaagtgacactactggcccaggctaccttctccatctggtttttgtttttgtttttttttcccccatgcttttgtttggctgctgtaatttttaagtatttgagtttgaacagattagctctggggggagggggtttccacaatgtgagggggaaccaagaaaattttaaatacagtgtattttccagcttcctgtctttacaccaaaataaagtattgacacaagagatctcttcctgccaaggtttttagttcattgccagtttagtctttttgacccatgtgtaattaatttttctcaacccaaagtaagattgagtcccctttgagatgcattagagcagtccaacccagaatggcacacactgctctgctgtagcatcatgtcagggcttcctggactcagtacacctctcagtttgtcttttaaaaaacagctgaatctttactacctatttagttctccttgttaaagaaacaggggtgggaataaaatggatttaggacacccagtttgaattgcagtttttttttttctgacacatggccaggctgtggtgccagcttaatggagtaggctgtccttggcacttgcatgtgtgaaaggagggttttgcctcttcttgagcatggcttgagttggtaaggaaagctgtaactcacgaagccctgagacctgctacccctaagatcgagcttgttttcagtgactggcttgagtcataggaggaggagtctggtacagctgcaggagagcagggccatctgaagcggtagcattgccaccatctccctctcatctagagcagttttcttatgccttggtttgagctgaatttgatgtgaattcttttgctgcttaataaagtgacctctaggtgcattagaatgcgaaggcaaatagttgcaataaatcacctgcacaagca

SEQ ID NO: 318109 - DNA, 3844 bp, Homo sapiens
aacataggctaggtcgaggctgggtgttaatcggccgagggactcgtcgccattcccggagcaggtcggcctcggcccaggggcgagtatccgttgctgtgtcggagacactagtccccgacaccgagacagccagccctctcccctgcctcgcggcgggagagcgtgtccggccggccggccggcggggctcgcgcaacctccctcgcctccccttcccccgcagcctccgccccgccaggcccggcccggactcccgagccccggtctcctcgtcctcggtcgccgctgccgccgggcttaacagccccgtccgccgcttctcttcctagtttgagaagccaaggaaggaaacagggaaaaatgtcgccatgaaggccgagaaccgctgccgccgccgacccccgccggccctgaacgccatgagcctgggtccccgccgcgcccgctccgctccgactgccgtcgccgccgaggcccccgttgatgccgctgagctcccccaacgccgccgccaccgcctccgacatggacaagaacagcggctccaacagctcctccgcctcttcgggcagcagcaaagggcaacagccgccccgctccgcctcggcggggccagccggcgagtctaaacccaagagcgatggaaagaactccagtggatccaagcgttataatcgcaaacgtgaactttcctaccccaaaaatgaaagttttaacaaccagtcccgtcgctccagttcacagaaaagcaagacttttaacaagatgcctcctcaaaggggcggcggcagcagcaaactctttagctcttcttttaatggtggaagacgagatgaggtagcagaggctcaacgggcagagtttagccctgcccagttctctggtcctaagaagatcaacctgaaccacttgttgaatttcacttttgaaccccgtggccagacgggtcactttgaaggcagtggacatggtagctggggaaagaggaacaagtggggacataagccttttaacaaggaactctttttacaggccaactgccaatttgtggtgtctgaagaccaagactacacagctcattttgctgatcctgatacattagttaactgggactttgtggaacaagtgcgcatttgtagccatgaagtgccatcttgcccaatatgcctctatccacctactgcagccaagataacccgttgtggacacatcttctgctgggcatgcatcctgcactatctttcactgagtgagaagacgtggagtaaatgtcccatctgttacagttctgtgcataagaaggatctcaagagtgttgttgccacagagtcacatcagtatgttgttggtgataccattacgatgcagctgatgaagagggagaaaggggtgttggtggctttgcccaaatccaaatggatgaatgtagaccatcccattcatctaggagatgaacagcacagccagtactccaagttgctgctggcctctaaggagcaggtgctgcaccgggtagttctggaggagaaagtagcactagagcagcagctggcagaggagaagcacactcccgagtcctgctttattgaggcagctatccaggagctcaagactcgggaagaggctctgtcgggattggccggaagcagaagggaggtcactggtgttgtggctgctctggaacaactggtgctgatggctcccttggcgaaggagtctgtttttcaacccaggaagggtgtgctggagtatctgtctgccttcgatgaagaaaccacggaagtttgttctctggacactccttctagacctcttgctctccctctggtagaagaggaggaagcagtgtctgaaccagagcctgaggggttgccagaggcctgtgatgacttggagttagcagatgacaatcttaaagaggggaccatttgcactgagtccagccagcaggaacccatcaccaagtcaggcttcacacgcctcagcagctctccttgttactacttttaccaagcggaagatggacagcatatgttcctgcaccctgtgaatgtgcgctgcctcgtgcgggagtacggcagcctggagaggagccccgagaagatctcagcaactgtggtggagattgctggctactccatgtctgaggatgttcgacagcgtcacagatatctctctcacttgccactcacctgtgagttcagcatctgtgaactggctttgcaacctcctgtggtctctaaggaaaccctagagatgttctcagatgacattgagaagaggaaacgtcagcgccaaaagaaggctcgggaggaacgccgccgagagcgcaggattgagatagaggagaacaagaaacagggcaagtacccagaagtccacattcccctcgagaatctacagcagtttcctgccttcaattcttatacctgctcctctgattctgctttgggtcccaccagcaccgagggccatggggccctctccatttctcctctcagcagaagtccaggttcccatgcagactttctgctgacccctctgtcacccactgccagtcagggcagtccctcattctgcgttgggagtctggaagaagactctcccttcccttcctttgcccagatgctgagggttggaaaagcaaaagcagatgtgtggcccaaaactgctccaaagaaagatgagaacagcttagttcctcctgcccctgtggacagcgacggggagagtgataattcagaccgtgttcctgtgcccagttttcaaaattccttcagccaagctattgaagcagccttcatgaaactggacacaccagctacttcagatcccctctctgaagagaaaggaggaaagaaaagaaaaaaacagaaacagaagctcctgttcagcacctcagtcgtccacaccaagtgacactactggcccaggctaccttctccatctggtttttgtttttgtttttttttcccccatgcttttgtttggctgctgtaatttttaagtatttgagtttgaacagattagctctggggggagggggtttccacaatgtgagggggaaccaagaaaattttaaatacagtgtattttccagcttcctgtctttacaccaaaataaagtattgacacaagagatctcttcctgccaaggtttttagttcattgccagtttagtctttttgacccatgtgtaattaatttttctcaacccaaagtaagattgagtcccctttgagatgcattagagcagtccaacccagaatggcacacactgctctgctgtagcatcatgtcagggcttcctggactcagtacacctctcagtttgtcttttaaaaaacagctgaatctttactacctatttagttctccttgttaaagaaacaggggtgggaataaaatggatttaggacacccagtttgaattgcagtttttttttttctgacacatggccaggctgtggtgccagcttaatggagtaggctgtccttggcacttgcatgtgtgaaaggagggttttgcctcttcttgagcatggcttgagttggtaaggaaagctgtaactcacgaagccctgagacctgctacccctaagatcgagcttgttttcagtgactggcttgagtcataggaggaggagtctggtacagctgcaggagagcagggccatctgaagcggtagcattgccaccatctccctctcatctagagcagttttcttatgccttggtttgagctgaatttgatgtgaattcttttgctgcttaataaagtgacctctaggtgcattagaatgcgaaggcaaatagttgcaataaatcacctgcacaagca

SEQ ID NO: 318110 - DNA, 3824 bp, Homo sapiens
tctttgagatgctgtttggcgactcgtcgccattcccggagcaggtcggcctcggcccaggggcgagtatccgttgctgtgtcggagacactagtccccgacaccgagacagccagccctctcccctgcctcgcggcgggagagcgtgtccggccggccggccggcggggctcgcgcaacctccctcgcctccccttcccccgcagcctccgccccgccaggcccggcccggactcccgagccccggcctcctcgtcctcggtcgccgctgccgccgggcttaacagccccgtccgccgcttctcttcctagtttgagaagccaaggaaggaaacagggaaaaatgtcgccatgaaggccgagaaccgctgccgccgccgacccccgccggccctgaacgccatgagcctgggtccccgccgcgcccgctccgctccgactgccgtcgccgccgaggcccccgttgatgccgctgagctcccccaacgccgccgccaccgcctccgacatggacaagaacagcggctccaacagctcctccgcctcttcgggcagcagcaaagggcaacagccgccccgctccgcctcggcggggccagccggcgagtctaaacccaagagcgatggaaagaactccagtggatccaagcgttataatcgcaaacgtgaactttcctaccccaaaaatgaaagttttaacaaccagtcccgtcgctccagttcacagaaaagcaagacttttaacaagatgcctcctcaaaggggcggcggcagcagcaaactctttagctcttcttttaatggtggaagacgagatgaggtagcagaggctcaacgggcagagtttagccctgcccagttctctggtcctaagaagatcaacctgaaccacttgttgaatttcacttttgaaccccgtggccagacgggtcactttgaaggcagtggacatggtagctggggaaagaggaacaagtggggacataagccttttaacaaggaactctttttacaggccaactgccaatttgtggtgtctgaagaccaagactacacagctcattttgctgatcctgatacattagttaactgggactttgtggaacaagtgcgcatttgtagccatgaagtgccatcttgcccaatatgcctctatccacctactgcagccaagataacccgttgtggacacatcttctgctgggcatgcatcctgcactatctttcactgagtgagaagacgtggagtaaatgtcccatctgttacagttctgtgcataagaaggatctcaagagtgttgttgccacagagtcacatcagtatgttgttggtgataccattacgatgcagctgatgaagagggagaaaggggtgttggtggctttgcccaaatccaaatggatgaatgtagaccatcccattcatctaggagatgaacagcacagccagtactccaagttgctgctggcctctaaggagcaggtgctgcaccgggtagttctggaggagaaagtagcactagagcagcagctggcagaggagaagcacactcccgagtcctgctttattgaggcagctatccaggagctcaagactcgggaagaggctctgtcgggattggccggaagcagaagggaggtcactggtgttgtggctgctctggaacaactggtgctgatggctcccttggcgaaggagtctgtttttcaacccaggaagggtgtgctggagtatctgtctgccttcgatgaagaaaccacggaagtttgttctctggacactccttctagacctcttgctctccctctggtagaagaggaggaagcagtgtctgaaccagagcctgaggggttgccagaggcctgtgatgacttggagttagcagatgacaatcttaaagaggggaccatttgcactgagtccagccagcaggaacccatcaccaagtcaggcttcacacgcctcagcagctctccttgttactacttttaccaagcggaagatggacagcatatgttcctgcaccctgtgaatgtgcgctgcctcgtgcgggagtacggcagcctggagaggagccccgagaagatctcagcaactgtggtggagattgctggctactccatgtctgaggatgttcgacagcgtcacagatatctctctcacttgccactcacctgtgagttcagcatctgtgaactggctttgcaacctcctgtggtctctaaggaaaccctagagatgttctcagatgacattgagaagaggaaacgtcagcgccaaaagaaggctcgggaggaacgccgccgagagcgcaggattgagatagaggagaacaagaaacagggcaagtacccagaagtccacattcccctcgagaatctacagcagtttcctgccttcaattcttatacctgctcctctgattctgctttgggtcccaccagcaccgagggccatggggccctctccatttctcctctcagcagaagtccaggttcccatgcagactttctgctgacccctctgtcacccactgccagtcagggcagtccctcattctgcgttgggagtctggaagaagactctcccttcccttcctttgcccagatgctgagggttggaaaagcaaaagcagatgtgtggcccaaaactgctccaaagaaagatgagaacagcttagttcctcctgcccctgtggacagcgacggggagagtgataattcagaccgtgttcctgtgcccagttttcaaaattccttcagccaagctattgaagcagccttcatgaaactggacacaccagctacttcagatcccctctctgaagagaaaggaggaaagaaaagaaaaaaacagaaacagaagctcctgttcagcacctcagtcgtccacaccaagtgacactactggcccaggctaccttctccatctggtttttgtttttgtttttttttcccccatgcttttgtttggctgctgtaatttttaagtatttgagtttgaacagattagctctggggggagggggtttccacaatgtgagggggaaccaagaaaattttaaatacagtgtattttccagcttcctgtctttacaccaaaataaagtattgacacaagagatctcttcctgccaaggtttttagttcattgccagtttagtctttttgacccatgtgtaattaatttttctcaacccaaagtaagattgagtcccctttgagatgcattagagcagtccaacccagaatggcacacactgctctgctgtagcatcatgtcagggcttcctggactcagtacacctctcagtttgtcttttaaaaaacagctgaatctttactacctatttagttctccttgttaaagaaacaggggtgggaataaaatggatttaggacacccagtttgaattgcagtttttttttttctgacacatggccaggctgtggtgccagcttaatggagtaggctgtccttggcacttgcatgtgtgaaaggagggttttgcctcttcttgagcatggcttgagttggtaaggaaagctgtaactcacgaagccctgagacctgctacccctaagatcgagcttgttttcagtgactggcttgagtcataggaggaggagtctggtacagctgcaggagagcagggccatctgaagcggtagcattgccaccatctccctctcatctagagcagttttcttatgccttggtttgagctgaatttgatgtgaattcttttgctgcttaataaagtgacctctaggtgcattagaatgcgaaggcaaatagttgcaataaatcacctgcacaagca

SEQ ID NO: 318111 - DNA, 3180 bp, Homo sapiens
ggaggcctgcgcacggattcagtgaactttcctaccccaaaaatgaaagttttaacaaccagtcccgtcgctccagttcacagaaaagcaagacttttaacaagatgcctcctcaaaggggcggcggcagcagcaaactctttagctcttcttttaatggtggaagacgagatgaggtagcagaggctcaacgggcagagtttagccctgcccagttctctggtcctaagaagatcaacctgaaccacttgttgaatttcacttttgaaccccgtggccagacgggtcactttgaaggcagtggacatggtagctggggaaagaggaacaagtggggacataagccttttaacaaggaactctttttacaggccaactgccaatttgtggtgtctgaagaccaagactacacagctcattttgctgatcctgatacattagttaactgggactttgtggaacaagtgcgcatttgtagccatgaagtgccatcttgcccaatatgcctctatccacctactgcagccaagataacccgttgtggacacatcttctgctgggcatgcatcctgcactatctttcactgagtgagaagacgtggagtaaatgtcccatctgttacagttctgtgcataagaaggatctcaagagtgttgttgccacagagtcacatcagtatgttgttggtgataccattacgatgcagctgatgaagagggagaaaggggtgttggtggctttgcccaaatccaaatggatgaatgtagaccatcccattcatctaggagatgaacagcacagccagtactccaagttgctgctggcctctaaggagcaggtgctgcaccgggtagttctggaggagaaagtagcactagagcagcagctggcagaggagaagcacactcccgagtcctgctttattgaggcagctatccaggagctcaagactcgggaagaggctctgtcgggattggccggaagcagaagggaggtcactggtgttgtggctgctctggaacaactggtgctgatggctcccttggcgaaggagtctgtttttcaacccaggaagggtgtgctggagtatctgtctgccttcgatgaagaaaccacggaagtttgttctctggacactccttctagacctcttgctctccctctggtagaagaggaggaagcagtgtctgaaccagagcctgaggggttgccagaggcctgtgatgacttggagttagcagatgacaatcttaaagaggggaccatttgcactgagtccagccagcaggaacccatcaccaagtcaggcttcacacgcctcagcagctctccttgttactacttttaccaagcggaagatggacagcatatgttcctgcaccctgtgaatgtgcgctgcctcgtgcgggagtacggcagcctggagaggagccccgagaagatctcagcaactgtggtggagattgctggctactccatgtctgaggatgttcgacagcgtcacagatatctctctcacttgccactcacctgtgagttcagcatctgtgaactggctttgcaacctcctgtggtctctaaggaaaccctagagatgttctcagatgacattgagaagaggaaacgtcagcgccaaaagaaggctcgggaggaacgccgccgagagcgcaggattgagatagaggagaacaagaaacagggcaagtacccagaagtccacattcccctcgagaatctacagcagtttcctgccttcaattcttatacctgctcctctgattctgctttgggtcccaccagcaccgagggccatggggccctctccatttctcctctcagcagaagtccaggttcccatgcagactttctgctgacccctctgtcacccactgccagtcagggcagtccctcattctgcgttgggagtctggaagaagactctcccttcccttcctttgcccagatgctgagggttggaaaagcaaaagcagatgtgtggcccaaaactgctccaaagaaagatgagaacagcttagttcctcctgcccctgtggacagcgacggggagagtgataattcagaccgtgttcctgtgcccagttttcaaaattccttcagccaagctattgaagcagccttcatgaaactggacacaccagctacttcagatcccctctctgaagagaaaggaggaaagaaaagaaaaaaacagaaacagaagctcctgttcagcacctcagtcgtccacaccaagtgacactactggcccaggctaccttctccatctggtttttgtttttgtttttttttcccccatgcttttgtttggctgctgtaatttttaagtatttgagtttgaacagattagctctggggggagggggtttccacaatgtgagggggaaccaagaaaattttaaatacagtgtattttccagcttcctgtctttacaccaaaataaagtattgacacaagagatctcttcctgccaaggtttttagttcattgccagtttagtctttttgacccatgtgtaattaatttttctcaacccaaagtaagattgagtcccctttgagatgcattagagcagtccaacccagaatggcacacactgctctgctgtagcatcatgtcagggcttcctggactcagtacacctctcagtttgtcttttaaaaaacagctgaatctttactacctatttagttctccttgttaaagaaacaggggtgggaataaaatggatttaggacacccagtttgaattgcagtttttttttttctgacacatggccaggctgtggtgccagcttaatggagtaggctgtccttggcacttgcatgtgtgaaaggagggttttgcctcttcttgagcatggcttgagttggtaaggaaagctgtaactcacgaagccctgagacctgctacccctaagatcgagcttgttttcagtgactggcttgagtcataggaggaggagtctggtacagctgcaggagagcagggccatctgaagcggtagcattgccaccatctccctctcatctagagcagttttcttatgccttggtttgagctgaatttgatgtgaattcttttgctgcttaataaagtgacctctaggtgcattagaatgcgaaggcaaatagttgcaataaatcacctgcacaagca

SEQ ID NO: 318112 - DNA, 3923 bp, Homo sapiens
aacataggctaggtcgaggctgggtgttaatcggccgagggactcgtcgccattcccggagcaggtcggcctcggcccaggggcgagtatccgttgctgtgtcggagacactagtccccgacaccgagacagccagccctctcccctgcctcgcggcgggagagcgtgtccggccggccggccggcggggctcgcgcaacctccctcgcctccccttcccccgcagcctccgccccgccaggcccggcccggactcccgagccccggtctcctcgtcctcggtcgccgctgccgccgggcttaacagccccgtccgccgcttctcttcctagtttgagaagccaaggaaggaaacagggaaaaatgtcgccatgaaggccgagaaccgctgccgccgccgacccccgccggccctgaacgccatgagcctgggtccccgccgcgcccgctccgctccgactgccgtcgccgccgaggcccccgttgatgccgctgagctcccccaacgccgccgccaccgcctccgacatggacaagaacagcggctccaacagctcctccgcctcttcgggcagcagcaaagggcaacagccgccccgctccgcctcggcggggccagccggcgagtctaaacccaagagcgatggaaagaactccagtggatccaagcgttataatcgcaaacgtgaactttcctaccccaaaaatgaaagttttaacaaccagtcccgtcgctccagttcacagaaaagcaagacttttaacaagatgcctcctcaaaggggcggcggcagcagcaaactctttagctcttcttttaatggtggaagacgagatgaggtagcagaggctcaacgggcagagtttagccctgcccagttctctggtcctaagaagatcaacctgaaccacttgttgaatttcacttttgaaccccgtggccagacgggtcactttgaaggcagtggacatggtagctggggaaagaggaacaagtggggacataagccttttaacaaggaactctttttacaggccaactgccaatttgtggtgtctgaagaccaagactacacagctcattttgctgatcctgatacattagttaactgggactttgtggaacaagtgcgcatttgtagccatgaagtgccatcttgcccaatatgcctctatccacctactgcagccaagataacccgttgtggacacatcttctgctgggcatgcatcctgcactatctttcactgagtgagaagacgtggagtaaatgtcccatctgttacagttctgtgcataagaaggatctcaagaggtgagattgagacatttactcagttagatcccaatctcttcactccttgccctgctacatataagtgtccatgtttcagtgttgttgccacagagtcacatcagtatgttgttggtgataccattacgatgcagctgatgaagagggagaaaggggtgttggtggctttgcccaaatccaaatggatgaatgtagaccatcccattcatctaggagatgaacagcacagccagtactccaagttgctgctggcctctaaggagcaggtgctgcaccgggtagttctggaggagaaagtagcactagagcagcagctggcagaggagaagcacactcccgagtcctgctttattgaggcagctatccaggagctcaagactcgggaagaggctctgtcgggattggccggaagcagaagggaggtcactggtgttgtggctgctctggaacaactggtgctgatggctcccttggcgaaggagtctgtttttcaacccaggaagggtgtgctggagtatctgtctgccttcgatgaagaaaccacggaagtttgttctctggacactccttctagacctcttgctctccctctggtagaagaggaggaagcagtgtctgaaccagagcctgaggggttgccagaggcctgtgatgacttggagttagcagatgacaatcttaaagaggggaccatttgcactgagtccagccagcaggaacccatcaccaagtcaggcttcacacgcctcagcagctctccttgttactacttttaccaagcggaagatggacagcatatgttcctgcaccctgtgaatgtgcgctgcctcgtgcgggagtacggcagcctggagaggagccccgagaagatctcagcaactgtggtggagattgctggctactccatgtctgaggatgttcgacagcgtcacagatatctctctcacttgccactcacctgtgagttcagcatctgtgaactggctttgcaacctcctgtggtctctaaggaaaccctagagatgttctcagatgacattgagaagaggaaacgtcagcgccaaaagaaggctcgggaggaacgccgccgagagcgcaggattgagatagaggagaacaagaaacagggcaagtacccagaagtccacattcccctcgagaatctacagcagtttcctgccttcaattcttatacctgctcctctgattctgctttgggtcccaccagcaccgagggccatggggccctctccatttctcctctcagcagaagtccaggttcccatgcagactttctgctgacccctctgtcacccactgccagtcagggcagtccctcattctgcgttgggagtctggaagaagactctcccttcccttcctttgcccagatgctgagggttggaaaagcaaaagcagatgtgtggcccaaaactgctccaaagaaagatgagaacagcttagttcctcctgcccctgtggacagcgacggggagagtgataattcagaccgtgttcctgtgcccagttttcaaaattccttcagccaagctattgaagcagccttcatgaaactggacacaccagctacttcagatcccctctctgaagagaaaggaggaaagaaaagaaaaaaacagaaacagaagctcctgttcagcacctcagtcgtccacaccaagtgacactactggcccaggctaccttctccatctggtttttgtttttgtttttttttcccccatgcttttgtttggctgctgtaatttttaagtatttgagtttgaacagattagctctggggggagggggtttccacaatgtgagggggaaccaagaaaattttaaatacagtgtattttccagcttcctgtctttacaccaaaataaagtattgacacaagagatctcttcctgccaaggtttttagttcattgccagtttagtctttttgacccatgtgtaattaatttttctcaacccaaagtaagattgagtcccctttgagatgcattagagcagtccaacccagaatggcacacactgctctgctgtagcatcatgtcagggcttcctggactcagtacacctctcagtttgtcttttaaaaaacagctgaatctttactacctatttagttctccttgttaaagaaacaggggtgggaataaaatggatttaggacacccagtttgaattgcagtttttttttttctgacacatggccaggctgtggtgccagcttaatggagtaggctgtccttggcacttgcatgtgtgaaaggagggttttgcctcttcttgagcatggcttgagttggtaaggaaagctgtaactcacgaagccctgagacctgctacccctaagatcgagcttgttttcagtgactggcttgagtcataggaggaggagtctggtacagctgcaggagagcagggccatctgaagcggtagcattgccaccatctccctctcatctagagcagttttcttatgccttggtttgagctgaatttgatgtgaattcttttgctgcttaataaagtgacctctaggtgcattagaatgcgaaggcaaatagttgcaataaatcacctgcacaagca

SEQ ID NO: 318113 - DNA, 4116 bp, Homo sapiens
aacataggctaggtcgaggctgggtgttaatcggccgagggactcgtcgccattcccggagcaggtcggcctcggcccaggggcgagtatccgttgctgtgtcggagacactagtccccgacaccgagacagccagccctctcccctgcctcgcggcgggagagcgtgtccggccggccggccggcggggctcgcgcaacctccctcgcctccccttcccccgcagcctccgccccgccaggcccggcccggactcccgagccccggtctcctcgtcctcggtcgccgctgccgccgggcttaacagccccgtccgccgcttctcttcctagtttgagaagccaaggaaggaaacagggaaaaatgtcgccatgaaggccgagaaccgctgccgccgccgacccccgccggccctgaacgccatgagcctgggtccccgccgcgcccgctccgctccgactgccgtcgccgccgaggcccccgttgatgccgctgagctcccccaacgccgccgccaccgcctccgacatggacaagaacagcggctccaacagctcctccgcctcttcgggcagcagcaaagggcaacagccgccccgctccgcctcggcggggccagccggcgagtctaaacccaagagcgatggaaagaactccagtggatccaagcgttataatcgcaaacgtgaactttcctaccccaaaaatgaaagttttaacaaccagtcccgtcgctccagttcacagaaaagcaagacttttaacaagatgcctcctcaaaggggcggcggcagcagcaaactctttagctcttcttttaatggtggaagacgagatgaggtagcagaggctcaacgggcagagtttagccctgcccagttctctggtcctaagaagatcaacctgaaccacttgttgaatttcacttttgaaccccgtggccagacgggtcactttgaaggcagtggacatggtagctggggaaagaggaacaagtggggacataagccttttaacaaggaactctttttacaggccaactgccaatttgtggtgtctgaagaccaagactacacagctcattttgctgatcctgatacattagttaactgggactttgtggaacaagtgcgcatttgtagccatgaagtgccatcttgcccaatatgcctctatccacctactgcagccaagataacccgttgtggacacatcttctgctgggcatgcatcctgcactatctttcactgagtgagaagacgtggagtaaatgtcccatctgttacagttctgtgcataagaaggatctcaagagtgttgttgccacagagtcacatcagtatgttgttggtgataccattacgatgcagctgatgaagagggagaaaggggtgttggtggctttgcccaaatccaaatggatgaatgtagaccatcccattcatctaggagatgaacagcacagccagtactccaagttgctgctggcctctaaggagcaggtgctgcaccgggtagttctggaggagaaagtagcactagagcagcagctggcagaggagaagcacactcccgagtcctgctttattgaggcagctatccaggagctcaagactcgggaagaggctctgtcgggattggccggaagcagaagggaggtcactggtgttgtggctgctctggaacaactggtgctgatggctcccttggcgaaggagtctgtttttcaacccaggaaggttagtgtgttcctgttactaagtggctgccgttcctcaaatgctgtcattgagctggtaggcattactgtgagatctaaaccttctcaagagaagaggggacaatgagtattttctgtatgcttgttattagttctttccccaggggtgttaaatcagtgaacacgacagctaagataaacatctagggagcttggctcttaggtctgcatttgccacattgctttcggaaagcaggagatatcctttctgttgacttagagtttgctgcaggtgtgctggagtatctgtctgccttcgatgaagaaaccacggaagtttgttctctggacactccttctagacctcttgctctccctctggtagaagaggaggaagcagtgtctgaaccagagcctgaggggttgccagaggcctgtgatgacttggagttagcagatgacaatcttaaagaggggaccatttgcactgagtccagccagcaggaacccatcaccaagtcaggcttcacacgcctcagcagctctccttgttactacttttaccaagcggaagatggacagcatatgttcctgcaccctgtgaatgtgcgctgcctcgtgcgggagtacggcagcctggagaggagccccgagaagatctcagcaactgtggtggagattgctggctactccatgtctgaggatgttcgacagcgtcacagatatctctctcacttgccactcacctgtgagttcagcatctgtgaactggctttgcaacctcctgtggtctctaaggaaaccctagagatgttctcagatgacattgagaagaggaaacgtcagcgccaaaagaaggctcgggaggaacgccgccgagagcgcaggattgagatagaggagaacaagaaacagggcaagtacccagaagtccacattcccctcgagaatctacagcagtttcctgccttcaattcttatacctgctcctctgattctgctttgggtcccaccagcaccgagggccatggggccctctccatttctcctctcagcagaagtccaggttcccatgcagactttctgctgacccctctgtcacccactgccagtcagggcagtccctcattctgcgttgggagtctggaagaagactctcccttcccttcctttgcccagatgctgagggttggaaaagcaaaagcagatgtgtggcccaaaactgctccaaagaaagatgagaacagcttagttcctcctgcccctgtggacagcgacggggagagtgataattcagaccgtgttcctgtgcccagttttcaaaattccttcagccaagctattgaagcagccttcatgaaactggacacaccagctacttcagatcccctctctgaagagaaaggaggaaagaaaagaaaaaaacagaaacagaagctcctgttcagcacctcagtcgtccacaccaagtgacactactggcccaggctaccttctccatctggtttttgtttttgtttttttttcccccatgcttttgtttggctgctgtaatttttaagtatttgagtttgaacagattagctctggggggagggggtttccacaatgtgagggggaaccaagaaaattttaaatacagtgtattttccagcttcctgtctttacaccaaaataaagtattgacacaagagatctcttcctgccaaggtttttagttcattgccagtttagtctttttgacccatgtgtaattaatttttctcaacccaaagtaagattgagtcccctttgagatgcattagagcagtccaacccagaatggcacacactgctctgctgtagcatcatgtcagggcttcctggactcagtacacctctcagtttgtcttttaaaaaacagctgaatctttactacctatttagttctccttgttaaagaaacaggggtgggaataaaatggatttaggacacccagtttgaattgcagtttttttttttctgacacatggccaggctgtggtgccagcttaatggagtaggctgtccttggcacttgcatgtgtgaaaggagggttttgcctcttcttgagcatggcttgagttggtaaggaaagctgtaactcacgaagccctgagacctgctacccctaagatcgagcttgttttcagtgactggcttgagtcataggaggaggagtctggtacagctgcaggagagcagggccatctgaagcggtagcattgccaccatctccctctcatctagagcagttttcttatgccttggtttgagctgaatttgatgtgaattcttttgctgcttaataaagtgacctctaggtgcattagaatgcgaaggcaaatagttgcaataaatcacctgcacaagca

SEQ ID NO: 318114 - DNA, 3175 bp, Homo sapiens
agtcttttcaactgccttgaagactagccattttctggggttctaaggggtgagagaggaaatctggcttactgctgtttgatggagtcacggtctaggttaattttagttcaagggatgcctttggggaatttggctggacttgaagcagaagaaaacagttcatggatttagacttctgcctgctgagtctttgggttctttccagagctggagctcagaactgaggctgaggtcctagtgcagtgcctcatgaaccagggctgctaatggcctgcatttgatttctaagtgaatagatgacaatttctgctgagggtttattggtagatcctgacagtctagctttttcctgtctttcctatttctagctgccaatttgtggtgtctgaagaccaagactacacagctcattttgctgatcctgatacattagttaactgggactttgtggaacaagtgcgcatttgtagccatgaagtgccatcttgcccaatatgcctctatccacctactgcagccaagataacccgttgtggacacatcttctgctgggcatgcatcctgcactatctttcactgagtgagaagacgtggagtaaatgtcccatctgttacagttctgtgcataagaaggatctcaagagtgttgttgccacagagtcacatcagtatgttgttggtgataccattacgatgcagctgatgaagagggagaaaggggtgttggtggctttgcccaaatccaaatggatgaatgtagaccatcccattcatctaggagatgaacagcacagccagtactccaagttgctgctggcctctaaggagcaggtgctgcaccgggtagttctggaggagaaagtagcactagagcagcagctggcagaggagaagcacactcccgagtcctgctttattgaggcagctatccaggagctcaagactcgggaagaggctctgtcgggattggccggaagcagaagggaggtcactggtgttgtggctgctctggaacaactggtgctgatggctcccttggcgaaggagtctgtttttcaacccaggaagggtgtgctggagtatctgtctgccttcgatgaagaaaccacggaagtttgttctctggacactccttctagacctcttgctctccctctggtagaagaggaggaagcagtgtctgaaccagagcctgaggggttgccagaggcctgtgatgacttggagttagcagatgacaatcttaaagaggggaccatttgcactgagtccagccagcaggaacccatcaccaagtcaggcttcacacgcctcagcagctctccttgttactacttttaccaagcggaagatggacagcatatgttcctgcaccctgtgaatgtgcgctgcctcgtgcgggagtacggcagcctggagaggagccccgagaagatctcagcaactgtggtggagattgctggctactccatgtctgaggatgttcgacagcgtcacagatatctctctcacttgccactcacctgtgagttcagcatctgtgaactggctttgcaacctcctgtggtctctaaggaaaccctagagatgttctcagatgacattgagaagaggaaacgtcagcgccaaaagaaggctcgggaggaacgccgccgagagcgcaggattgagatagaggagaacaagaaacagggcaagtacccagaagtccacattcccctcgagaatctacagcagtttcctgccttcaattcttatacctgctcctctgattctgctttgggtcccaccagcaccgagggccatggggccctctccatttctcctctcagcagaagtccaggttcccatgcagactttctgctgacccctctgtcacccactgccagtcagggcagtccctcattctgcgttgggagtctggaagaagactctcccttcccttcctttgcccagatgctgagggttggaaaagcaaaagcagatgtgtggcccaaaactgctccaaagaaagatgagaacagcttagttcctcctgcccctgtggacagcgacggggagagtgataattcagaccgtgttcctgtgcccagttttcaaaattccttcagccaagctattgaagcagccttcatgaaactggacacaccagctacttcagatcccctctctgaagagaaaggaggaaagaaaagaaaaaaacagaaacagaagctcctgttcagcacctcagtcgtccacaccaagtgacactactggcccaggctaccttctccatctggtttttgtttttgtttttttttcccccatgcttttgtttggctgctgtaatttttaagtatttgagtttgaacagattagctctggggggagggggtttccacaatgtgagggggaaccaagaaaattttaaatacagtgtattttccagcttcctgtctttacaccaaaataaagtattgacacaagagatctcttcctgccaaggtttttagttcattgccagtttagtctttttgacccatgtgtaattaatttttctcaacccaaagtaagattgagtcccctttgagatgcattagagcagtccaacccagaatggcacacactgctctgctgtagcatcatgtcagggcttcctggactcagtacacctctcagtttgtcttttaaaaaacagctgaatctttactacctatttagttctccttgttaaagaaacaggggtgggaataaaatggatttaggacacccagtttgaattgcagtttttttttttctgacacatggccaggctgtggtgccagcttaatggagtaggctgtccttggcacttgcatgtgtgaaaggagggttttgcctcttcttgagcatggcttgagttggtaaggaaagctgtaactcacgaagccctgagacctgctacccctaagatcgagcttgttttcagtgactggcttgagtcataggaggaggagtctggtacagctgcaggagagcagggccatctgaagcggtagcattgccaccatctccctctcatctagagcagttttcttatgccttggtttgagctgaatttgatgtgaattcttttgctgcttaataaagtgacctctaggtgcattagaatgcgaaggcaaatagttgcaataaatcacctgcacaagca

SEQ ID NO: 318115 - DNA, 2757 bp, Homo sapiens
  misc_feature (61)..(61): n is a, c, g, or t
ttatgcacagaactgtaacagatgggacatttactccacgtcttctcactcagtgaaaganagcaggatcatgcccagcagaagatgtgtccacaacgggttatcttggctgcagtaggtggatagaggcatattgggcatgcatcctgcactatctttcactgagtgagaagacgtggagtaaatgtcccatctgttacagttctgtgcataagaaggatctcaagagtgttgttgccacagagtcacatcagtatgttgttggtgataccattacgatgcagctgatgaagagggagaaaggggtgttggtggctttgcccaaatccaaatggatgaatgtagaccatcccattcatctaggagatgaacagcacagccagtactccaagttgctgctggcctctaaggagcaggtgctgcaccgggtagttctggaggagaaagtagcactagagcagcagctggcagaggagaagcacactcccgagtcctgctttattgaggcagctatccaggagctcaagactcgggaagaggctctgtcgggattggccggaagcagaagggaggtcactggtgttgtggctgctctggaacaactggtgctgatggctcccttggcgaaggagtctgtttttcaacccaggaagggtgtgctggagtatctgtctgccttcgatgaagaaaccacggaagtttgttctctggacactccttctagacctcttgctctccctctggtagaagaggaggaagcagtgtctgaaccagagcctgaggggttgccagaggcctgtgatgacttggagttagcagatgacaatcttaaagaggggaccatttgcactgagtccagccagcaggaacccatcaccaagtcaggcttcacacgcctcagcagctctccttgttactacttttaccaagcggaagatggacagcatatgttcctgcaccctgtgaatgtgcgctgcctcgtgcgggagtacggcagcctggagaggagccccgagaagatctcagcaactgtggtggagattgctggctactccatgtctgaggatgttcgacagcgtcacagatatctctctcacttgccactcacctgtgagttcagcatctgtgaactggctttgcaacctcctgtggtctctaaggaaaccctagagatgttctcagatgacattgagaagaggaaacgtcagcgccaaaagaaggctcgggaggaacgccgccgagagcgcaggattgagatagaggagaacaagaaacagggcaagtacccagaagtccacattcccctcgagaatctacagcagtttcctgccttcaattcttatacctgctcctctgattctgctttgggtcccaccagcaccgagggccatggggccctctccatttctcctctcagcagaagtccaggttcccatgcagactttctgctgacccctctgtcacccactgccagtcagggcagtccctcattctgcgttgggagtctggaagaagactctcccttcccttcctttgcccagatgctgagggttggaaaagcaaaagcagatgtgtggcccaaaactgctccaaagaaagatgagaacagcttagttcctcctgcccctgtggacagcgacggggagagtgataattcagaccgtgttcctgtgcccagttttcaaaattccttcagccaagctattgaagcagccttcatgaaactggacacaccagctacttcagatcccctctctgaagagaaaggaggaaagaaaagaaaaaaacagaaacagaagctcctgttcagcacctcagtcgtccacaccaagtgacactactggcccaggctaccttctccatctggtttttgtttttgtttttttttcccccatgcttttgtttggctgctgtaatttttaagtatttgagtttgaacagattagctctggggggagggggtttccacaatgtgagggggaaccaagaaaattttaaatacagtgtattttccagcttcctgtctttacaccaaaataaagtattgacacaagagatctcttcctgccaaggtttttagttcattgccagtttagtctttttgacccatgtgtaattaatttttctcaacccaaagtaagattgagtcccctttgagatgcattagagcagtccaacccagaatggcacacactgctctgctgtagcatcatgtcagggcttcctggactcagtacacctctcagtttgtcttttaaaaaacagctgaatctttactacctatttagttctccttgttaaagaaacaggggtgggaataaaatggatttaggacacccagtttgaattgcagtttttttttttctgacacatggccaggctgtggtgccagcttaatggagtaggctgtccttggcacttgcatgtgtgaaaggagggttttgcctcttcttgagcatggcttgagttggtaaggaaagctgtaactcacgaagccctgagacctgctacccctaagatcgagcttgttttcagtgactggcttgagtcataggaggaggagtctggtacagctgcaggagagcagggccatctgaagcggtagcattgccaccatctccctctcatctagagcagttttcttatgccttggtttgagctgaatttgatgtgaattcttttgctgcttaataaagtgacctctaggtgcattagaatgcgaaggcaaatagttgcaataaatcacctgcacaagca

SEQ ID NO: 318116 - DNA, 4090 bp, Homo sapiens
tctttgagatgctgtttggcgactcgtcgccattcccggagcaggtcggcctcggcccaggggcgagtatccgttgctgtgtcggagacactagtccccgacaccgagacagccagccctctcccctgcctcgcggcgggagagcgtgtccggccggccggccggcggggctcgcgcaacctccctcgcctccccttcccccgcagcctccgccccgccaggcccggcccggactcccgagccccggcctcctcgtcctcggtcgccgctgccgccgggcttaacagccccgtccgccgcttctcttcctagtttgagaagccaaggaaggaaacagggaaaaatgtcgccatgaaggccgagaaccgctgccgccgccgacccccgccggccctgaacgccatgagcctgggtccccgccgcgcccgctccgctccgactgccgtcgccgccgaggcccccgttgatgccgctgagctcccccaacgccgccgccaccgcctccgacatggacaagaacagcggctccaacagctcctccgcctcttcgggcagcagcaaagggcaacagccgccccgctccgcctcggcggggccagccggcgagtctaaacccaagagcgaattactaatttcagctggattcaatttgttgtcagttgattctgtagtaaggccatatgttgcccctctggaggtgcttgtcaactactctggatgatggatggaaagaactccagtggatccaagcgttataatcgcaaacgtgaactttcctaccccaaaaatgaaagttttaacaaccagtcccgtcgctccagttcacagaaaagcaagacttttaacaagatgcctcctcaaaggggcggcggcagcagcaaactctttagctcttcttttaatggtggaagacgagatgaggtagcagaggctcaacgggcagagtttagccctgcccagttctctggtcctaagaagatcaacctgaaccacttgttgaatttcacttttgaaccccgtggccagacgggtcactttgaaggcagtggacatggtagctggggaaagaggaacaagtggggacataagccttttaacaaggaactctttttacaggccaactgccaatttgtggtgtctgaagaccaagactacacagctcattttgctgatcctgatacattagttaactgggactttgtggaacaagtgcgcatttgtagccatgaagtgccatcttgcccaatatgcctctatccacctactgcagccaagataacccgttgtggacacatcttctgctgggcatgcatcctgcactatctttcactgagtgagaagacgtggagtaaatgtcccatctgttacagttctgtgcataagaaggatctcaagagtgttgttgccacagagtcacatcagtatgttgttggtgataccattacgatgcagctgatgaagagggagaaaggggtgttggtggctttgcccaaatccaaatggatgaatgtagaccatcccattcatctaggagatgaacagcacagccagtactccaagttgctgctggcctctaaggagcaggtgctgcaccgggtagttctggaggagaaagtagcactagagcagcagctggcagaggagaagcacactcccgagtcctgctttattgaggcagctatccaggagctcaagactcgggaagaggctctgtcgggattggccggaagcagaagggaggtcactggtgttgtggctgctctggaacaactggtgctgatggctcccttggcgaaggagtctgtttttcaacccaggaagggtgtgctggagtatctgtctgccttcgatgaagaaaccacggaagtttgttctctggacactccttctagacctcttgctctccctctggtagaagaggaggaagcagtgtctgaaccagagcctgaggggttgccagaggcctgtgatgacttggagttagcagatgacaatcttaaagaggggaccatttgcactgagtccagccagcaggaacccatcaccaagtcaggcttcacacgcctcagcagctctccttgttactacttttaccaagcggaagatggacagcatatgttcctgcaccctgtgaatgtgcgctgcctcgtgcgggagtacggcagcctggagaggagccccgagaagatctcagcaactgtggtggagattgctggctactccatgtctgaggatgttcgacagcgtcacagatatctctctcacttgccactcacctgtgagttcagcatctgtgaactggctttgcaacctcctgtggtctctaaggaaaccctagagatgttctcagatgacattgagaagaggaaacgtcagcgccaaaagaaggctcgggaggaacgccgccgagagcgcaggattgagatagaggagaacaagaaacagggcaagtacccagaagtccacattcccctcgagaatctacagcagtttcctgccttcaattcttatacctgctcctctgattctgctttgggtcccaccagcaccgagggccatggggccctctccatttctcctctcagcagaagtccaggttcccatgcagactttctgctgacccctctgtcacccactgccagtcagggcagtccctcattctgcgttgggagtctggaagaagactctcccttcccttcctttgcccagatgctgagggttggaaaagcaaaagcagatgtgtggcccaaaactgctccaaagaaagatgagaacagcttagttcctcctgcccctgtggacagcgacggggagagtgataattcagaccgtgttcctgtgcccagttttcaaaattccttcagccaagctattgaagcagccttcatgaaactggacacaccagctacttcagatcccctctctgaagagaaaggaggaaagaaaagaaaaaaacagaaacagaagctcctgttcagcacctcagtcgtccacaccaagtgacactactggcccaggctaccttctccatctggtttttgtttttgtttttttttcccccatgcttttgtttggctgctgtaatttttaagtatttgagtttgaacagattagctctggggggagggggtttccacaatgtgagggggaaccaagaaaattttaaatacagtgtattttccagcttcctgtctttacaccaaaataaagtattgacaaaaaaaaaaaaaaaaaattcgggggcttatcttatatgtcgggtgtggcggggagaaaaagggtgtatatggaatttgggcactatgggtctataagctggtttcctggacccaagtttttttggtacaaggtgggtgagatcttggccgggtctccctatataggtggagtcggtatttaaatttcggataaagccaaggttaacctggtttaattgattgggggaaaaagaaaaaacgacttacaaaggacgggtgacaagtcccaataggctcaacacgaacggaccctagtaggacaaccccacatacaaccgcgtacaagaaaaaccatgcaatgatgccaagaccaacaagcaacccgacgacaccaagaagcgaacggtaagaaggcaagacacccgacaaacacaactcattttcaccgagagatatacacgcatcagagaacgaagcgaaccgaatacgccacaaactagcggacacacaaagaagaaaccgacgaatgcacaccacaccctaaaaaactatagaaggcaacgaccaaacaatgccacagcgtgagtatcaatcacagcaaacgagaacactacagagggaacaacgcagacataaaccggggaaagaaacgaagaaataacgacaaagagccaacgacgcgcagacgggagaaactaaccaaaccgcaagaccacaaacttaaccaatccacaccaaagagccagacggacgccgcaccagcggaaaggcgacaagacacgagagcaaggaacgaagaacagaagaagaacaacagccgagcccaaacagatagacgacggaaacacacaaacaggacaaaaggacagaaaaaaataaccacaacaatctca

SEQ ID NO: 318117 - DNA, 3271 bp, Homo sapiens
tctttgagatgctgtttggcgactcgtcgccattcccggagcaggtcggcctcggcccaggggcgagtatccgttgctgtgtcggagacactagtccccgacaccgagacagccagccctctcccctgcctcgcggcgggagagcgtgtccggccggccggccggcggggctcgcgcaacctccctcgcctccccttcccccgcagcctccgccccgccaggcccggcccggactcccgagccccggcctcctcgtcctcggtcgccgctgccgccgggcttaacagccccgtccgccgcttctcttcctagtttgagaagccaaggaaggaaacagggaaaaatgtcgccatgaaggccgagaaccgctgccgccgccgacccccgccggccctgaacgccatgagcctgggtccccgccgcgcccgctccgctccgactgccgtcgccgccgaggcccccgttgatgccgctgagctcccccaacgccgccgccaccgcctccgacatggacaagaacagcggctccaacagctcctccgcctcttcgggcagcagcaaagggcaacagccgccccgctccgcctcggcggggccagccggcgagtctaaacccaagagcgaattactaatttcagctggattcaatttgttgtcagttgattctgtagtaaggccatatgttgcccctctggaggtgcttgtcaactactctggatgatggatggaaagaactccagtggatccaagcgttataatcgcaaacgtgaactttcctaccccaaaaatgaaagttttaacaaccagtcccgtcgctccagttcacagaaaagcaagacttttaacaagatgcctcctcaaaggggcggcggcagcagcaaactctttagctcttcttttaatggtggaagacgagatgaggtagcagaggctcaacgggcagagtttagccctgcccagttctctggtcctaagaagatcaacctgaaccacttgttgaatttcacttttgaaccccgtggccagacgggtcactttgaaggcagtggacatggtagctggggaaagaggaacaagtggggacataagccttttaacaaggaactctttttacaggccaactgccaatttgtggtgtctgaagaccaagactacacagctcattttgctgatcctgatacattagttaactgggactttgtggaacaagtgcgcatttgtagccatgaagtgccatcttgcccaatatgcctctatccacctactgcagccaagataacccgttgtggacacatcttctgctgggcatgcatcctgcactatctttcactgagtgagaagacgtggagtaaatgtcccatctgttacagttctgtgcataagaaggatctcaagagtgttgttgccacagagtcacatcagtatgttgttggtgataccattacgatgcagctgatgaagagggagaaaggggtgttggtggctttgcccaaatccaaatggatgaatgtagaccatcccattcatctaggagatgaacagcacagccagtactccaagttgctgctggcctctaaggagcaggtgctgcaccgggtagttctggaggagaaagtagcactagagcagcagctggcagaggagaagcacactcccgagtcctgctttattgaggcagctatccaggagctcaagactcgggaagaggctctgtcgggattggccggaagcagaagggaggtcactggtgttgtggctgctctggaacaactggtgctgatggctcccttggcgaaggagtctgtttttcaacccaggaagggtgtgctggagtatctgtctgccttcgatgaagaaaccacggaagtttgttctctggacactccttctagacctcttgctctccctctggtagaagaggaggaagcagtgtctgaaccagagcctgaggggttgccagaggcctgtgatgacttggagttagcagatgacaatcttaaagaggggaccatttgcactgagtccagccagcaggaacccatcaccaagtcaggcttcacacgcctcagcagctctccttgttactacttttaccaagcggaagatggacagcatatgttcctgcaccctgtgaatgtgcgctgcctcgtgcgggagtacggcagcctggagaggagccccgagaagatctcagcaactgtggtggagattgctggctactccatgtctgaggatgttcgacagcgtcacagatatctctctcacttgccactcacctgtgagttcagcatctgtgaactggctttgcaacctcctgtggtctctaaggaaaccctagagatgttctcagatgacattgagaagaggaaacgtcagcgccaaaagaaggctcgggaggaacgccgccgagagcgcaggattgagatagaggagaacaagaaacagggcaagtacccagaagtccacattcccctcgagaatctacagcagtttcctgccttcaattcttatacctgctcctctgattctgctttgggtcccaccagcaccgagggccatggggccctctccatttctcctctcagcagaagtccaggttcccatgcagactttctgctgacccctctgtcacccactgccagtcagggcagtccctcattctgcgttgggagtctggaagaagactctcccttcccttcctttgcccagatgctgagggttggaaaagcaaaagcagatgtgtggcccaaaactgctccaaagaaagatgagaacagcttagttcctcctgcccctgtggacagcgacggggagagtgataattcagaccgtgttcctgtgcccagttttcaaaattccttcagccaagctattgaagcagccttcatgaaactggacacaccagctacttcagatcccctctctgaagagaaaggaggaaagaaaagaaaaaaacagaaacagaagctcctgttcagcacctcagtcgtccacaccaagtgacactactggcccaggctaccttctccatctggtttttgtttttgtttttttttcccccatgcttttgtttggctgctgtaatttttaagtatttgagtttgaacagattagctctggggggagggggtttccacaatgtgagggggaaccaagaaaattttaaatacagtgtattttccagcttcctgtctttacaccaaaataaagtattgaccgatgcggccagacctcccttttctcttatatacttacgcacgacctaaccaca

SEQ ID NO: 318118 - DNA, 2137 bp, Homo sapiens
tagtgctggcgtgtgatcttgtgctcgatggttggtgtgctggagtatctgtctgccttcgatgaagaaaccacggaagtttgttctctggacactccttctagacctcttgctctccctctggtagaagaggaggaagcagtgtctgaaccagagcctgaggggttgccagaggcctgtgatgacttggagttagcagatgacaatcttaaagaggggaccatttgcactgagtccagccagcaggaacccatcaccaagtcaggcttcacacgcctcagcagctctccttgttactacttttaccaagcggaagatggacagcatatgttcctgcaccctgtgaatgtgcgctgcctcgtgcgggagtacggcagcctggagaggagccccgagaagatctcagcaactgtggtggagattgctggctactccatgtctgaggatgttcgacagcgtcacagatatctctctcacttgccactcacctgtgagttcagcatctgtgaactggctttgcaacctcctgtggtctctaaggaaaccctagagatgttctcagatgacattgagaagaggaaacgtcagcgccaaaagaaggctcgggaggaacgccgccgagagcgcaggattgagatagaggagaacaagaaacagggcaagtacccagaagtccacattcccctcgagaatctacagcagtttcctgccttcaattcttatacctgctcctctgattctgctttgggtcccaccagcaccgagggccatggggccctctccatttctcctctcagcagaagtccaggttcccatgcagactttctgctgacccctctgtcacccactgccagtcagggcagtccctcattctgcgttgggagtctggaagaagactctcccttcccttcctttgcccagatgctgagggttggaaaagcaaaagcagatgtgtggcccaaaactgctccaaagaaagatgagaacagcttagttcctcctgcccctgtggacagcgacggggagagtgataattcagaccgtgttcctgtgcccagttttcaaaattccttcagccaagctattgaagcagccttcatgaaactggacacaccagctacttcagatcccctctctgaagagaaaggaggaaagaaaagaaaaaaacagaaacagaagctcctgttcagcacctcagtcgtccacaccaagtgacactactggcccaggctaccttctccatctggtttttgtttttgtttttttttcccccatgcttttgtttggctgctgtaatttttaagtatttgagtttgaacagattagctctggggggagggggtttccacaatgtgagggggaaccaagaaaattttaaatacagtgtattttccagcttcctgtctttacaccaaaataaagtattgacacaagagatctcttcctgccaaggtttttagttcattgccagtttagtctttttgacccatgtgtaattaatttttctcaacccaaagtaagattgagtcccctttgagatgcattagagcagtccaacccagaatggcacacactgctctgctgtagcatcatgtcagggcttcctggactcagtacacctctcagtttgtcttttaaaaaacagctgaatctttactacctatttagttctccttgttaaagaaacaggggtgggaataaaatggatttaggacacccagtttgaattgcagtttttttttttctgacacatggccaggctgtggtgccagcttaatggagtaggctgtccttggcacttgcatgtgtgaaaggagggttttgcctcttcttgagcatggcttgagttggtaaggaaagctgtaactcacgaagccctgagacctgctacccctaagatcgagcttgttttcagtgactggcttgagtcataggaggaggagtctggtacagctgcaggagagcagggccatctgaagcggtagcattgccaccatctccctctcatctagagcagttttcttatgccttggtttgagctgaatttgatgtgaattcttttgctgcttaataaagtgacctctaggtgcattagaatgcgaaggcaaatagttgcaataaatcacctgcacaagca

SEQ ID NO: 318119 - DNA, 4463 bp, Homo sapiens
tctttgagatgctgtttggcgactcgtcgccattcccggagcaggtcggcctcggcccaggggcgagtatccgttgctgtgtcggagacactagtccccgacaccgagacagccagccctctcccctgcctcgcggcgggagagcgtgtccggccggccggccggcggggctcgcgcaacctccctcgcctccccttcccccgcagcctccgccccgccaggcccggcccggactcccgagccccggcctcctcgtcctcggtcgccgctgccgccgggcttaacagccccgtccgccgcttctcttcctagtttgagaagccaaggaaggaaacagggaaaaatgtcgccatgaaggccgagaaccgctgccgccgccgacccccgccggccctgaacgccatgagcctgggtccccgccgcgcccgctccgctccgactgccgtcgccgccgaggcccccgttgatgccgctgagctcccccaacgccgccgccaccgcctccgacatggacaagaacagcggctccaacagctcctccgcctcttcgggcagcagcaaagggcaacagccgccccgctccgcctcggcggggccagccggcgagtctaaacccaagagcgatggaaagaactccagtggatccaagcgttataatcgcaaacgtgaactttcctaccccaaaaatgaaagttttaacaaccagtcccgtcgctccagttcacagaaaagcaagacttttaacaagatgcctcctcaaaggggcggcggcagcagcaaactctttagctcttcttttaatggtggaagacgagatgaggtagcagaggctcaacgggcagagtttagccctgcccagttctctggtcctaagaagatcaacctgaaccacttgttgaatttcacttttgaaccccgtggccagacgggtcactttgaaggcagtggacatggtagctggggaaagaggaacaagtggggacataagccttttaacaaggaactctttttacaggccaactgccaatttgtggtgtctgaagaccaagactacacagctcattttgctgatcctgatacattagttaactgggactttgtggaacaagtgcgcatttgtagccatgaagtgccatcttgcccaatatgcctctatccacctactgcagccaagataacccgttgtggacacatcttctgctgggcatgcatcctgcactatctttcactgagtgagaagacgtggagtaaatgtcccatctgttacagttctgtgcataagaaggatctcaagagtgttgttgccacagagtcacatcagtatgttgttggtgataccattacgatgcagctgatgaagagggagaaaggggtgttggtggctttgcccaaatccaaatggatgaatgtagaccatcccattcatctaggagatgaacagcacagccagtactccaagttgctgctggcctctaaggagcaggtgctgcaccgggtagttctggaggagaaagtagcactagagcagcagctggcagaggagaagcacactcccgagtcctgctttattgaggcagctatccaggagctcaagactcgggaagaggctctgtcgggattggccggaagcagaagggaggtcactggtgttgtggctgctctggaacaactggtgctgatggctcccttggcgaaggagtctgtttttcaacccaggaagggtgtgctggagtatctgtctgccttcgatgaagaaaccacggaagtttgttctctggacactccttctagacctcttgctctccctctggtagaagaggaggaagcagtgtctgaaccagagcctgaggggttgccagaggcctgtgatgacttggagttagcagatgacaatcttaaagaggggaccatttgcactgagtccagccagcaggaacccatcaccaagtcaggcttcacacgcctcagcagctctccttgttactacttttaccaagcggaagatggacagcatatgttcctgcaccctgtgaatgtgcgctgcctcgtgcgggagtacggcagcctggagaggagccccgagaagatctcagcaactgtggtggagattgctggctactccatgtctgaggatgttcgacagcgtcacagatatctctctcacttgccactcacctgtgagttcagcatctgtgaactggctttgcaacctcctgtggtctctaaggaaaccctagagatgttctcagatgacattgagaagaggaaacgtcagcgccaaaagaaggctcgggaggaacgccgccgagagcgcaggattgagatagaggagaacaagaaacagggcaagtacccagaagtccacattcccctcgagaatctacagcagtttcctgccttcaattcttatacctgctcctctgattctgctttgggtcccaccagcaccgagggccatggggccctctccatttctcctctcagcagaagtccaggttcccatgcagactttctgctgacccctctgtcacccactgccagtcagggcagtccctcattctgcgttgggagtctggaagaagactctcccttcccttcctttgcccagatgctgagggttggaaaagcaaaagcagatgtgtggcccaaaactgctccaaagaaagatgagaacagcttagttcctcctgcccctgtggacagcgacggggagagtgataattcagaccgtgttcctgtgcccagttttcaaaattccttcagccaagctattgaagcagccttcatgaaactggacacaccagctacttcagatcccctctctggtaagggcagaggctggagtgcccagggttgtcaaacatactacacatgtactgccattcccgcctggattcagtggcagacatcactaattaggctctttcccttctgaacccttcagcacactctagtgtcatttaaataatactccatttggtatgtcagataggacctatttgccaccccagagaaattgatgacgcctgaaagtgaaattctgaggaactcttccaagatacagtggggtgtacaacctgtatcctttagaatcttgagttggtacagggtggctaattagatggagaagtcagtctcgaagcctgttgcactctgttcatgactagacaagaatcacatatgtatggcgtgctatgtgcctagcactgtgctaattctcccaacaaccacgttaaatgggtgtacctcacgttacagatggggaaactgaggtccagggaggtaaaagtgatttgcccaaagacacccacttggtgtataccaagactggtattggcatctaggcagtctaattccagagcctccactcttagctcccactctgtgactctcagtaatgaaaactggccaggggacaagggatggcattttaagttaagctgtctttctgtgtctccctttagaagagaaaggaggaaagaaaagaaaaaaacagaaacagaagctcctgttcagcacctcagtcgtccacaccaagtgacactactggcccaggctaccttctccatctggtttttgtttttgtttttttttcccccatgcttttgtttggctgctgtaatttttaagtatttgagtttgaacagattagctctggggggagggggtttccacaatgtgagggggaaccaagaaaattttaaatacagtgtattttccagcttcctgtctttacaccaaaataaagtattgacacaagagatctcttcctgccaaggtttttagttcattgccagtttagtctttttgacccatgtgtaattaatttttctcaacccaaagtaagattgagtcccctttgagatgcattagagcagtccaacccagaatggcacacactgctctgctgtagcatcatgtcagggcttcctggactcagtacacctctcagtttgtcttttaaaaaacagctgaatctttactacctatttagttctccttgttaaagaaacaggggtgggaataaaatggatttaggacacccagtttgaattgcagtttttttttttctgacacatggccaggctgtggtgccagcttaatggagtaggctgtccttggcacttgcatgtgtgaaaggagggttttgcctcttcttgagcatggcttgagttggtaaggaaagctgtaactcacgaagccctgagacctgctacccctaagatcgagcttgttttcagtgactggcttgagtcataggaggaggagtctggtacagctgcaggagagcagggccatctgaagcggtagcattgccaccatctccctctcatctagagcagttttcttatgccttggtttgagctgaatttgatgtgaattcttttgctgcttaataaagtgacctctaggtgcattagaatgcgaaggcaaatagttgcaataaatcacctgcacaagca

SEQ ID NO: 318120 - DNA, 3241 bp, Homo sapiens
  misc_feature (3166)..(3166): n is a, c, g, or t
tctttgagatgctgtttggcgactcgtcgccattcccggagcaggtcggcctcggcccaggggcgagtatccgttgctgtgtcggagacactagtccccgacaccgagacagccagccctctcccctgcctcgcggcgggagagcgtgtccggccggccggccggcggggctcgcgcaacctccctcgcctccccttcccccgcagcctccgccccgccaggcccggcccggactcccgagccccggcctcctcgtcctcggtcgccgctgccgccgggcttaacagccccgtccgccgcttctcttcctagtttgagaagccaaggaaggaaacagggaaaaatgtcgccatgaaggccgagaaccgctgccgccgccgacccccgccggccctgaacgccatgagcctgggtccccgccgcgcccgctccgctccgactgccgtcgccgccgaggcccccgttgatgccgctgagctcccccaacgccgccgccaccgcctccgacatggacaagaacagcggctccaacagctcctccgcctcttcgggcagcagcaaagggcaacagccgccccgctccgcctcggcggggccagccggcgagtctaaacccaagagcgatggaaagaactccagtggatccaagcgttataatcgcaaacgtgaactttcctaccccaaaaatgaaagttttaacaaccagtcccgtcgctccagttcacagaaaagcaagacttttaacaagatgcctcctcaaaggggcggcggcagcagcaaactctttagctcttcttttaatggtggaagacgagatgaggtagcagaggctcaacgggcagagtttagccctgcccagttctctggtcctaagaagatcaacctgaaccacttgttgaatttcacttttgaaccccgtggccagacgggtcactttgaaggcagtggacatggtagctggggaaagaggaacaagtggggacataagccttttaacaaggaactctttttacaggccaactgccaatttgtggtgtctgaagaccaagactacacagctcattttgctgatcctgatacattagttaactgggactttgtggaacaagtgcgcatttgtagccatgaagtgccatcttgcccaatatgcctctatccacctactgcagccaagataacccgttgtggacacatcttctgctgggcatgcatcctgcactatctttcactgagtgagaagacgtggagtaaatgtcccatctgttacagttctgtgcataagaaggatctcaagagtgttgttgccacagagtcacatcagtatgttgttggtgataccattacgatgcagctgatgaagagggagaaaggggtgttggtggctttgcccaaatccaaatggatgaatgtagaccatcccattcatctaggagatgaacagcacagccagtactccaagttgctgctggcctctaaggagcaggtgctgcaccgggtagttctggaggagaaagtagcactagagcagcagctggcagaggagaagcacactcccgagtcctgctttattgaggcagctatccaggagctcaagactcgggaagaggctctgtcgggattggccggaagcagaagggaggtcactggtgttgtggctgctctggaacaactggtgctgatggctcccttggcgaaggagtctgtttttcaacccaggaagggtgtgctggagtatctgtctgccttcgatgaagaaaccacggaagtttgttctctggacactccttctagacctcttgctctccctctggtagaagaggaggaagcagtgtctgaaccagagcctgaggggttgccagaggcctgtgatgacttggagttagcagatgacaatcttaaagaggggaccatttgcactgagtccagccagcaggaacccatcaccaagtcaggcttcacacgcctcagcagctctccttgttactacttttaccaagcggaagatggacagcatatgttcctgcaccctgtgaatgtgcgctgcctcgtgcgggagtacggcagcctggagaggagccccgagaagatctcagcaactgtggtggagattgctggctactccatgtctgaggatgttcgacagcgtcacagatatctctctcacttgccactcacctgtgagttcagcatctgtgaactggctttgcaacctcctgtggtctctaaggaaaccctagagatgttctcagatgacattgagaagaggaaacgtcagcgccaaaagaaggctcgggaggaacgccgccgagagcgcaggattgagatagaggagaacaagaaacagggcaagtacccagaagtccacattcccctcgagaatctacagcagtttcctgccttcaattcttatacctgctcctctgattctgctttgggtcccaccagcaccgagggccatggggccctctccatttctcctctcagcagaagtccaggttcccatgcagactttctgctgacccctctgtcacccactgccagtcagggcagtccctcattctgcgttgggagtctggaagaagactctcccttcccttcctttgcccagatgctgagggttggaaaagcaaaagcagatgtgtggcccaaaactgctccaaagaaagatgagaacagcttagttcctcctgcccctgtggacagcgacggggagagtgataattcagaccgtgttcctgtgcccagttttcaaaattccttcagccaagctattgaagcagccttcatgaaactggacacaccagctacttcagatcccctctctgaagagaaaggaggaaagaaaagaaaaaaacagaaacagaagctcctgttcagcacctcagtcgtccacaccaagtgacactactggcccaggctaccttctccatctggtttttgtttttgtttttttttcccccatgcttttgtttggctgctgtaatttttaagtatttgagtttgaacagattagctctggggggagggggtttccacaatgtgagggggaaccaagaaaattttaaatacagtgtattttccagtctgttttaacaataagtgccagaaaaaaaaaaaaaaaccggcttgtgtggggaaagagaggccggccaggtcgccttggagnatcgcccatgggtatgactcgttcgtaaactggttaagaacaaaaaagacacacatgacctcagcacaattacgt

SEQ ID NO: 318121 - DNA, 2768 bp, Homo sapiens
aacataggctaggtcgaggctgggtgttaatcggccgagggactcgtcgccattcccggagcaggtcggcctcggcccaggggcgagtatccgttgctgtgtcggagacactagtccccgacaccgagacagccagccctctcccctgcctcgcggcgggagagcgtgtccggccggccggccggcggggctcgcgcaacctccctcgcctccccttcccccgcagcctccgccccgccaggcccggcccggactcccgagccccggtctcctcgtcctcggtcgccgctgccgccgggcttaacagccccgtccgccgcttctcttcctagtttgagaagccaaggaaggaaacagggaaaaatgtcgccatgaaggccgagaaccgctgccgccgccgacccccgccggccctgaacgccatgagcctgggtccccgccgcgcccgctccgctccgactgccgtcgccgccgaggcccccgttgatgccgctgagctcccccaacgccgccgccaccgcctccgacatggacaagaacagcggctccaacagctcctccgcctcttcgggcagcagcaaagggcaacagccgccccgctccgcctcggcggggccagccggcgagtctaaacccaagagcgatggaaagaactccagtggatccaagcgttataatcgcaaacgtgaactttcctaccccaaaaatgaaagttttaacaaccagtcccgtcgctccagttcacagaaaagcaagacttttaacaagatgcctcctcaaaggggcggcggcagcagcaaactctttagctcttcttttaatggtggaagacgagatgaggtagcagaggctcaacgggcagagtttagccctgcccagttctctggtcctaagaagatcaacctgaaccacttgttgaatttcacttttgaaccccgtggccagacgggtcactttgaaggcagtggacatggtagctggggaaagaggaacaagtggggacataagccttttaacaaggaactctttttacaggccaactgccaatttgtggtgtctgaagaccaagactacacagctcattttgctgatcctgatacattagttaactgggactttgtggaacaagtgcgcatttgtagccatgaagtgccatcttgcccaatatgcctctatccacctactgcagccaagataacccgttgtggacacatcttctgctgggcatgcatcctgcactatctttcactgagtgagaagacgtggagtaaatgtcccatctgttacagttctgtgcataagaaggatctcaagagtgttgttgccacagagtcacatcagtatgttgttggtgataccattacgatgcagctgatgaagagggagaaaggggtgttggtggctttgcctctccatttctcctctcagcagaagtccaggttcccatgcagactttctgctgacccctctgtcacccactgccagtcagggcagtccctcattctgcgttgggagtctggaagaagactctcccttcccttcctttgcccagatgctgagggttggaaaagcaaaagcagatgtgtggcccaaaactgctccaaagaaagatgagaacagcttagttcctcctgcccctgtggacagcgacggggagagtgataattcagaccgtgttcctgtgcccagttttcaaaattccttcagccaagctattgaagcagccttcatgaaactggacacaccagctacttcagatcccctctctgaagagaaaggaggaaagaaaagaaaaaaacagaaacagaagctcctgttcagcacctcagtcgtccacaccaagtgacactactggcccaggctaccttctccatctggtttttgtttttgtttttttttcccccatgcttttgtttggctgctgtaatttttaagtatttgagtttgaacagattagctctggggggagggggtttccacaatgtgagggggaaccaagaaaattttaaatacagtgtattttccagcttcctgtctttacaccaaaataaagtattgacacaagagatctcttcctgccaaggtttttagttcattgccagtttagtctttttgacccatgtgtaattaatttttctcaacccaaagtaagattgagtcccctttgagatgcattagagcagtccaacccagaatggcacacactgctctgctgtagcatcatgtcagggcttcctggactcagtacacctctcagtttgtcttttaaaaaacagctgaatctttactacctatttagttctccttgttaaagaaacaggggtgggaataaaatggatttaggacacccagtttgaattgcagtttttttttttctgacacatggccaggctgtggtgccagcttaatggagtaggctgtccttggcacttgcatgtgtgaaaggagggttttgcctcttcttgagcatggcttgagttggtaaggaaagctgtaactcacgaagccctgagacctgctacccctaagatcgagcttgttttcagtgactggcttgagtcataggaggaggagtctggtacagctgcaggagagcagggccatctgaagcggtagcattgccaccatctccctctcatctagagcagttttcttatgccttggtttgagctgaatttgatgtgaattcttttgctgcttaataaagtgacctctaggtgcattagaatgcgaaggcaaatagttgcaataaatcacctgcacaagca

SEQ ID NO: 318122 - DNA, 4362 bp, Homo sapiens
tctttgagatgctgtttggcgactcgtcgccattcccggagcaggtcggcctcggcccaggggcgagtatccgttgctgtgtcggagacactagtccccgacaccgagacagccagccctctcccctgcctcgcggcgggagagcgtgtccggccggccggccggcggggctcgcgcaacctccctcgcctccccttcccccgcagcctccgccccgccaggcccggcccggactcccgagccccggcctcctcgtcctcggtcgccgctgccgccgggcttaacagccccgtccgccgcttctcttcctagtttgagaagccaaggaaggaaacagggaaaaatgtcgccatgaaggccgagaaccgctgccgccgccgacccccgccggccctgaacgccatgagcctgggtccccgccgcgcccgctccgctccgactgccgtcgccgccgaggcccccgttgatgccgctgagctcccccaacgccgccgccaccgcctccgacatggacaagaacagcggctccaacagctcctccgcctcttcgggcagcagcaaagggcaacagccgccccgctccgcctcggcggggccagccggcgagtctaaacccaagagcgatggaaagaactccagtggatccaagcgttataatcgcaaacgtgaactttcctaccccaaaaatgaaagttttaacaaccagtcccgtcgctccagttcacagaaaagcaagacttttaacaagatgcctcctcaaaggggcggcggcagcagcaaactctttagctcttcttttaatggtggaagacgagatgaggtagcagaggctcaacgggcagagtttagccctgcccagttctctggtcctaagaagatcaacctgaaccacttgttgaatttcacttttgaaccccgtggccagacgggtcactttgaaggcagtggacatggtagctggggaaagaggaacaagtggggacataagccttttaacaaggaactctttttacaggccaactgccaatttgtggtgtctgaagaccaagactacacagctcattttgctgatcctgatacattagttaactgggactttgtggaacaagtgcgcatttgtagccatgaagtgccatcttgcccaatatgcctctatccacctactgcagccaagataacccgttgtggacacatcttctgctgggcatgcatcctgcactatctttcactgagtgagaagacgtggagtaaatgtcccatctgttacagttctgtgcataagaaggatctcaagagtgttgttgccacagagtcacatcagtatgttgttggtgataccattacgatgcagctgatgaagagggagaaaggggtgttggtggctttgcccaaatccaaatggatgaatgtagaccatcccattcatctaggagatgaacagcacagccagtactccaagttgctgctggcctctaaggagcaggtgctgcaccgggtagttctggaggagaaagtagcactagagcagcagctggcagaggagaagcacactcccgagtcctgctttattgaggcagctatccaggagctcaagactcgggaagaggctctgtcgggattggccggaagcagaagggaggtcactggtgttgtggctgctctggaacaactggtgctgatggctcccttggcgaaggagtctgtttttcaacccaggaagggtgtgctggagtatctgtctgccttcgatgaagaaaccacggaagtttgttctctggacactccttctagacctcttgctctccctctggtagaagaggaggaagcagtgtctgaaccagagcctgaggggttgccagaggcctgtgatgacttggagttagcagatgacaatcttaaagaggggaccatttgcactgagtccagccagcaggaacccatcaccaagtcaggcttcacacgcctcagcagctctccttgttactacttttaccaagcggaagatggacagcatatgttcctgcaccctgtgaatgtgcgctgcctcgtgcgggagtacggcagcctggagaggagccccgagaagatctcagcaactgtggtggagattgctggctactccatgtctgaggatgttcgacagcgtcacagatatctctctcacttgccactcacctgtgagttcagcatctgtgaactggctttgcaacctcctgtggtctctaaggaaaccctagagatgttctcagatgacattgagaagaggaaacgtcagcgccaaaagaaggctcgggaggaacgccgccgagagcgcaggattgagatagaggagaacaagaaacagggcaagtacccagaagtccacattcccctcgagaatctacagcagtttcctgccttcaattcttatacctgctcctctgattctgctttgggtcccaccagcaccgagggccatggggccctctccatttctcctctcagcagaagtccaggttcccatgcagatgctgagggttggaaaagcaaaagcagatgtgtggcccaaaactgctccaaagaaagatgagaacagcttagttcctcctgcccctgtggacagcgacggggagagtgataattcagaccgtgttcctgtgcccagttttcaaaattccttcagccaagctattgaagcagccttcatgaaactggacacaccagctacttcagatcccctctctggtaagggcagaggctggagtgcccagggttgtcaaacatactacacatgtactgccattcccgcctggattcagtggcagacatcactaattaggctctttcccttctgaacccttcagcacactctagtgtcatttaaataatactccatttggtatgtcagataggacctatttgccaccccagagaaattgatgacgcctgaaagtgaaattctgaggaactcttccaagatacagtggggtgtacaacctgtatcctttagaatcttgagttggtacagggtggctaattagatggagaagtcagtctcgaagcctgttgcactctgttcatgactagacaagaatcacatatgtatggcgtgctatgtgcctagcactgtgctaattctcccaacaaccacgttaaatgggtgtacctcacgttacagatggggaaactgaggtccagggaggtaaaagtgatttgcccaaagacacccacttggtgtataccaagactggtattggcatctaggcagtctaattccagagcctccactcttagctcccactctgtgactctcagtaatgaaaactggccaggggacaagggatggcattttaagttaagctgtctttctgtgtctccctttagaagagaaaggaggaaagaaaagaaaaaaacagaaacagaagctcctgttcagcacctcagtcgtccacaccaagtgacactactggcccaggctaccttctccatctggtttttgtttttgtttttttttcccccatgcttttgtttggctgctgtaatttttaagtatttgagtttgaacagattagctctggggggagggggtttccacaatgtgagggggaaccaagaaaattttaaatacagtgtattttccagcttcctgtctttacaccaaaataaagtattgacacaagagatctcttcctgccaaggtttttagttcattgccagtttagtctttttgacccatgtgtaattaatttttctcaacccaaagtaagattgagtcccctttgagatgcattagagcagtccaacccagaatggcacacactgctctgctgtagcatcatgtcagggcttcctggactcagtacacctctcagtttgtcttttaaaaaacagctgaatctttactacctatttagttctccttgttaaagaaacaggggtgggaataaaatggatttaggacacccagtttgaattgcagtttttttttttctgacacatggccaggctgtggtgccagcttaatggagtaggctgtccttggcacttgcatgtgtgaaaggagggttttgcctcttcttgagcatggcttgagttggtaaggaaagctgtaactcacgaagccctgagacctgctacccctaagatcgagcttgttttcagtgactggcttgagtcataggaggaggagtctggtacagctgcaggagagcagggccatctgaagcggtagcattgccaccatctccctctcatctagagcagttttcttatgccttggtttgagctgaatttgatgtgaattcttttgctgcttaataaagtgacctctaggtgcattagaatgcgaaggcaaatagttgcaataaatcacctgcacaagca

SEQ ID NO: 318123 - DNA, 1679 bp, Homo sapiens
attaggctaggtacgaggctgggtggtcacctgtgagttcagcatctgtgaactggctttgcaacctcctgtggtctctaaggaaaccctagagatgttctcagatgacattgagaagaggaaacgtcagcgccaaaagaaggctcgggaggaacgccgccgagagcgcaggattgagatagaggagaacaagaaacagggcaagtacccagaagtccacattcccctcgagaatctacagcagtttcctgccttcaattcttatacctgctcctctgattctgctttgggtcccaccagcaccgagggccatggggccctctccatttctcctctcagcagaagtccaggttcccatgcagactttctgctgacccctctgtcacccactgccagtcagggcagtccctcattctgcgttgggagtctggaagaagactctcccttcccttcctttgcccagatgctgagggttggaaaagcaaaagcagatgtgtggcccaaaactgctccaaagaaagatgagaacagcttagttcctcctgcccctgtggacagcgacggggagagtgataattcagaccgtgttcctgtgcccagttttcaaaattccttcagccaagctattgaagcagccttcatgaaactggacacaccagctacttcagatcccctctctgaagagaaaggaggaaagaaaagaaaaaaacagaaacagaagctcctgttcagcacctcagtcgtccacaccaagtgacactactggcccaggctaccttctccatctggtttttgtttttgtttttttttcccccatgcttttgtttggctgctgtaatttttaagtatttgagtttgaacagattagctctggggggagggggtttccacaatgtgagggggaaccaagaaaattttaaatacagtgtattttccagcttcctgtctttacaccaaaataaagtattgacacaagagatctcttcctgccaaggtttttagttcattgccagtttagtctttttgacccatgtgtaattaatttttctcaacccaaagtaagattgagtcccctttgagatgcattagagcagtccaacccagaatggcacacactgctctgctgtagcatcatgtcagggcttcctggactcagtacacctctcagtttgtcttttaaaaaacagctgaatctttactacctatttagttctccttgttaaagaaacaggggtgggaataaaatggatttaggacacccagtttgaattgcagtttttttttttctgacacatggccaggctgtggtgccagcttaatggagtaggctgtccttggcacttgcatgtgtgaaaggagggttttgcctcttcttgagcatggcttgagttggtaaggaaagctgtaactcacgaagccctgagacctgctacccctaagatcgagcttgttttcagtgactggcttgagtcataggaggaggagtctggtacagctgcaggagagcagggccatctgaagcggtagcattgccaccatctccctctcatctagagcagttttcttatgccttggtttgagctgaatttgatgtgaattcttttgctgcttaataaagtgacctctaggtgcattagaatgcgaaggcaaatagttgcaataaatcacctgcacaagca

SEQ ID NO: 318124 - DNA, 2832 bp, Homo sapiens
aacataggctaggtcgaggctgggtgttaatcggccgagggactcgtcgccattcccggagcaggtcggcctcggcccaggggcgagtatccgttgctgtgtcggagacactagtccccgacaccgagacagccagccctctcccctgcctcgcggcgggagagcgtgtccggccggccggccggcggggctcgcgcaacctccctcgcctccccttcccccgcagcctccgccccgccaggcccggcccggactcccgagccccggtctcctcgtcctcggtcgccgctgccgccgggcttaacagccccgtccgccgcttctcttcctagtttgagaagccaaggaaggaaacagggaaaaatgtcgccatgaaggccgagaaccgctgccgccgccgacccccgccggccctgaacgccatgagcctgggtccccgccgcgcccgctccgctccgactgccgtcgccgccgaggcccccgttgatgccgctgagctcccccaacgccgccgccaccgcctccgacatggacaagaacagcggctccaacagctcctccgcctcttcgggcagcagcaaagggcaacagccgccccgctccgcctcggcggggccagccggcgagtctaaacccaagagcgatggaaagaactccagtggatccaagcgttataatcgcaaacgtgaactttcctaccccaaaaatgaaagttttaacaaccagtcccgtcgctccagttcacagaaaagcaagacttttaacaagatgcctcctcaaaggggcggcggcagcagcaaactctttagctcttcttttaatggtggaagacgagatgaggtagcagaggctcaacgggcagagtttagccctgcccagttctctggtcctaagaagatcaacctgaaccacttgttgaatttcacttttgaaccccgtggccagacgggtcactttgaaggcagtggacatggtagctggggaaagaggaacaagtggggacataagccttttaacaaggaactctttttacaggccaactgccaatttgtggtgtctgaagaccaagactacacagctcattttgctgatcctgatacattagttaactgggactttgtggaacaagtgcgcatttgtagccatgaagtgccatcttgcccaatatgcctctatccacctactgcagccaagataacccgttgtggacacatcttctgctgggcatgcatcctgcactatctttcactgagtgagaagacacactcccgagtcctgctttattgaggcagctatccaggagctcaaggatgttcgacagcgtcacagatatctctctcacttgccactcacctgtgagttcagcatctgtgaactggctttgcaacctcctgtggtctctaaggaaaccctagagatgttctcagatgacattgagaagaggaaacgtcagcgccaaaagaaggctcgggaggaacgccgccgagagcgcaggagtctcaggttcccatgcagactttctgctgacccctctgtcacccactgccagtcagggcagtccctcattctgcgttgggagtctggaagaagactctcccttcccttcctttgcccagatgctgagggttggaaaagcaaaagcagatgtgtggcccaaaactgctccaaagaaagatgagaacagcttagttcctcctgcccctgtggacagcgacggggagagtgataattcagaccgtgttcctgtgcccagttttcaaaattccttcagccaagctattgaagcagccttcatgaaactggacacaccagctacttcagatcccctctctgaagagaaaggaggaaagaaaagaaaaaaacagaaacagaagctcctgttcagcacctcagtcgtccacaccaagtgacactactggcccaggctaccttctccatctggtttttgtttttgtttttttttcccccatgcttttgtttggctgctgtaatttttaagtatttgagtttgaacagattagctctggggggagggggtttccacaatgtgagggggaaccaagaaaattttaaatacagtgtattttccagcttcctgtctttacaccaaaataaagtattgacacaagagatctcttcctgccaaggtttttagttcattgccagtttagtctttttgacccatgtgtaattaatttttctcaacccaaagtaagattgagtcccctttgagatgcattagagcagtccaacccagaatggcacacactgctctgctgtagcatcatgtcagggcttcctggactcagtacacctctcagtttgtcttttaaaaaacagctgaatctttactacctatttagttctccttgttaaagaaacaggggtgggaataaaatggatttaggacacccagtttgaattgcagtttttttttttctgacacatggccaggctgtggtgccagcttaatggagtaggctgtccttggcacttgcatgtgtgaaaggagggttttgcctcttcttgagcatggcttgagttggtaaggaaagctgtaactcacgaagccctgagacctgctacccctaagatcgagcttgttttcagtgactggcttgagtcataggaggaggagtctggtacagctgcaggagagcagggccatctgaagcggtagcattgccaccatctccctctcatctagagcagttttcttatgccttggtttgagctgaatttgatgtgaattcttttgctgcttaataaagtgacctctaggtgcattagaatgcgaaggcaaatagttgcaataaatcacctgcacaagca

SEQ ID NO: 318125 - DNA, 2784 bp, Homo sapiens
tctttgagatgctgtttggcgactcgtcgccattcccggagcaggtcggcctcggcccaggggcgagtatccgttgctgtgtcggagacactagtccccgacaccgagacagccagccctctcccctgcctcgcggcgggagagcgtgtccggccggccggccggcggggctcgcgcaacctccctcgcctccccttcccccgcagcctccgccccgccaggcccggcccggactcccgagccccggcctcctcgtcctcggtcgccgctgccgccgggcttaacagccccgtccgccgcttctcttcctagtttgagaagccaaggaaggaaacagggaaaaatgtcgccatgaaggccgagaaccgctgccgccgccgacccccgccggccctgaacgccatgagcctgggtccccgccgcgcccgctccgctccgactgccgtcgccgccgaggcccccgttgatgccgctgagctcccccaacgccgccgccaccgcctccgacatggacaagaacagcggctccaacagctcctccgcctcttcgggcagcagcaaagggcaacagccgccccgctccgcctcggcggggccagccggcgagtctaaacccaagagcgatggaaagaactccagtggatccaagcgttataatcgcaaacgtgaactttcctaccccaaaaatgaaagttttaacaaccagtcccgtcgctccagttcacagaaaagcaagacttttaacaagatgcctcctcaaaggggcggcggcagcagcaaactctttagctcttcttttaatggtggaagacgagatgaggtagcagaggctcaacgggcagagtttagccctgcccagttctctggtcctaagaagatcaacctgaaccacttgttgaatttcacttttgaaccccgtggccagacgggtcactttgaaggcagtggacatggtagctggggaaagaggaacaagtggggacataagccttttaacaaggaactctttttacaggccaactgccaatttgtggtgtctgaagaccaagactacacagctcattttgctgatcctgatacattagttaactgggactttgtggaacaagtgcgcatttgtagccatgaagtgccatcttgcccaatatgcctctatccacctactgcagccaagataacccgttgtggacacatcttctgctgggcatgcatcctgcactatctttcactgagtgagaagacgtggagtaaatgtcccatctgttacagttctgtgcataagaaggatctcaagagtgttgttgccacagagtcacatcagtatgttgttggtgataccattacgatgcagctgatgaagagggagaaaggggtgttggtggctttgcccaaatccaaatggatgaatgtagaccatcccattcatctaggagatgaacagcacagccagtactccaagttgctgctggcctctaaggagcaggtgctgcaccgggtagttctggaggagaaagtagcactagagcagcagctggcagaggagaagcacactcccgagtcctgctttattgaggcagctatccaggagctcaagactcgggaagaggctctgtcgggattggccggaagcagaagggaggtcactggtgttgtggctgctctggaacaactggtgctgatggctcccttggcgaaggagtctgtttttcaacccaggaagggtgtgctggagtatctgtctgccttcgatgaagaaaccacggaagtttgttctctggacactccttctagacctcttgctctccctctggtagaagaggaggaagcagtgtctgaaccagagcctgaggggttgccagaggcctgtgatgacttggagttagcagatgacaatcttaaagaggggaccatttgcactgagtccagccagcaggaacccatcaccaagtcaggcttcacacgcctcagcagctctccttgttactacttttaccaagcggaagatggacagcatatgttcctgcaccctgtgaatgtgcgctgcctcgtgcgggagtacggcagcctggagaggagccccgagaagatctcagcaactgtggtggagattgctggctactccatgtctgaggatgttcgacagcgtcacagatatctctctcacttgccactcacctgtgagttcagcatctgtgaactggctttgcaacctcctgtggtctctaaggaaaccctagagatgttctcagatgacattgagaagaggaaacgtcagcgccaaaagaaggctcgggaggaacgccgccgagagcgcaggattgagatagaggagaacaagaaacagggcaagtacccagaagtccacattcccctcgagaatctacagcagtttcctgccttcaattcttatacctgctcctctgattctgctttgggtcccaccagcaccgagggccatggggccctctccatttctcctctcagcagaagtccaggttcccatgcagactttctgctgacccctctgtcacccactgccagtcagggcagtccctcattctgcgttgggagtctggaagaagactctcccttcccttcctttgcccagagaagcccttacatgaaggtcttccatgggtttgcatgctggacctctgttcttcccactccaaagtctcttgagacaatcttaactcatctcataacgtctagtaccaacccacatggtaaaaagtgccagtttattttcgtctgcataggttttcttttaggttcgtcgtctga

SEQ ID NO: 318126 - DNA, 3228 bp, Homo sapiens
tctttgagatgctgtttggcgactcgtcgccattcccggagcaggtcggcctcggcccaggggcgagtatccgttgctgtgtcggagacactagtccccgacaccgagacagccagccctctcccctgcctcgcggcgggagagcgtgtccggccggccggccggcggggctcgcgcaacctccctcgcctccccttcccccgcagcctccgccccgccaggcccggcccggactcccgagccccggcctcctcgtcctcggtcgccgctgccgccgggcttaacagccccgtccgccgcttctcttcctagtttgagaagccaaggaaggaaacagggaaaaatgtcgccatgaaggccgagaaccgctgccgccgccgacccccgccggccctgaacgccatgagcctgggtccccgccgcgcccgctccgctccgactgccgtcgccgccgaggcccccgttgatgccgctgagctcccccaacgccgccgccaccgcctccgacatggacaagaacagcggctccaacagctcctccgcctcttcgggcagcagcaaagggcaacagccgccccgctccgcctcggcggggccagccggcgagtctaaacccaagagcgatggaaagaactccagtggatccaagcgttataatcgcaaacgtgaactttcctaccccaaaaatgaaagttttaacaaccagtcccgtcgctccagttcacagaaaagcaagacttttaacaagatgcctcctcaaaggggcggcggcagcagcaaactctttagctcttcttttaatggtggaagacgagatgaggtagcagaggctcaacgggcagagtttagccctgcccagttctctggtcctaagaagatcaacctgaaccacttgttgaatttcacttttgaaccccgtggccagacgggtcactttgaaggcagtggacatggtagctggggaaagaggaacaagtggggacataagccttttaacaaggaactctttttacaggccaactgccaatttgtggtgtctgaagaccaagactacacagctcattttgctgatcctgatacattagttaactgggactttgtggaacaagtgcgcatttgtagccatgaagtgccatcttgcccaatatgcctctatccacctactgcagccaagataacccgttgtggacacatcttctgctgggcatgcatcctgcactatctttcactgagtgagaagacgtggagtaaatgtcccatctgttacagttctgtgcataagaaggatctcaagagtgttgttgccacagagtcacatcagtatgttgttggtgataccattacgatgcagctgatgaagagggagaaaggggtgttggtggctttgcccaaatccaaatggatgaatgtagaccatcccattcatctaggagatgaacagcacagccagtactccaagttgctgctggcctctaaggagcaggtgctgcaccgggtagttctggaggagaaagtagcactagagcagcagctggcagaggagaagcacactcccgagtcctgctttattgaggcagctatccaggagctcaagactcgggaagaggctctgtcgggattggccggaagcagaagggaggtcactggtgttgtggctgctctggaacaactggtgctgatggctcccttggcgaaggagtctgtttttcaacccaggaagggtgtgctggagtatctgtctgccttcgatgaagaaaccacggaagtttgttctctggacactccttctagacctcttgctctccctctggtagaagaggaggaagcagtgtctgaaccagagcctgaggggttgccagaggcctgtgatgacttggagttagcagatgacaatcttaaagaggggaccatttgcactgagtccagccagcaggaacccatcaccaagtcaggcttcacacgcctcagcagctctccttgttactacttttaccaagcggaagatggacagcatatgttcctgcaccctgtgaatgtgcgctgcctcgtgcgggagtacggcagcctggagaggagccccgagaagatctcagcaactgtggtggagattgctggctactccatgtctgaggatgttcgacagcgtcacagatatctctctcacttgccactcacctgtgagttcagcatctgtgaactggctttgcaacctcctgtggtctctaaggaaaccctagagatgttctcagatgacattgagaagaggaaacgtcagcgccaaaagaaggctcgggaggaacgccgccgagagcgcaggattgagatagaggagaacaagaaacagggcaagtacccagaagtccacattcccctcgagaatctacagcagtttcctgccttcaattcttatacctgctcctctgattctgctttgggtcccaccagcaccgagggccatggggccctctccatttctcctctcagcagaagtccaggttcccatgcaggtaaacaggtgaaatttaatgaattcacccatcagttagaccttatgcaaagctttggtgtctgagtttacaaccccggcccactcagcatggtgtggacttcaggggcataaccttactttggtagtcctgaggtacatcaaattcttttattcatctttcccacttgctatactgactgctttaccctgccagcttctaagcacctcaaggagctctttaggcaggatagttgaaaatggagtcttccctttgacccacctatttttgtttctagtttttgtttgagatactcccctgtatgcctaaacatctttgtacatgtctctttattgtagcatcgttttaatagctcaaaaaaaaaaaacagtttagaaagcctaccaataagaaaatgactaaattatagtatttatactgtaaaatgtttcacaccagaaggccgggcgtggtggcttatgcctgtaatcccagcactttgggaggccgaggcgggtggatcacgaggtcaggaattcaagaccagcctgaccaacacagtgaaaccctatctctactgaaaatgcaaaaattagcagggcatggtggcaggcgcctgtagtcccagctacttgggaggctgaggcaacagaattgcttgaacctgggaggcggaggtctcagtgagacaaggttgcgtcactgcattccagcctgggcgacagagcgagactttgtctca

SEQ ID NO: 318127 - DNA, 3105 bp, Homo sapiens
tctttgagatgctgtttggcgactcgtcgccattcccggagcaggtcggcctcggcccaggggcgagtatccgttgctgtgtcggagacactagtccccgacaccgagacagccagccctctcccctgcctcgcggcgggagagcgtgtccggccggccggccggcggggctcgcgcaacctccctcgcctccccttcccccgcagcctccgccccgccaggcccggcccggactcccgagccccggcctcctcgtcctcggtcgccgctgccgccgggcttaacagccccgtccgccgcttctcttcctagtttgagaagccaaggaaggaaacagggaaaaatgtcgccatgaaggccgagaaccgctgccgccgccgacccccgccggccctgaacgccatgagcctgggtccccgccgcgcccgctccgctccgactgccgtcgccgccgaggcccccgttgatgccgctgagctcccccaacgccgccgccaccgcctccgacatggacaagaacagcggctccaacagctcctccgcctcttcgggcagcagcaaagggcaacagccgccccgctccgcctcggcggggccagccggcgagtctaaacccaagagcgatggaaagaactccagtggatccaagcgttataatcgcaaacgtgaactttcctaccccaaaaatgaaagttttaacaaccagtcccgtcgctccagttcacagaaaagcaagacttttaacaagatgcctcctcaaaggggcggcggcagcagcaaactctttagctcttcttttaatggtggaagacgagatgaggtagcagaggctcaacgggcagagtttagccctgcccagttctctggtcctaagaagatcaacctgaaccacttgttgaatttcacttttgaaccccgtggccagacgggtcactttgaaggcagtggacatggtagctggggaaagaggaacaagtggggacataagccttttaacaaggaactctttttacaggccaactgccaatttgtggtgtctgaagaccaagactacacagctcattttgctgatcctgatacattagttaactgggactttgtggaacaagtgcgcatttgtagccatgaagtgccatcttgcccaatatgcctctatccacctactgcagccaagataacccgttgtggacacatcttctgctgggcatgcatcctgcactatctttcactgagtgagaagacgtggagtaaatgtcccatctgttacagttctgtgcataagaaggatctcaagagtgttgttgccacagagtcacatcagtatgttgttggtgataccattacgatgcagctgatgaagagggagaaaggggtgttggtggctttgcccaaatccaaatggatgaatgtagaccatcccattcatctaggagatgaacagcacagccagtactccaagttgctgctggcctctaaggagcaggtgctgcaccgggtagttctggaggagaaagtagcactagagcagcagctggcagaggagaagcacactcccgagtcctgctttattgaggcagctatccaggagctcaagactcgggaagaggctctgtcgggattggccggaagcagaagggaggtcactggtgttgtggctgctctggaacaactggtgctgatggctcccttggcgaaggagtctgtttttcaacccaggaagggtgtgctggagtatctgtctgccttcgatgaagaaaccacggaagtttgttctctggacactccttctagacctcttgctctccctctggtagaagaggaggaagcagtgtctgaaccagagcctgaggggttgccagaggcctgtgatgacttggagttagcagatgacaatcttaaagaggggaccatttgcactgagtccagccagcaggaacccatcaccaagtcaggcttcacacgcctcagcagctctccttgttactacttttaccaagcggaagatggacagcatatgttcctgcaccctgtgaatgtgcgctgcctcgtgcgggagtacggcagcctggagaggagccccgagaagatctcagcaactgtggtggagattgctggctactccatgtctgaggatgttcgacagcgtcacagatatctctctcacttgccactcacctgtgagttcagcatctgtgaactggctttgcaacctcctgtggtctctaaggaaaccctagagatgttctcagatgacattgagaagaggaaacgtcagcgccaaaagaaggctcgggaggaacgccgccgagagcgcaggattgagatagaggagaacaagaaacagggcaagtacccagaagtccacattcccctcgagaatctacagcagtttcctgccttcaattcttatacctgctcctctgattctgctttgggtcccaccagcaccgagggccatggggccctctccatttctcctctcagcagaagtccaggttcccatgcaggtaaacaggtgaaatttaatgaattcacccatcagttagaccttatgcaaagctttggtgtctgagtttacaaccccggcccactcagcatggtgtggacttcaggggcataaccttactttggtagtcctgaggtacatcaaattcttttattcatctttcccacttgctatactgactgctttaccctgccagcttctaagcacctcaaggagctctttaggcaggatagttgaaaatggagtcttccctttgacccacctatttttgtttctagtttttgtttgagatactcccctgtatgcctaaacatctttgtacatgtctctttattgtagcatcgttttaatagctcaaaaaaaaaaaacagtttagaaagcctaccaataagaaaatgactaaattatagtatttatactgtaaaatgtttcacaccatgcccggccattgacagttctttagagcagttgatacggatctttcttatgtaattacagcagtttgtactgagaaataagcaagaattgagctttggtaaggagggttccgaagtcaaggaacatgaaataattgtggaggtgaggtgagaagagagggg

SEQ ID NO: 318128 - DNA, 2794 bp, Homo sapiens
  misc_feature (2758)..(2758): n is a, c, g, or t
  misc_feature (2794)..(2794): n is a, c, g, or t
tctttgagatgctgtttggcgactcgtcgccattcccggagcaggtcggcctcggcccaggggcgagtatccgttgctgtgtcggagacactagtccccgacaccgagacagccagccctctcccctgcctcgcggcgggagagcgtgtccggccggccggccggcggggctcgcgcaacctccctcgcctccccttcccccgcagcctccgccccgccaggcccggcccggactcccgagccccggcctcctcgtcctcggtcgccgctgccgccgggcttaacagccccgtccgccgcttctcttcctagtttgagaagccaaggaaggaaacagggaaaaatgtcgccatgaaggccgagaaccgctgccgccgccgacccccgccggccctgaacgccatgagcctgggtccccgccgcgcccgctccgctccgactgccgtcgccgccgaggcccccgttgatgccgctgagctcccccaacgccgccgccaccgcctccgacatggacaagaacagcggctccaacagctcctccgcctcttcgggcagcagcaaagggcaacagccgccccgctccgcctcggcggggccagccggcgagtctaaacccaagagcgatggaaagaactccagtggatccaagcgttataatcgcaaacgtgaactttcctaccccaaaaatgaaagttttaacaaccagtcccgtcgctccagttcacagaaaagcaagacttttaacaagatgcctcctcaaaggggcggcggcagcagcaaactctttagctcttcttttaatggtggaagacgagatgaggtagcagaggctcaacgggcagagtttagccctgcccagttctctggtcctaagaagatcaacctgaaccacttgttgaatttcacttttgaaccccgtggccagacgggtcactttgaaggcagtggacatggtagctggggaaagaggaacaagtggggacataagccttttaacaaggaactctttttacaggccaactgccaatttgtggtgtctgaagaccaagactacacagctcattttgctgatcctgatacattagttaactgggactttgtggaacaagtgcgcatttgtagccatgaagtgccatcttgcccaatatgcctctatccacctactgcagccaagataacccgttgtggacacatcttctgctgggcatgcatcctgcactatctttcactgagtgagaagacgtggagtaaatgtcccatctgttacagttctgtgcataagaaggatctcaagagtgttgttgccacagagtcacatcagtatgttgttggtgataccattacgatgcagctgatgaagagggagaaaggggtgttggtggctttgcccaaatccaaatggatgaatgtagaccatcccattcatctaggagatgaacagcacagccagtactccaagttgctgctggcctctaaggagcaggtgctgcaccgggtagttctggaggagaaagtagcactagagcagcagctggcagaggagaagcacactcccgagtcctgctttattgaggcagctatccaggagctcaagactcgggaagaggctctgtcgggattggccggaagcagaagggaggtcactggtgttgtggctgctctggaacaactggtgctgatggctcccttggcgaaggagtctgtttttcaacccaggaagggtgtgctggagtatctgtctgccttcgatgaagaaaccacggaagtttgttctctggacactccttctagacctcttgctctccctctggtagaagaggaggaagcagtgtctgaaccagagcctgaggggttgccagaggcctgtgatgacttggagttagcagatgacaatcttaaagaggggaccatttgcactgagtccagccagcaggaacccatcaccaagtcaggcttcacacgcctcagcagctctccttgttactacttttaccaagcggaagatggacagcatatgttcctgcaccctgtgaatgtgcgctgcctcgtgcgggagtacggcagcctggagaggagccccgagaagatctcagcaactgtggtggagattgctggctactccatgtctgaggatgttcgacagcgtcacagatatctctctcacttgccactcacctgtgagttcagcatctgtgaactggctttgcaacctcctgtggtctctaaggaaaccctagagatgttctcagatgacattgagaagaggaaacgtcagcgccaaaagaaggctcgggaggaacgccgccgagagcgcaggattgagatagaggagaacaagaaacagggcaagtacccagaagtccacattcccctcgagaatctacagcagtttcctgccttcaattcttatacctgctcctctgattctgctttgggtcccaccagcaccgagggccatggggccctctccatttctcctctcagcagaagtccaggttcccatgcagatgctgagggttggaaaagcaaaagcagatgtgtggcccaaaactgctccaaagaaagatgagaacagcttagttcctcctgcccctgtggacagcgacggggagagtgataattcagaccgtgttcctgtgcccagttttcaaaattccttcagccaagctattgaagcagccttcatgaaactggacacaccagctacttcagatcccctctctgaagagaaagaggaaagaaagaaccaggctacttntccaatggctctgggttggttttttcccaagcttgn

SEQ ID NO: 318129 - DNA, 2481 bp, Homo sapiens
tctttgagatgctgtttggcgactcgtcgccattcccggagcaggtcggcctcggcccaggggcgagtatccgttgctgtgtcggagacactagtccccgacaccgagacagccagccctctcccctgcctcgcggcgggagagcgtgtccggccggccggccggcggggctcgcgcaacctccctcgcctccccttcccccgcagcctccgccccgccaggcccggcccggactcccgagccccggcctcctcgtcctcggtcgccgctgccgccgggcttaacagccccgtccgccgcttctcttcctagtttgagaagccaaggaaggaaacagggaaaaatgtcgccatgaaggccgagaaccgctgccgccgccgacccccgccggccctgaacgccatgagcctgggtccccgccgcgcccgctccgctccgactgccgtcgccgccgaggcccccgttgatgccgctgagctcccccaacgccgccgccaccgcctccgacatggacaagaacagcggctccaacagctcctccgcctcttcgggcagcagcaaagggcaacagccgccccgctccgcctcggcggggccagccggcgagtctaaacccaagagcgatggaaagaactccagtggatccaagcgttataatcgcaaacgtgaactttcctaccccaaaaatgaaagttttaacaaccagtcccgtcgctccagttcacagaaaagcaagacttttaacaagatgcctcctcaaaggggcggcggcagcagcaaactctttagctcttcttttaatggtggaagacgagatgaggtagcagaggctcaacgggcagagtttagccctgcccagttctctggtcctaagaagatcaacctgaaccacttgttgaatttcacttttgaaccccgtggccagacgggtcactttgaaggcagtggacatggtagctggggaaagaggaacaagtggggacataagccttttaacaaggaactctttttacaggccaactgccaatttgtggtgtctgaagaccaagactacacagctcattttgctgatcctgatacattagttaactgggactttgtggaacaagtgcgcatttgtagccatgaagtgccatcttgcccaatatgcctctatccacctactgcagccaagataacccgttgtggacacatcttctgctgggcatgcatcctgcactatctttcactgagtgagaagacgtggagtaaatgtcccatctgttacagttctgtgcataagaaggatctcaagagtgttgttgccacagagtcacatcagtatgttgttggtgataccattacgatgcagctgatgaagagggagaaaggggtgttggtggctttgcccaaatccaaatggatgaatgtagaccatcccattcatctaggagatgaacagcacagccagtactccaagttgctgctggcctctaaggagcaggtgctgcaccgggtagttctggaggagaaagtagcactagagcagcagctggcagaggagaagcacactcccgagtcctgctttattgaggcagctatccaggagctcaagactcgggaagaggctctgtcgggattggccggaagcagaagggaggtcactggtgttgtggctgctctggaacaactggtgctgatggctcccttggcgaaggagtctgtttttcaacccaggaagggtgtgctggagtatctgtctgccttcgatgaagaaaccacggaagtttgttctctggacactccttctagacctcttgctctccctctggtagaagaggaggaagcagtgtctgaaccagagcctgaggggttgccagaggcctgtgatgacttggagttagcagatgacaatcttaaagaggggaccatttgcactgagtccagccagcaggaacccatcaccaagtcaggcttcacacgcctcagcagctctccttgttactacttttaccaagcggaagatggacagcatatgttcctgcaccctgtgaatgtgcgctgcctcgtgcgggagtacggcagcctggagaggagccccgagaagatctcagcaactgtggtggagattgctggctactccatgtctgaggatgttcgacagcgtcacagatatctctctcacttgccactcacctgtgagttcagcatctgtgaactggctttgcaacctcctgtggtctctaaggaaaccctagagatgttctcagatgacattgagaagaggaaacgtcagcgccaaaagaaggctcgggaggaacgccgccgagagcgcaggattgagatagaggagaacaagaaacagggcaagtacccagaagtccacattcccctcgagaatctacagcagtttcctgccttcaattcttatacctgctcctctattatccttggctcctacactccgcatgcttctagacctcaactgtgatcatctccgtc

SEQ ID NO: 318130 - DNA, 2194 bp, Homo sapiens
aacataggctaggtcgaggctgggtgttaatcggccgagggactcgtcgccattcccggagcaggtcggcctcggcccaggggcgagtatccgttgctgtgtcggagacactagtccccgacaccgagacagccagccctctcccctgcctcgcggcgggagagcgtgtccggccggccggccggcggggctcgcgcaacctccctcgcctccccttcccccgcagcctccgccccgccaggcccggcccggactcccgagccccggtctcctcgtcctcggtcgccgctgccgccgggcttaacagccccgtccgccgcttctcttcctagtttgagaagccaaggaaggaaacagggaaaaatgtcgccatgaaggccgagaaccgctgccgccgccgacccccgccggccctgaacgccatgagcctgggtccccgccgcgcccgctccgctccgactgccgtcgccgccgaggcccccgttgatgccgctgagctcccccaacgccgccgccaccgcctccgacatggacaagaacagcggctccaacagctcctccgcctcttcgggcagcagcaaagggcaacagccgccccgctccgcctcggcggggccagccggcgagtctaaacccaagagcgatggaaagaactccagtggatccaagcgttataatcgcaaacgtgaactttcctaccccaaaaatgaaagttttaacaaccagtcccgtcgctccagttcacagaaaagcaagacttttaacaagatgcctcctcaaaggggcggcggcagcagcaaactctttagctcttcttttaatggtggaagacgagatgaggtagcagaggctcaacgggcagagtttagccctgcccagttctctggtcctaagaagatcaacctgaaccacttgttgaatttcacttttgaaccccgtggccagacgggtcactttgaaggcagtggacatggtagctggggaaagaggaacaagtggggacataagccttttaacaaggaactctttttacaggccaactgccaatttgtggtgtctgaagaccaagactacacagctcattttgctgatcctgatacattagttaactgggactttgtggaacaagtgcgcatttgtagccatgaagtgccatcttgcccaatatgcctctatccacctactgcagccaagataacccgttgtggacacatcttctgctgggcatgcatcctgcactatctttcactgagtgagaagacgtggagtaaatgtcccatctgttacagttctgtgcataagaaggatctcaagagtgttgttgccacagagtcacatcagtatgttgttggtgataccattacgatgcagctgatgaagagggagaaaggggtgttggtggctttgcccaaatccaaatggatgaatgtagaccatcccattcatctaggagatgaacagcacagccagtactccaagttgctgctggcctctaaggagcaggtgctgcaccgggtagttctggaggagaaagtagcactagagcagcagctggcagaggagaagcacactcccgagtcctgctttattgaggcagctatccaggagctcaagactcgggaagaggctctgtcgggattggccggaagcagaagggaggtcactggtgttgtggctgctctggaacaactggtgctgatggctcccttggcgaaggagtctgtttttcaacccaggaagggtgtgctggagtatctgtctgccttcgatgaagaaaccacggaagtttgttctctggacactccttctagacctcttgctctccctctggtagaagaggaggaagcagtgtctgaaccagagcctgaggggttgccagaggcctgtgatgacttggagttagcagatgacaatcttaaagaggggaccatttgcactgagtccagccagcaggaacccatcaccaagtcaggcttcacacgcctcagcagctctccttgttactacttttaccaagcggaagatggacagcatatgtttcctgcccccgggaaaggggcggcgcccgggggggaggagggggccggggagaggccccaagaaaattcagcagggcgggggaatggggcgaacccgggcgagggggcacaggggagaaatccaggaacccggggtgccacggagggggaccggt

SEQ ID NO: 318131 - DNA, 1638 bp, Homo sapiens
aacataggctaggtcgaggctgggtgttaatcggccgagggactcgtcgccattcccggagcaggtcggcctcggcccaggggcgagtatccgttgctgtgtcggagacactagtccccgacaccgagacagccagccctctcccctgcctcgcggcgggagagcgtgtccggccggccggccggcggggctcgcgcaacctccctcgcctccccttcccccgcagcctccgccccgccaggcccggcccggactcccgagccccggtctcctcgtcctcggtcgccgctgccgccgggcttaacagccccgtccgccgcttctcttcctagtttgagaagccaaggaaggaaacagggaaaaatgtcgccatgaaggccgagaaccgctgccgccgccgacccccgccggccctgaacgccatgagcctgggtccccgccgcgcccgctccgctccgactgccgtcgccgccgaggcccccgttgatgccgctgagctcccccaacgccgccgccaccgcctccgacatggacaagaacagcggctccaacagctcctccgcctcttcgggcagcagcaaagggcaacagccgccccgctccgcctcggcggggccagccggcgagtctaaacccaagagcgatggaaagaactccagtggatccaagcgttataatcgcaaacgtgaactttcctaccccaaaaatgaaagttttaacaaccagtcccgtcgctccagttcacagaaaagcaagacttttaacaagatgcctcctcaaaggggcggcggcagcagcaaactctttagctcttcttttaatggtggaagacgagatgaggtagcagaggctcaacgggcagagtttagccctgcccagttctctggtcctaagaagatcaacctgaaccacttgttgaatttcacttttgaaccccgtggccagacgggtcactttgaaggcagtggacatggtagctggggaaagaggaacaagtggggacataagccttttaacaaggaactctttttacaggccaactgccaatttgtggtgtctgaagaccaagactacacagctcattttgctgatcctgatacattagttaactgggactttgtggaacaagtgcgcatttgtagccatgaagtgccatcttgcccaatatgcctctatccacctactgcagccaagataacccgttgtggacacatcttctgctgggcatgcatcctgcactatctttcactgagtgagaagacgtggagtaaatgtcccatctgttacagttctgtgcataagaaggatctcaagagtgttgttgccacagagtcacatcagtatgttgttggtgataccattacgatgcagctgatgaagagggagaaaggggtgttggtggctttgcccaaatccaaatggatgaatgtagaccatcccattcatctaggagatgaacagcacagccagtactccaagttgctgctggcctctaaggagcaggtgctgcaccgggtagttctggaggagaaagtagcactagagcagcagctggcagaggagaagcacactcccgagtcctgctttattgaggcagctatccaggagctcaagactcaggtggatgcattggagatg

SEQ ID NO: 318132 - DNA, 384 bp, Homo sapiens
gagtcacatcagtatgttgttggtgataccattacgatgcagctgatgaagagggagaaaggggtgttggtggctttgcccaaatccaaatggatgaatgtagaccatcccattcatctaggaggtgagttctttaaattttggggacaaataatcctgggtacattctttaaggtgattgaatatatctaagcatcagaaagtgaagcctttgggcagggcacatctggcatgttcatattagtcataggattccagtaggttagggtggggtttgtagagagtagattaattattggtttcaagtttgtttaatctatacatcctaatttttcattttacaaggttttattacatagtgtctttcactgtgcccaatcttag

SEQ ID NO: 318133 - DNA, 4202 bp, Homo sapiens
tctttgagatgctgtttggcgactcgtcgccattcccggagcaggtcggcctcggcccaggggcgagtatccgttgctgtgtcggagacactagtccccgacaccgagacagccagccctctcccctgcctcgcggcgggagagcgtgtccggccggccggccggcggggctcgcgcaacctccctcgcctccccttcccccgcagcctccgccccgccaggcccggcccggactcccgagccccggcctcctcgtcctcggtcgccgctgccgccgggcttaacagccccgtccgccgcttctcttcctagtttgagaagccaaggaaggaaacagggaaaaatgtcgccatgaaggccgagaaccgctgccgccgccgacccccgccggccctgaacgccatgagcctgggtccccgccgcgcccgctccgctccgactgccgtcgccgccgaggcccccgttgatgccgctgagctcccccaacgccgccgccaccgcctccgacatggacaagaacagcggctccaacagctcctccgcctcttcgggcagcagcaaagggcaacagccgccccgctccgcctcggcggggccagccggcgagtctaaacccaagagcgaattactaatttcagctggattcaatttgttgtcagttgattctgtagtaaggccatatgttgcccctctggaggtgcttgtcaactactctggatgatggatggaaagaactccagtggatccaagcgttataatcgcaaacgtgaactttcctaccccaaaaatgaaagttttaacaaccagtcccgtcgctccagttcacagaaaagcaagacttttaacaagatgcctcctcaaaggggcggcggcagcagcaaactctttagctcttcttttaatggtggaagacgagatgaggtagcagaggctcaacgggcagagtttagccctgcccagttctctggtcctaagaagatcaacctgaaccacttgttgaatttcacttttgaaccccgtggccagacgggtcactttgaaggcagtggacatggtagctggggaaagaggaacaagtggggacataagccttttaacaaggaactctttttacaggccaactgccaatttgtggtgtctgaagaccaagactacacagctcattttgctgatcctgatacattagttaactgggactttgtggaacaagtgcgcatttgtagccatgaagtgccatcttgcccaatatgcctctatccacctactgcagccaagataacccgttgtggacacatcttctgctgggcatgcatcctgcactatctttcactgagtgagaagacgtggagtaaatgtcccatctgttacagttctgtgcataagaaggatctcaagagtgttgttgccacagagtcacatcagtatgttgttggtgataccattacgatgcagctgatgaagagggagaaaggggtgttggtggctttgcccaaatccaaatggatgaatgtagaccatcccattcatctaggagatgaacagcacagccagtactccaagttgctgctggcctctaaggagcaggtgctgcaccgggtagttctggaggagaaagtagcactagagcagcagctggcagaggagaagcacactcccgagtcctgctttattgaggcagctatccaggagctcaagactcgggaagaggctctgtcgggattggccggaagcagaagggaggtcactggtgttgtggctgctctggaacaactggtgctgatggctcccttggcgaaggagtctgtttttcaacccaggaagggtgtgctggagtatctgtctgccttcgatgaagaaaccacggaagtttgttctctggacactccttctagacctcttgctctccctctggtagaagaggaggaagcagtgtctgaaccagagcctgaggggttgccagaggcctgtgatgacttggagttagcagatgacaatcttaaagaggggaccatttgcactgagtccagccagcaggaacccatcaccaagtcaggcttcacacgcctcagcagctctccttgttactacttttaccaagcggaagatggacagcatatgttcctgcaccctgtgaatgtgcgctgcctcgtgcgggagtacggcagcctggagaggagccccgagaagatctcagcaactgtggtggagattgctggctactccatgtctgaggatgttcgacagcgtcacagatatctctctcacttgccactcacctgtgagttcagcatctgtgaactggctttgcaacctcctgtggtctctaaggaaaccctagagatgttctcagatgacattgagaagaggaaacgtcagcgccaaaagaaggctcgggaggaacgccgccgagagcgcaggattgagatagaggagaacaagaaacagggcaagtacccagaagtccacattcccctcgagaatctacagcagtttcctgccttcaattcttatacctgctcctctgattctgctttgggtcccaccagcaccgagggccatggggccctctccatttctcctctcagcagaagtccaggttcccatgcagactttctgctgacccctctgtcacccactgccagtcagggcagtccctcattctgcgttgggagtctggaagaagactctcccttcccttcctttgcccagatgctgagggttggaaaagcaaaagcagatgtgtggcccaaaactgctccaaagaaagatgagaacagcttagttcctcctgcccctgtggacagcgacggggagagtgataattcagaccgtgttcctgtgcccagttttcaaaattccttcagccaagctattgaagcagccttcatgaaactggacacaccagctacttcagatcccctctctgaagagaaaggaggaaagaaaagaaaaaaacagaaacagaagctcctgttcagcacctcagtcgtccacaccaagtgacactactggcccaggctaccttctccatctggtttttgtttttgtttttttttcccccatgcttttgtttggctgctgtaatttttaagtatttgagtttgaacagattagctctggggggagggggtttccacaatgtgagggggaaccaagaaaattttaaatacagtgtattttccagcttcctgtctttacaccaaaataaagtattgacacaagagatctcttcctgccaaggtttttagttcattgccagtttagtctttttgacccatgtgtaattaatttttctcaacccaaagtaagattgagtcccctttgagatgcattagagcagtccaacccagaatggcacacactgctctgctgtagcatcatgtcagggcttcctggactcagtacacctctcagtttgtcttttaaaaaacagctgaatctttactacctatttagttctccttgttaaagaaacaggggtgggaataaaatggatttaggacacccagtttgaattgcagtttttttttttctgacacatggccaggctgtggtgccagcttaatggagtaggctgtccttggcacttgcatgtgtgaaaggagggttttgcctcttcttgagcatggcttgagttggtaaggaaagctgtaactcacgaagccctgagacctgctacccctaagatcgagcttgttttcagtgactggcttgagtcataggaggaggagtctggtacagctgcaggagagcagggccatctgaagcggtagcattgccaccatctccctctcatctagagcagttttcttatgccttggtttgagctgaatttgatgtgaattcttttgctgcttaataaagtgacctctaggtgcattagaatgcgaaggcaaatagttgcaataaatcacctgcacaagcaaaaaaaaaaaggcgggcccccattatagtgtggcacatttaaacagcatattatgagcaacactggcaaacacccaactaccttgcaagggccaacacaacaagcaacaaaacaagggggcgacaaatccaccgagccacgacgcccatgggcacggcccgagggtcaatagagcagcacgtcaccgcgacgtccgcattggccactgggaatgccccgaacgcgaacatagacacggggcgtgaacacacagagcgggcagacaaagcaccgacac

SEQ ID NO: 318134 - DNA, 3834 bp, Homo sapiens
cggctggtacagcctcggagttacgggatcgactcgtcgccattcccggagcaggtcggcctcggcccaggggcgagtatccgttgctgtgtcggagacactagtccccgacaccgagacagccagccctctcccctgcctcgcggcgggagagcgtgtccggccggccggccggcggggctcgcgcaacctccctcgcctccccttcccccgcagcctccgccccgccaggcccggcccggactcccgagccccggcctcctcgtcctcggtcgccgctgccgccgggcttaacagccccgtccgccgcttctcttcctagtttgagaagccaaggaaggaaacagggaaaaatgtcgccatgaaggccgagaaccgctgccgccgccgacccccgccggccctgaacgccatgagcctgggtccccgccgcgcccgctccgctccgactgccgtcgccgccgaggcccccgttgatgccgctgagctcccccaacgccgccgccaccgcctccgacatggacaagaacagcggctccaacagctcctccgcctcttcgggcagcagcaaagggcaacagccgccccgctccgcctcggcggggccagccggcgagtctaaacccaagagcgatggaaagaactccagtggatccaagcgttataatcgcaaacgtgaactttcctaccccaaaaatgaaagttttaacaaccagtcccgtcgctccagttcacagaaaagcaagacttttaacaagatgcctcctcaaaggggcggcggcagcagcaaactctttagctcttcttttaatggtggaagacgagatgaggtagcagaggctcaacgggcagagtttagccctgcccagttctctggtcctaagaagatcaacctgaaccacttgttgaatttcacttttgaaccccgtggccagacgggtcactttgaaggcagtggacatggtagctggggaaagaggaacaagtggggacataagccttttaacaaggaactctttttacaggccaactgccaatttgtggtgtctgaagaccaagactacacagctcattttgctgatcctgatacattagttaactgggactttgtggaacaagtgcgcatttgtagccatgaagtgccatcttgcccaatatgcctctatccacctactgcagccaagataacccgttgtggacacatcttctgctgggcatgcatcctgcactatctttcactgagtgagaagacgtggagtaaatgtcccatctgttacagttctgtgcataagaaggatctcaagagtgttgttgccacagagtcacatcagtatgttgttggtgataccattacgatgcagctgatgaagagggagaaaggggtgttggtggctttgcccaaatccaaatggatgaatgtagaccatcccattcatctaggagatgaacagcacagccagtactccaagttgctgctggcctctaaggagcaggtgctgcaccgggtagttctggaggagaaagtagcactagagcagcagctggcagaggagaagcacactcccgagtcctgctttattgaggcagctatccaggagctcaagactcgggaagaggctctgtcgggattggccggaagcagaagggaggtcactggtgttgtggctgctctggaacaactggtgctgatggctcccttggcgaaggagtctgtttttcaacccaggaagggtgtgctggagtatctgtctgccttcgatgaagaaaccacggaagtttgttctctggacactccttctagacctcttgctctccctctggtagaagaggaggaagcagtgtctgaaccagagcctgaggggttgccagaggcctgtgatgacttggagttagcagatgacaatcttaaagaggggaccatttgcactgagtccagccagcaggaacccatcaccaagtcaggcttcacacgcctcagcagctctccttgttactacttttaccaagcggaagatggacagcatatgttcctgcaccctgtgaatgtgcgctgcctcgtgcgggagtacggcagcctggagaggagccccgagaagatctcagcaactgtggtggagattgctggctactccatgtctgaggatgttcgacagcgtcacagatatctctctcacttgccactcacctgtgagttcagcatctgtgaactggctttgcaacctcctgtggtctctaaggaaaccctagagatgttctcagatgacattgagaagaggaaacgtcagcgccaaaagaaggctcgggaggaacgccgccgagagcgcaggattgagatagaggagaacaagaaacagggcaagtacccagaagtccacattcccctcgagaatctacagcagtttcctgccttcaattcttatacctgctcctctgattctgctttgggtcccaccagcaccgagggccatggggccctctccatttctcctctcagcagaagtccaggttcccatgcagactttctgctgacccctctgtcacccactgccagtcagggcagtccctcattctgcgttgggagtctggaagaagactctcccttcccttcctttgcccagatgctgagggttggaaaagcaaaagcagatgtgtggcccaaaactgctccaaagaaagatgagaacagcttagttcctcctgcccctgtggacagcgacggggagagtgataattcagaccgtgttcctgtgcccagttttcaaaattccttcagccaagctattgaagcagccttcatgaaactggacacaccagctacttcagatcccctctctgaagagaaaggaggaaagaaaagaaaaaaacagaaacagaagctcctgttcagcacctcagtcgtccacaccaagtgacactactggcccaggctaccttctccatctggtttttgtttttgtttttttttcccccatgcttttgtttggctgctgtaatttttaagtatttgagtttgaacagattagctctggggggagggggtttccacaatgtgagggggaaccaagaaaattttaaatacagtgtattttccagcttcctgtctttacaccaaaataaagtattgacacaagagatctcttcctgccaaggtttttagttcattgccagtttagtctttttgacccatgtgtaattaatttttctcaacccaaagtaagattgagtcccctttgagatgcattagagcagtccaacccagaatggcacacactgctctgctgtagcatcatgtcagggcttcctggactcagtacacctctcagtttgtcttttaaaaaacagctgaatctttactacctatttagttctccttgttaaagaaacaggggtgggaataaaatggatttaggacacccagtttgaattgcagtttttttttttctgacacatggccaggctgtggtgccagcttaatggagtaggctgtccttggcacttgcatgtgtgaaaggagggttttgcctcttcttgagcatggcttgagttggtaaggaaagctgtaactcacgaagccctgagacctgctacccctaagatcgagcttgttttcagtgactggcttgagtcataggaggaggagtctggtacagctgcaggagagcagggccatctgaagcggtagcattgccaccatctccctctcatctagagcagttttcttatgccttggtttgagctgaatttgatgtgaattcttttgctgcttaataaagtgacctctaggtgcattagaatgcgaaggcaaatagttgcaataaatcacctgcacaagca

SEQ ID NO: 318135 - DNA, 3136 bp, Homo sapiens
ggccatatgttgcccctctggaggtgcttgtcaactaagaaaagcaagacttttaacaagatgcctcctcaaaggggcggcggcagcagcaaactctttagctcttcttttaatggtggaagacgagatgaggtagcagaggctcaacgggcagagtttagccctgcccagttctctggtcctaagaagatcaacctgaaccacttgttgaatttcacttttgaaccccgtggccagacgggtcactttgaaggcagtggacatggtagctggggaaagaggaacaagtggggacataagccttttaacaaggaactctttttacaggccaactgccaatttgtggtgtctgaagaccaagactacacagctcattttgctgatcctgatacattagttaactgggactttgtggaacaagtgcgcatttgtagccatgaagtgccatcttgcccaatatgcctctatccacctactgcagccaagataacccgttgtggacacatcttctgctgggcatgcatcctgcactatctttcactgagtgagaagacgtggagtaaatgtcccatctgttacagttctgtgcataagaaggatctcaagagtgttgttgccacagagtcacatcagtatgttgttggtgataccattacgatgcagctgatgaagagggagaaaggggtgttggtggctttgcccaaatccaaatggatgaatgtagaccatcccattcatctaggagatgaacagcacagccagtactccaagttgctgctggcctctaaggagcaggtgctgcaccgggtagttctggaggagaaagtagcactagagcagcagctggcagaggagaagcacactcccgagtcctgctttattgaggcagctatccaggagctcaagactcgggaagaggctctgtcgggattggccggaagcagaagggaggtcactggtgttgtggctgctctggaacaactggtgctgatggctcccttggcgaaggagtctgtttttcaacccaggaagggtgtgctggagtatctgtctgccttcgatgaagaaaccacggaagtttgttctctggacactccttctagacctcttgctctccctctggtagaagaggaggaagcagtgtctgaaccagagcctgaggggttgccagaggcctgtgatgacttggagttagcagatgacaatcttaaagaggggaccatttgcactgagtccagccagcaggaacccatcaccaagtcaggcttcacacgcctcagcagctctccttgttactacttttaccaagcggaagatggacagcatatgttcctgcaccctgtgaatgtgcgctgcctcgtgcgggagtacggcagcctggagaggagccccgagaagatctcagcaactgtggtggagattgctggctactccatgtctgaggatgttcgacagcgtcacagatatctctctcacttgccactcacctgtgagttcagcatctgtgaactggctttgcaacctcctgtggtctctaaggaaaccctagagatgttctcagatgacattgagaagaggaaacgtcagcgccaaaagaaggctcgggaggaacgccgccgagagcgcaggattgagatagaggagaacaagaaacagggcaagtacccagaagtccacattcccctcgagaatctacagcagtttcctgccttcaattcttatacctgctcctctgattctgctttgggtcccaccagcaccgagggccatggggccctctccatttctcctctcagcagaagtccaggttcccatgcagactttctgctgacccctctgtcacccactgccagtcagggcagtccctcattctgcgttgggagtctggaagaagactctcccttcccttcctttgcccagatgctgagggttggaaaagcaaaagcagatgtgtggcccaaaactgctccaaagaaagatgagaacagcttagttcctcctgcccctgtggacagcgacggggagagtgataattcagaccgtgttcctgtgcccagttttcaaaattccttcagccaagctattgaagcagccttcatgaaactggacacaccagctacttcagatcccctctctgaagagaaaggaggaaagaaaagaaaaaaacagaaacagaagctcctgttcagcacctcagtcgtccacaccaagtgacactactggcccaggctaccttctccatctggtttttgtttttgtttttttttcccccatgcttttgtttggctgctgtaatttttaagtatttgagtttgaacagattagctctggggggagggggtttccacaatgtgagggggaaccaagaaaattttaaatacagtgtattttccagcttcctgtctttacaccaaaataaagtattgacacaagagatctcttcctgccaaggtttttagttcattgccagtttagtctttttgacccatgtgtaattaatttttctcaacccaaagtaagattgagtcccctttgagatgcattagagcagtccaacccagaatggcacacactgctctgctgtagcatcatgtcagggcttcctggactcagtacacctctcagtttgtcttttaaaaaacagctgaatctttactacctatttagttctccttgttaaagaaacaggggtgggaataaaatggatttaggacacccagtttgaattgcagtttttttttttctgacacatggccaggctgtggtgccagcttaatggagtaggctgtccttggcacttgcatgtgtgaaaggagggttttgcctcttcttgagcatggcttgagttggtaaggaaagctgtaactcacgaagccctgagacctgctacccctaagatcgagcttgttttcagtgactggcttgagtcataggaggaggagtctggtacagctgcaggagagcagggccatctgaagcggtagcattgccaccatctccctctcatctagagcagttttcttatgccttggtttgagctgaatttgatgtgaattcttttgctgcttaataaagtgacctctaggtgcattagaatgcgaaggcaaatagttgcaataaatcacctgcacaagca

SEQ ID NO: 318136 - DNA, 3028 bp, Homo sapiens
ctgattcattctcattctctctaggtagcagaggctcaacgggcagagtttagccctgcccagttctctggtcctaagaagatcaacctgaaccacttgttgaatttcacttttgaaccccgtggccagacgggtcactttgaaggcagtggacatggtagctggggaaagaggaacaagtggggacataagccttttaacaaggaactctttttacaggccaactgccaatttgtggtgtctgaagaccaagactacacagctcattttgctgatcctgatacattagttaactgggactttgtggaacaagtgcgcatttgtagccatgaagtgccatcttgcccaatatgcctctatccacctactgcagccaagataacccgttgtggacacatcttctgctgggcatgcatcctgcactatctttcactgagtgagaagacgtggagtaaatgtcccatctgttacagttctgtgcataagaaggatctcaagagtgttgttgccacagagtcacatcagtatgttgttggtgataccattacgatgcagctgatgaagagggagaaaggggtgttggtggctttgcccaaatccaaatggatgaatgtagaccatcccattcatctaggagatgaacagcacagccagtactccaagttgctgctggcctctaaggagcaggtgctgcaccgggtagttctggaggagaaagtagcactagagcagcagctggcagaggagaagcacactcccgagtcctgctttattgaggcagctatccaggagctcaagactcgggaagaggctctgtcgggattggccggaagcagaagggaggtcactggtgttgtggctgctctggaacaactggtgctgatggctcccttggcgaaggagtctgtttttcaacccaggaagggtgtgctggagtatctgtctgccttcgatgaagaaaccacggaagtttgttctctggacactccttctagacctcttgctctccctctggtagaagaggaggaagcagtgtctgaaccagagcctgaggggttgccagaggcctgtgatgacttggagttagcagatgacaatcttaaagaggggaccatttgcactgagtccagccagcaggaacccatcaccaagtcaggcttcacacgcctcagcagctctccttgttactacttttaccaagcggaagatggacagcatatgttcctgcaccctgtgaatgtgcgctgcctcgtgcgggagtacggcagcctggagaggagccccgagaagatctcagcaactgtggtggagattgctggctactccatgtctgaggatgttcgacagcgtcacagatatctctctcacttgccactcacctgtgagttcagcatctgtgaactggctttgcaacctcctgtggtctctaaggaaaccctagagatgttctcagatgacattgagaagaggaaacgtcagcgccaaaagaaggctcgggaggaacgccgccgagagcgcaggattgagatagaggagaacaagaaacagggcaagtacccagaagtccacattcccctcgagaatctacagcagtttcctgccttcaattcttatacctgctcctctgattctgctttgggtcccaccagcaccgagggccatggggccctctccatttctcctctcagcagaagtccaggttcccatgcagactttctgctgacccctctgtcacccactgccagtcagggcagtccctcattctgcgttgggagtctggaagaagactctcccttcccttcctttgcccagatgctgagggttggaaaagcaaaagcagatgtgtggcccaaaactgctccaaagaaagatgagaacagcttagttcctcctgcccctgtggacagcgacggggagagtgataattcagaccgtgttcctgtgcccagttttcaaaattccttcagccaagctattgaagcagccttcatgaaactggacacaccagctacttcagatcccctctctgaagagaaaggaggaaagaaaagaaaaaaacagaaacagaagctcctgttcagcacctcagtcgtccacaccaagtgacactactggcccaggctaccttctccatctggtttttgtttttgtttttttttcccccatgcttttgtttggctgctgtaatttttaagtatttgagtttgaacagattagctctggggggagggggtttccacaatgtgagggggaaccaagaaaattttaaatacagtgtattttccagcttcctgtctttacaccaaaataaagtattgacacaagagatctcttcctgccaaggtttttagttcattgccagtttagtctttttgacccatgtgtaattaatttttctcaacccaaagtaagattgagtcccctttgagatgcattagagcagtccaacccagaatggcacacactgctctgctgtagcatcatgtcagggcttcctggactcagtacacctctcagtttgtcttttaaaaaacagctgaatctttactacctatttagttctccttgttaaagaaacaggggtgggaataaaatggatttaggacacccagtttgaattgcagtttttttttttctgacacatggccaggctgtggtgccagcttaatggagtaggctgtccttggcacttgcatgtgtgaaaggagggttttgcctcttcttgagcatggcttgagttggtaaggaaagctgtaactcacgaagccctgagacctgctacccctaagatcgagcttgttttcagtgactggcttgagtcataggaggaggagtctggtacagctgcaggagagcagggccatctgaagcggtagcattgccaccatctccctctcatctagagcagttttcttatgccttggtttgagctgaatttgatgtgaattcttttgctgcttaataaagtgacctctaggtgcattagaatgcgaaggcaaatagttgcaataaatcacctgcacaagca

SEQ ID NO: 318137 - DNA, 2696 bp, Homo sapiens
  misc_feature (14)..(14): n is a, c, g, or t
ggccgcgcggtgantcggacgaggctatccacctactgcagccaagataacccgttgtggacacatcttctgctgggcatgcatcctgcactatctttcactgagtgagaagacgtggagtaaatgtcccatctgttacagttctgtgcataagaaggatctcaagagtgttgttgccacagagtcacatcagtatgttgttggtgataccattacgatgcagctgatgaagagggagaaaggggtgttggtggctttgcccaaatccaaatggatgaatgtagaccatcccattcatctaggagatgaacagcacagccagtactccaagttgctgctggcctctaaggagcaggtgctgcaccgggtagttctggaggagaaagtagcactagagcagcagctggcagaggagaagcacactcccgagtcctgctttattgaggcagctatccaggagctcaagactcgggaagaggctctgtcgggattggccggaagcagaagggaggtcactggtgttgtggctgctctggaacaactggtgctgatggctcccttggcgaaggagtctgtttttcaacccaggaagggtgtgctggagtatctgtctgccttcgatgaagaaaccacggaagtttgttctctggacactccttctagacctcttgctctccctctggtagaagaggaggaagcagtgtctgaaccagagcctgaggggttgccagaggcctgtgatgacttggagttagcagatgacaatcttaaagaggggaccatttgcactgagtccagccagcaggaacccatcaccaagtcaggcttcacacgcctcagcagctctccttgttactacttttaccaagcggaagatggacagcatatgttcctgcaccctgtgaatgtgcgctgcctcgtgcgggagtacggcagcctggagaggagccccgagaagatctcagcaactgtggtggagattgctggctactccatgtctgaggatgttcgacagcgtcacagatatctctctcacttgccactcacctgtgagttcagcatctgtgaactggctttgcaacctcctgtggtctctaaggaaaccctagagatgttctcagatgacattgagaagaggaaacgtcagcgccaaaagaaggctcgggaggaacgccgccgagagcgcaggattgagatagaggagaacaagaaacagggcaagtacccagaagtccacattcccctcgagaatctacagcagtttcctgccttcaattcttatacctgctcctctgattctgctttgggtcccaccagcaccgagggccatggggccctctccatttctcctctcagcagaagtccaggttcccatgcagactttctgctgacccctctgtcacccactgccagtcagggcagtccctcattctgcgttgggagtctggaagaagactctcccttcccttcctttgcccagatgctgagggttggaaaagcaaaagcagatgtgtggcccaaaactgctccaaagaaagatgagaacagcttagttcctcctgcccctgtggacagcgacggggagagtgataattcagaccgtgttcctgtgcccagttttcaaaattccttcagccaagctattgaagcagccttcatgaaactggacacaccagctacttcagatcccctctctgaagagaaaggaggaaagaaaagaaaaaaacagaaacagaagctcctgttcagcacctcagtcgtccacaccaagtgacactactggcccaggctaccttctccatctggtttttgtttttgtttttttttcccccatgcttttgtttggctgctgtaatttttaagtatttgagtttgaacagattagctctggggggagggggtttccacaatgtgagggggaaccaagaaaattttaaatacagtgtattttccagcttcctgtctttacaccaaaataaagtattgacacaagagatctcttcctgccaaggtttttagttcattgccagtttagtctttttgacccatgtgtaattaatttttctcaacccaaagtaagattgagtcccctttgagatgcattagagcagtccaacccagaatggcacacactgctctgctgtagcatcatgtcagggcttcctggactcagtacacctctcagtttgtcttttaaaaaacagctgaatctttactacctatttagttctccttgttaaagaaacaggggtgggaataaaatggatttaggacacccagtttgaattgcagtttttttttttctgacacatggccaggctgtggtgccagcttaatggagtaggctgtccttggcacttgcatgtgtgaaaggagggttttgcctcttcttgagcatggcttgagttggtaaggaaagctgtaactcacgaagccctgagacctgctacccctaagatcgagcttgttttcagtgactggcttgagtcataggaggaggagtctggtacagctgcaggagagcagggccatctgaagcggtagcattgccaccatctccctctcatctagagcagttttcttatgccttggtttgagctgaatttgatgtgaattcttttgctgcttaataaagtgacctctaggtgcattagaatgcgaaggcaaatagttgcaataaatcacctgcacaagca

SEQ ID NO: 318138 - DNA, 2641 bp, Homo sapiens
  misc_feature (61)..(61): n is a, c, g, or t
ttatgcacagaactgtaacagatgggacatttactccacgtcttctcactcagtgaaaganagcaggatcatgcccagcagaagatgtgtccacaacgggttatcttggctgctgttgttgccacagagtcacatcagtatgttgttggtgataccattacgatgcagctgatgaagagggagaaaggggtgttggtggctttgcccaaatccaaatggatgaatgtagaccatcccattcatctaggagatgaacagcacagccagtactccaagttgctgctggcctctaaggagcaggtgctgcaccgggtagttctggaggagaaagtagcactagagcagcagctggcagaggagaagcacactcccgagtcctgctttattgaggcagctatccaggagctcaagactcgggaagaggctctgtcgggattggccggaagcagaagggaggtcactggtgttgtggctgctctggaacaactggtgctgatggctcccttggcgaaggagtctgtttttcaacccaggaagggtgtgctggagtatctgtctgccttcgatgaagaaaccacggaagtttgttctctggacactccttctagacctcttgctctccctctggtagaagaggaggaagcagtgtctgaaccagagcctgaggggttgccagaggcctgtgatgacttggagttagcagatgacaatcttaaagaggggaccatttgcactgagtccagccagcaggaacccatcaccaagtcaggcttcacacgcctcagcagctctccttgttactacttttaccaagcggaagatggacagcatatgttcctgcaccctgtgaatgtgcgctgcctcgtgcgggagtacggcagcctggagaggagccccgagaagatctcagcaactgtggtggagattgctggctactccatgtctgaggatgttcgacagcgtcacagatatctctctcacttgccactcacctgtgagttcagcatctgtgaactggctttgcaacctcctgtggtctctaaggaaaccctagagatgttctcagatgacattgagaagaggaaacgtcagcgccaaaagaaggctcgggaggaacgccgccgagagcgcaggattgagatagaggagaacaagaaacagggcaagtacccagaagtccacattcccctcgagaatctacagcagtttcctgccttcaattcttatacctgctcctctgattctgctttgggtcccaccagcaccgagggccatggggccctctccatttctcctctcagcagaagtccaggttcccatgcagactttctgctgacccctctgtcacccactgccagtcagggcagtccctcattctgcgttgggagtctggaagaagactctcccttcccttcctttgcccagatgctgagggttggaaaagcaaaagcagatgtgtggcccaaaactgctccaaagaaagatgagaacagcttagttcctcctgcccctgtggacagcgacggggagagtgataattcagaccgtgttcctgtgcccagttttcaaaattccttcagccaagctattgaagcagccttcatgaaactggacacaccagctacttcagatcccctctctgaagagaaaggaggaaagaaaagaaaaaaacagaaacagaagctcctgttcagcacctcagtcgtccacaccaagtgacactactggcccaggctaccttctccatctggtttttgtttttgtttttttttcccccatgcttttgtttggctgctgtaatttttaagtatttgagtttgaacagattagctctggggggagggggtttccacaatgtgagggggaaccaagaaaattttaaatacagtgtattttccagcttcctgtctttacaccaaaataaagtattgacacaagagatctcttcctgccaaggtttttagttcattgccagtttagtctttttgacccatgtgtaattaatttttctcaacccaaagtaagattgagtcccctttgagatgcattagagcagtccaacccagaatggcacacactgctctgctgtagcatcatgtcagggcttcctggactcagtacacctctcagtttgtcttttaaaaaacagctgaatctttactacctatttagttctccttgttaaagaaacaggggtgggaataaaatggatttaggacacccagtttgaattgcagtttttttttttctgacacatggccaggctgtggtgccagcttaatggagtaggctgtccttggcacttgcatgtgtgaaaggagggttttgcctcttcttgagcatggcttgagttggtaaggaaagctgtaactcacgaagccctgagacctgctacccctaagatcgagcttgttttcagtgactggcttgagtcataggaggaggagtctggtacagctgcaggagagcagggccatctgaagcggtagcattgccaccatctccctctcatctagagcagttttcttatgccttggtttgagctgaatttgatgtgaattcttttgctgcttaataaagtgacctctaggtgcattagaatgcgaaggcaaatagttgcaataaatcacctgcacaagca

SEQ ID NO: 318139 - DNA, 3723 bp, Homo sapiens
tctttgagatgctgtttggcgactcgtcgccattcccggagcaggtcggcctcggcccaggggcgagtatccgttgctgtgtcggagacactagtccccgacaccgagacagccagccctctcccctgcctcgcggcgggagagcgtgtccggccggccggccggcggggctcgcgcaacctccctcgcctccccttcccccgcagcctccgccccgccaggcccggcccggactcccgagccccggcctcctcgtcctcggtcgccgctgccgccgggcttaacagccccgtccgccgcttctcttcctagtttgagaagccaaggaaggaaacagggaaaaatgtcgccatgaaggccgagaaccgctgccgccgccgacccccgccggccctgaacgccatgagcctgggtccccgccgcgcccgctccgctccgactgccgtcgccgccgaggcccccgttgatgccgctgagctcccccaacgccgccgccaccgcctccgacatggacaagaacagcggctccaacagctcctccgcctcttcgggcagcagcaaagggcaacagccgccccgctccgcctcggcggggccagccggcgagtctaaacccaagagcgatggaaagaactccagtggatccaagcgttataatcgcaaacgtgaactttcctaccccaaaaatgaaagttttaacaaccagtcccgtcgctccagttcacagaaaagcaagacttttaacaagatgcctcctcaaaggggcggcggcagcagcaaactctttagctcttcttttaatggtggaagacgagatgaggtagcagaggctcaacgggcagagtttagccctgcccagttctctggtcctaagaagatcaacctgaaccacttgttgaatttcacttttgaaccccgtggccagacgggtcactttgaaggcagtggacatggtagctggggaaagaggaacaagtggggacataagccttttaacaaggaactctttttacaggccaactgccaatttgtggtgtctgaagaccaagactacacagctcattttgctgatcctgatacattagttaactgggactttgtggaacaagtgcgcatttgtagccatgaagtgccatcttgcccaatatgcctctatccacctactgcagccaagataacccgttgtggacacatcttctgctgggcatgcatcctgcactatctttcactgagtgagaagacgtggagtaaatgtcccatctgttacagttctgtgcataagaaggatctcaagagtgttgttgccacagagtcacatcagtatgttgttggtgataccattacgatgcagctgatgaagagggagaaaggggtgttggtggctttgcccaaatccaaatggatgaatgtagaccatcccattcatctaggagatgaacagcacagccagtactccaagttgctgctggcctctaaggagcaggtgctgcaccgggtagttctggaggagaaagtagcactagagcagcagctggcagaggagaagcacactcccgagtcctgctttattgaggcagctatccaggagctcaagactcgggaagaggctctgtcgggattggccggaagcagaagggaggtcactggtgttgtggctgctctggaacaactggtgctgatggctcccttggcgaaggagtctgtttttcaacccaggaagggtgtgctggagtatctgtctgccttcgatgaagaaaccacggaagtttgttctctggacactccttctagacctcttgctctccctctggtagaagaggaggaagcagtgtctgaaccagagcctgaggggttgccagaggcctgtgatgacttggagttagcagatgacaatcttaaagaggggaccatttgcactgagtccagccagcaggaacccatcaccaagtcaggcttcacacgcctcagcagctctccttgttactacttttaccaagcggaagatggacagcatatgttcctgcaccctgtgaatgtgcgctgcctcgtgcgggagtacggcagcctggagaggagccccgagaagatctcagcaactgtggtggagattgctggctactccatgtctgaggatgttcgacagcgtcacagatatctctctcacttgccactcacctgtgagttcagcatctgtgaactggctttgcaacctcctgtggtctctaaggaaaccctagagatgttctcagatgacattgagaagaggaaacgtcagcgccaaaagaaggctcgggaggaacgccgccgagagcgcaggattgagatagaggagaacaagaaacagggcaagtacccagaagtccacattcccctcgagaatctacagcagtttcctgccttcaattcttatacctgctcctctgattctgctttgggtcccaccagcaccgagggccatggggccctctccatttctcctctcagcagaagtccaggttcccatgcagatgctgagggttggaaaagcaaaagcagatgtgtggcccaaaactgctccaaagaaagatgagaacagcttagttcctcctgcccctgtggacagcgacggggagagtgataattcagaccgtgttcctgtgcccagttttcaaaattccttcagccaagctattgaagcagccttcatgaaactggacacaccagctacttcagatcccctctctgaagagaaaggaggaaagaaaagaaaaaaacagaaacagaagctcctgttcagcacctcagtcgtccacaccaagtgacactactggcccaggctaccttctccatctggtttttgtttttgtttttttttcccccatgcttttgtttggctgctgtaatttttaagtatttgagtttgaacagattagctctggggggagggggtttccacaatgtgagggggaaccaagaaaattttaaatacagtgtattttccagcttcctgtctttacaccaaaataaagtattgacacaagagatctcttcctgccaaggtttttagttcattgccagtttagtctttttgacccatgtgtaattaatttttctcaacccaaagtaagattgagtcccctttgagatgcattagagcagtccaacccagaatggcacacactgctctgctgtagcatcatgtcagggcttcctggactcagtacacctctcagtttgtcttttaaaaaacagctgaatctttactacctatttagttctccttgttaaagaaacaggggtgggaataaaatggatttaggacacccagtttgaattgcagtttttttttttctgacacatggccaggctgtggtgccagcttaatggagtaggctgtccttggcacttgcatgtgtgaaaggagggttttgcctcttcttgagcatggcttgagttggtaaggaaagctgtaactcacgaagccctgagacctgctacccctaagatcgagcttgttttcagtgactggcttgagtcataggaggaggagtctggtacagctgcaggagagcagggccatctgaagcggtagcattgccaccatctccctctcatctagagcagttttcttatgccttggtttgagctgaatttgatgtgaattcttttgctgcttaataaagtgacctctaggtgcattagaatgcgaaggcaaatagttgcaataaatcacctgcacaagca

SEQ ID NO: 318140 - DNA, 1787 bp, Homo sapiens
  misc_feature (2)..(2): n is a, c, g, or t
anggaccccgcagcttaagggctaccccctggagaggagccccgagaagatctcagcaactgtggtggagattgctggctactccatgtctgaggatgttcgacagcgtcacagatatctctctcacttgccactcacctgtgagttcagcatctgtgaactggctttgcaacctcctgtggtctctaaggaaaccctagagatgttctcagatgacattgagaagaggaaacgtcagcgccaaaagaaggctcgggaggaacgccgccgagagcgcaggattgagatagaggagaacaagaaacagggcaagtacccagaagtccacattcccctcgagaatctacagcagtttcctgccttcaattcttatacctgctcctctgattctgctttgggtcccaccagcaccgagggccatggggccctctccatttctcctctcagcagaagtccaggttcccatgcagactttctgctgacccctctgtcacccactgccagtcagggcagtccctcattctgcgttgggagtctggaagaagactctcccttcccttcctttgcccagatgctgagggttggaaaagcaaaagcagatgtgtggcccaaaactgctccaaagaaagatgagaacagcttagttcctcctgcccctgtggacagcgacggggagagtgataattcagaccgtgttcctgtgcccagttttcaaaattccttcagccaagctattgaagcagccttcatgaaactggacacaccagctacttcagatcccctctctgaagagaaaggaggaaagaaaagaaaaaaacagaaacagaagctcctgttcagcacctcagtcgtccacaccaagtgacactactggcccaggctaccttctccatctggtttttgtttttgtttttttttcccccatgcttttgtttggctgctgtaatttttaagtatttgagtttgaacagattagctctggggggagggggtttccacaatgtgagggggaaccaagaaaattttaaatacagtgtattttccagcttcctgtctttacaccaaaataaagtattgacacaagagatctcttcctgccaaggtttttagttcattgccagtttagtctttttgacccatgtgtaattaatttttctcaacccaaagtaagattgagtcccctttgagatgcattagagcagtccaacccagaatggcacacactgctctgctgtagcatcatgtcagggcttcctggactcagtacacctctcagtttgtcttttaaaaaacagctgaatctttactacctatttagttctccttgttaaagaaacaggggtgggaataaaatggatttaggacacccagtttgaattgcagtttttttttttctgacacatggccaggctgtggtgccagcttaatggagtaggctgtccttggcacttgcatgtgtgaaaggagggttttgcctcttcttgagcatggcttgagttggtaaggaaagctgtaactcacgaagccctgagacctgctacccctaagatcgagcttgttttcagtgactggcttgagtcataggaggaggagtctggtacagctgcaggagagcagggccatctgaagcggtagcattgccaccatctccctctcatctagagcagttttcttatgccttggtttgagctgaatttgatgtgaattcttttgctgcttaataaagtgacctctaggtgcattagaatgcgaaggcaaatagttgcaataaatcacctgcacaagca

SEQ ID NO: 318141 - DNA, 2980 bp, Homo sapiens
  misc_feature (2828)..(2828): n is a, c, g, or t
  misc_feature (2831)..(2831): n is a, c, g, or t
tctttgagatgctgtttggcgactcgtcgccattcccggagcaggtcggcctcggcccaggggcgagtatccgttgctgtgtcggagacactagtccccgacaccgagacagccagccctctcccctgcctcgcggcgggagagcgtgtccggccggccggccggcggggctcgcgcaacctccctcgcctccccttcccccgcagcctccgccccgccaggcccggcccggactcccgagccccggcctcctcgtcctcggtcgccgctgccgccgggcttaacagccccgtccgccgcttctcttcctagtttgagaagccaaggaaggaaacagggaaaaatgtcgccatgaaggccgagaaccgctgccgccgccgacccccgccggccctgaacgccatgagcctgggtccccgccgcgcccgctccgctccgactgccgtcgccgccgaggcccccgttgatgccgctgagctcccccaacgccgccgccaccgcctccgacatggacaagaacagcggctccaacagctcctccgcctcttcgggcagcagcaaagggcaacagccgccccgctccgcctcggcggggccagccggcgagtctaaacccaagagcgatggaaagaactccagtggatccaagcgttataatcgcaaacgtgaactttcctaccccaaaaatgaaagttttaacaaccagtcccgtcgctccagttcacagaaaagcaagacttttaacaagatgcctcctcaaaggggcggcggcagcagcaaactctttagctcttcttttaatggtggaagacgagatgaggtagcagaggctcaacgggcagagtttagccctgcccagttctctggtcctaagaagatcaacctgaaccacttgttgaatttcacttttgaaccccgtggccagacgggtcactttgaaggcagtggacatggtagctggggaaagaggaacaagtggggacataagccttttaacaaggaactctttttacaggccaactgccaatttgtggtgtctgaagaccaagactacacagctcattttgctgatcctgatacattagttaactgggactttgtggaacaagtgcgcatttgtagccatgaagtgccatcttgcccaatatgcctctatccacctactgcagccaagataacccgttgtggacacatcttctgctgggcatgcatcctgcactatctttcactgagtgagaagacgtggagtaaatgtcccatctgttacagttctgtgcataagaaggatctcaagagtgttgttgccacagagtcacatcagtatgttgttggtgataccattacgatgcagctgatgaagagggagaaaggggtgttggtggctttgcccaaatccaaatggatgaatgtagaccatcccattcatctaggagatgaacagcacagccagtactccaagttgctgctggcctctaaggagcaggtgctgcaccgggtagttctggaggagaaagtagcactagagcagcagctggcagaggagaagcacactcccgagtcctgctttattgaggcagctatccaggagctcaagactcgggaagaggctctgtcgggattggccggaagcagaagggaggtcactggtgttgtggctgctctggaacaactggtgctgatggctcccttggcgaaggagtctgtttttcaacccaggaagggtgtgctggagtatctgtctgccttcgatgaagaaaccacggaagtttgttctctggacactccttctagacctcttgctctccctctggtagaagaggaggaagcagtgtctgaaccagagcctgaggggttgccagaggcctgtgatgacttggagttagcagatgacaatcttaaagaggggaccatttgcactgagtccagccagcaggaacccatcaccaagtcaggcttcacacgcctcagcagctctccttgttactacttttaccaagcggaagatggacagcatatgttcctgcaccctgtgaatgtgcgctgcctcgtgcgggagtacggcagcctggagaggagccccgagaagatctcagcaactgtggtggagattgctggctactccatgtctgaggatgttcgacagcgtcacagatatctctctcacttgccactcacctgtgagttcagcatctgtgaactggctttgcaacctcctgtggtctctaaggaaaccctagagatgttctcagatgacattgagaagaggaaacgtcagcgccaaaagaaggctcgggaggaacgccgccgagagcgcaggattgagatagaggagaacaagaaacagggcaagtacccagaagtccacattcccctcgagaatctacagcagtttcctgccttcaattcttatacctgctcctctgattctgctttgggtcccaccagcaccgagggccatggggccctctccatttctcctctcagcagaagtccaggttcccatgcagactttctgctgacccctctgtcacccactgccagtcagggcagtccctcattctgcgttgggagtctggaagaagactctcccttcccttcctttgcccagatgctgagggttggaaaagcaaaagcagatgtgtggcccaaaactgctccaaagaaagatgagaacagcttagttcctcctgcccctgtggacagcgacggggagagtgataattcagaccgtgttcctgtgcccagttttcaaaattccttcagccaagctattgaagcagccttcatgaaactggacacaccagctacttcagatcccctctctgagnaangggggagcggcacaacgggtctgtccgccctgccccagtacatggccggacctcccggtggttggtccccgttgggcggctttcgggacaccggggggtcccgggccttggccttcctaaaaggcgccccctctgtgtggtttcttcgg

SEQ ID NO: 318142 - DNA, 2733 bp, Homo sapiens
  misc_feature (2728)..(2728): n is a, c, g, or t
tctttgagatgctgtttggcgactcgtcgccattcccggagcaggtcggcctcggcccaggggcgagtatccgttgctgtgtcggagacactagtccccgacaccgagacagccagccctctcccctgcctcgcggcgggagagcgtgtccggccggccggccggcggggctcgcgcaacctccctcgcctccccttcccccgcagcctccgccccgccaggcccggcccggactcccgagccccggcctcctcgtcctcggtcgccgctgccgccgggcttaacagccccgtccgccgcttctcttcctagtttgagaagccaaggaaggaaacagggaaaaatgtcgccatgaaggccgagaaccgctgccgccgccgacccccgccggccctgaacgccatgagcctgggtccccgccgcgcccgctccgctccgactgccgtcgccgccgaggcccccgttgatgccgctgagctcccccaacgccgccgccaccgcctccgacatggacaagaacagcggctccaacagctcctccgcctcttcgggcagcagcaaagggcaacagccgccccgctccgcctcggcggggccagccggcgagtctaaacccaagagcgatggaaagaactccagtggatccaagcgttataatcgcaaacgtgaactttcctaccccaaaaatgaaagttttaacaaccagtcccgtcgctccagttcacagaaaagcaagacttttaacaagatgcctcctcaaaggggcggcggcagcagcaaactctttagctcttcttttaatggtggaagacgagatgaggtagcagaggctcaacgggcagagtttagccctgcccagttctctggtcctaagaagatcaacctgaaccacttgttgaatttcacttttgaaccccgtggccagacgggtcactttgaaggcagtggacatggtagctggggaaagaggaacaagtggggacataagccttttaacaaggaactctttttacaggccaactgccaatttgtggtgtctgaagaccaagactacacagctcattttgctgatcctgatacattagttaactgggactttgtggaacaagtgcgcatttgtagccatgaagtgccatcttgcccaatatgcctctatccacctactgcagccaagataacccgttgtggacacatcttctgctgggcatgcatcctgcactatctttcactgagtgagaagacgtggagtaaatgtcccatctgttacagttctgtgcataagaaggatctcaagagtgttgttgccacagagtcacatcagtatgttgttggtgataccattacgatgcagctgatgaagagggagaaaggggtgttggtggctttgcccaaatccaaatggatgaatgtagaccatcccattcatctaggagatgaacagcacagccagtactccaagttgctgctggcctctaaggagcaggtgctgcaccgggtagttctggaggagaaagtagcactagagcagcagctggcagaggagaagcacactcccgagtcctgctttattgaggcagctatccaggagctcaagactcgggaagaggctctgtcgggattggccggaagcagaagggaggtcactggtgttgtggctgctctggaacaactggtgctgatggctcccttggcgaaggagtctgtttttcaacccaggaagggtgtgctggagtatctgtctgccttcgatgaagaaaccacggaagtttgttctctggacactccttctagacctcttgctctccctctggtagaagaggaggaagcagtgtctgaaccagagcctgaggggttgccagaggcctgtgatgacttggagttagcagatgacaatcttaaagaggggaccatttgcactgagtccagccagcaggaacccatcaccaagtcaggcttcacacgcctcagcagctctccttgttactacttttaccaagcggaagatggacagcatatgttcctgcaccctgtgaatgtgcgctgcctcgtgcgggagtacggcagcctggagaggagccccgagaagatctcagcaactgtggtggagattgctggctactccatgtctgaggatgttcgacagcgtcacagatatctctctcacttgccactcacctgtgagttcagcatctgtgaactggctttgcaacctcctgtggtctctaaggaaaccctagagatgttctcagatgacattgagaagaggaaacgtcagcgccaaaagaaggctcgggaggaacgccgccgagagcgcaggattgagatagaggagaacaagaaacagggcaagtacccagaagtccacattcccctcgagaatctacagcagtttcctgccttcaattcttatacctgctcctctgattctgctttgggtcccaccagcaccgagggccatggggccctctccatttctcctctcagcagaagtccaggttcccatgcagatgctgaggggttggaaaagcaaagcagatgtgttggccaaactggtccagaagatgagaccgtattccctgccctgtggaaggggggagatgtattcgacgggccgggccgtttaatctcccattgtagctttgaagggaccttaccctgaaagggggaaaaaaaacgtttcctccagaagcgcgcccctgtggtcccgggcttaacggggggaagtcanaaagt

SEQ ID NO: 318143 - DNA, 1335 bp, Homo sapiens
gcggccgctccaacatcagaatgagggactgccctgactggcagtgggtgacagagggcagtccctcattctgcgttgggagtctggaagaagactctcccttcccttcctttgcccagatgctgagggttggaaaagcaaaagcagatgtgtggcccaaaactgctccaaagaaagatgagaacagcttagttcctcctgcccctgtggacagcgacggggagagtgataattcagaccgtgttcctgtgcccagttttcaaaattccttcagccaagctattgaagcagccttcatgaaactggacacaccagctacttcagatcccctctctgaagagaaaggaggaaagaaaagaaaaaaacagaaacagaagctcctgttcagcacctcagtcgtccacaccaagtgacactactggcccaggctaccttctccatctggtttttgtttttgtttttttttcccccatgcttttgtttggctgctgtaatttttaagtatttgagtttgaacagattagctctggggggagggggtttccacaatgtgagggggaaccaagaaaattttaaatacagtgtattttccagcttcctgtctttacaccaaaataaagtattgacacaagagatctcttcctgccaaggtttttagttcattgccagtttagtctttttgacccatgtgtaattaatttttctcaacccaaagtaagattgagtcccctttgagatgcattagagcagtccaacccagaatggcacacactgctctgctgtagcatcatgtcagggcttcctggactcagtacacctctcagtttgtcttttaaaaaacagctgaatctttactacctatttagttctccttgttaaagaaacaggggtgggaataaaatggatttaggacacccagtttgaattgcagtttttttttttctgacacatggccaggctgtggtgccagcttaatggagtaggctgtccttggcacttgcatgtgtgaaaggagggttttgcctcttcttgagcatggcttgagttggtaaggaaagctgtaactcacgaagccctgagacctgctacccctaagatcgagcttgttttcagtgactggcttgagtcataggaggaggagtctggtacagctgcaggagagcagggccatctgaagcggtagcattgccaccatctccctctcatctagagcagttttcttatgccttggtttgagctgaatttgatgtgaattcttttgctgcttaataaagtgacctctaggtgcattagaatgcgaaggcaaatagttgcaataaatcacctgcacaagca

SEQ ID NO: 318144 - DNA, 2924 bp, Homo sapiens
  misc_feature (2849)..(2850): n is a, c, g, or t
tctttgagatgctgtttggcgactcgtcgccattcccggagcaggtcggcctcggcccaggggcgagtatccgttgctgtgtcggagacactagtccccgacaccgagacagccagccctctcccctgcctcgcggcgggagagcgtgtccggccggccggccggcggggctcgcgcaacctccctcgcctccccttcccccgcagcctccgccccgccaggcccggcccggactcccgagccccggcctcctcgtcctcggtcgccgctgccgccgggcttaacagccccgtccgccgcttctcttcctagtttgagaagccaaggaaggaaacagggaaaaatgtcgccatgaaggccgagaaccgctgccgccgccgacccccgccggccctgaacgccatgagcctgggtccccgccgcgcccgctccgctccgactgccgtcgccgccgaggcccccgttgatgccgctgagctcccccaacgccgccgccaccgcctccgacatggacaagaacagcggctccaacagctcctccgcctcttcgggcagcagcaaagggcaacagccgccccgctccgcctcggcggggccagccggcgagtctaaacccaagagcgatggaaagaactccagtggatccaagcgttataatcgcaaacgtgaactttcctaccccaaaaatgaaagttttaacaaccagtcccgtcgctccagttcacagaaaagcaagacttttaacaagatgcctcctcaaaggggcggcggcagcagcaaactctttagctcttcttttaatggtggaagacgagatgaggtagcagaggctcaacgggcagagtttagccctgcccagttctctggtcctaagaagatcaacctgaaccacttgttgaatttcacttttgaaccccgtggccagacgggtcactttgaaggcagtggacatggtagctggggaaagaggaacaagtggggacataagccttttaacaaggaactctttttacaggccaactgccaatttgtggtgtctgaagaccaagactacacagctcattttgctgatcctgatacattagttaactgggactttgtggaacaagtgcgcatttgtagccatgaagtgccatcttgcccaatatgcctctatccacctactgcagccaagataacccgttgtggacacatcttctgctgggcatgcatcctgcactatctttcactgagtgagaagacgtggagtaaatgtcccatctgttacagttctgtgcataagaaggatctcaagagtgttgttgccacagagtcacatcagtatgttgttggtgataccattacgatgcagctgatgaagagggagaaaggggtgttggtggctttgcccaaatccaaatggatgaatgtagaccatcccattcatctaggagatgaacagcacagccagtactccaagttgctgctggcctctaaggagcaggtgctgcaccgggtagttctggaggagaaagtagcactagagcagcagctggcagaggagaagcacactcccgagtcctgctttattgaggcagctatccaggagctcaagactcgggaagaggctctgtcgggattggccggaagcagaagggaggtcactggtgttgtggctgctctggaacaactggtgctgatggctcccttggcgaaggagtctgtttttcaacccaggaagggtgtgctggagtatctgtctgccttcgatgaagaaaccacggaagtttgttctctggacactccttctagacctcttgctctccctctggtagaagaggaggaagcagtgtctgaaccagagcctgaggggttgccagaggcctgtgatgacttggagttagcagatgacaatcttaaagaggggaccatttgcactgagtccagccagcaggaacccatcaccaagtcaggcttcacacgcctcagcagctctccttgttactacttttaccaagcggaagatggacagcatatgttcctgcaccctgtgaatgtgcgctgcctcgtgcgggagtacggcagcctggagaggagccccgagaagatctcagcaactgtggtggagattgctggctactccatgtctgaggatgttcgacagcgtcacagatatctctctcacttgccactcacctgtgagttcagcatctgtgaactggctttgcaacctcctgtggtctctaaggaaaccctagagatgttctcagatgacattgagaagaggaaacgtcagcgccaaaagaaggctcgggaggaacgccgccgagagcgcaggagtctcaggttcccatgcagactttctgctgacccctctgtcacccactgccagtcagggcagtccctcattctgcgttgggagtctggaagaagactctcccttcccttcctttgcccagatgctgagggttggaaaagcaaaagcagatgtgtggcccaaaactgctccaaagaaagatgagaacagcttagttcctcctgcccctgtggacagcgacggggagagtgataattcagaccgtgttcctgtgcccagttttcaaaattccttcagccaagctattgaagcagccttcatgaaactggacacaccagctacttcagatcccctctctgaagagaaaggaggaaagaaaagaaaaaaacagaaacagaagctcctgttcagcacctcagtcgtccacaccaagtgacactactggcccaggctaccttctccatctggtttttgtttttgtttttttttcccccatgcttttgtttggctgctgtaatttttaagtatttgagtttgaacagattaaacttgnnacctaacacatccaatcctcaaatcttaacccttatctctatccacaatccccccctttcgccctttcctcgct

SEQ ID NO: 318145 - DNA, 2385 bp, Homo sapiens
aacataggctaggtcgaggctgggtgttaatcggccgagggactcgtcgccattcccggagcaggtcggcctcggcccaggggcgagtatccgttgctgtgtcggagacactagtccccgacaccgagacagccagccctctcccctgcctcgcggcgggagagcgtgtccggccggccggccggcggggctcgcgcaacctccctcgcctccccttcccccgcagcctccgccccgccaggcccggcccggactcccgagccccggtctcctcgtcctcggtcgccgctgccgccgggcttaacagccccgtccgccgcttctcttcctagtttgagaagccaaggaaggaaacagggaaaaatgtcgccatgaaggccgagaaccgctgccgccgccgacccccgccggccctgaacgccatgagcctgggtccccgccgcgcccgctccgctccgactgccgtcgccgccgaggcccccgttgatgccgctgagctcccccaacgccgccgccaccgcctccgacatggacaagaacagcggctccaacagctcctccgcctcttcgggcagcagcaaagggcaacagccgccccgctccgcctcggcggggccagccggcgagtctaaacccaagagcgatggaaagaactccagtggatccaagcgttataatcgcaaacgtgaactttcctaccccaaaaatgaaagttttaacaaccagtcccgtcgctccagttcacagaaaagcaagacttttaacaagatgcctcctcaaaggggcggcggcagcagcaaactctttagctcttcttttaatggtggaagacgagatgaggtagcagaggctcaacgggcagagtttagccctgcccagttctctggtcctaagaagatcaacctgaaccacttgttgaatttcacttttgaaccccgtggccagacgggtcactttgaaggcagtggacatggtagctggggaaagaggaacaagtggggacataagccttttaacaaggaactctttttacaggccaactgccaatttgtggtgtctgaagaccaagactacacagctcattttgctgatcctgatacattagttaactgggactttgtggaacaagtgcgcatttgtagccatgaagtgccatcttgcccaatatgcctctatccacctactgcagccaagataacccgttgtggacacatcttctgctgggcatgcatcctgcactatctttcactgagtgagaagacgtggagtaaatgtcccatctgttacagttctgtgcataagaaggatctcaagagtgttgttgccacagagtcacatcagtatgttgttggtgataccattacgatgcagctgatgaagagggagaaaggggtgttggtggctttgcccaaatccaaatggatgaatgtagaccatcccattcatctaggagatgaacagcacagccagtactccaagttgctgctggcctctaaggagcaggtgctgcaccgggtagttctggaggagaaagtagcactagagcagcagctggcagaggagaagcacactcccgagtcctgctttattgaggcagctatccaggagctcaagactcgggaagaggctctgtcgggattggccggaagcagaagggaggtcactggtgttgtggctgctctggaacaactggtgctgatggctcccttggcgaaggagtctgtttttcaacccaggaaggttagtgtgttcctgttactaagtggctgccgttcctcaaatgctgtcattgagctggtaggcattactgtgagatctaaaccttctcaagagaagaggggacaatgagtattttctgtatgcttgttattagttctttccccaggggtgttaaatcagtgaacacgacagctaagataaacatctagggagcttggctcttaggtctgcatttgccacattgctttcggaaagcaggagatatcctttctgttgacttagagtttgctgcaggtgtgctggagtatctgtctgccttcgatgaagaaaccacggaagtttgttctctggacactccttctagacctcttgctctccctctggtagaagaggaggaagcagtgtctgaaccagagcctgaggggttgccagaggcctgtgatgacttggagttagcagatgacaatcttaaagaggggaccatttgcactgagtccagccagcaggaacccatcaccaagtcaggcttcacacgcctcagcagctctccttgttactacttttaccaaggtgagggtgccggaagagagggctgggttgccgcagaggtgtttcagaggtgacccggtgctctaagcagaggagcgccactagatcctgtggctt

SEQ ID NO: 318146 - DNA, 845 bp, Homo sapiens
ttttaaactactgcatcaggaaatattgtaaaacagttttgccttgaatatttgtgatgaaatctacgatgatcttcaagattctcttaattttgctaatattcagctgatcagaatttgtttttaaaatgtctggctggtgggtacttcccactgacaactgcttattgcttacagtatgtctgccttgtcaatgaatgaggttcagggtgcttcctagggatcagagtcagtaccatttttctctttcatctacagctgatcagatgtttattttacttacattaaatgaatgatggagatccaaagtgaatattatagaatattattctaggatcaacatcttttgctttgaaaaatcaacatctcttggcttttcctcagccaacccagcaaacagagattatcagactctgttgattttttactttcatttggcattggcctttttcttactgaaattaaaaaggctaatgatttgcctggtttctgtctctgacctttgcaggtctattttcttaatttttagatactatatatctgaaactttttttaatgtgtcaactttttaatggatagaaaatagacacgaatagtgattatgtgttcatttttcaattttccagaaaataactgaagtgaagtgatggactccgatttggagagtagtaagacgtgaaaggaatacacttgtgtttaagcaccatggccttgatgattcactgttggggagaagaaacaagaaaagtaactggttgtcacctatgagacccttacgtgattgttagttaagtttttattcaaagcagctgtaatttagttaataaaataattatgatctatgt

SEQ ID NO: 318147 - DNA, 277 bp, Homo sapiens
tagtgcaggtggctagtatttgttcgaactatacacctgcgtgacactcatataatcgagaataactgaagtgaagtgatggactccgatttggagagtagtaagacgtgaaaggaatacacttgtgtttaagcaccatggccttgatgattcactgttggggagaagaaacaagaaaagtaactggttgtcacctatgagacccttacgtgattgttagttaagtttttattcaaagcagctgtaatttagttaataaaataattatgatctatgt

SEQ ID NO: 318148 - DNA, 265 bp, Homo sapiens
gtaggaatgaagctcatgcttttttatgtaacgagccccccacctcagaataactgaagtgaagtgatggactccgatttggagagtagtaagacgtgaaaggaatacacttgtgtttaagcaccatggccttgatgattcactgttggggagaagaaacaagaaaagtaactggttgtcacctatgagacccttacgtgattgttagttaagtttttattcaaagcagctgtaatttagttaataaaataattatgatctatgt

SEQ ID NO: 318149 - DNA, 395 bp, Homo sapiens
ttttgactgtaggatttactgcttactacgtaatttaaatattagcatatataagttttactataaaatgacatgacataaattatatttttatgtaaatatattttaaatatttttcagaaagctgtagaggaaccccttaatgcattcaaagaatcaaaaggaatgatgaatgatgaataactgaagtgaagtgatggactccgatttggagagtagtaagacgtgaaaggaatacacttgtgtttaagcaccatggccttgatgattcactgttggggagaagaaacaagaaaagtaactggttgtcacctatgagacccttacgtgattgttagttaagtttttattcaaagcagctgtaatttagttaataaaataattatgatctatgt

SEQ ID NO: 318150 - DNA, 280 bp, Homo sapiens
tatatcgtattacaatattttatctttaaggacgctaaaaaaaaaccttatgatggaaacgagaataactgaagtgaagtgatggactccgatttggagagtagtaagacgtgaaaggaatacacttgtgtttaagcaccatggccttgatgattcactgttggggagaagaaacaagaaaagtaactggttgtcacctatgagacccttacgtgattgttagttaagtttttattcaaagcagctgtaatttagttaataaaataattatgatctatgt

SEQ ID NO: 318151 - DNA, 271 bp, Homo sapiens
aatgcggtatgaccgtaggtttactgttagaaagaacagccccaccccccttataataactgaagtgaagtgatggactccgatttggagagtagtaagacgtgaaaggaatacacttgtgtttaagcaccatggccttgatgattcactgttggggagaagaaacaagaaaagtaactggttgtcacctatgagacccttacgtgattgttagttaagtttttattcaaagcagctgtaatttagttaataaaataattatgatctatgt

SEQ ID NO: 318152 - DNA, 279 bp, Homo sapiens
  misc_feature (43)..(43): n is a, c, g, or t
  misc_feature (45)..(46): n is a, c, g, or t
tacgcaataatattggtccctgtctgcgtgacaagaagcccanannccctagtagacacgagaataactgaagtgaagtgatggactccgatttggagagtagtaagacgtgaaaggaatacacttgtgtttaagcaccatggccttgatgattcactgttggggagaagaaacaagaaaagtaactggttgtcacctatgagacccttacgtgattgttagttaagtttttattcaaagcagctgtaatttagttaataaaataattatgatctatgt

SEQ ID NO: 318153 - DNA, 273 bp, Homo sapiens
gatgcagaagtccaaggtgtaaacaaggtgcagtggcgggcccctcagataccgagaataactgaagtgaagtgatggactccgatttggagagtagtaagacgtgaaaggaatacacttgtgtttaagcaccatggccttgatgattcactgttggggagaagaaacaagaaaagtaactggttgtcacctatgagacccttacgtgattgttagttaagtttttattcaaagcagctgtaatttagttaataaaataattatgatctatgt

SEQ ID NO: 318154 - DNA, 264 bp, Homo sapiens
agttagtatgcggtttctattaaggttgaacgacgctgctctccctcaataactgaagtgaagtgatggactccgatttggagagtagtaagacgtgaaaggaatacacttgtgtttaagcaccatggccttgatgattcactgttggggagaagaaacaagaaaagtaactggttgtcacctatgagacccttacgtgattgttagttaagtttttattcaaagcagctgtaatttagttaataaaataattatgatctatgt

SEQ ID NO: 318155 - DNA, 1293 bp, Homo sapiens
agaggttggcttcttgtttggatacaaggaccaagtcactcccccaggttcctccacagtaagggaggcctatttaaagccgcccatggcactaacagaaactggactcctatgagctcagatacataactgggcctcacaggggtgggacagtatgtagtctaggaattggaaggatccattccatatcaaagaactgaagcatcgtgttgccctctcagcagcaagagtaaggtgatgcccctgtcagttatagttcctgagttcctctgtctttgattctttgcctattagccagctagctcaccctcttgtttatgccactgttttttatcctattcatgccttctcacagacaacttttcttacctacagctttggactcatccttgtctcctttctgtttctttttcactttcccttcccatcaccaactttctgggtttttttctgtttcttcttagagtccagtggcagggagaaacttgtcagtccagtctgttgccatttttcctgtttgagaaagactcaccagcttttggctggctcacagattggctttccttgggtcaggacccacccttttccctgccagctttggaagcttgacagaattcgagtgtgcagtggtggtaaataaatagtaaggaacacagagcagtcctggaggcgtgcctccatctgctgatgagaaaatccagtgctgtcatccagcccaggtcccagcggaatgggcctctctgttcagtaggatccccctcctgctgagtggttcatggcatgtttctgttcaacgcttttccatctgtaggattcttattctgtatttatttgttgttttgggtttttttattttttgagatggagtctcgctctgtcgcccaggctggagtgcagtggcacgaccccagctcgctgcagcctctgcctcccaggacgagggagatcctcccacctcagccttccacgtagctgggactacaggcatgcaccacaggcatgcaccaccacgccagctaattttagtattttggtagagacagggttgcatcatgttgcccaggctggtcttgaatgcctgagctcaagcaatctatttgccttggcctcccaaagtgctgggattacaggcatgagccaccacggccagccttctcatttgttttttttataaggaagctatctcttcttccctccccaactagggtattctttttccctttcgtcactttgctttctgtctgcaccattgggcttgaaaactttgatcaggaagctgtcagacctgtaccg

SEQ ID NO: 318156 - DNA, 677 bp, Homo sapiens
cgggaggctgaggcaggagaattgcttgaacccggaaggcagatgttgcagtgagttgagatcatgccaccgcactccagcctggtgacagagtgagactctgtctcaaaaaaaataaaaaagaattatgaatattacttttataatattctcaccactgggaaaaatgcactattctgtgtctaagtagctgcttaccttaaccaagtgatatttgggcaaggggatcgttgccttttgctactggttgagacgaagcatggcaccccctagtagagaaggatcccaattacttccaatttgtgatgtacacattttagaaagatacaggctattgccacagagatagaccaaaacatctcattttctttctttgtaaacctagatctgatttcccaactaagtctgtttcctttgtgaatgctgtgggtatgatccacagaaaggctacataatgaaatgatagctttacaattaatttggctgtagagttgtagactagttagcatatcattgcatatttgtttatttagaaatgatttccaattgtggaacctcactaactgcctgcttggcttgttactaatcctagcattcaaagaatcaaaaggaatgatgaatgatggtaagtataaaatgcacttaataattatagatcagttaaaacatggacattg

SEQ ID NO: 318157 - DNA, 310 bp, Homo sapiens
ttttgactgtaggatttactgcttactacgtaatttaaatattagcatatataagttttactataaaatgacatgacataaattatatttttatgtaaatatattttaaatatttttcagaaagctgtagaggaaccccttaatggtatgtggttatttcactcttaatcctttaccagatcataatttgatctggcccgcaaaacagttagaatgccctgtctatgccttaggaagaatctaggtttttttcctctttttttctttccttggcatctctactcttgattattcatcaagaattatgggc

SEQ ID NO: 318158 - DNA, 5016 bp, Homo sapiens
gcgggcggggagcaggcgggggagcgggcgggaagcagtgggagcgcgcgtgcgcgcggccgtgcagcctgggcagtgggtcctgcctgtgacgcgcggcggcggtcggtcctgcctgtaacggcggcggcggctgctgctccagacacctgcggcggcggcggcgaccccgcggcgggcgcggagatgtggcccctggtagcggcgctgttgctgggctcggcgtgctgcggatcagctcagctactatttaataaaacaaaatctgtagaattcacgttttgtaatgacactgtcgtcattccatgctttgttactaatatggaggcacaaaacactactgaagtatacgtaaagtggaaatttaaaggaagagatatttacacctttgatggagctctaaacaagtccactgtccccactgactttagtagtgcaaaaattgaagtctcacaattactaaaaggagatgcctctttgaagatggataagagtgatgctgtctcacacacaggaaactacacttgtgaagtaacagaattaaccagagaaggtgaaacgatcatcgagctaaaatatcgtgttgtttcatggttttctccaaatgaaaatattcttattgttattttcccaatttttgctatactcctgttctggggacagtttggtattaaaacacttaaatatagatccggtggtatggatgagaaaacaattgctttacttgttgctggactagtgatcactgtcattgtcattgttggagccattcttttcgtcccaggtgaatattcattaaagaatgctactggccttggtttaattgtgacttctacagggatattaatattacttcactactatgtgtttagtacagcgattggattaacctccttcgtcattgccatattggttattcaggtgatagcctatatcctcgctgtggttggactgagtctctgtattgcggcgtgtataccaatgcatggccctcttctgatttcaggtttgagtatcttagctctagcacaattacttggactagtttatatgaaatttgtggcttccaatcagaagactatacaacctcctaggaataactgaagtgaagtgatggactccgatttggagagtagtaagacgtgaaaggaatacacttgtgtttaagcaccatggccttgatgattcactgttggggagaagaaacaagaaaagtaactggttgtcacctatgagacccttacgtgattgttagttaagtttttattcaaagcagctgtaatttagttaataaaataattatgatctatgttgtttgcccaattgagatccagttttttgttgttatttttaatcaattaggggcaatagtagaatggacaatttccaagaatgatgcctttcaggtcctagggcctctggcctctaggtaaccagtttaaattggttcagggtgataactacttagcactgccctggtgattacccagagatatctatgaaaaccagtggcttccatcaaacctttgccaactcaggttcacagcagctttgggcagttatggcagtatggcattagctgagaggtgtctgccacttctgggtcaatggaataataaattaagtacaggcaggaatttggttgggagcatcttgtatgatctccgtatgatgtgatattgatggagatagtggtcctcattcttgggggttgccattcccacattcccccttcaacaaacagtgtaacaggtccttcccagatttagggtacttttattgatggatatgttttccttttattcacataaccccttgaaaccctgtcttgtcctcctgttatttgcttctgctgtacaagatgtagcaccttttctcctctttgaacatggtctagtgacacggtagcaccagttgcaggaaggagccagacttgttctcagagcactgtgttcacacttttcagcaaaaatagctatggttgtgacatatgtattcccttcctctgatttgaaggcaaaaatctacagtgtttcttcacttcttttctgatctggggcatgaaaaaagcaagattgaaatttgaactatgagtctcctgcatggcaacaaaatgtgtgtcaccatcaggccaacaggccagcccttgaatggggatttattactgttgtatctatgttgcatgataaacattcatcaccttcctcctgtagtcctgcctcgtactccccttcccctatgattgaaaagtaaacaaaacccacatttcctatcctggttagaagaaaattaatgttctgacagttgtgatcgcctggagtacttttagacttttagcattcgttttttacctgtttgtggatgtgtgtttgtatgtgcatacgtatgagataggcacatgcatcttctgtatggacaaaggtggggtacctacaggagagcaaaggttaattttgtgcttttagtaaaaacatttaaatacaaagttctttattgggtggaattatatttgatgcaaatatttgatcacttaaaacttttaaaacttctaggtaatttgccacgctttttgactgctcaccaataccctgtaaaaatacgtaattcttcctgtttgtgtaataagatattcatatttgtagttgcattaataatagttatttcttagtccatcagatgttcccgtgtgcctcttttatgccaaattgattgtcatatttcatgttgggaccaagtagtttgcccatggcaaacctaaatttatgacctgctgaggcctctcagaaaactgagcatactagcaagacagctcttcttgatatgtatatacacacatgtatattcttccttgattgtgtagctgtccaaaataataacatatatagagggagctgtattcctttatacaaatctgatggctcctgcagcactttttccttctgaaaatatttacattttgctaacctagtttgttactttaaaaatcagttttgatgaaaggagggaaaagcagatggacttgaaaaagatccaagctcctattagaaaaggtatgaaaatctttatagtaaaattttttataaactaaagttgtaccttttaatatgtagtaaactctcatttatttggggttcgctcttggatctcatccatccattgtgttctctttaatgctgcctgccttttgaggcattcactgccctagacaatgccaccagagatagtgggggaaatgccagatgaaaccaactcttgctctcactagttgtcagcttctctggataagtgaccacagaagcaggagtcctcctgcttgggcatcattgggccagttccttctctttaaatcagatttgtaatggctcccaaattccatcacatcacatttaaattgcagacagtgttttgcacatcatgtatctgttttgtcccataatatgctttttactccctgatcccagtttctgctgttgactcttccattcagttttatttattgtgtgttctcacagtgacaccatttgtccttttctgcaacaacctttccagctacttttgccaaattctatttgtcttctccttcaaaacattctcctttgcagttcctcttcatctgtgtagctgctcttttgtctcttaacttaccattcctatagtactttatgcatctctgcttagttctattagttttttggccttgctcttctccttgattttaaaattccttctatagctagagcttttctttctttcattctctcttcctgcagtgttttgcatacatcagaagctaggtacataagttaaatgattgagagttggctgtatttagatttatcactttttaatagggtgagcttgagagttttctttctttctgtttttttttttttttttttgactaatttcacatgctctaaaaaccttcaaaggtgattatttttctcctggaaactccaggtccattctgtttaaatccctaagaatgtcagaattaaaataacagggctatcccgtaattggaaatatttcttttttcaggatgctatagtcaatttagtaagtgaccaccaaattgttatttgcactaacaaagctcaaaacacgataagtttactcctccatctcagtaataaaaattaagctgtaatcaaccttctaggtttctcttgtcttaaaatgggtattcaaaaatggggatctgtggtgtatgtatggaaacacatactccttaatttacctgttgttggaaactggagaaatgattgtcgggcaaccgtttattttttattgtattttatttggttgagggatttttttataaacagttttacttgtgtcatattttaaaattactaactgccatcacctgctggggtcctttgttaggtcattttcagtgactaatagggataatccaggtaactttgaagagatgagcagtgagtgaccaggcagtttttctgcctttagctttgacagttcttaattaagatcattgaagaccagctttctcataaatttctctttttgaaaaaaagaaagcatttgtactaagctcctctgtaagacaacatcttaaatcttaaaagtgttgttatcatgactggtgagagaagaaaacattttgtttttattaaatggagcattatttacaaaaagccattgttgagaattagatcccacatcgtataaatatctattaaccattctaaataaagagaactccagtgttgctatgtgcaagatcctctcttggagcttttttgcatagcaattaaaggtgtgctatttgtcagtagccatttttttgcagtgatttgaagaccaaagttgttttacagctgtgttaccgttaaaggtttttttttttatatgtattaaatcaatttatcactgtttaaagctttgaatatctgcaatctttgccaaggtacttttttatttaaaaaaaaacataactttgtaaatattaccctgtaatattatatatacttaataaaacattttaagcta

SEQ ID NO: 318159 - DNA, 5054 bp, Homo sapiens
gcgggcggggagcaggcgggggagcgggcgggaagcagtgggagcgcgcgtgcgcgcggccgtgcagcctgggcagtgggtcctgcctgtgacgcgcggcggcggtcggtcctgcctgtaacggcggcggcggctgctgctccagacacctgcggcggcggcggcgaccccgcggcgggcgcggagatgtggcccctggtagcggcgctgttgctgggctcggcgtgctgcggatcagctcagctactatttaataaaacaaaatctgtagaattcacgttttgtaatgacactgtcgtcattccatgctttgttactaatatggaggcacaaaacactactgaagtatacgtaaagtggaaatttaaaggaagagatatttacacctttgatggagctctaaacaagtccactgtccccactgactttagtagtgcaaaaattgaagtctcacaattactaaaaggagatgcctctttgaagatggataagagtgatgctgtctcacacacaggaaactacacttgtgaagtaacagaattaaccagagaaggtgaaacgatcatcgagctaaaatatcgtgttgtttcatggttttctccaaatgaaaatattcttattgttattttcccaatttttgctatactcctgttctggggacagtttggtattaaaacacttaaatatagatccggtggtatggatgagaaaacaattgctttacttgttgctggactagtgatcactgtcattgtcattgttggagccattcttttcgtcccaggtgaatattcattaaagaatgctactggccttggtttaattgtgacttctacagggatattaatattacttcactactatgtgtttagtacagcgattggattaacctccttcgtcattgccatattggttattcaggtgatagcctatatcctcgctgtggttggactgagtctctgtattgcggcgtgtataccaatgcatggccctcttctgatttcaggtttgagtatcttagctctagcacaattacttggactagtttatatgaaatttgtggcttccaatcagaagactatacaacctcctaggaataactgaagtgaagtgatggactccgatttggagagtagtaagacgtgaaaggaatacacttgtgtttaagcaccatggccttgatgattcactgttggggagaagaaacaagaaaagtaactggttgtcacctatgagacccttacgtgattgttagttaagtttttattcaaagcagctgtaatttagttaataaaataattatgatctatgttgtttgcccaattgagatccagttttttgttgttatttttaatcaattaggggcaatagtagaatggacaatttccaagaatgatgcctttcaggtcctagggcctctggcctctaggtaaccagtttaaattggttcagggtgataactacttagcactgccctggtgattacccagagatatctatgaaaaccagtggcttccatcaaacctttgccaactcaggttcacagcagctttgggcagttatggcagtatggcattagctgagaggtgtctgccacttctgggtcaatggaataataaattaagtacaggcaggaatttggttgggagcatcttgtatgatctccgtatgatgtgatattgatggagatagtggtcctcattcttgggggttgccattcccacattcccccttcaacaaacagtgtaacaggtccttcccagatttagggtacttttattgatggatatgttttccttttattcacataaccccttgaaaccctgtcttgtcctcctgttatttgcttctgctgtacaagatgtagcaccttttctcctctttgaacatggtctagtgacacggtagcaccagttgcaggaaggagccagacttgttctcagagcactgtgttcacacttttcagcaaaaatagctatggttgtgacatatgtattcccttcctctgatttgaaggcaaaaatctacagtgtttcttcacttcttttctgatctggggcatgaaaaaagcaagattgaaatttgaactatgagtctcctgcatggcaacaaaatgtgtgtcaccatcaggccaacaggccagcccttgaatggggatttattactgttgtatctatgttgcatgataaacattcatcaccttcctcctgtagtcctgcctcgtactccccttcccctatgattgaaaagtaaacaaaacccacatttcctatcctggttagaagaaaattaatgttctgacagttgtgatcgcctggagtacttttagacttttagcattcgttttttacctgtttgtggatgtgtgtttgtatgtgcatacgtatgagataggcacatgcatcttctgtatggacaaaggtggggtacctacaggagagcaaaggttaattttgtgcttttagtaaaaacatttaaatacaaagttctttattgggtggaattatatttgatgcaaatatttgatcacttaaaacttttaaaacttctaggtaatttgccacgctttttgactgctcaccaataccctgtaaaaatacgtaattcttcctgtttgtgtaataagatattcatatttgtagttgcattaataatagttatttcttagtccatcagatgttcccgtgtgcctcttttatgccaaattgattgtcatatttcatgttgggaccaagtagtttgcccatggcaaacctaaatttatgacctgctgaggcctctcagaaaactgagcatactagcaagacagctcttcttgatatgtatacacaaatatatacgtatatctatatatacgtatgtatatacacacatgtatattcttccttgattgtgtagctgtccaaaataataacatatatagagggagctgtattcctttatacaaatctgatggctcctgcagcactttttccttctgaaaatatttacattttgctaacctagtttgttactttaaaaatcagttttgatgaaaggagggaaaagcagatggacttgaaaaagatccaagctcctattagaaaaggtatgaaaatctttatagtaaaattttttataaactaaagttgtaccttttaatatgtagtaaactctcatttatttggggttcgctcttggatctcatccatccattgtgttctctttaatgctgcctgccttttgaggcattcactgccctagacaatgccaccagagatagtgggggaaatgccagatgaaaccaactcttgctctcactagttgtcagcttctctggataagtgaccacagaagcaggagtcctcctgcttgggcatcattgggccagttccttctctttaaatcagatttgtaatggctcccaaattccatcacatcacatttaaattgcagacagtgttttgcacatcatgtatctgttttgtcccataatatgctttttactccctgatcccagtttctgctgttgactcttccattcagttttatttattgtgtgttctcacagtgacaccatttgtccttttctgcaacaacctttccagctacttttgccaaattctatttgtcttctccttcaaaacattctcctttgcagttcctcttcatctgtgtagctgctcttttgtctcttaacttaccattcctatagtactttatgcatctctgcttagttctattagttttttggccttgctcttctccttgattttaaaattccttctatagctagagcttttctttctttcattctctcttcctgcagtgttttgcatacatcagaagctaggtacataagttaaatgattgagagttggctgtatttagatttatcactttttaatagggtgagcttgagagttttctttctttctgtttttttttttttttttttgactaatttcacatgctctaaaaaccttcaaaggtgattatttttctcctggaaactccaggtccattctgtttaaatccctaagaatgtcagaattaaaataacagggctatcccgtaattggaaatatttcttttttcaggatgctatagtcaatttagtaagtgaccaccaaattgttatttgcactaacaaagctcaaaacacgataagtttactcctccatctcagtaataaaaattaagctgtaatcaaccttctaggtttctcttgtcttaaaatgggtattcaaaaatggggatctgtggtgtatgtatggaaacacatactccttaatttacctgttgttggaaactggagaaatgattgtcgggcaaccgtttattttttattgtattttatttggttgagggatttttttataaacagttttacttgtgtcatattttaaaattactaactgccatcacctgctggggtcctttgttaggtcattttcagtgactaatagggataatccaggtaactttgaagagatgagcagtgagtgaccaggcagtttttctgcctttagctttgacagttcttaattaagatcattgaagaccagctttctcataaatttctctttttgaaaaaaagaaagcatttgtactaagctcctctgtaagacaacatcttaaatcttaaaagtgttgttatcatgactggtgagagaagaaaacattttgtttttattaaatggagcattatttacaaaaagccattgttgagaattagatcccacatcgtataaatatctattaaccattctaaataaagagaactccagtgttgctatgtgcaagatcctctcttggagcttttttgcatagcaattaaaggtgtgctatttgtcagtagccatttttttgcagtgatttgaagaccaaagttgttttacagctgtgttaccgttaaaggtttttttttttatatgtattaaatcaatttatcactgtttaaagctttgaatatctgcaatctttgccaaggtacttttttatttaaaaaaaaacataactttgtaaatattaccctgtaatattatatatacttaataaaacattttaagcta

SEQ ID NO: 318160 - DNA, 5223 bp, Homo sapiens
gcgggcggggagcaggcgggggagcgggcgggaagcagtgggagcgcgcgtgcgcgcggccgtgcagcctgggcagtgggtcctgcctgtgacgcgcggcggcggtcggtcctgcctgtaacggcggcggcggctgctgctccagacacctgcggcggcggcggcgaccccgcggcgggcgcggagatgtggcccctggtagcggcgctgttgctgggctcggcgtgctgcggatcagctcagctactatttaataaaacaaaatctgtagaattcacgttttgtaatgacactgtcgtcattccatgctttgttactaatatggaggcacaaaacactactgaagtatacgtaaagtggaaatttaaaggaagagatatttacacctttgatggagctctaaacaagtccactgtccccactgactttagtagtgcaaaaattgaagtctcacaattactaaaaggagatgcctctttgaagatggataagagtgatgctgtctcacacacaggaaactacacttgtgaagtaacagaattaaccagagaaggtgaaacgatcatcgagctaaaatatcgtgttgtttcatggttttctccaaatgaaaatattcttattgttattttcccaatttttgctatactcctgttctggggacagtttggtattaaaacacttaaatatagatccggtggtatggatgagaaaacaattgctttacttgttgctggactagtgatcactgtcattgtcattgttggagccattcttttcgtcccaggtgaatattcattaaagaatgctactggccttggtttaattgtgacttctacagggatattaatattacttcactactatgtgtttagtacagcgattggattaacctccttcgtcattgccatattggttattcaggtgatagcctatatcctcgctgtggttggactgagtctctgtattgcggcgtgtataccaatgcatggccctcttctgatttcaggtttgagtatcttagctctagcacaattacttggactagtttatatgaaatttgtggcttccaatcagaagactatacaacctcctaggaataactgaagtgaagtgatggactccgatttggagagtagtaagacgtgaaaggaatacacttgtgtttaagcaccatggccttgatgattcactgttggggagaagaaacaagaaaagtaactggttgtcacctatgagacccttacgtgattgttagttaagtttttattcaaagcagctgtaatttagttaataaaataattatgatctatgttgtttgcccaattgagatccagttttttgttgttatttttaatcaattaggggcaatagtagaatggacaatttccaagaatgatgcctttcaggtcctagggcctctggcctctaggtaaccagtttaaattggttcagggtgataactacttagcactgccctggtgattacccagagatatctatgaaaaccagtggcttccatcaaacctttgccaactcaggttcacagcagctttgggcagttatggcagtatggcattagctgagaggtgtctgccacttctgggtcaatggaataataaattaagtacaggcaggaatttggttgggagcatcttgtatgatctccgtatgatgtgatattgatggagatagtggtcctcattcttgggggttgccattcccacattcccccttcaacaaacagtgtaacaggtccttcccagatttagggtacttttattgatggatatgttttccttttattcacataaccccttgaaaccctgtcttgtcctcctgttatttgcttctgctgtacaagatgtagcaccttttctcctctttgaacatggtctagtgacacggtagcaccagttgcaggaaggagccagacttgttctcagagcactgtgttcacacttttcagcaaaaatagctatggttgtgacatatgtattcccttcctctgatttgaaggcaaaaatctacagtgtttcttcacttcttttctgatctggggcatgaaaaaagcaagattgaaatttgaactatgagtctcctgcatggcaacaaaatgtgtgtcaccatcaggccaacaggccagcccttgaatggggatttattactgttgtatctatgttgcatgataaacattcatcaccttcctcctgtagtcctgcctcgtactccccttcccctatgattgaaaagtaaacaaaacccacatttcctatcctggttagaagaaaattaatgttctgacagttgtgatcgcctggagtacttttagacttttagcattcgttttttacctgtttgtggatgtgtgtttgtatgtgcatacgtatgagataggcacatgcatcttctgtatggacaaaggtggggtacctacaggagagcaaaggttaattttgtgcttttagtaaaaacatttaaatacaaagttctttattgggtggaattatatttgatgcaaatatttgatcacttaaaacttttaaaacttctaggtaatttgccacgctttttgactgctcaccaataccctgtaaaaatacgtaattcttcctgtttgtgtaataagatattcatatttgtagttgcattaataatagttatttcttagtccatcagatgttcccgtgtgcctcttttatgccaaattgattgtcatatttcatgttgggaccaagtagtttgcccatggcaaacctaaatttatgacctgctgaggcctctcagaaaactgagcatactagcaagacagctcttcttgatatgtatatacacacatgtatattcttccttgattgtgtagctgtccaaaataataacatatatagagggagctgtattcctttatacaaatctgatggctcctgcagcactttttccttctgaaaatatttacattttgctaacctagtttgttactttaaaaatcagttttgatgaaaggagggaaaagcagatggacttgaaaaagatccaagctcctattagaaaaggtatgaaaatctttatagtaaaattttttataaactaaagttgtaccttttaatatgtagtaaactctcatttatttggggttcgctcttggatctcatccatccattgtgttctctttaatgctgcctgccttttgaggcattcactgccctagacaatgccaccagagatagtgggggaaatgccagatgaaaccaactcttgctctcactagttgtcagcttctctggataagtgaccacagaagcaggagtcctcctgcttgggcatcattgggccagttccttctctttaaatcagatttgtaatggctcccaaattccatcacatcacatttaaattgcagacagtgttttgcacatcatgtatctgttttgtcccataatatgctttttactccctgatcccagtttctgctgttgactcttccattcagttttatttattgtgtgttctcacagtgacaccatttgtccttttctgcaacaacctttccagctacttttgccaaattctatttgtcttctccttcaaaacattctcctttgcagttcctcttcatctgtgtagctgctcttttgtctcttaacttaccattcctatagtactttatgcatctctgcttagttctattagttttttggccttgctcttctccttgattttaaaattccttctatagctagagcttttctttctttcattctctcttcctgcagtgttttgcatacatcagaagctaggtacataagttaaatgattgagagttggctgtatttagatttatcactttttaatagggtgagcttgagagttttctttctttctgtttttttttttttttttttgactaatttcacatgctctaaaaaccttcaaaggtgattatttttctcctggaaactccaggtccattctgtttaaatccctaagaatgtcagaattaaaataacagggctatcccgtaattggaaatatttcttttttcaggatgctatagtcaatttagtaagtgaccaccaaattgttatttgcactaacaaagctcaaaacacgataagtttactcctccatctcagtaataaaaattaagctgtaatcaaccttctaggtttctcttgtcttaaaatgggtattcaaaaatggggatctgtggtgtatgtatggaaacacatactccttaatttacctgttgttggaaactggagaaatgattgtcgggcaaccgtttattttttattgtattttatttggttgagggatttttttataaacagttttacttgtgtcatattttaaaattactaactgccatcacctgctggggtcctttgttaggtcattttcagtgactaatagggataatccaggtaactttgaagagatgagcagtgagtgaccaggcagtttttctgcctttagctttgacagttcttaattaagatcattgaagaccagctttctcataaatttctctttttgaaaaaaagaaagcatttgtactaagctcctctgtaagacaacatcttaaatcttaaaagtgttgttatcatgactggtgagagaagaaaacattttgtttttattaaatggagcattatttacaaaaagccattgttgagaattagatcccacatcgtataaatatctattaaccattctaaataaagagaactccagtgttgctatgtgcaagatcctctcttggagcttttttgcatagcaattaaaggtgtgctatttgtcagtagccatttttttgcagtgatttgaagaccaaagttgttttacagctgtgttaccgttaaaggtttttttttttatatgtattaaatcaatttatcactgtttaaagctttgaatatctgcaatctttgccaaggtacttttttatttaaaaaaaaacataactttgtaaatattaccctgtaatattatatatacttaataaaacattttaagctattttgttgggctatttctattgctgctacagcagaccacaagcacatttctgaaaaatttaatttattaatgtatttttaagttgcttatattctaggtaacaatgtaaagaatgatttaaaatattaattatgaattttttgagtataatacccaataagcttttaattagagcagagttttaattaaaagttttaaatcagtcca

SEQ ID NO: 318161 - DNA, 5074 bp, Homo sapiens
gcgggcggggagcaggcgggggagcgggcgggaagcagtgggagcgcgcgtgcgcgcggccgtgcagcctgggcagtgggtcctgcctgtgacgcgcggcggcggtcggtcctgcctgtaacggcggcggcggctgctgctccagacacctgcggcggcggcggcgaccccgcggcgggcgcggagatgtggcccctggtagcggcgctgttgctgggctcggcgtgctgcggatcagctcagctactatttaataaaacaaaatctgtagaattcacgttttgtaatgacactgtcgtcattccatgctttgttactaatatggaggcacaaaacactactgaagtatacgtaaagtggaaatttaaaggaagagatatttacacctttgatggagctctaaacaagtccactgtccccactgactttagtagtgcaaaaattgaagtctcacaattactaaaaggagatgcctctttgaagatggataagagtgatgctgtctcacacacaggaaactacacttgtgaagtaacagaattaaccagagaaggtgaaacgatcatcgagctaaaatatcgtgttgtttcatggttttctccaaatgaaaatattcttattgttattttcccaatttttgctatactcctgttctggggacagtttggtattaaaacacttaaatatagatccggtggtatggatgagaaaacaattgctttacttgttgctggactagtgatcactgtcattgtcattgttggagccattcttttcgtcccaggtgaatattcattaaagaatgctactggccttggtttaattgtgacttctacagggatattaatattacttcactactatgtgtttagtacagcgattggattaacctccttcgtcattgccatattggttattcaggtgatagcctatatcctcgctgtggttggactgagtctctgtattgcggcgtgtataccaatgcatggccctcttctgatttcaggtttgagtatcttagctctagcacaattacttggactagtttatatgaaatttgtggcttccaatcagaagactatacaacctcctaggaaagctgtagaggaaccccttaatgcattcaaagaatcaaaaggaatgatgaatgatgaataactgaagtgaagtgatggactccgatttggagagtagtaagacgtgaaaggaatacacttgtgtttaagcaccatggccttgatgattcactgttggggagaagaaacaagaaaagtaactggttgtcacctatgagacccttacgtgattgttagttaagtttttattcaaagcagctgtaatttagttaataaaataattatgatctatgttgtttgcccaattgagatccagttttttgttgttatttttaatcaattaggggcaatagtagaatggacaatttccaagaatgatgcctttcaggtcctagggcctctggcctctaggtaaccagtttaaattggttcagggtgataactacttagcactgccctggtgattacccagagatatctatgaaaaccagtggcttccatcaaacctttgccaactcaggttcacagcagctttgggcagttatggcagtatggcattagctgagaggtgtctgccacttctgggtcaatggaataataaattaagtacaggcaggaatttggttgggagcatcttgtatgatctccgtatgatgtgatattgatggagatagtggtcctcattcttgggggttgccattcccacattcccccttcaacaaacagtgtaacaggtccttcccagatttagggtacttttattgatggatatgttttccttttattcacataaccccttgaaaccctgtcttgtcctcctgttatttgcttctgctgtacaagatgtagcaccttttctcctctttgaacatggtctagtgacacggtagcaccagttgcaggaaggagccagacttgttctcagagcactgtgttcacacttttcagcaaaaatagctatggttgtgacatatgtattcccttcctctgatttgaaggcaaaaatctacagtgtttcttcacttcttttctgatctggggcatgaaaaaagcaagattgaaatttgaactatgagtctcctgcatggcaacaaaatgtgtgtcaccatcaggccaacaggccagcccttgaatggggatttattactgttgtatctatgttgcatgataaacattcatcaccttcctcctgtagtcctgcctcgtactccccttcccctatgattgaaaagtaaacaaaacccacatttcctatcctggttagaagaaaattaatgttctgacagttgtgatcgcctggagtacttttagacttttagcattcgttttttacctgtttgtggatgtgtgtttgtatgtgcatacgtatgagataggcacatgcatcttctgtatggacaaaggtggggtacctacaggagagcaaaggttaattttgtgcttttagtaaaaacatttaaatacaaagttctttattgggtggaattatatttgatgcaaatatttgatcacttaaaacttttaaaacttctaggtaatttgccacgctttttgactgctcaccaataccctgtaaaaatacgtaattcttcctgtttgtgtaataagatattcatatttgtagttgcattaataatagttatttcttagtccatcagatgttcccgtgtgcctcttttatgccaaattgattgtcatatttcatgttgggaccaagtagtttgcccatggcaaacctaaatttatgacctgctgaggcctctcagaaaactgagcatactagcaagacagctcttcttgatatgtatatacacacatgtatattcttccttgattgtgtagctgtccaaaataataacatatatagagggagctgtattcctttatacaaatctgatggctcctgcagcactttttccttctgaaaatatttacattttgctaacctagtttgttactttaaaaatcagttttgatgaaaggagggaaaagcagatggacttgaaaaagatccaagctcctattagaaaaggtatgaaaatctttatagtaaaattttttataaactaaagttgtaccttttaatatgtagtaaactctcatttatttggggttcgctcttggatctcatccatccattgtgttctctttaatgctgcctgccttttgaggcattcactgccctagacaatgccaccagagatagtgggggaaatgccagatgaaaccaactcttgctctcactagttgtcagcttctctggataagtgaccacagaagcaggagtcctcctgcttgggcatcattgggccagttccttctctttaaatcagatttgtaatggctcccaaattccatcacatcacatttaaattgcagacagtgttttgcacatcatgtatctgttttgtcccataatatgctttttactccctgatcccagtttctgctgttgactcttccattcagttttatttattgtgtgttctcacagtgacaccatttgtccttttctgcaacaacctttccagctacttttgccaaattctatttgtcttctccttcaaaacattctcctttgcagttcctcttcatctgtgtagctgctcttttgtctcttaacttaccattcctatagtactttatgcatctctgcttagttctattagttttttggccttgctcttctccttgattttaaaattccttctatagctagagcttttctttctttcattctctcttcctgcagtgttttgcatacatcagaagctaggtacataagttaaatgattgagagttggctgtatttagatttatcactttttaatagggtgagcttgagagttttctttctttctgtttttttttttttttttttgactaatttcacatgctctaaaaaccttcaaaggtgattatttttctcctggaaactccaggtccattctgtttaaatccctaagaatgtcagaattaaaataacagggctatcccgtaattggaaatatttcttttttcaggatgctatagtcaatttagtaagtgaccaccaaattgttatttgcactaacaaagctcaaaacacgataagtttactcctccatctcagtaataaaaattaagctgtaatcaaccttctaggtttctcttgtcttaaaatgggtattcaaaaatggggatctgtggtgtatgtatggaaacacatactccttaatttacctgttgttggaaactggagaaatgattgtcgggcaaccgtttattttttattgtattttatttggttgagggatttttttataaacagttttacttgtgtcatattttaaaattactaactgccatcacctgctggggtcctttgttaggtcattttcagtgactaatagggataatccaggtaactttgaagagatgagcagtgagtgaccaggcagtttttctgcctttagctttgacagttcttaattaagatcattgaagaccagctttctcataaatttctctttttgaaaaaaagaaagcatttgtactaagctcctctgtaagacaacatcttaaatcttaaaagtgttgttatcatgactggtgagagaagaaaacattttgtttttattaaatggagcattatttacaaaaagccattgttgagaattagatcccacatcgtataaatatctattaaccattctaaataaagagaactccagtgttgctatgtgcaagatcctctcttggagcttttttgcatagcaattaaaggtgtgctatttgtcagtagccatttttttgcagtgatttgaagaccaaagttgttttacagctgtgttaccgttaaaggtttttttttttatatgtattaaatcaatttatcactgtttaaagctttgaatatctgcaatctttgccaaggtacttttttatttaaaaaaaaacataactttgtaaatattaccctgtaatattatatatacttaataaaacattttaagcta

SEQ ID NO: 318162 - DNA, 5041 bp, Homo sapiens
gcgggcggggagcaggcgggggagcgggcgggaagcagtgggagcgcgcgtgcgcgcggccgtgcagcctgggcagtgggtcctgcctgtgacgcgcggcggcggtcggtcctgcctgtaacggcggcggcggctgctgctccagacacctgcggcggcggcggcgaccccgcggcgggcgcggagatgtggcccctggtagcggcgctgttgctgggctcggcgtgctgcggatcagctcagctactatttaataaaacaaaatctgtagaattcacgttttgtaatgacactgtcgtcattccatgctttgttactaatatggaggcacaaaacactactgaagtatacgtaaagtggaaatttaaaggaagagatatttacacctttgatggagctctaaacaagtccactgtccccactgactttagtagtgcaaaaattgaagtctcacaattactaaaaggagatgcctctttgaagatggataagagtgatgctgtctcacacacaggaaactacacttgtgaagtaacagaattaaccagagaaggtgaaacgatcatcgagctaaaatatcgtgttgtttcatggttttctccaaatgaaaatattcttattgttattttcccaatttttgctatactcctgttctggggacagtttggtattaaaacacttaaatatagatccggtggtatggatgagaaaacaattgctttacttgttgctggactagtgatcactgtcattgtcattgttggagccattcttttcgtcccaggtgaatattcattaaagaatgctactggccttggtttaattgtgacttctacagggatattaatattacttcactactatgtgtttagtacagcgattggattaacctccttcgtcattgccatattggttattcaggtgatagcctatatcctcgctgtggttggactgagtctctgtattgcggcgtgtataccaatgcatggccctcttctgatttcaggtttgagtatcttagctctagcacaattacttggactagtttatatgaaatttgtggcttccaatcagaagactatacaacctcctaggaaagctgtagaggaaccccttaatgaataactgaagtgaagtgatggactccgatttggagagtagtaagacgtgaaaggaatacacttgtgtttaagcaccatggccttgatgattcactgttggggagaagaaacaagaaaagtaactggttgtcacctatgagacccttacgtgattgttagttaagtttttattcaaagcagctgtaatttagttaataaaataattatgatctatgttgtttgcccaattgagatccagttttttgttgttatttttaatcaattaggggcaatagtagaatggacaatttccaagaatgatgcctttcaggtcctagggcctctggcctctaggtaaccagtttaaattggttcagggtgataactacttagcactgccctggtgattacccagagatatctatgaaaaccagtggcttccatcaaacctttgccaactcaggttcacagcagctttgggcagttatggcagtatggcattagctgagaggtgtctgccacttctgggtcaatggaataataaattaagtacaggcaggaatttggttgggagcatcttgtatgatctccgtatgatgtgatattgatggagatagtggtcctcattcttgggggttgccattcccacattcccccttcaacaaacagtgtaacaggtccttcccagatttagggtacttttattgatggatatgttttccttttattcacataaccccttgaaaccctgtcttgtcctcctgttatttgcttctgctgtacaagatgtagcaccttttctcctctttgaacatggtctagtgacacggtagcaccagttgcaggaaggagccagacttgttctcagagcactgtgttcacacttttcagcaaaaatagctatggttgtgacatatgtattcccttcctctgatttgaaggcaaaaatctacagtgtttcttcacttcttttctgatctggggcatgaaaaaagcaagattgaaatttgaactatgagtctcctgcatggcaacaaaatgtgtgtcaccatcaggccaacaggccagcccttgaatggggatttattactgttgtatctatgttgcatgataaacattcatcaccttcctcctgtagtcctgcctcgtactccccttcccctatgattgaaaagtaaacaaaacccacatttcctatcctggttagaagaaaattaatgttctgacagttgtgatcgcctggagtacttttagacttttagcattcgttttttacctgtttgtggatgtgtgtttgtatgtgcatacgtatgagataggcacatgcatcttctgtatggacaaaggtggggtacctacaggagagcaaaggttaattttgtgcttttagtaaaaacatttaaatacaaagttctttattgggtggaattatatttgatgcaaatatttgatcacttaaaacttttaaaacttctaggtaatttgccacgctttttgactgctcaccaataccctgtaaaaatacgtaattcttcctgtttgtgtaataagatattcatatttgtagttgcattaataatagttatttcttagtccatcagatgttcccgtgtgcctcttttatgccaaattgattgtcatatttcatgttgggaccaagtagtttgcccatggcaaacctaaatttatgacctgctgaggcctctcagaaaactgagcatactagcaagacagctcttcttgatatgtatatacacacatgtatattcttccttgattgtgtagctgtccaaaataataacatatatagagggagctgtattcctttatacaaatctgatggctcctgcagcactttttccttctgaaaatatttacattttgctaacctagtttgttactttaaaaatcagttttgatgaaaggagggaaaagcagatggacttgaaaaagatccaagctcctattagaaaaggtatgaaaatctttatagtaaaattttttataaactaaagttgtaccttttaatatgtagtaaactctcatttatttggggttcgctcttggatctcatccatccattgtgttctctttaatgctgcctgccttttgaggcattcactgccctagacaatgccaccagagatagtgggggaaatgccagatgaaaccaactcttgctctcactagttgtcagcttctctggataagtgaccacagaagcaggagtcctcctgcttgggcatcattgggccagttccttctctttaaatcagatttgtaatggctcccaaattccatcacatcacatttaaattgcagacagtgttttgcacatcatgtatctgttttgtcccataatatgctttttactccctgatcccagtttctgctgttgactcttccattcagttttatttattgtgtgttctcacagtgacaccatttgtccttttctgcaacaacctttccagctacttttgccaaattctatttgtcttctccttcaaaacattctcctttgcagttcctcttcatctgtgtagctgctcttttgtctcttaacttaccattcctatagtactttatgcatctctgcttagttctattagttttttggccttgctcttctccttgattttaaaattccttctatagctagagcttttctttctttcattctctcttcctgcagtgttttgcatacatcagaagctaggtacataagttaaatgattgagagttggctgtatttagatttatcactttttaatagggtgagcttgagagttttctttctttctgtttttttttttttttttttgactaatttcacatgctctaaaaaccttcaaaggtgattatttttctcctggaaactccaggtccattctgtttaaatccctaagaatgtcagaattaaaataacagggctatcccgtaattggaaatatttcttttttcaggatgctatagtcaatttagtaagtgaccaccaaattgttatttgcactaacaaagctcaaaacacgataagtttactcctccatctcagtaataaaaattaagctgtaatcaaccttctaggtttctcttgtcttaaaatgggtattcaaaaatggggatctgtggtgtatgtatggaaacacatactccttaatttacctgttgttggaaactggagaaatgattgtcgggcaaccgtttattttttattgtattttatttggttgagggatttttttataaacagttttacttgtgtcatattttaaaattactaactgccatcacctgctggggtcctttgttaggtcattttcagtgactaatagggataatccaggtaactttgaagagatgagcagtgagtgaccaggcagtttttctgcctttagctttgacagttcttaattaagatcattgaagaccagctttctcataaatttctctttttgaaaaaaagaaagcatttgtactaagctcctctgtaagacaacatcttaaatcttaaaagtgttgttatcatgactggtgagagaagaaaacattttgtttttattaaatggagcattatttacaaaaagccattgttgagaattagatcccacatcgtataaatatctattaaccattctaaataaagagaactccagtgttgctatgtgcaagatcctctcttggagcttttttgcatagcaattaaaggtgtgctatttgtcagtagccatttttttgcagtgatttgaagaccaaagttgttttacagctgtgttaccgttaaaggtttttttttttatatgtattaaatcaatttatcactgtttaaagctttgaatatctgcaatctttgccaaggtacttttttatttaaaaaaaaacataactttgtaaatattaccctgtaatattatatatacttaataaaacattttaagcta

SEQ ID NO: 318163 - DNA, 5121 bp, Homo sapiens
gcgggcggggagcaggcgggggagcgggcgggaagcagtgggagcgcgcgtgcgcgcggccgtgcagcctgggcagtgggtcctgcctgtgacgcgcggcggcggtcggtcctgcctgtaacggcggcggcggctgctgctccagacacctgcggcggcggcggcgaccccgcggcgggcgcggagatgtggcccctggtagcggcgctgttgctgggctcggcgtgctgcggatcagctcagctactatttaataaaacaaaatctgtagaattcacgttttgtaatgacactgtcgtcattccatgctttgttactaatatggaggcacaaaacactactgaagtatacgtaaagtggaaatttaaaggaagagatatttacacctttgatggagctctaaacaagtccactgtccccactgactttagtagtgcaaaaattgaagtctcacaattactaaaaggagatgcctctttgaagatggataagagtgatgctgtctcacacacaggaaactacacttgtgaagtaacagaattaaccagagaaggtgaaacgatcatcgagctaaaatatcgtgttgtttcatggttttctccaaatgaaaatattcttattgttattttcccaatttttgctatactcctgttctggggacagtttggtattaaaacacttaaatatagatccggtggtatggatgagaaaacaattgctttacttgttgctggactagtgatcactgtcattgtcattgttggagccattcttttcgtcccaggtgaatattcattaaagaatgctactggccttggtttaattgtgacttctacagggatattaatattacttcactactatgtgtttagtacagcgattggattaacctccttcgtcattgccatattggttattcaggtgatagcctatatcctcgctgtggttggactgagtctctgtattgcggcgtgtataccaatgcatggccctcttctgatttcaggtttgagtatcttagctctagcacaattacttggactagtttatatgaaatttgtggggttcagagggacacctacagtcagttgaaaggcaagaagagacaagcttccaatcagaagactatacaacctcctaggaaagctgtagaggaaccccttaatgcattcaaagaatcaaaaggaatgatgaatgatgaataactgaagtgaagtgatggactccgatttggagagtagtaagacgtgaaaggaatacacttgtgtttaagcaccatggccttgatgattcactgttggggagaagaaacaagaaaagtaactggttgtcacctatgagacccttacgtgattgttagttaagtttttattcaaagcagctgtaatttagttaataaaataattatgatctatgttgtttgcccaattgagatccagttttttgttgttatttttaatcaattaggggcaatagtagaatggacaatttccaagaatgatgcctttcaggtcctagggcctctggcctctaggtaaccagtttaaattggttcagggtgataactacttagcactgccctggtgattacccagagatatctatgaaaaccagtggcttccatcaaacctttgccaactcaggttcacagcagctttgggcagttatggcagtatggcattagctgagaggtgtctgccacttctgggtcaatggaataataaattaagtacaggcaggaatttggttgggagcatcttgtatgatctccgtatgatgtgatattgatggagatagtggtcctcattcttgggggttgccattcccacattcccccttcaacaaacagtgtaacaggtccttcccagatttagggtacttttattgatggatatgttttccttttattcacataaccccttgaaaccctgtcttgtcctcctgttatttgcttctgctgtacaagatgtagcaccttttctcctctttgaacatggtctagtgacacggtagcaccagttgcaggaaggagccagacttgttctcagagcactgtgttcacacttttcagcaaaaatagctatggttgtgacatatgtattcccttcctctgatttgaaggcaaaaatctacagtgtttcttcacttcttttctgatctggggcatgaaaaaagcaagattgaaatttgaactatgagtctcctgcatggcaacaaaatgtgtgtcaccatcaggccaacaggccagcccttgaatggggatttattactgttgtatctatgttgcatgataaacattcatcaccttcctcctgtagtcctgcctcgtactccccttcccctatgattgaaaagtaaacaaaacccacatttcctatcctggttagaagaaaattaatgttctgacagttgtgatcgcctggagtacttttagacttttagcattcgttttttacctgtttgtggatgtgtgtttgtatgtgcatacgtatgagataggcacatgcatcttctgtatggacaaaggtggggtacctacaggagagcaaaggttaattttgtgcttttagtaaaaacatttaaatacaaagttctttattgggtggaattatatttgatgcaaatatttgatcacttaaaacttttaaaacttctaggtaatttgccacgctttttgactgctcaccaataccctgtaaaaatacgtaattcttcctgtttgtgtaataagatattcatatttgtagttgcattaataatagttatttcttagtccatcagatgttcccgtgtgcctcttttatgccaaattgattgtcatatttcatgttgggaccaagtagtttgcccatggcaaacctaaatttatgacctgctgaggcctctcagaaaactgagcatactagcaagacagctcttcttgatatgtatatacacacatgtatattcttccttgattgtgtagctgtccaaaataataacatatatagagggagctgtattcctttatacaaatctgatggctcctgcagcactttttccttctgaaaatatttacattttgctaacctagtttgttactttaaaaatcagttttgatgaaaggagggaaaagcagatggacttgaaaaagatccaagctcctattagaaaaggtatgaaaatctttatagtaaaattttttataaactaaagttgtaccttttaatatgtagtaaactctcatttatttggggttcgctcttggatctcatccatccattgtgttctctttaatgctgcctgccttttgaggcattcactgccctagacaatgccaccagagatagtgggggaaatgccagatgaaaccaactcttgctctcactagttgtcagcttctctggataagtgaccacagaagcaggagtcctcctgcttgggcatcattgggccagttccttctctttaaatcagatttgtaatggctcccaaattccatcacatcacatttaaattgcagacagtgttttgcacatcatgtatctgttttgtcccataatatgctttttactccctgatcccagtttctgctgttgactcttccattcagttttatttattgtgtgttctcacagtgacaccatttgtccttttctgcaacaacctttccagctacttttgccaaattctatttgtcttctccttcaaaacattctcctttgcagttcctcttcatctgtgtagctgctcttttgtctcttaacttaccattcctatagtactttatgcatctctgcttagttctattagttttttggccttgctcttctccttgattttaaaattccttctatagctagagcttttctttctttcattctctcttcctgcagtgttttgcatacatcagaagctaggtacataagttaaatgattgagagttggctgtatttagatttatcactttttaatagggtgagcttgagagttttctttctttctgtttttttttttttttttttgactaatttcacatgctctaaaaaccttcaaaggtgattatttttctcctggaaactccaggtccattctgtttaaatccctaagaatgtcagaattaaaataacagggctatcccgtaattggaaatatttcttttttcaggatgctatagtcaatttagtaagtgaccaccaaattgttatttgcactaacaaagctcaaaacacgataagtttactcctccatctcagtaataaaaattaagctgtaatcaaccttctaggtttctcttgtcttaaaatgggtattcaaaaatggggatctgtggtgtatgtatggaaacacatactccttaatttacctgttgttggaaactggagaaatgattgtcgggcaaccgtttattttttattgtattttatttggttgagggatttttttataaacagttttacttgtgtcatattttaaaattactaactgccatcacctgctggggtcctttgttaggtcattttcagtgactaatagggataatccaggtaactttgaagagatgagcagtgagtgaccaggcagtttttctgcctttagctttgacagttcttaattaagatcattgaagaccagctttctcataaatttctctttttgaaaaaaagaaagcatttgtactaagctcctctgtaagacaacatcttaaatcttaaaagtgttgttatcatgactggtgagagaagaaaacattttgtttttattaaatggagcattatttacaaaaagccattgttgagaattagatcccacatcgtataaatatctattaaccattctaaataaagagaactccagtgttgctatgtgcaagatcctctcttggagcttttttgcatagcaattaaaggtgtgctatttgtcagtagccatttttttgcagtgatttgaagaccaaagttgttttacagctgtgttaccgttaaaggtttttttttttatatgtattaaatcaatttatcactgtttaaagctttgaatatctgcaatctttgccaaggtacttttttatttaaaaaaaaacataactttgtaaatattaccctgtaatattatatatacttaataaaacattttaagcta

SEQ ID NO: 318164 - DNA, 5016 bp, Homo sapiens
  misc_feature (978)..(978): n is a, c, g, or t
  misc_feature (992)..(992): n is a, c, g, or t
  misc_feature (998)..(998): n is a, c, g, or t
  misc_feature (1002)..(1002): n is a, c, g, or t
  misc_feature (1005)..(1005): n is a, c, g, or t
  misc_feature (1026)..(1026): n is a, c, g, or t
  misc_feature (1028)..(1029): n is a, c, g, or t
  misc_feature (1044)..(1044): n is a, c, g, or t
  misc_feature (1055)..(1055): n is a, c, g, or t
  misc_feature (1057)..(1057): n is a, c, g, or t
  misc_feature (1073)..(1073): n is a, c, g, or t
  misc_feature (1086)..(1086): n is a, c, g, or t
gcgggcggggagcaggcgggggagcgggcgggaagcagtgggagcgcgcgtgcgcgcggccgtgcagcctgggcagtgggtcctgcctgtgacgcgcggcggcggtcggtcctgcctgtaacggcggcggcggctgctgctccagacacctgcggcggcggcggcgaccccgcggcgggcgcggagatgtggcccctggtagcggcgctgttgctgggctcggcgtgctgcggatcagctcagctactatttaataaaacaaaatctgtagaattcacgttttgtaatgacactgtcgtcattccatgctttgttactaatatggaggcacaaaacactactgaagtatacgtaaagtggaaatttaaaggaagagatatttacacctttgatggagctctaaacaagtccactgtccccactgactttagtagtgcaaaaattgaagtctcacaattactaaaaggagatgcctctttgaagatggataagagtgatgctgtctcacacacaggaaactacacttgtgaagtaacagaattaaccagagaaggtgaaacgatcatcgagctaaaatatcgtgttgtttcatggttttctccaaatgaaaatattcttattgttattttcccaatttttgctatactcctgttctggggacagtttggtattaaaacacttaaatatagatccggtggtatggatgagaaaacaattgctttacttgttgctggactagtgatcactgtcattgtcattgttggagccattcttttcgtcccaggtgaatattcattaaagaatgctactggccttggtttaattgtgacttctacagggatattaatattacttcactactatgtgtttagtacagcgattggattaacctccttcgtcattgccatattggttattcaggtgatagcctatatcctcgctgtggttggactgagtctctgtattgcggcgggtatnccaacgcatggccntcgtcngatnccnggggggagggtcttggggctngnncaatgacttggacgnggttatagganangtggggcggccaatcngaagactatacanccgcctaggaataactgaagtgaagtgatggactccgatttggagagtagtaagacgtgaaaggaatacacttgtgtttaagcaccatggccttgatgattcactgttggggagaagaaacaagaaaagtaactggttgtcacctatgagacccttacgtgattgttagttaagtttttattcaaagcagctgtaatttagttaataaaataattatgatctatgttgtttgcccaattgagatccagttttttgttgttatttttaatcaattaggggcaatagtagaatggacaatttccaagaatgatgcctttcaggtcctagggcctctggcctctaggtaaccagtttaaattggttcagggtgataactacttagcactgccctggtgattacccagagatatctatgaaaaccagtggcttccatcaaacctttgccaactcaggttcacagcagctttgggcagttatggcagtatggcattagctgagaggtgtctgccacttctgggtcaatggaataataaattaagtacaggcaggaatttggttgggagcatcttgtatgatctccgtatgatgtgatattgatggagatagtggtcctcattcttgggggttgccattcccacattcccccttcaacaaacagtgtaacaggtccttcccagatttagggtacttttattgatggatatgttttccttttattcacataaccccttgaaaccctgtcttgtcctcctgttatttgcttctgctgtacaagatgtagcaccttttctcctctttgaacatggtctagtgacacggtagcaccagttgcaggaaggagccagacttgttctcagagcactgtgttcacacttttcagcaaaaatagctatggttgtgacatatgtattcccttcctctgatttgaaggcaaaaatctacagtgtttcttcacttcttttctgatctggggcatgaaaaaagcaagattgaaatttgaactatgagtctcctgcatggcaacaaaatgtgtgtcaccatcaggccaacaggccagcccttgaatggggatttattactgttgtatctatgttgcatgataaacattcatcaccttcctcctgtagtcctgcctcgtactccccttcccctatgattgaaaagtaaacaaaacccacatttcctatcctggttagaagaaaattaatgttctgacagttgtgatcgcctggagtacttttagacttttagcattcgttttttacctgtttgtggatgtgtgtttgtatgtgcatacgtatgagataggcacatgcatcttctgtatggacaaaggtggggtacctacaggagagcaaaggttaattttgtgcttttagtaaaaacatttaaatacaaagttctttattgggtggaattatatttgatgcaaatatttgatcacttaaaacttttaaaacttctaggtaatttgccacgctttttgactgctcaccaataccctgtaaaaatacgtaattcttcctgtttgtgtaataagatattcatatttgtagttgcattaataatagttatttcttagtccatcagatgttcccgtgtgcctcttttatgccaaattgattgtcatatttcatgttgggaccaagtagtttgcccatggcaaacctaaatttatgacctgctgaggcctctcagaaaactgagcatactagcaagacagctcttcttgatatgtatatacacacatgtatattcttccttgattgtgtagctgtccaaaataataacatatatagagggagctgtattcctttatacaaatctgatggctcctgcagcactttttccttctgaaaatatttacattttgctaacctagtttgttactttaaaaatcagttttgatgaaaggagggaaaagcagatggacttgaaaaagatccaagctcctattagaaaaggtatgaaaatctttatagtaaaattttttataaactaaagttgtaccttttaatatgtagtaaactctcatttatttggggttcgctcttggatctcatccatccattgtgttctctttaatgctgcctgccttttgaggcattcactgccctagacaatgccaccagagatagtgggggaaatgccagatgaaaccaactcttgctctcactagttgtcagcttctctggataagtgaccacagaagcaggagtcctcctgcttgggcatcattgggccagttccttctctttaaatcagatttgtaatggctcccaaattccatcacatcacatttaaattgcagacagtgttttgcacatcatgtatctgttttgtcccataatatgctttttactccctgatcccagtttctgctgttgactcttccattcagttttatttattgtgtgttctcacagtgacaccatttgtccttttctgcaacaacctttccagctacttttgccaaattctatttgtcttctccttcaaaacattctcctttgcagttcctcttcatctgtgtagctgctcttttgtctcttaacttaccattcctatagtactttatgcatctctgcttagttctattagttttttggccttgctcttctccttgattttaaaattccttctatagctagagcttttctttctttcattctctcttcctgcagtgttttgcatacatcagaagctaggtacataagttaaatgattgagagttggctgtatttagatttatcactttttaatagggtgagcttgagagttttctttctttctgtttttttttttttttttttgactaatttcacatgctctaaaaaccttcaaaggtgattatttttctcctggaaactccaggtccattctgtttaaatccctaagaatgtcagaattaaaataacagggctatcccgtaattggaaatatttcttttttcaggatgctatagtcaatttagtaagtgaccaccaaattgttatttgcactaacaaagctcaaaacacgataagtttactcctccatctcagtaataaaaattaagctgtaatcaaccttctaggtttctcttgtcttaaaatgggtattcaaaaatggggatctgtggtgtatgtatggaaacacatactccttaatttacctgttgttggaaactggagaaatgattgtcgggcaaccgtttattttttattgtattttatttggttgagggatttttttataaacagttttacttgtgtcatattttaaaattactaactgccatcacctgctggggtcctttgttaggtcattttcagtgactaatagggataatccaggtaactttgaagagatgagcagtgagtgaccaggcagtttttctgcctttagctttgacagttcttaattaagatcattgaagaccagctttctcataaatttctctttttgaaaaaaagaaagcatttgtactaagctcctctgtaagacaacatcttaaatcttaaaagtgttgttatcatgactggtgagagaagaaaacattttgtttttattaaatggagcattatttacaaaaagccattgttgagaattagatcccacatcgtataaatatctattaaccattctaaataaagagaactccagtgttgctatgtgcaagatcctctcttggagcttttttgcatagcaattaaaggtgtgctatttgtcagtagccatttttttgcagtgatttgaagaccaaagttgttttacagctgtgttaccgttaaaggtttttttttttatatgtattaaatcaatttatcactgtttaaagctttgaatatctgcaatctttgccaaggtacttttttatttaaaaaaaaacataactttgtaaatattaccctgtaatattatatatacttaataaaacattttaagcta

SEQ ID NO: 318165 - DNA, 5807 bp, Homo sapiens
agaggttggcttcttgtttggatacaaggaccaagtcactcccccaggttcctccacagtaagggaggcctatttaaagccgcccatggcactaacagaaactggactcctatgagctcagatacataactgggcctcacaggggtgggacagtatgtagtctaggaattggaaggatccattccatatcaaagaactgaagcatcgtgttgccctctcagcagcaagagtaaggtgatgcccctgtcagttatagttcctgagttcctctgtctttgattctttgcctattagccagctagctcaccctcttgtttatgccactgttttttatcctattcatgccttctcacagacaacttttcttacctacagctttggactcatccttgtctcctttctgtttctttttcactttcccttcccatcaccaactttctgggtttttttctgtttcttcttagagtccagtggcagggagaaacttgtcagtccagtctgttgccatttttcctgtttgagaaagactcaccagcttttggctggctcacagattggctttccttgggtcaggacccacccttttccctgccagctttggaagcttgacagaattcgagtgtgcagtggtggtaaataaatagtaaggaacacagagcagtcctggaggcgtgcctccatctgctgatgagaaaatccagtgctgtcatccagcccaggtcccagcggaatgggcctctctgttcagtaggatccccctcctgctgagtggttcatggcatgtttctgttcaacgcttttccatctgtaggattcttattctgtatttatttgttgttttgggtttttttattttttgagatggagtctcgctctgtcgcccaggctggagtgcagtggcacgaccccagctcgctgcagcctctgcctcccaggacgagggagatcctcccacctcagccttccacgtagctgggactacaggcatgcaccacaggcatgcaccaccacgccagctaattttagtattttggtagagacagggttgcatcatgttgcccaggctggtcttgaatgcctgagctcaagcaatctatttgccttggcctcccaaagtgctgggattacaggcatgagccaccacggccagccttctcatttgttttttttataaggaagctatctcttcttccctccccaactagggtattctttttccctttcgtcactttgctcatgtactgtattccttcaacttcattaatgaatccatttggaagcagtgaaaaaggcaactcagaaagctaagaagaaatagatagaggaatactcagagctatctgagtattttctttagtttgttagctctttggagctttgaaactggaaagacccagggagtgatgtggagaaagagactgagcttgtaagacacaggagcagtgagctaagggagatggagtagtggggacaaattctggcacattctgtctacactctgggtagatagaggagggaggatggagcacccatggtgggggtatgttggtgacagcattttcccaccagccagtgtaacaagtggctgatttgggggaaagatggcataaacaaatgagagaatgtgtttactatttgatgtagatgggttatttgcttcatttttcaaatcagtgtatataatcaagaatattcagcatgtttgaatagactgtcagagctggaactctttcattaacatctctggcacctttagttttagccctgaacattttatcttaaaattaaacattaccaaatgccttagtttatttcatttattaaatttatattcttatttgttatttatatcagcttccaatcagaagactatacaacctcctaggaataactgaagtgaagtgatggactccgatttggagagtagtaagacgtgaaaggaatacacttgtgtttaagcaccatggccttgatgattcactgttggggagaagaaacaagaaaagtaactggttgtcacctatgagacccttacgtgattgttagttaagtttttattcaaagcagctgtaatttagttaataaaataattatgatctatgttgtttgcccaattgagatccagttttttgttgttatttttaatcaattaggggcaatagtagaatggacaatttccaagaatgatgcctttcaggtcctagggcctctggcctctaggtaaccagtttaaattggttcagggtgataactacttagcactgccctggtgattacccagagatatctatgaaaaccagtggcttccatcaaacctttgccaactcaggttcacagcagctttgggcagttatggcagtatggcattagctgagaggtgtctgccacttctgggtcaatggaataataaattaagtacaggcaggaatttggttgggagcatcttgtatgatctccgtatgatgtgatattgatggagatagtggtcctcattcttgggggttgccattcccacattcccccttcaacaaacagtgtaacaggtccttcccagatttagggtacttttattgatggatatgttttccttttattcacataaccccttgaaaccctgtcttgtcctcctgttatttgcttctgctgtacaagatgtagcaccttttctcctctttgaacatggtctagtgacacggtagcaccagttgcaggaaggagccagacttgttctcagagcactgtgttcacacttttcagcaaaaatagctatggttgtgacatatgtattcccttcctctgatttgaaggcaaaaatctacagtgtttcttcacttcttttctgatctggggcatgaaaaaagcaagattgaaatttgaactatgagtctcctgcatggcaacaaaatgtgtgtcaccatcaggccaacaggccagcccttgaatggggatttattactgttgtatctatgttgcatgataaacattcatcaccttcctcctgtagtcctgcctcgtactccccttcccctatgattgaaaagtaaacaaaacccacatttcctatcctggttagaagaaaattaatgttctgacagttgtgatcgcctggagtacttttagacttttagcattcgttttttacctgtttgtggatgtgtgtttgtatgtgcatacgtatgagataggcacatgcatcttctgtatggacaaaggtggggtacctacaggagagcaaaggttaattttgtgcttttagtaaaaacatttaaatacaaagttctttattgggtggaattatatttgatgcaaatatttgatcacttaaaacttttaaaacttctaggtaatttgccacgctttttgactgctcaccaataccctgtaaaaatacgtaattcttcctgtttgtgtaataagatattcatatttgtagttgcattaataatagttatttcttagtccatcagatgttcccgtgtgcctcttttatgccaaattgattgtcatatttcatgttgggaccaagtagtttgcccatggcaaacctaaatttatgacctgctgaggcctctcagaaaactgagcatactagcaagacagctcttcttgatatgtatatacacacatgtatattcttccttgattgtgtagctgtccaaaataataacatatatagagggagctgtattcctttatacaaatctgatggctcctgcagcactttttccttctgaaaatatttacattttgctaacctagtttgttactttaaaaatcagttttgatgaaaggagggaaaagcagatggacttgaaaaagatccaagctcctattagaaaaggtatgaaaatctttatagtaaaattttttataaactaaagttgtaccttttaatatgtagtaaactctcatttatttggggttcgctcttggatctcatccatccattgtgttctctttaatgctgcctgccttttgaggcattcactgccctagacaatgccaccagagatagtgggggaaatgccagatgaaaccaactcttgctctcactagttgtcagcttctctggataagtgaccacagaagcaggagtcctcctgcttgggcatcattgggccagttccttctctttaaatcagatttgtaatggctcccaaattccatcacatcacatttaaattgcagacagtgttttgcacatcatgtatctgttttgtcccataatatgctttttactccctgatcccagtttctgctgttgactcttccattcagttttatttattgtgtgttctcacagtgacaccatttgtccttttctgcaacaacctttccagctacttttgccaaattctatttgtcttctccttcaaaacattctcctttgcagttcctcttcatctgtgtagctgctcttttgtctcttaacttaccattcctatagtactttatgcatctctgcttagttctattagttttttggccttgctcttctccttgattttaaaattccttctatagctagagcttttctttctttcattctctcttcctgcagtgttttgcatacatcagaagctaggtacataagttaaatgattgagagttggctgtatttagatttatcactttttaatagggtgagcttgagagttttctttctttctgtttttttttttttttttttgactaatttcacatgctctaaaaaccttcaaaggtgattatttttctcctggaaactccaggtccattctgtttaaatccctaagaatgtcagaattaaaataacagggctatcccgtaattggaaatatttcttttttcaggatgctatagtcaatttagtaagtgaccaccaaattgttatttgcactaacaaagctcaaaacacgataagtttactcctccatctcagtaataaaaattaagctgtaatcaaccttctaggtttctcttgtcttaaaatgggtattcaaaaatggggatctgtggtgtatgtatggaaacacatactccttaatttacctgttgttggaaactggagaaatgattgtcgggcaaccgtttattttttattgtattttatttggttgagggatttttttataaacagttttacttgtgtcatattttaaaattactaactgccatcacctgctggggtcctttgttaggtcattttcagtgactaatagggataatccaggtaactttgaagagatgagcagtgagtgaccaggcagtttttctgcctttagctttgacagttcttaattaagatcattgaagaccagctttctcataaatttctctttttgaaaaaaagaaagcatttgtactaagctcctctgtaagacaacatcttaaatcttaaaagtgttgttatcatgactggtgagagaagaaaacattttgtttttattaaatggagcattatttacaaaaagccattgttgagaattagatcccacatcgtataaatatctattaaccattctaaataaagagaactccagtgttgctatgtgcaagatcctctcttggagcttttttgcatagcaattaaaggtgtgctatttgtcagtagccatttttttgcagtgatttgaagaccaaagttgttttacagctgtgttaccgttaaaggtttttttttttatatgtattaaatcaatttatcactgtttaaagctttgaatatctgcaatctttgccaaggtacttttttatttaaaaaaaaacataactttgtaaatattaccctgtaatattatatatacttaataaaacattttaagcta

SEQ ID NO: 318166 - DNA, 5865 bp, Homo sapiens
agaggttggcttcttgtttggatacaaggaccaagtcactcccccaggttcctccacagtaagggaggcctatttaaagccgcccatggcactaacagaaactggactcctatgagctcagatacataactgggcctcacaggggtgggacagtatgtagtctaggaattggaaggatccattccatatcaaagaactgaagcatcgtgttgccctctcagcagcaagagtaaggtgatgcccctgtcagttatagttcctgagttcctctgtctttgattctttgcctattagccagctagctcaccctcttgtttatgccactgttttttatcctattcatgccttctcacagacaacttttcttacctacagctttggactcatccttgtctcctttctgtttctttttcactttcccttcccatcaccaactttctgggtttttttctgtttcttcttagagtccagtggcagggagaaacttgtcagtccagtctgttgccatttttcctgtttgagaaagactcaccagcttttggctggctcacagattggctttccttgggtcaggacccacccttttccctgccagctttggaagcttgacagaattcgagtgtgcagtggtggtaaataaatagtaaggaacacagagcagtcctggaggcgtgcctccatctgctgatgagaaaatccagtgctgtcatccagcccaggtcccagcggaatgggcctctctgttcagtaggatccccctcctgctgagtggttcatggcatgtttctgttcaacgcttttccatctgtaggattcttattctgtatttatttgttgttttgggtttttttattttttgagatggagtctcgctctgtcgcccaggctggagtgcagtggcacgaccccagctcgctgcagcctctgcctcccaggacgagggagatcctcccacctcagccttccacgtagctgggactacaggcatgcaccacaggcatgcaccaccacgccagctaattttagtattttggtagagacagggttgcatcatgttgcccaggctggtcttgaatgcctgagctcaagcaatctatttgccttggcctcccaaagtgctgggattacaggcatgagccaccacggccagccttctcatttgttttttttataaggaagctatctcttcttccctccccaactagggtattctttttccctttcgtcactttgctcatgtactgtattccttcaacttcattaatgaatccatttggaagcagtgaaaaaggcaactcagaaagctaagaagaaatagatagaggaatactcagagctatctgagtattttctttagtttgttagctctttggagctttgaaactggaaagacccagggagtgatgtggagaaagagactgagcttgtaagacacaggagcagtgagctaagggagatggagtagtggggacaaattctggcacattctgtctacactctgggtagatagaggagggaggatggagcacccatggtgggggtatgttggtgacagcattttcccaccagccagtgtaacaagtggctgatttgggggaaagatggcataaacaaatgagagaatgtgtttactatttgatgtagatgggttatttgcttcatttttcaaatcagtgtatataatcaagaatattcagcatgtttgaatagactgtcagagctggaactctttcattaacatctctggcacctttagttttagccctgaacattttatcttaaaattaaacattaccaaatgccttagtttatttcatttattaaatttatattcttatttgttatttatatcagcttccaatcagaagactatacaacctcctaggaaagctgtagaggaaccccttaatgcattcaaagaatcaaaaggaatgatgaatgatgaataactgaagtgaagtgatggactccgatttggagagtagtaagacgtgaaaggaatacacttgtgtttaagcaccatggccttgatgattcactgttggggagaagaaacaagaaaagtaactggttgtcacctatgagacccttacgtgattgttagttaagtttttattcaaagcagctgtaatttagttaataaaataattatgatctatgttgtttgcccaattgagatccagttttttgttgttatttttaatcaattaggggcaatagtagaatggacaatttccaagaatgatgcctttcaggtcctagggcctctggcctctaggtaaccagtttaaattggttcagggtgataactacttagcactgccctggtgattacccagagatatctatgaaaaccagtggcttccatcaaacctttgccaactcaggttcacagcagctttgggcagttatggcagtatggcattagctgagaggtgtctgccacttctgggtcaatggaataataaattaagtacaggcaggaatttggttgggagcatcttgtatgatctccgtatgatgtgatattgatggagatagtggtcctcattcttgggggttgccattcccacattcccccttcaacaaacagtgtaacaggtccttcccagatttagggtacttttattgatggatatgttttccttttattcacataaccccttgaaaccctgtcttgtcctcctgttatttgcttctgctgtacaagatgtagcaccttttctcctctttgaacatggtctagtgacacggtagcaccagttgcaggaaggagccagacttgttctcagagcactgtgttcacacttttcagcaaaaatagctatggttgtgacatatgtattcccttcctctgatttgaaggcaaaaatctacagtgtttcttcacttcttttctgatctggggcatgaaaaaagcaagattgaaatttgaactatgagtctcctgcatggcaacaaaatgtgtgtcaccatcaggccaacaggccagcccttgaatggggatttattactgttgtatctatgttgcatgataaacattcatcaccttcctcctgtagtcctgcctcgtactccccttcccctatgattgaaaagtaaacaaaacccacatttcctatcctggttagaagaaaattaatgttctgacagttgtgatcgcctggagtacttttagacttttagcattcgttttttacctgtttgtggatgtgtgtttgtatgtgcatacgtatgagataggcacatgcatcttctgtatggacaaaggtggggtacctacaggagagcaaaggttaattttgtgcttttagtaaaaacatttaaatacaaagttctttattgggtggaattatatttgatgcaaatatttgatcacttaaaacttttaaaacttctaggtaatttgccacgctttttgactgctcaccaataccctgtaaaaatacgtaattcttcctgtttgtgtaataagatattcatatttgtagttgcattaataatagttatttcttagtccatcagatgttcccgtgtgcctcttttatgccaaattgattgtcatatttcatgttgggaccaagtagtttgcccatggcaaacctaaatttatgacctgctgaggcctctcagaaaactgagcatactagcaagacagctcttcttgatatgtatatacacacatgtatattcttccttgattgtgtagctgtccaaaataataacatatatagagggagctgtattcctttatacaaatctgatggctcctgcagcactttttccttctgaaaatatttacattttgctaacctagtttgttactttaaaaatcagttttgatgaaaggagggaaaagcagatggacttgaaaaagatccaagctcctattagaaaaggtatgaaaatctttatagtaaaattttttataaactaaagttgtaccttttaatatgtagtaaactctcatttatttggggttcgctcttggatctcatccatccattgtgttctctttaatgctgcctgccttttgaggcattcactgccctagacaatgccaccagagatagtgggggaaatgccagatgaaaccaactcttgctctcactagttgtcagcttctctggataagtgaccacagaagcaggagtcctcctgcttgggcatcattgggccagttccttctctttaaatcagatttgtaatggctcccaaattccatcacatcacatttaaattgcagacagtgttttgcacatcatgtatctgttttgtcccataatatgctttttactccctgatcccagtttctgctgttgactcttccattcagttttatttattgtgtgttctcacagtgacaccatttgtccttttctgcaacaacctttccagctacttttgccaaattctatttgtcttctccttcaaaacattctcctttgcagttcctcttcatctgtgtagctgctcttttgtctcttaacttaccattcctatagtactttatgcatctctgcttagttctattagttttttggccttgctcttctccttgattttaaaattccttctatagctagagcttttctttctttcattctctcttcctgcagtgttttgcatacatcagaagctaggtacataagttaaatgattgagagttggctgtatttagatttatcactttttaatagggtgagcttgagagttttctttctttctgtttttttttttttttttttgactaatttcacatgctctaaaaaccttcaaaggtgattatttttctcctggaaactccaggtccattctgtttaaatccctaagaatgtcagaattaaaataacagggctatcccgtaattggaaatatttcttttttcaggatgctatagtcaatttagtaagtgaccaccaaattgttatttgcactaacaaagctcaaaacacgataagtttactcctccatctcagtaataaaaattaagctgtaatcaaccttctaggtttctcttgtcttaaaatgggtattcaaaaatggggatctgtggtgtatgtatggaaacacatactccttaatttacctgttgttggaaactggagaaatgattgtcgggcaaccgtttattttttattgtattttatttggttgagggatttttttataaacagttttacttgtgtcatattttaaaattactaactgccatcacctgctggggtcctttgttaggtcattttcagtgactaatagggataatccaggtaactttgaagagatgagcagtgagtgaccaggcagtttttctgcctttagctttgacagttcttaattaagatcattgaagaccagctttctcataaatttctctttttgaaaaaaagaaagcatttgtactaagctcctctgtaagacaacatcttaaatcttaaaagtgttgttatcatgactggtgagagaagaaaacattttgtttttattaaatggagcattatttacaaaaagccattgttgagaattagatcccacatcgtataaatatctattaaccattctaaataaagagaactccagtgttgctatgtgcaagatcctctcttggagcttttttgcatagcaattaaaggtgtgctatttgtcagtagccatttttttgcagtgatttgaagaccaaagttgttttacagctgtgttaccgttaaaggtttttttttttatatgtattaaatcaatttatcactgtttaaagctttgaatatctgcaatctttgccaaggtacttttttatttaaaaaaaaacataactttgtaaatattaccctgtaatattatatatacttaataaaacattttaagcta

SEQ ID NO: 318167 - DNA, 4549 bp, Homo sapiens
ttttaaactactgcatcaggaaatattgtaaaacagttttgccttgaatatttgtgatgaaatctacgatgatcttcaagattctcttaattttgctaatattcagctgatcagaatttgtttttaaaatgtctggctggtgggtacttcccactgacaactgcttattgcttacagtatgtctgccttgtcaatgaatgaggttcagggtgcttcctagggatcagagtcagtaccatttttctctttcatctacagctgatcagatgtttattttacttacattaaatgaatgatggagatccaaagtgaatattatagaatattattctaggatcaacatcttttgctttgaaaaatcaacatctcttggcttttcctcagccaacccagcaaacagagattatcagactctgttgattttttactttcatttggcattggcctttttcttactgaaattaaaaaggctaatgatttgcctggtttctgtctctgacctttgcaggtctattttcttaatttttagatactatatatctgaaactttttttaatgtgtcaactttttaatggatagaaaatagacacgaatagtgattatgtgttcatttttcaattttccagaaaataactgaagtgaagtgatggactccgatttggagagtagtaagacgtgaaaggaatacacttgtgtttaagcaccatggccttgatgattcactgttggggagaagaaacaagaaaagtaactggttgtcacctatgagacccttacgtgattgttagttaagtttttattcaaagcagctgtaatttagttaataaaataattatgatctatgttgtttgcccaattgagatccagttttttgttgttatttttaatcaattaggggcaatagtagaatggacaatttccaagaatgatgcctttcaggtcctagggcctctggcctctaggtaaccagtttaaattggttcagggtgataactacttagcactgccctggtgattacccagagatatctatgaaaaccagtggcttccatcaaacctttgccaactcaggttcacagcagctttgggcagttatggcagtatggcattagctgagaggtgtctgccacttctgggtcaatggaataataaattaagtacaggcaggaatttggttgggagcatcttgtatgatctccgtatgatgtgatattgatggagatagtggtcctcattcttgggggttgccattcccacattcccccttcaacaaacagtgtaacaggtccttcccagatttagggtacttttattgatggatatgttttccttttattcacataaccccttgaaaccctgtcttgtcctcctgttatttgcttctgctgtacaagatgtagcaccttttctcctctttgaacatggtctagtgacacggtagcaccagttgcaggaaggagccagacttgttctcagagcactgtgttcacacttttcagcaaaaatagctatggttgtgacatatgtattcccttcctctgatttgaaggcaaaaatctacagtgtttcttcacttcttttctgatctggggcatgaaaaaagcaagattgaaatttgaactatgagtctcctgcatggcaacaaaatgtgtgtcaccatcaggccaacaggccagcccttgaatggggatttattactgttgtatctatgttgcatgataaacattcatcaccttcctcctgtagtcctgcctcgtactccccttcccctatgattgaaaagtaaacaaaacccacatttcctatcctggttagaagaaaattaatgttctgacagttgtgatcgcctggagtacttttagacttttagcattcgttttttacctgtttgtggatgtgtgtttgtatgtgcatacgtatgagataggcacatgcatcttctgtatggacaaaggtggggtacctacaggagagcaaaggttaattttgtgcttttagtaaaaacatttaaatacaaagttctttattgggtggaattatatttgatgcaaatatttgatcacttaaaacttttaaaacttctaggtaatttgccacgctttttgactgctcaccaataccctgtaaaaatacgtaattcttcctgtttgtgtaataagatattcatatttgtagttgcattaataatagttatttcttagtccatcagatgttcccgtgtgcctcttttatgccaaattgattgtcatatttcatgttgggaccaagtagtttgcccatggcaaacctaaatttatgacctgctgaggcctctcagaaaactgagcatactagcaagacagctcttcttgatatgtatatacacacatgtatattcttccttgattgtgtagctgtccaaaataataacatatatagagggagctgtattcctttatacaaatctgatggctcctgcagcactttttccttctgaaaatatttacattttgctaacctagtttgttactttaaaaatcagttttgatgaaaggagggaaaagcagatggacttgaaaaagatccaagctcctattagaaaaggtatgaaaatctttatagtaaaattttttataaactaaagttgtaccttttaatatgtagtaaactctcatttatttggggttcgctcttggatctcatccatccattgtgttctctttaatgctgcctgccttttgaggcattcactgccctagacaatgccaccagagatagtgggggaaatgccagatgaaaccaactcttgctctcactagttgtcagcttctctggataagtgaccacagaagcaggagtcctcctgcttgggcatcattgggccagttccttctctttaaatcagatttgtaatggctcccaaattccatcacatcacatttaaattgcagacagtgttttgcacatcatgtatctgttttgtcccataatatgctttttactccctgatcccagtttctgctgttgactcttccattcagttttatttattgtgtgttctcacagtgacaccatttgtccttttctgcaacaacctttccagctacttttgccaaattctatttgtcttctccttcaaaacattctcctttgcagttcctcttcatctgtgtagctgctcttttgtctcttaacttaccattcctatagtactttatgcatctctgcttagttctattagttttttggccttgctcttctccttgattttaaaattccttctatagctagagcttttctttctttcattctctcttcctgcagtgttttgcatacatcagaagctaggtacataagttaaatgattgagagttggctgtatttagatttatcactttttaatagggtgagcttgagagttttctttctttctgtttttttttttttttttttgactaatttcacatgctctaaaaaccttcaaaggtgattatttttctcctggaaactccaggtccattctgtttaaatccctaagaatgtcagaattaaaataacagggctatcccgtaattggaaatatttcttttttcaggatgctatagtcaatttagtaagtgaccaccaaattgttatttgcactaacaaagctcaaaacacgataagtttactcctccatctcagtaataaaaattaagctgtaatcaaccttctaggtttctcttgtcttaaaatgggtattcaaaaatggggatctgtggtgtatgtatggaaacacatactccttaatttacctgttgttggaaactggagaaatgattgtcgggcaaccgtttattttttattgtattttatttggttgagggatttttttataaacagttttacttgtgtcatattttaaaattactaactgccatcacctgctggggtcctttgttaggtcattttcagtgactaatagggataatccaggtaactttgaagagatgagcagtgagtgaccaggcagtttttctgcctttagctttgacagttcttaattaagatcattgaagaccagctttctcataaatttctctttttgaaaaaaagaaagcatttgtactaagctcctctgtaagacaacatcttaaatcttaaaagtgttgttatcatgactggtgagagaagaaaacattttgtttttattaaatggagcattatttacaaaaagccattgttgagaattagatcccacatcgtataaatatctattaaccattctaaataaagagaactccagtgttgctatgtgcaagatcctctcttggagcttttttgcatagcaattaaaggtgtgctatttgtcagtagccatttttttgcagtgatttgaagaccaaagttgttttacagctgtgttaccgttaaaggtttttttttttatatgtattaaatcaatttatcactgtttaaagctttgaatatctgcaatctttgccaaggtacttttttatttaaaaaaaaacataactttgtaaatattaccctgtaatattatatatacttaataaaacattttaagcta

SEQ ID NO: 318168 - DNA, 4546 bp, Homo sapiens
cgggaggctgaggcaggagaattgcttgaacccggaaggcagatgttgcagtgagttgagatcatgccaccgcactccagcctggtgacagagtgagactctgtctcaaaaaaaataaaaaagaattatgaatattacttttataatattctcaccactgggaaaaatgcactattctgtgtctaagtagctgcttaccttaaccaagtgatatttgggcaaggggatcgttgccttttgctactggttgagacgaagcatggcaccccctagtagagaaggatcccaattacttccaatttgtgatgtacacattttagaaagatacaggctattgccacagagatagaccaaaacatctcattttctttctttgtaaacctagatctgatttcccaactaagtctgtttcctttgtgaatgctgtgggtatgatccacagaaaggctacataatgaaatgatagctttacaattaatttggctgtagagttgtagactagttagcatatcattgcatatttgtttatttagaaatgatttccaattgtggaacctcactaactgcctgcttggcttgttactaatcctagcattcaaagaatcaaaaggaatgatgaatgatgaataactgaagtgaagtgatggactccgatttggagagtagtaagacgtgaaaggaatacacttgtgtttaagcaccatggccttgatgattcactgttggggagaagaaacaagaaaagtaactggttgtcacctatgagacccttacgtgattgttagttaagtttttattcaaagcagctgtaatttagttaataaaataattatgatctatgttgtttgcccaattgagatccagttttttgttgttatttttaatcaattaggggcaatagtagaatggacaatttccaagaatgatgcctttcaggtcctagggcctctggcctctaggtaaccagtttaaattggttcagggtgataactacttagcactgccctggtgattacccagagatatctatgaaaaccagtggcttccatcaaacctttgccaactcaggttcacagcagctttgggcagttatggcagtatggcattagctgagaggtgtctgccacttctgggtcaatggaataataaattaagtacaggcaggaatttggttgggagcatcttgtatgatctccgtatgatgtgatattgatggagatagtggtcctcattcttgggggttgccattcccacattcccccttcaacaaacagtgtaacaggtccttcccagatttagggtacttttattgatggatatgttttccttttattcacataaccccttgaaaccctgtcttgtcctcctgttatttgcttctgctgtacaagatgtagcaccttttctcctctttgaacatggtctagtgacacggtagcaccagttgcaggaaggagccagacttgttctcagagcactgtgttcacacttttcagcaaaaatagctatggttgtgacatatgtattcccttcctctgatttgaaggcaaaaatctacagtgtttcttcacttcttttctgatctggggcatgaaaaaagcaagattgaaatttgaactatgagtctcctgcatggcaacaaaatgtgtgtcaccatcaggccaacaggccagcccttgaatggggatttattactgttgtatctatgttgcatgataaacattcatcaccttcctcctgtagtcctgcctcgtactccccttcccctatgattgaaaagtaaacaaaacccacatttcctatcctggttagaagaaaattaatgttctgacagttgtgatcgcctggagtacttttagacttttagcattcgttttttacctgtttgtggatgtgtgtttgtatgtgcatacgtatgagataggcacatgcatcttctgtatggacaaaggtggggtacctacaggagagcaaaggttaattttgtgcttttagtaaaaacatttaaatacaaagttctttattgggtggaattatatttgatgcaaatatttgatcacttaaaacttttaaaacttctaggtaatttgccacgctttttgactgctcaccaataccctgtaaaaatacgtaattcttcctgtttgtgtaataagatattcatatttgtagttgcattaataatagttatttcttagtccatcagatgttcccgtgtgcctcttttatgccaaattgattgtcatatttcatgttgggaccaagtagtttgcccatggcaaacctaaatttatgacctgctgaggcctctcagaaaactgagcatactagcaagacagctcttcttgatatgtatatacacacatgtatattcttccttgattgtgtagctgtccaaaataataacatatatagagggagctgtattcctttatacaaatctgatggctcctgcagcactttttccttctgaaaatatttacattttgctaacctagtttgttactttaaaaatcagttttgatgaaaggagggaaaagcagatggacttgaaaaagatccaagctcctattagaaaaggtatgaaaatctttatagtaaaattttttataaactaaagttgtaccttttaatatgtagtaaactctcatttatttggggttcgctcttggatctcatccatccattgtgttctctttaatgctgcctgccttttgaggcattcactgccctagacaatgccaccagagatagtgggggaaatgccagatgaaaccaactcttgctctcactagttgtcagcttctctggataagtgaccacagaagcaggagtcctcctgcttgggcatcattgggccagttccttctctttaaatcagatttgtaatggctcccaaattccatcacatcacatttaaattgcagacagtgttttgcacatcatgtatctgttttgtcccataatatgctttttactccctgatcccagtttctgctgttgactcttccattcagttttatttattgtgtgttctcacagtgacaccatttgtccttttctgcaacaacctttccagctacttttgccaaattctatttgtcttctccttcaaaacattctcctttgcagttcctcttcatctgtgtagctgctcttttgtctcttaacttaccattcctatagtactttatgcatctctgcttagttctattagttttttggccttgctcttctccttgattttaaaattccttctatagctagagcttttctttctttcattctctcttcctgcagtgttttgcatacatcagaagctaggtacataagttaaatgattgagagttggctgtatttagatttatcactttttaatagggtgagcttgagagttttctttctttctgtttttttttttttttttttgactaatttcacatgctctaaaaaccttcaaaggtgattatttttctcctggaaactccaggtccattctgtttaaatccctaagaatgtcagaattaaaataacagggctatcccgtaattggaaatatttcttttttcaggatgctatagtcaatttagtaagtgaccaccaaattgttatttgcactaacaaagctcaaaacacgataagtttactcctccatctcagtaataaaaattaagctgtaatcaaccttctaggtttctcttgtcttaaaatgggtattcaaaaatggggatctgtggtgtatgtatggaaacacatactccttaatttacctgttgttggaaactggagaaatgattgtcgggcaaccgtttattttttattgtattttatttggttgagggatttttttataaacagttttacttgtgtcatattttaaaattactaactgccatcacctgctggggtcctttgttaggtcattttcagtgactaatagggataatccaggtaactttgaagagatgagcagtgagtgaccaggcagtttttctgcctttagctttgacagttcttaattaagatcattgaagaccagctttctcataaatttctctttttgaaaaaaagaaagcatttgtactaagctcctctgtaagacaacatcttaaatcttaaaagtgttgttatcatgactggtgagagaagaaaacattttgtttttattaaatggagcattatttacaaaaagccattgttgagaattagatcccacatcgtataaatatctattaaccattctaaataaagagaactccagtgttgctatgtgcaagatcctctcttggagcttttttgcatagcaattaaaggtgtgctatttgtcagtagccatttttttgcagtgatttgaagaccaaagttgttttacagctgtgttaccgttaaaggtttttttttttatatgtattaaatcaatttatcactgtttaaagctttgaatatctgcaatctttgccaaggtacttttttatttaaaaaaaaacataactttgtaaatattaccctgtaatattatatatacttaataaaacattttaagcta

SEQ ID NO: 318169 - DNA, 4036 bp, Homo sapiens
gattgcgagctcggacccagatctgtcgtccatcagaagactatgaaccctcctaggaaagctgtagaggaaccccttaatgcattcaaagaatcaagaggaatgatgaatgatgaataactgaagtgaagtgatggactccgatttggagagtagtaagacgtgaaaggaatacacttgtgtttaagcaccatggccttgatgattcactgttggggagaagaaacaagaaaagtaactggttgtcacctatgagacccttacgtgattgttagttaagtttttattcaaagcagctgtaatttagttaataaaataattatgatctatgttgtttgcccaattgagatccagttttttgttgttatttttaatcaattaggggcaatagtagaatggacaatttccaagaatgatgcctttcaggtcctagggcctctggcctctaggtaaccagtttaaattggttcagggtgataactacttagcactgccctggtgattacccagagatatctatgaaaaccagtggcttccatcaaacctttgccaactcaggttcacagcagctttgggcagttatggcagtatggcattagctgagaggtgtctgccacttctgggtcaatggaataataaattaagtacaggcaggaatttggttgggagcatcttgtatgatctccgtatgatgtgatattgatggagatagtggtcctcattcttgggggttgccattcccacattcccccttcaacaaacagtgtaacaggtccttcccagatttagggtacttttattgatggatatgttttccttttattcacataaccccttgaaaccctgtcttgtcctcctgttatttgcttctgctgtacaagatgtagcaccttttctcctctttgaacatggtctagtgacacggtagcaccagttgcaggaaggagccagacttgttctcagagcactgtgttcacacttttcagcaaaaatagctatggttgtgacatatgtattcccttcctctgatttgaaggcaaaaatctacagtgtttcttcacttcttttctgatctggggcatgaaaaaagcaagattgaaatttgaactatgagtctcctgcatggcaacaaaatgtgtgtcaccatcaggccaacaggccagcccttgaatggggatttattactgttgtatctatgttgcatgataaacattcatcaccttcctcctgtagtcctgcctcgtactccccttcccctatgattgaaaagtaaacaaaacccacatttcctatcctggttagaagaaaattaatgttctgacagttgtgatcgcctggagtacttttagacttttagcattcgttttttacctgtttgtggatgtgtgtttgtatgtgcatacgtatgagataggcacatgcatcttctgtatggacaaaggtggggtacctacaggagagcaaaggttaattttgtgcttttagtaaaaacatttaaatacaaagttctttattgggtggaattatatttgatgcaaatatttgatcacttaaaacttttaaaacttctaggtaatttgccacgctttttgactgctcaccaataccctgtaaaaatacgtaattcttcctgtttgtgtaataagatattcatatttgtagttgcattaataatagttatttcttagtccatcagatgttcccgtgtgcctcttttatgccaaattgattgtcatatttcatgttgggaccaagtagtttgcccatggcaaacctaaatttatgacctgctgaggcctctcagaaaactgagcatactagcaagacagctcttcttgatatgtatatacacacatgtatattcttccttgattgtgtagctgtccaaaataataacatatatagagggagctgtattcctttatacaaatctgatggctcctgcagcactttttccttctgaaaatatttacattttgctaacctagtttgttactttaaaaatcagttttgatgaaaggagggaaaagcagatggacttgaaaaagatccaagctcctattagaaaaggtatgaaaatctttatagtaaaattttttataaactaaagttgtaccttttaatatgtagtaaactctcatttatttggggttcgctcttggatctcatccatccattgtgttctctttaatgctgcctgccttttgaggcattcactgccctagacaatgccaccagagatagtgggggaaatgccagatgaaaccaactcttgctctcactagttgtcagcttctctggataagtgaccacagaagcaggagtcctcctgcttgggcatcattgggccagttccttctctttaaatcagatttgtaatggctcccaaattccatcacatcacatttaaattgcagacagtgttttgcacatcatgtatctgttttgtcccataatatgctttttactccctgatcccagtttctgctgttgactcttccattcagttttatttattgtgtgttctcacagtgacaccatttgtccttttctgcaacaacctttccagctacttttgccaaattctatttgtcttctccttcaaaacattctcctttgcagttcctcttcatctgtgtagctgctcttttgtctcttaacttaccattcctatagtactttatgcatctctgcttagttctattagttttttggccttgctcttctccttgattttaaaattccttctatagctagagcttttctttctttcattctctcttcctgcagtgttttgcatacatcagaagctaggtacataagttaaatgattgagagttggctgtatttagatttatcactttttaatagggtgagcttgagagttttctttctttctgtttttttttttttttttttgactaatttcacatgctctaaaaaccttcaaaggtgattatttttctcctggaaactccaggtccattctgtttaaatccctaagaatgtcagaattaaaataacagggctatcccgtaattggaaatatttcttttttcaggatgctatagtcaatttagtaagtgaccaccaaattgttatttgcactaacaaagctcaaaacacgataagtttactcctccatctcagtaataaaaattaagctgtaatcaaccttctaggtttctcttgtcttaaaatgggtattcaaaaatggggatctgtggtgtatgtatggaaacacatactccttaatttacctgttgttggaaactggagaaatgattgtcgggcaaccgtttattttttattgtattttatttggttgagggatttttttataaacagttttacttgtgtcatattttaaaattactaactgccatcacctgctggggtcctttgttaggtcattttcagtgactaatagggataatccaggtaactttgaagagatgagcagtgagtgaccaggcagtttttctgcctttagctttgacagttcttaattaagatcattgaagaccagctttctcataaatttctctttttgaaaaaaagaaagcatttgtactaagctcctctgtaagacaacatcttaaatcttaaaagtgttgttatcatgactggtgagagaagaaaacattttgtttttattaaatggagcattatttacaaaaagccattgttgagaattagatcccacatcgtataaatatctattaaccattctaaataaagagaactccagtgttgctatgtgcaagatcctctcttggagcttttttgcatagcaattaaaggtgtgctatttgtcagtagccatttttttgcagtgatttgaagaccaaagttgttttacagctgtgttaccgttaaaggtttttttttttatatgtattaaatcaatttatcactgtttaaagctttgaatatctgcaatctttgccaaggtacttttttatttaaaaaaaaacataactttgtaaatattaccctgtaatattatatatacttaataaaacattttaagcta

SEQ ID NO: 318170 - DNA, 3983 bp, Homo sapiens
  misc_feature (41)..(41): n is a, c, g, or t
gcgactcaccccacaatattctcccaatttagagattaagnaaaacccttgatagacacgagaataactgaagtgaagtgatggactccgatttggagagtagtaagacgtgaaaggaatacacttgtgtttaagcaccatggccttgatgattcactgttggggagaagaaacaagaaaagtaactggttgtcacctatgagacccttacgtgattgttagttaagtttttattcaaagcagctgtaatttagttaataaaataattatgatctatgttgtttgcccaattgagatccagttttttgttgttatttttaatcaattaggggcaatagtagaatggacaatttccaagaatgatgcctttcaggtcctagggcctctggcctctaggtaaccagtttaaattggttcagggtgataactacttagcactgccctggtgattacccagagatatctatgaaaaccagtggcttccatcaaacctttgccaactcaggttcacagcagctttgggcagttatggcagtatggcattagctgagaggtgtctgccacttctgggtcaatggaataataaattaagtacaggcaggaatttggttgggagcatcttgtatgatctccgtatgatgtgatattgatggagatagtggtcctcattcttgggggttgccattcccacattcccccttcaacaaacagtgtaacaggtccttcccagatttagggtacttttattgatggatatgttttccttttattcacataaccccttgaaaccctgtcttgtcctcctgttatttgcttctgctgtacaagatgtagcaccttttctcctctttgaacatggtctagtgacacggtagcaccagttgcaggaaggagccagacttgttctcagagcactgtgttcacacttttcagcaaaaatagctatggttgtgacatatgtattcccttcctctgatttgaaggcaaaaatctacagtgtttcttcacttcttttctgatctggggcatgaaaaaagcaagattgaaatttgaactatgagtctcctgcatggcaacaaaatgtgtgtcaccatcaggccaacaggccagcccttgaatggggatttattactgttgtatctatgttgcatgataaacattcatcaccttcctcctgtagtcctgcctcgtactccccttcccctatgattgaaaagtaaacaaaacccacatttcctatcctggttagaagaaaattaatgttctgacagttgtgatcgcctggagtacttttagacttttagcattcgttttttacctgtttgtggatgtgtgtttgtatgtgcatacgtatgagataggcacatgcatcttctgtatggacaaaggtggggtacctacaggagagcaaaggttaattttgtgcttttagtaaaaacatttaaatacaaagttctttattgggtggaattatatttgatgcaaatatttgatcacttaaaacttttaaaacttctaggtaatttgccacgctttttgactgctcaccaataccctgtaaaaatacgtaattcttcctgtttgtgtaataagatattcatatttgtagttgcattaataatagttatttcttagtccatcagatgttcccgtgtgcctcttttatgccaaattgattgtcatatttcatgttgggaccaagtagtttgcccatggcaaacctaaatttatgacctgctgaggcctctcagaaaactgagcatactagcaagacagctcttcttgatatgtatatacacacatgtatattcttccttgattgtgtagctgtccaaaataataacatatatagagggagctgtattcctttatacaaatctgatggctcctgcagcactttttccttctgaaaatatttacattttgctaacctagtttgttactttaaaaatcagttttgatgaaaggagggaaaagcagatggacttgaaaaagatccaagctcctattagaaaaggtatgaaaatctttatagtaaaattttttataaactaaagttgtaccttttaatatgtagtaaactctcatttatttggggttcgctcttggatctcatccatccattgtgttctctttaatgctgcctgccttttgaggcattcactgccctagacaatgccaccagagatagtgggggaaatgccagatgaaaccaactcttgctctcactagttgtcagcttctctggataagtgaccacagaagcaggagtcctcctgcttgggcatcattgggccagttccttctctttaaatcagatttgtaatggctcccaaattccatcacatcacatttaaattgcagacagtgttttgcacatcatgtatctgttttgtcccataatatgctttttactccctgatcccagtttctgctgttgactcttccattcagttttatttattgtgtgttctcacagtgacaccatttgtccttttctgcaacaacctttccagctacttttgccaaattctatttgtcttctccttcaaaacattctcctttgcagttcctcttcatctgtgtagctgctcttttgtctcttaacttaccattcctatagtactttatgcatctctgcttagttctattagttttttggccttgctcttctccttgattttaaaattccttctatagctagagcttttctttctttcattctctcttcctgcagtgttttgcatacatcagaagctaggtacataagttaaatgattgagagttggctgtatttagatttatcactttttaatagggtgagcttgagagttttctttctttctgtttttttttttttttttttgactaatttcacatgctctaaaaaccttcaaaggtgattatttttctcctggaaactccaggtccattctgtttaaatccctaagaatgtcagaattaaaataacagggctatcccgtaattggaaatatttcttttttcaggatgctatagtcaatttagtaagtgaccaccaaattgttatttgcactaacaaagctcaaaacacgataagtttactcctccatctcagtaataaaaattaagctgtaatcaaccttctaggtttctcttgtcttaaaatgggtattcaaaaatggggatctgtggtgtatgtatggaaacacatactccttaatttacctgttgttggaaactggagaaatgattgtcgggcaaccgtttattttttattgtattttatttggttgagggatttttttataaacagttttacttgtgtcatattttaaaattactaactgccatcacctgctggggtcctttgttaggtcattttcagtgactaatagggataatccaggtaactttgaagagatgagcagtgagtgaccaggcagtttttctgcctttagctttgacagttcttaattaagatcattgaagaccagctttctcataaatttctctttttgaaaaaaagaaagcatttgtactaagctcctctgtaagacaacatcttaaatcttaaaagtgttgttatcatgactggtgagagaagaaaacattttgtttttattaaatggagcattatttacaaaaagccattgttgagaattagatcccacatcgtataaatatctattaaccattctaaataaagagaactccagtgttgctatgtgcaagatcctctcttggagcttttttgcatagcaattaaaggtgtgctatttgtcagtagccatttttttgcagtgatttgaagaccaaagttgttttacagctgtgttaccgttaaaggtttttttttttatatgtattaaatcaatttatcactgtttaaagctttgaatatctgcaatctttgccaaggtacttttttatttaaaaaaaaacataactttgtaaatattaccctgtaatattatatatacttaataaaacattttaagcta

SEQ ID NO: 318171 - DNA, 1337 bp, Homo sapiens
gcgggcggggagcaggcgggggagcgggcgggaagcagtgggagcgcgcgtgcgcgcggccgtgcagcctgggcagtgggtcctgcctgtgacgcgcggcggcggtcggtcctgcctgtaacggcggcggcggctgctgctccagacacctgcggcggcggcggcgaccccgcggcgggcgcggagatgtggcccctggtagcggcgctgttgctgggctcggcgtgctgcggatcagctcagctactatttaataaaacaaaatctgtagaattcacgttttgtaatgacactgtcgtcattccatgctttgttactaatatggaggcacaaaacactactgaagtatacgtaaagtggaaatttaaaggaagagatatttacacctttgatggagctctaaacaagtccactgtccccactgactttagtagtgcaaaaattgaagtctcacaattactaaaaggagatgcctctttgaagatggataagagtgatgctgtctcacacacaggaaactacacttgtgaagtaacagaattaaccagagaaggtgaaacgatcatcgagctaaaatatcgtgttgtttcatggttttctccaaatgaaaatattcttattgttattttcccaatttttgctatactcctgttctggggacagtttggtattaaaacacttaaatatagatccggtggtatggatgagaaaacaattgctttacttgttgctggactagtgatcactgtcattgtcattgttggagccattcttttcgtcccaggtgaatattcattaaagaatgctactggccttggtttaattgtgacttctacagggatattaatattacttcactactatgtgtttagtacagcgattggattaacctccttcgtcattgccatattggttattcaggtgatagcctatatcctcgctgtggttggactgagtctctgtattgcggcgtgtataccaatgcatggccctcttctgatttcaggtttgagtatcttagctctagcacaattacttggactagtttatatgaaatttgtggcttccaatcagaagactatacaacctcctaggaaagctgtagaggaaccccttaatgaataactgaagtgaagtgatggactccgatttggagagtagtaagacgtgaaaggaatacacttgtgtttaagcaccatggccttgatgattcactgttggggagaagaaacaagaaaagtaactggttgtcacctatgagacccttacgtgattgttagttaagtttttattcaaagcagctgtaatttagttaataaaataattatgatctatgt

SEQ ID NO: 318172 - DNA, 2994 bp, Homo sapiens
tgtgttgtatgagtgtgttataaatgcatattgtgttgtgagtagcatatattgggtatgtgttgtataggttgcatgtgttgtgtgtgttgtgtgttgtcagtgttgtatatgttgtatgagtacattgtacatgcatgttgtgttgtatctatgttgcatgataaacattcatcaccttcctcctgtagtcctgcctcgtactccccttcccctatgattgaaaagtaaacaaaacccacatttcctatcctggttagaagaaaattaatgttctgacagttgtgatcgcctggagtacttttagacttttagcattcgttttttacctgtttgtggatgtgtgtttgtatgtgcatacgtatgagataggcacatgcatcttctgtatggacaaaggtggggtacctacaggagagcaaaggttaattttgtgcttttagtaaaaacatttaaatacaaagttctttattgggtggaattatatttgatgcaaatatttgatcacttaaaacttttaaaacttctaggtaatttgccacgctttttgactgctcaccaataccctgtaaaaatacgtaattcttcctgtttgtgtaataagatattcatatttgtagttgcattaataatagttatttcttagtccatcagatgttcccgtgtgcctcttttatgccaaattgattgtcatatttcatgttgggaccaagtagtttgcccatggcaaacctaaatttatgacctgctgaggcctctcagaaaactgagcatactagcaagacagctcttcttgatatgtatatacacacatgtatattcttccttgattgtgtagctgtccaaaataataacatatatagagggagctgtattcctttatacaaatctgatggctcctgcagcactttttccttctgaaaatatttacattttgctaacctagtttgttactttaaaaatcagttttgatgaaaggagggaaaagcagatggacttgaaaaagatccaagctcctattagaaaaggtatgaaaatctttatagtaaaattttttataaactaaagttgtaccttttaatatgtagtaaactctcatttatttggggttcgctcttggatctcatccatccattgtgttctctttaatgctgcctgccttttgaggcattcactgccctagacaatgccaccagagatagtgggggaaatgccagatgaaaccaactcttgctctcactagttgtcagcttctctggataagtgaccacagaagcaggagtcctcctgcttgggcatcattgggccagttccttctctttaaatcagatttgtaatggctcccaaattccatcacatcacatttaaattgcagacagtgttttgcacatcatgtatctgttttgtcccataatatgctttttactccctgatcccagtttctgctgttgactcttccattcagttttatttattgtgtgttctcacagtgacaccatttgtccttttctgcaacaacctttccagctacttttgccaaattctatttgtcttctccttcaaaacattctcctttgcagttcctcttcatctgtgtagctgctcttttgtctcttaacttaccattcctatagtactttatgcatctctgcttagttctattagttttttggccttgctcttctccttgattttaaaattccttctatagctagagcttttctttctttcattctctcttcctgcagtgttttgcatacatcagaagctaggtacataagttaaatgattgagagttggctgtatttagatttatcactttttaatagggtgagcttgagagttttctttctttctgtttttttttttttttttttgactaatttcacatgctctaaaaaccttcaaaggtgattatttttctcctggaaactccaggtccattctgtttaaatccctaagaatgtcagaattaaaataacagggctatcccgtaattggaaatatttcttttttcaggatgctatagtcaatttagtaagtgaccaccaaattgttatttgcactaacaaagctcaaaacacgataagtttactcctccatctcagtaataaaaattaagctgtaatcaaccttctaggtttctcttgtcttaaaatgggtattcaaaaatggggatctgtggtgtatgtatggaaacacatactccttaatttacctgttgttggaaactggagaaatgattgtcgggcaaccgtttattttttattgtattttatttggttgagggatttttttataaacagttttacttgtgtcatattttaaaattactaactgccatcacctgctggggtcctttgttaggtcattttcagtgactaatagggataatccaggtaactttgaagagatgagcagtgagtgaccaggcagtttttctgcctttagctttgacagttcttaattaagatcattgaagaccagctttctcataaatttctctttttgaaaaaaagaaagcatttgtactaagctcctctgtaagacaacatcttaaatcttaaaagtgttgttatcatgactggtgagagaagaaaacattttgtttttattaaatggagcattatttacaaaaagccattgttgagaattagatcccacatcgtataaatatctattaaccattctaaataaagagaactccagtgttgctatgtgcaagatcctctcttggagcttttttgcatagcaattaaaggtgtgctatttgtcagtagccatttttttgcagtgatttgaagaccaaagttgttttacagctgtgttaccgttaaaggtttttttttttatatgtattaaatcaatttatcactgtttaaagctttgaatatctgcaatctttgccaaggtacttttttatttaaaaaaaaacataactttgtaaatattaccctgtaatattatatatacttaataaaacattttaagcta

SEQ ID NO: 318173 - DNA, 1893 bp, Homo sapiens
  misc_feature (1893)..(1893): n is a, c, g, or t
gcgggcggggagcaggcgggggagcgggcgggaagcagtgggagcgcgcgtgcgcgcggccgtgcagcctgggcagtgggtcctgcctgtgacgcgcggcggcggtcggtcctgcctgtaacggcggcggcggctgctgctccagacacctgcggcggcggcggcgaccccgcggcgggcgcggagatgtggcccctggtagcggcgctgttgctgggctcggcgtgctgcggatcagctcagctactatttaataaaacaaaatctgtagaattcacgttttgtaatgacactgtcgtcattccatgctttgttactaatatggaggcacaaaacactactgaagtatacgtaaagtggaaatttaaaggaagagatatttacacctttgatggagctctaaacaagtccactgtccccactgactttagtagtgcaaaaattgaagtctcacaattactaaaaggagatgcctctttgaagatggataagagtgatgctgtctcacacacaggaaactacacttgtgaagtaacagaattaaccagagaaggtgaaacgatcatcgagctaaaatatcgtgttgtttcatggttttctccaaatgaaaatattcttattgttattttcccaatttttgctatactcctgttctggggacagtttggtattaaaacacttaaatatagatccggtggtatggatgagaaaacaattgctttacttgttgctggactagtgatcactgtcattgtcattgttggagccattcttttcgtcccaggtgaatattcattaaagaatgctactggccttggtttaattgtgacttctacagggatattaatattacttcactactatgtgtttagtacagcgattggattaacctccttcgtcattgccatattggttattcaggtgatagcctatatcctcgctgtggttggactgagtctctgtattgcggcgtgtataccaatgcatggccctcttctgatttcaggtttgagtatcttagctctagcacaattacttggactagtttatatgaaatttgtggcttccaatcagaagactatacaacctcctaggaaagctgtagaggaaccccttaatgcattcaaagaatcaaaaggaatgatgaatgatgaataactgaagtgaagtgatggactccgatttggagagtagtaagacgtgaaaggaatacacttgtgtttaagcaccatggccttgatgattcactgttggggagaagaaacaagaaaagtaactggttgtcacctatgagacccttacgtgattgttagttaagtttttattcaaagcagctgtaatttagttaataaaataattatgatctatgtaaaaaaaaaaaaaaaaaaaaaaaaaaaaaaaaaaaaaagggagaaggaaggacgcagaagagagctcccataaggatgccacaaaggggggcgcaaaaacacagaggtgtgatactcgaaaaaatggtgggccacaataagtggagcgagcaagagtgaaacacgataacaacaaccggcccggcacctgtcgacaacgcatacaaaccgggcggacatagccggccaacacagggcgcaaggtagggagagagagtgatacccacacacaaggcccgctagcctgccagtatacccacccacgctggggggacacacaccgtgcggcaaacccaagagactatcaccaacgaagtataagagccgccacaaactgagaagcaacctcccaaacaaagccacaaacgcggcgcgaaaaaacagcggccgcgacaatgcggcacggcaacctgagagacagggccagacaacaacccgcacaccagccgcgacgacacatcccaccccgctaacacccagaagn

SEQ ID NO: 318174 - DNA, 1280 bp, Homo sapiens
gcgggcggggagcaggcgggggagcgggcgggaagcagtgggagcgcgcgtgcgcgcggccgtgcagcctgggcagtgggtcctgcctgtgacgcgcggcggcggtcggtcctgcctgtaacggcggcggcggctgctgctccagacacctgcggcggcggcggcgaccccgcggcgggcgcggagatgtggcccctggtagcggcgctgttgctgggctcggcgtgctgcggatcagctcagctactatttaataaaacaaaatctgtagaattcacgttttgtaatgacactgtcgtcattccatgctttgttactaatatggaggcacaaaacactactgaagtatacgtaaagtggaaatttaaaggaagagatatttacacctttgatggagctctaaacaagtccactgtccccactgactttagtagtgcaaaaattgaagtctcacaattactaaaaggagatgcctctttgaagatggataagagtgatgctgtctcacacacaggaaactacacttgtgaagtaacagaattaaccagagaaggtgaaacgatcatcgagctaaaatatcgtgttgtttcatggttttctccaaatgaaaatattcttattgttattttcccaatttttgctatactcctgttctggggacagtttggtattaaaacacttaaatatagatccggtggtatggatgagaaaacaattgctttacttgttgctggactagtgatcactgtcattgtcattgttggagccattcttttcgtcccaggtgaatattcattaaagaatgctactggccttggtttaattgtgacttctacagggatattaatattacttcactactatgtgtttagtacagcgattggattaacctccttcgtcattgccatattggttattcaggtgatagcctatatcctcgctgtggttggactgagtctctgtattgcggcgtgtataccaatgcatggccctcttctgatttcaggtttgagtatcttagctctagcacaattacttggactagtttatatgaaatttgtggaataactgaagtgaagtgatggactccgatttggagagtagtaagacgtgaaaggaatacacttgtgtttaagcaccatggccttgatgattcactgttggggagaagaaacaagaaaagtaactggttgtcacctatgagacccttacgtgattgttagttaagtttttattcaaagcagctgtaatttagttaataaaataattatgatctatgt

SEQ ID NO: 318175 - DNA, 1648 bp, Homo sapiens
gcgggcggggagcaggcgggggagcgggcgggaagcagtgggagcgcgcgtgcgcgcggccgtgcagcctgggcagtgggtcctgcctgtgacgcgcggcggcggtcggtcctgcctgtaacggcggcggcggctgctgctccagacacctgcggcggcggcggcgaccccgcggcgggcgcggagatgtggcccctggtagcggcgctgttgctgggctcggcgtgctgcggatcagctcagctactatttaataaaacaaaatctgtagaattcacgttttgtaatgacactgtcgtcattccatgctttgttactaatatggaggcacaaaacactactgaagtatacgtaaagtggaaatttaaaggaagagatatttacacctttgatggagctctaaacaagtccactgtccccactgactttagtagtgcaaaaattgaagtctcacaattactaaaaggagatgcctctttgaagatggataagagtgatgctgtctcacacacaggaaactacacttgtgaagtaacagaattaaccagagaaggtgaaacgatcatcgagctaaaatatcgtgttgtttcatggttttctccaaatgaaaatattcttattgttattttcccaatttttgctatactcctgttctggggacagtttggtattaaaacacttaaatatagatccggtggtatggatgagaaaacaattgctttacttgttgctggactagtgatcactgtcattgtcattgttggagccattcttttcgtcccaggtgaatattcattaaagaatgctactggccttggtttaattgtgacttctacagggatattaatattacttcactactatgtgtttagtacagcgattggattaacctccttcgtcattgccatattggttattcaggtgatagcctatatcctcgctgtggttggactgagtctctgtattgcggcgtgtataccaatgcatggccctcttctgatttcaggtttgagtatcttagctctagcacaattacttggactagtttatatgaaatttgtggaataactgaagtgaagtgatggactccgatttggagagtagtaagacgtgaaaggaatacacttgtgtttaagcaccatggccttgatgattcactgttggggagaagaaacaagaaaagtaactggttgtcacctatgagacccttacgtgattgttagttaagtttttattcaaagcagctgtaatttagttaataaaataattatgatctatgtaaaaaaaaaaaaaaaaaaacaaaaaacacaggagaaaaaaaaaaaaaaaaaaaaaaaaaaaaaaggggggggggggcgagtcatgatatctaccccggcgggggggaaccacatatgacgccaccacccctattttttttagacaaggacggggcccccacagaggagggcgtacattaaaacgaacgcgcggcgcggcgctttataaacaaactgctgggcgagagaaaaactacgtcggcggactttctggggagaaccccccctgcgggcgggcaagggcgaacccccaccagagtatgaagagcgcggcggactacaaatggggtgctgtgtgcaaccgcagtctttggcgcggagaagtggca

SEQ ID NO: 318176 - DNA, 906 bp, Homo sapiens
atcagccggaccagcaggctgggcccagattaagctgtaatcaaccttctaggtttctcttgtcttaaaatgggtattcaaaaatggggatctgtggtgtatgtatggaaacacatactccttaatttacctgttgttggaaactggagaaatgattgtcgggcaaccgtttattttttattgtattttatttggttgagggatttttttataaacagttttacttgtgtcatattttaaaattactaactgccatcacctgctggggtcctttgttaggtcattttcagtgactaatagggataatccaggtaactttgaagagatgagcagtgagtgaccaggcagtttttctgcctttagctttgacagttcttaattaagatcattgaagaccagctttctcataaatttctctttttgaaaaaaagaaagcatttgtactaagctcctctgtaagacaacatcttaaatcttaaaagtgttgttatcatgactggtgagagaagaaaacattttgtttttattaaatggagcattatttacaaaaagccattgttgagaattagatcccacatcgtataaatatctattaaccattctaaataaagagaactccagtgttgctatgtgcaagatcctctcttggagcttttttgcatagcaattaaaggtgtgctatttgtcagtagccatttttttgcagtgatttgaagaccaaagttgttttacagctgtgttaccgttaaaggtttttttttttatatgtattaaatcaatttatcactgtttaaagctttgaatatctgcaatctttgccaaggtacttttttatttaaaaaaaaacataactttgtaaatattaccctgtaatattatatatacttaataaaacattttaagcta

SEQ ID NO: 318177 - DNA, 2103 bp, Homo sapiens
agaggttggcttcttgtttggatacaaggaccaagtcactcccccaggttcctccacagtaagggaggcctatttaaagccgcccatggcactaacagaaactggactcctatgagctcagatacataactgggcctcacaggggtgggacagtatgtagtctaggaattggaaggatccattccatatcaaagaactgaagcatcgtgttgccctctcagcagcaagagtaaggtgatgcccctgtcagttatagttcctgagttcctctgtctttgattctttgcctattagccagctagctcaccctcttgtttatgccactgttttttatcctattcatgccttctcacagacaacttttcttacctacagctttggactcatccttgtctcctttctgtttctttttcactttcccttcccatcaccaactttctgggtttttttctgtttcttcttagagtccagtggcagggagaaacttgtcagtccagtctgttgccatttttcctgtttgagaaagactcaccagcttttggctggctcacagattggctttccttgggtcaggacccacccttttccctgccagctttggaagcttgacagaattcgagtgtgcagtggtggtaaataaatagtaaggaacacagagcagtcctggaggcgtgcctccatctgctgatgagaaaatccagtgctgtcatccagcccaggtcccagcggaatgggcctctctgttcagtaggatccccctcctgctgagtggttcatggcatgtttctgttcaacgcttttccatctgtaggattcttattctgtatttatttgttgttttgggtttttttattttttgagatggagtctcgctctgtcgcccaggctggagtgcagtggcacgaccccagctcgctgcagcctctgcctcccaggacgagggagatcctcccacctcagccttccacgtagctgggactacaggcatgcaccacaggcatgcaccaccacgccagctaattttagtattttggtagagacagggttgcatcatgttgcccaggctggtcttgaatgcctgagctcaagcaatctatttgccttggcctcccaaagtgctgggattacaggcatgagccaccacggccagccttctcatttgttttttttataaggaagctatctcttcttccctccccaactagggtattctttttccctttcgtcactttgctcatgtactgtattccttcaacttcattaatgaatccatttggaagcagtgaaaaaggcaactcagaaagctaagaagaaatagatagaggaatactcagagctatctgagtattttctttagtttgttagctctttggagctttgaaactggaaagacccagggagtgatgtggagaaagagactgagcttgtaagacacaggagcagtgagctaagggagatggagtagtggggacaaattctggcacattctgtctacactctgggtagatagaggagggaggatggagcacccatggtgggggtatgttggtgacagcattttcccaccagccagtgtaacaagtggctgatttgggggaaagatggcataaacaaatgagagaatgtgtttactatttgatgtagatgggttatttgcttcatttttcaaatcagtgtatataatcaagaatattcagcatgtttgaatagactgtcagagctggaactctttcattaacatctctggcacctttagttttagccctgaacattttatcttaaaattaaacattaccaaatgccttagtttatttcatttattaaatttatattcttatttgttatttatatcagcttccaatcagaagactatacaacctcctaggaataactgaagtgaagtgatggactccgatttggagagtagtaagacgtgaaaggaatacacttgtgtttaagcaccatggccttgatgattcactgttggggagaagaaacaagaaaagtaactggttgtcacctatgagacccttacgtgattgttagttaagtttttattcaaagcagctgtaatttagttaataaaataattatgatctatgt

SEQ ID NO: 318178 - DNA, 2161 bp, Homo sapiens
agaggttggcttcttgtttggatacaaggaccaagtcactcccccaggttcctccacagtaagggaggcctatttaaagccgcccatggcactaacagaaactggactcctatgagctcagatacataactgggcctcacaggggtgggacagtatgtagtctaggaattggaaggatccattccatatcaaagaactgaagcatcgtgttgccctctcagcagcaagagtaaggtgatgcccctgtcagttatagttcctgagttcctctgtctttgattctttgcctattagccagctagctcaccctcttgtttatgccactgttttttatcctattcatgccttctcacagacaacttttcttacctacagctttggactcatccttgtctcctttctgtttctttttcactttcccttcccatcaccaactttctgggtttttttctgtttcttcttagagtccagtggcagggagaaacttgtcagtccagtctgttgccatttttcctgtttgagaaagactcaccagcttttggctggctcacagattggctttccttgggtcaggacccacccttttccctgccagctttggaagcttgacagaattcgagtgtgcagtggtggtaaataaatagtaaggaacacagagcagtcctggaggcgtgcctccatctgctgatgagaaaatccagtgctgtcatccagcccaggtcccagcggaatgggcctctctgttcagtaggatccccctcctgctgagtggttcatggcatgtttctgttcaacgcttttccatctgtaggattcttattctgtatttatttgttgttttgggtttttttattttttgagatggagtctcgctctgtcgcccaggctggagtgcagtggcacgaccccagctcgctgcagcctctgcctcccaggacgagggagatcctcccacctcagccttccacgtagctgggactacaggcatgcaccacaggcatgcaccaccacgccagctaattttagtattttggtagagacagggttgcatcatgttgcccaggctggtcttgaatgcctgagctcaagcaatctatttgccttggcctcccaaagtgctgggattacaggcatgagccaccacggccagccttctcatttgttttttttataaggaagctatctcttcttccctccccaactagggtattctttttccctttcgtcactttgctcatgtactgtattccttcaacttcattaatgaatccatttggaagcagtgaaaaaggcaactcagaaagctaagaagaaatagatagaggaatactcagagctatctgagtattttctttagtttgttagctctttggagctttgaaactggaaagacccagggagtgatgtggagaaagagactgagcttgtaagacacaggagcagtgagctaagggagatggagtagtggggacaaattctggcacattctgtctacactctgggtagatagaggagggaggatggagcacccatggtgggggtatgttggtgacagcattttcccaccagccagtgtaacaagtggctgatttgggggaaagatggcataaacaaatgagagaatgtgtttactatttgatgtagatgggttatttgcttcatttttcaaatcagtgtatataatcaagaatattcagcatgtttgaatagactgtcagagctggaactctttcattaacatctctggcacctttagttttagccctgaacattttatcttaaaattaaacattaccaaatgccttagtttatttcatttattaaatttatattcttatttgttatttatatcagcttccaatcagaagactatacaacctcctaggaaagctgtagaggaaccccttaatgcattcaaagaatcaaaaggaatgatgaatgatgaataactgaagtgaagtgatggactccgatttggagagtagtaagacgtgaaaggaatacacttgtgtttaagcaccatggccttgatgattcactgttggggagaagaaacaagaaaagtaactggttgtcacctatgagacccttacgtgattgttagttaagtttttattcaaagcagctgtaatttagttaataaaataattatgatctatgt

SEQ ID NO: 318179 - DNA, 2128 bp, Homo sapiens
agaggttggcttcttgtttggatacaaggaccaagtcactcccccaggttcctccacagtaagggaggcctatttaaagccgcccatggcactaacagaaactggactcctatgagctcagatacataactgggcctcacaggggtgggacagtatgtagtctaggaattggaaggatccattccatatcaaagaactgaagcatcgtgttgccctctcagcagcaagagtaaggtgatgcccctgtcagttatagttcctgagttcctctgtctttgattctttgcctattagccagctagctcaccctcttgtttatgccactgttttttatcctattcatgccttctcacagacaacttttcttacctacagctttggactcatccttgtctcctttctgtttctttttcactttcccttcccatcaccaactttctgggtttttttctgtttcttcttagagtccagtggcagggagaaacttgtcagtccagtctgttgccatttttcctgtttgagaaagactcaccagcttttggctggctcacagattggctttccttgggtcaggacccacccttttccctgccagctttggaagcttgacagaattcgagtgtgcagtggtggtaaataaatagtaaggaacacagagcagtcctggaggcgtgcctccatctgctgatgagaaaatccagtgctgtcatccagcccaggtcccagcggaatgggcctctctgttcagtaggatccccctcctgctgagtggttcatggcatgtttctgttcaacgcttttccatctgtaggattcttattctgtatttatttgttgttttgggtttttttattttttgagatggagtctcgctctgtcgcccaggctggagtgcagtggcacgaccccagctcgctgcagcctctgcctcccaggacgagggagatcctcccacctcagccttccacgtagctgggactacaggcatgcaccacaggcatgcaccaccacgccagctaattttagtattttggtagagacagggttgcatcatgttgcccaggctggtcttgaatgcctgagctcaagcaatctatttgccttggcctcccaaagtgctgggattacaggcatgagccaccacggccagccttctcatttgttttttttataaggaagctatctcttcttccctccccaactagggtattctttttccctttcgtcactttgctcatgtactgtattccttcaacttcattaatgaatccatttggaagcagtgaaaaaggcaactcagaaagctaagaagaaatagatagaggaatactcagagctatctgagtattttctttagtttgttagctctttggagctttgaaactggaaagacccagggagtgatgtggagaaagagactgagcttgtaagacacaggagcagtgagctaagggagatggagtagtggggacaaattctggcacattctgtctacactctgggtagatagaggagggaggatggagcacccatggtgggggtatgttggtgacagcattttcccaccagccagtgtaacaagtggctgatttgggggaaagatggcataaacaaatgagagaatgtgtttactatttgatgtagatgggttatttgcttcatttttcaaatcagtgtatataatcaagaatattcagcatgtttgaatagactgtcagagctggaactctttcattaacatctctggcacctttagttttagccctgaacattttatcttaaaattaaacattaccaaatgccttagtttatttcatttattaaatttatattcttatttgttatttatatcagcttccaatcagaagactatacaacctcctaggaaagctgtagaggaaccccttaatgaataactgaagtgaagtgatggactccgatttggagagtagtaagacgtgaaaggaatacacttgtgtttaagcaccatggccttgatgattcactgttggggagaagaaacaagaaaagtaactggttgtcacctatgagacccttacgtgattgttagttaagtttttattcaaagcagctgtaatttagttaataaaataattatgatctatgt

SEQ ID NO: 318180 - DNA, 1312 bp, Homo sapiens
gcgggcggggagcaggcgggggagcgggcgggaagcagtgggagcgcgcgtgcgcgcggccgtgcagcctgggcagtgggtcctgcctgtgacgcgcggcggcggtcggtcctgcctgtaacggcggcggcggctgctgctccagacacctgcggcggcggcggcgaccccgcggcgggcgcggagatgtggcccctggtagcggcgctgttgctgggctcggcgtgctgcggatcagctcagctactatttaataaaacaaaatctgtagaattcacgttttgtaatgacactgtcgtcattccatgctttgttactaatatggaggcacaaaacactactgaagtatacgtaaagtggaaatttaaaggaagagatatttacacctttgatggagctctaaacaagtccactgtccccactgactttagtagtgcaaaaattgaagtctcacaattactaaaaggagatgcctctttgaagatggataagagtgatgctgtctcacacacaggaaactacacttgtgaagtaacagaattaaccagagaaggtgaaacgatcatcgagctaaaatatcgtgttgtttcatggttttctccaaatgaaaatattcttattgttattttcccaatttttgctatactcctgttctggggacagtttggtattaaaacacttaaatatagatccggtggtatggatgagaaaacaattgctttacttgttgctggactagtgatcactgtcattgtcattgttggagccattcttttcgtcccaggtgaatattcattaaagaatgctactggccttggtttaattgtgacttctacagggatattaatattacttcactactatgtgtttagtacagcgattggattaacctccttcgtcattgccatattggttattcaggtgatagcctatatcctcgctgtggttggactgagtctctgtattgcggcgtgtataccaatgcatggccctcttctgatttcaggtttgagtatcttagctctagcacaattacttggactagtttatatgaaatttgtggcttccaatcagaagactatacaacctcctaggaataactgaagtgaagtgatggactccgatttggagagtagtaagacgtgaaaggaatacacttgtgtttaagcaccatggccttgatgattcactgttggggagaagaaacaagaaaagtaactggttgtcacctatgagacccttacgtgattgttagttaagtttttattcaaagcagctgtaatttagttaataaaataattatgatctatgt

SEQ ID NO: 318181 - DNA, 1370 bp, Homo sapiens
gcgggcggggagcaggcgggggagcgggcgggaagcagtgggagcgcgcgtgcgcgcggccgtgcagcctgggcagtgggtcctgcctgtgacgcgcggcggcggtcggtcctgcctgtaacggcggcggcggctgctgctccagacacctgcggcggcggcggcgaccccgcggcgggcgcggagatgtggcccctggtagcggcgctgttgctgggctcggcgtgctgcggatcagctcagctactatttaataaaacaaaatctgtagaattcacgttttgtaatgacactgtcgtcattccatgctttgttactaatatggaggcacaaaacactactgaagtatacgtaaagtggaaatttaaaggaagagatatttacacctttgatggagctctaaacaagtccactgtccccactgactttagtagtgcaaaaattgaagtctcacaattactaaaaggagatgcctctttgaagatggataagagtgatgctgtctcacacacaggaaactacacttgtgaagtaacagaattaaccagagaaggtgaaacgatcatcgagctaaaatatcgtgttgtttcatggttttctccaaatgaaaatattcttattgttattttcccaatttttgctatactcctgttctggggacagtttggtattaaaacacttaaatatagatccggtggtatggatgagaaaacaattgctttacttgttgctggactagtgatcactgtcattgtcattgttggagccattcttttcgtcccaggtgaatattcattaaagaatgctactggccttggtttaattgtgacttctacagggatattaatattacttcactactatgtgtttagtacagcgattggattaacctccttcgtcattgccatattggttattcaggtgatagcctatatcctcgctgtggttggactgagtctctgtattgcggcgtgtataccaatgcatggccctcttctgatttcaggtttgagtatcttagctctagcacaattacttggactagtttatatgaaatttgtggcttccaatcagaagactatacaacctcctaggaaagctgtagaggaaccccttaatgcattcaaagaatcaaaaggaatgatgaatgatgaataactgaagtgaagtgatggactccgatttggagagtagtaagacgtgaaaggaatacacttgtgtttaagcaccatggccttgatgattcactgttggggagaagaaacaagaaaagtaactggttgtcacctatgagacccttacgtgattgttagttaagtttttattcaaagcagctgtaatttagttaataaaataattatgatctatgt

SEQ ID NO: 318182 - DNA, 4970 bp, Homo sapiens
gcgggcggggagcaggcgggggagcgggcgggaagcagtgggagcgcgcgtgcgcgcggccgtgcagcctgggcagtgggtcctgcctgtgacgcgcggcggcggtcggtcctgcctgtaacggcggcggcggctgctgctccagacacctgcggcggcggcggcgaccccgcggcgggcgcggagatgtggcccctggtagcggcgctgttgctgggctcggcgtgctgcggatcagctcagctactatttaataaaacaaaatctgtagaattcacgttttgtaatgacactgtcgtcattccatgctttgttactaatatggaggcacaaaacactactgaagtatacgtaaagtggaaatttaaaggaagagatatttacacctttgatggagctctaaacaagtccactgtccccactgactttagtagtgcaaaaattgaagtctcacaattactaaaaggagatgcctctttgaagatggataagagtgatgctgtctcacacacaggaaactacacttgtgaagtaacagaattaaccagagaaggtgaaacgatcatcgagctaaaatatcgtgttgtttcatggttttctccaaatgaaaatattcttattgttattttcccaatttttgctatactcctgttctggggacagtttggtattaaaacacttaaatatagatccggtggtatggatgagaaaacaattgctttacttgttgctggactagtgatcactgtcattgtcattgttggagccattcttttcgtcccaggtgaatattcattaaagaatgctactggccttggtttaattgtgacttctacagggatattaatattacttcactactatgtgtttagtacagcgattggattaacctccttcgtcattgccatattggttattcaggtgatagcctatatcctcgctgtggttggactgagtctctgtattgcggcgtgtataccaatgcatggccctcttctgatttcaggtttgagtatcttagctctagcacaattacttggactagtttatatgaaatttgtggcttccaatcagaagactatacaacctcctaggaataactgaagtgaagtgatggactccgatttggagagtagtaagacgtgaaaggaatacacttgtgtttaagcaccatggccttgatgattcactgttggggagaagaaacaagaaaagtaactggttgtcacctatgagacccttacgtgattgttagttaagtttttattcaaagcagctgtaatttagttaataaaataattatgatctatgttgtttgcccaattgagatccagttttttgttgttatttttaatcaattaggggcaatagtagaatggacaatttccaagaatgatgcctttcaggtcctagggcctctggcctctaggtaaccagtttaaattggttcagggtgataactacttagcactgccctggtgattacccagagatatctatgaaaaccagtggcttccatcaaacctttgccaactcaggttcacagcagctttgggcagttatggcagtatggcattagctgagaggtgtctgccacttctgggtcaatggaataataaattaagtacaggcaggaatttggttgggagcatcttgtatgatctccgtatgatgtgatattgatggagatagtggtcctcattcttgggggttgccattcccacattcccccttcaacaaacagtgtaacaggtccttcccagatttagggtacttttattgatggatatgttttccttttattcacataaccccttgaaaccctgtcttgtcctcctgttatttgcttctgctgtacaagatgtagcaccttttctcctctttgaacatggtctagtgacacggtagcaccagttgcaggaaggagccagacttgttctcagagcactgtgttcacacttttcagcaaaaatagctatggttgtgacatatgtattcccttcctctgatttgaaggcaaaaatctacagtgtttcttcacttcttttctgatctggggcatgaaaaaagcaagattgaaatttgaactatgagtctcctgcatggcaacaaaatgtgtgtcaccatcaggccaacaggccagccccttcccctatgattgaaaagtaaacaaaacccacatttcctatcctggttagaagaaaattaatgttctgacagttgtgatcgcctggagtacttttagacttttagcattcgttttttacctgtttgtggatgtgtgtttgtatgtgcatacgtatgagataggcacatgcatcttctgtatggacaaaggtggggtacctacaggagagcaaaggttaattttgtgcttttagtaaaaacatttaaatacaaagttctttattgggtggaattatatttgatgcaaatatttgatcacttaaaacttttaaaacttctaggtaatttgccacgctttttgactgctcaccaataccctgtaaaaatacgtaattcttcctgtttgtgtaataagatattcatatttgtagttgcattaataatagttatttcttagtccatcagatgttcccgtgtgcctcttttatgccaaattgattgtcatatttcatgttgggaccaagtagtttgcccatggcaaacctaaatttatgacctgctgaggcctctcagaaaactgagcatactagcaagacagctcttcttgatatgtatacacaaatatatacgtatatctatatatacgtatgtatatacacacatgtatattcttccttgattgtgtagctgtccaaaataataacatatatagagggagctgtattcctttatacaaatctgatggctcctgcagcactttttccttctgaaaatatttacattttgctaacctagtttgttactttaaaaatcagttttgatgaaaggagggaaaagcagatggacttgaaaaagatccaagctcctattagaaaaggtatgaaaatctttatagtaaaattttttataaactaaagttgtaccttttaatatgtagtaaactctcatttatttggggttcgctcttggatctcatccatccattgtgttctctttaatgctgcctgccttttgaggcattcactgccctagacaatgccaccagagatagtgggggaaatgccagatgaaaccaactcttgctctcactagttgtcagcttctctggataagtgaccacagaagcaggagtcctcctgcttgggcatcattgggccagttccttctctttaaatcagatttgtaatggctcccaaattccatcacatcacatttaaattgcagacagtgttttgcacatcatgtatctgttttgtcccataatatgctttttactccctgatcccagtttctgctgttgactcttccattcagttttatttattgtgtgttctcacagtgacaccatttgtccttttctgcaacaacctttccagctacttttgccaaattctatttgtcttctccttcaaaacattctcctttgcagttcctcttcatctgtgtagctgctcttttgtctcttaacttaccattcctatagtactttatgcatctctgcttagttctattagttttttggccttgctcttctccttgattttaaaattccttctatagctagagcttttctttctttcattctctcttcctgcagtgttttgcatacatcagaagctaggtacataagttaaatgattgagagttggctgtatttagatttatcactttttaatagggtgagcttgagagttttctttctttctgtttttttttttttttttttgactaatttcacatgctctaaaaaccttcaaaggtgattatttttctcctggaaactccaggtccattctgtttaaatccctaagaatgtcagaattaaaataacagggctatcccgtaattggaaatatttcttttttcaggatgctatagtcaatttagtaagtgaccaccaaattgttatttgcactaacaaagctcaaaacacgataagtttactcctccatctcagtaataaaaattaagctgtaatcaaccttctaggtttctcttgtcttaaaatgggtattcaaaaatggggatctgtggtgtatgtatggaaacacatactccttaatttacctgttgttggaaactggagaaatgattgtcgggcaaccgtttattttttattgtattttatttggttgagggatttttttataaacagttttacttgtgtcatattttaaaattactaactgccatcacctgctggggtcctttgttaggtcattttcagtgactaatagggataatccaggtaactttgaagagatgagcagtgagtgaccaggcagtttttctgcctttagctttgacagttcttaattaagatcattgaagaccagctttctcataaatttctctttttgaaaaaaagaaagcatttgtactaagctcctctgtaagacaacatcttaaatcttaaaagtgttgttatcatgactggtgagagaagaaaacattttgtttttattaaatggagcattatttacaaaaagccattgttgagaattagatcccacatcgtataaatatctattaaccattctaaataaagagaactccagtgttgctatgtgcaagatcctctcttggagcttttttgcatagcaattaaaggtgtgctatttgtcagtagccatttttttgcagtgatttgaagaccaaagttgttttacagctgtgttaccgttaaaggtttttttttttatatgtattaaatcaatttatcactgtttaaagctttgaatatctgcaatctttgccaaggtacttttttatttaaaaaaaaacataactttgtaaatattaccctgtaatattatatatacttaataaaacattttaagcta

SEQ ID NO: 318183 - DNA, 4733 bp, Homo sapiens
gcgggcggggagcaggcgggggagcgggcgggaagcagtgggagcgcgcgtgcgcgcggccgtgcagcctgggcagtgggtcctgcctgtgacgcgcggcggcggtcggtcctgcctgtaacggcggcggcggctgctgctccagacacctgcggcggcggcggcgaccccgcggcgggcgcggagatgtggcccctggtagcggcgctgttgctgggctcggcgtgctgcggatcagctcagctactatttaataaaacaaaatctgtagaattcacgttttgtaatgacactgtcgtcattccatgctttgttactaatatggaggcacaaaacactactgaagtatacgtaaagtggaaatttaaaggaagagatatttacacctttgatggagctctaaacaagtccactgtccccactgactttagtagtgcaaaaattgaagtctcacaattactaaaaggagatgcctctttgaagatggataagagtgatgctgtctcacacacaggaaactacacttgtgaagtaacagaattaaccagagaaggtgaaacgatcatcgagctaaaatatcgtgttgtttcatggttttctccaaatgaaaatattcttattgttattttcccaatttttgctatactcctgttctggggacagtttggtattaaaacacttaaatatagatccggtggtatggatgagaaaacaattgctttacttgttgctggactagtgatcactgtcattgtcattgttggagccattcttttcgtcccaggtgaatattcattaaagaatgctactggccttggtttaattgtgacttctacagggatattaatattacttcactactatgtgtttagtacagcgattggattaacctccttcgtcattgccatattggttattcaggtgatagcctatatcctcgctgtggttggactgagtctctgtattgcggcgtgtataccaatgcatggccctcttctgatttcaggtttgagtatcttagctctagcacaattacttggactagtttatatgaaatttgtggcttccaatcagaagactatacaacctcctaggaataactgaagtgaagtgatggactccgatttggagagtagtaagacgtgaaaggaatacacttgtgtttaagcaccatggccttgatgattcactgttggggagaagaaacaagaaaagtaactggttgtcacctatgagacccttacgtgattgttagttaagtttttattcaaagcagctgtaatttagttaataaaataattatgatctatgttgtttgcccaattgagatccagttttttgttgttatttttaatcaattaggggcaatagtagaatggacaatttccaagaatgatgcctttcaggtcctagggcctctggcctctaggtaaccagtttaaattggttcagggtgataactacttagcactgccctggtgattacccagagatatctatgaaaaccagtggcttccatcaaacctttgccaactcaggttcacagcagctttgggcagttatggcagtatggcattagctgagaggtgtctgccacttctgggtcaatggaataataaattaagtacaggcaggaatttggttgggagcatcttgtatgatctccgtatgatgtgatattgatggagatagtggtcctcattcttgggggttgccattcccacattcccccttcaacaaacagtgtaacaggtccttcccagatttagggtacttttattgatggatatgttttccttttattcacataaccccttgaaaccctgtcttgtcctcctgttatttgcttctgctgtacaagatgtagcaccttttctcctctttgaacatggtctagtgacacggtagcaccagttgcaggaaggagccagacttgttctcagagcactgtgttcacacttttcagcaaaaatagctatggttgtgacatatgtattcccttcctctgatttgaaggcaaaaatctacagtgtttcttcacttcttttctgatctggggcatgaaaaaagcaagattgaaatttgaactatgagtctcctgcatggcaacaaaatgtgtgtcaccatcaggccaacaggccagcccttgaatggggatttattactgttgtatctatgttgcatgataaacattcatcaccttcctcctgtagtcctgcctcgtactccccttcccctatgattgaaaagtaaacaaaacccacatttcctatcctggttagaagaaaattaatgttctgacagttgtgatcgcctggagtacttttagacttttagcattcgttttttacctgtttgtggatgtgtgtttgtatgtgcatacgtatgagataggcacatgcatcttctgtatggacaaaggtggggtacctacaggagagcaaaggttaattttgtgcttttagtaaaaacatttaaatacaaagttctttattgggtggaattatatttgatgcaaatatttgatcacttaaaacttttaaaacttctaggtaatttgccacgctttttgactgctcaccaataccctgtaaaaatacgtaattcttcctgtttgtgtaataagatattcatatttgtagttgcattaataatagttatttcttagtccatcagatgttcccgtgtgcctcttttatgccaaattgattgtcatatttcatgttgggaccaagtagtttgcccatggcaaacctaaatttatgacctgctgaggcctctcagaaaactgagcatactagcaagacagctcttcttgatatgtatatacacacatgtatattcttccttgattgtgtagctgtccaaaataataacatatatagagggagctgtattcctttatacaaatctgatggctcctgcagcactttttccttctgaaaatatttacattttgctaacctagtttgttactttaaaaatcagttttgatgaaaggagggaaaagcagatggacttgaaaaagatccaagctcctattagaaaaggtatgaaaatctttatagtaaaattttttataaactaaagttgtaccttttaatatgtagtaaactctcatttatttggggttcgctcttggatctcatccatccattgtgttctctttaatgctgcctgccttttgaggcattcactgccctagacaatgccaccagagatagtgggggaaatgccagatgaaaccaactcttgctctcactagttgtcagcttctctggataagtgaccacagaagcaggagtcctcctgcttgggcatcattgggccagttccttctctttaaatcagatttgtaatggctcccaaattccatcacatcacatttaaattgcagacagtgttttgcacatcatgtatctgttttgtcccataatatgctttttactccctgatcccagtttctgctgttgactcttccattcagttttatttattgtgtgttctcacagtgacaccatttgtccttttctgcaacaacctttccagctacttttgccaaattctatttgtcttctccttcaaaacattctcctttgcagttcctcttcatctgtgtagctgctcttttgtctcttaacttaccattcctatagtactttatgcatctctgcttagttctattagttttttggccttgctcttctccttgattttaaaattccttctatagctagagcttttctttctttcattctctcttcctgcagtgttttgcatacatcagaagctaggtacataagttaaatgattgagagttggctgtatttagatttatcactttttaatagggtgagcttgagagttttctttctttctgtttttttttttttttttttgactaatttcacatgctctaaaaaccttcaaaggtgattatttttctcctggaaactccaggtccattctgtttaaatccctaagaatgtcagaattaaaataacagggctatcccgtaattggaaatatttcttttttcaggatgctatagtcaatttagtaagtgaccaccaaattgttatttgcactaacaaagctcaaaacacgataagtttactcctccatctcagtaataaaaattaagctgtaatcaaccttctaggtttctcttgtcttaaaatgggtattcaaaaatggggatctgtggtgtatgtatggaaacacatactccttaatttacctgttgttggaaactggagaaatgattgtcgggcaaccgtttattttttattgtattttatttggttgagggatttttttataaacagttttacttgtgtcatattttaaaattactaactgccatcacctgctggggtcctttgttaggtcattttcagtgactaatagggataatccaggtaactttgaagagatgagcagtgagtgaccaggcagtttttctgcctttagctttgacagttcttaattaagatcattgaagaccagctttctcataaatttctctttttgaaaaaaagaaagcatttgtactaagctcctctgtaagacaacatcttaaatcttaaaagtgttgttatcatgactggtgagagaagaaaacattttgtttttattaaatgcgccaattatacacaaaggcattggtgtgtatagaccacaacggtatttatataacactcttaataagagcatccatggtggttgtgcgg

SEQ ID NO: 318184 - DNA, 4984 bp, Homo sapiens
gcgggcggggagcaggcgggggagcgggcgggaagcagtgggagcgcgcgtgcgcgcggccgtgcagcctgggcagtgggtcctgcctgtgacgcgcggcggcggtcggtcctgcctgtaacggcggcggcggctgctgctccagacacctgcggcggcggcggcgaccccgcggcgggcgcggagatgtggcccctggtagcggcgctgttgctgggctcggcgtgctgcggatcagctcagctactatttaataaaacaaaatctgtagaattcacgttttgtaatgacactgtcgtcattccatgctttgttactaatatggaggcacaaaacactactgaagtatacgtaaagtggaaatttaaaggaagagatatttacacctttgatggagctctaaacaagtccactgtccccactgactttagtagtgcaaaaattgaagtctcacaattactaaaaggagatgcctctttgaagatggataagagtgatgctgtctcacacacaggaaactacacttgtgaagtaacagaattaaccagagaaggtgaaacgatcatcgagctaaaatatcgtgttgtttcatggttttctccaaatgaaaatattcttattgttattttcccaatttttgctatactcctgttctggggacagtttggtattaaaacacttaaatatagatccggtggtatggatgagaaaacaattgctttacttgttgctggactagtgatcactgtcattgtcattgttggagccattcttttcgtcccaggtgaatattcattaaagaatgctactggccttggtttaattgtgacttctacagggatattaatattacttcactactatgtgtttagtacagcgattggattaacctccttcgtcattgccatattggttattcaggtgatagcctatatcctcgctgtggttggactgagtctctgtattgcggcgtgtataccaatgcatggccctcttctgatttcaggtttgagtatcttagctctagcacaattacttggactagtttatatgaaatttgtggaataactgaagtgaagtgatggactccgatttggagagtagtaagacgtgaaaggaatacacttgtgtttaagcaccatggccttgatgattcactgttggggagaagaaacaagaaaagtaactggttgtcacctatgagacccttacgtgattgttagttaagtttttattcaaagcagctgtaatttagttaataaaataattatgatctatgttgtttgcccaattgagatccagttttttgttgttatttttaatcaattaggggcaatagtagaatggacaatttccaagaatgatgcctttcaggtcctagggcctctggcctctaggtaaccagtttaaattggttcagggtgataactacttagcactgccctggtgattacccagagatatctatgaaaaccagtggcttccatcaaacctttgccaactcaggttcacagcagctttgggcagttatggcagtatggcattagctgagaggtgtctgccacttctgggtcaatggaataataaattaagtacaggcaggaatttggttgggagcatcttgtatgatctccgtatgatgtgatattgatggagatagtggtcctcattcttgggggttgccattcccacattcccccttcaacaaacagtgtaacaggtccttcccagatttagggtacttttattgatggatatgttttccttttattcacataaccccttgaaaccctgtcttgtcctcctgttatttgcttctgctgtacaagatgtagcaccttttctcctctttgaacatggtctagtgacacggtagcaccagttgcaggaaggagccagacttgttctcagagcactgtgttcacacttttcagcaaaaatagctatggttgtgacatatgtattcccttcctctgatttgaaggcaaaaatctacagtgtttcttcacttcttttctgatctggggcatgaaaaaagcaagattgaaatttgaactatgagtctcctgcatggcaacaaaatgtgtgtcaccatcaggccaacaggccagcccttgaatggggatttattactgttgtatctatgttgcatgataaacattcatcaccttcctcctgtagtcctgcctcgtactccccttcccctatgattgaaaagtaaacaaaacccacatttcctatcctggttagaagaaaattaatgttctgacagttgtgatcgcctggagtacttttagacttttagcattcgttttttacctgtttgtggatgtgtgtttgtatgtgcatacgtatgagataggcacatgcatcttctgtatggacaaaggtggggtacctacaggagagcaaaggttaattttgtgcttttagtaaaaacatttaaatacaaagttctttattgggtggaattatatttgatgcaaatatttgatcacttaaaacttttaaaacttctaggtaatttgccacgctttttgactgctcaccaataccctgtaaaaatacgtaattcttcctgtttgtgtaataagatattcatatttgtagttgcattaataatagttatttcttagtccatcagatgttcccgtgtgcctcttttatgccaaattgattgtcatatttcatgttgggaccaagtagtttgcccatggcaaacctaaatttatgacctgctgaggcctctcagaaaactgagcatactagcaagacagctcttcttgatatgtatatacacacatgtatattcttccttgattgtgtagctgtccaaaataataacatatatagagggagctgtattcctttatacaaatctgatggctcctgcagcactttttccttctgaaaatatttacattttgctaacctagtttgttactttaaaaatcagttttgatgaaaggagggaaaagcagatggacttgaaaaagatccaagctcctattagaaaaggtatgaaaatctttatagtaaaattttttataaactaaagttgtaccttttaatatgtagtaaactctcatttatttggggttcgctcttggatctcatccatccattgtgttctctttaatgctgcctgccttttgaggcattcactgccctagacaatgccaccagagatagtgggggaaatgccagatgaaaccaactcttgctctcactagttgtcagcttctctggataagtgaccacagaagcaggagtcctcctgcttgggcatcattgggccagttccttctctttaaatcagatttgtaatggctcccaaattccatcacatcacatttaaattgcagacagtgttttgcacatcatgtatctgttttgtcccataatatgctttttactccctgatcccagtttctgctgttgactcttccattcagttttatttattgtgtgttctcacagtgacaccatttgtccttttctgcaacaacctttccagctacttttgccaaattctatttgtcttctccttcaaaacattctcctttgcagttcctcttcatctgtgtagctgctcttttgtctcttaacttaccattcctatagtactttatgcatctctgcttagttctattagttttttggccttgctcttctccttgattttaaaattccttctatagctagagcttttctttctttcattctctcttcctgcagtgttttgcatacatcagaagctaggtacataagttaaatgattgagagttggctgtatttagatttatcactttttaatagggtgagcttgagagttttctttctttctgtttttttttttttttttttgactaatttcacatgctctaaaaaccttcaaaggtgattatttttctcctggaaactccaggtccattctgtttaaatccctaagaatgtcagaattaaaataacagggctatcccgtaattggaaatatttcttttttcaggatgctatagtcaatttagtaagtgaccaccaaattgttatttgcactaacaaagctcaaaacacgataagtttactcctccatctcagtaataaaaattaagctgtaatcaaccttctaggtttctcttgtcttaaaatgggtattcaaaaatggggatctgtggtgtatgtatggaaacacatactccttaatttacctgttgttggaaactggagaaatgattgtcgggcaaccgtttattttttattgtattttatttggttgagggatttttttataaacagttttacttgtgtcatattttaaaattactaactgccatcacctgctggggtcctttgttaggtcattttcagtgactaatagggataatccaggtaactttgaagagatgagcagtgagtgaccaggcagtttttctgcctttagctttgacagttcttaattaagatcattgaagaccagctttctcataaatttctctttttgaaaaaaagaaagcatttgtactaagctcctctgtaagacaacatcttaaatcttaaaagtgttgttatcatgactggtgagagaagaaaacattttgtttttattaaatggagcattatttacaaaaagccattgttgagaattagatcccacatcgtataaatatctattaaccattctaaataaagagaactccagtgttgctatgtgcaagatcctctcttggagcttttttgcatagcaattaaaggtgtgctatttgtcagtagccatttttttgcagtgatttgaagaccaaagttgttttacagctgtgttaccgttaaaggtttttttttttatatgtattaaatcaatttatcactgtttaaagctttgaatatctgcaatctttgccaaggtacttttttatttaaaaaaaaacataactttgtaaatattaccctgtaatattatatatacttaataaaacattttaagcta

SEQ ID NO: 318185 - DNA, 3591 bp, Homo sapiens
gcgggcggggagcaggcgggggagcgggcgggaagcagtgggagcgcgcgtgcgcgcggccgtgcagcctgggcagtgggtcctgcctgtgacgcgcggcggcggtcggtcctgcctgtaacggcggcggcggctgctgctccagacacctgcggcggcggcggcgaccccgcggcgggcgcggagatgtggcccctggtagcggcgctgttgctgggctcggcgtgctgcggatcagctcagctactatttaataaaacaaaatctgtagaattcacgttttgtaatgacactgtcgtcattccatgctttgttactaatatggaggcacaaaacactactgaagtatacgtaaagtggaaatttaaaggaagagatatttacacctttgatggagctctaaacaagtccactgtccccactgactttagtagtgcaaaaattgaagtctcacaattactaaaaggagatgcctctttgaagatggataagagtgatgctgtctcacacacaggaaactacacttgtgaagtaacagaattaaccagagaaggtgaaacgatcatcgagctaaaatatcgtgttgtttcatggttttctccaaatgaaaatattcttattgttattttcccaatttttgctatactcctgttctggggacagtttggtattaaaacacttaaatatagatccggtggtatggatgagaaaacaattgctttacttgttgctggactagtgatcactgtcattgtcattgttggagccattcttttcgtcccaggtgaatattcattaaagaatgctactggccttggtttaattgtgacttctacagggatattaatattacttcactactatgtgtttagtacagcgattggattaacctccttcgtcattgccatattggttattcaggtgatagcctatatcctcgctgtggttggactgagtctctgtattgcggcgtgtataccaatgcatggccctcttctgatttcaggtttgagtatcttagctctagcacaattacttggactagtttatatgaaatttgtggcttccaatcagaagactatacaacctcctaggaataactgaagtgaagtgatggactccgatttggagagtagtaagacgtgaaaggaatacacttgtgtttaagcaccatggccttgatgattcactgttggggagaagaaacaagaaaagtaactggttgtcacctatgagacccttacgtgattgttagttaagtttttattcaaagcagctgtaatttagttaataaaataattatgatctatgttgtttgcccaattgagatccagttttttgttgttatttttaatcaattaggggcaatagtagaatggacaatttccaagaatgatgcctttcaggtcctagggcctctggcctctaggtaaccagtttaaattggttcagggtgataactacttagcactgccctggtgattacccagagatatctatgaaaaccagtggcttccatcaaacctttgccaactcaggttcacagcagctttgggcagttatggcagtatggcattagctgagaggtgtctgccacttctgggtcaatggaataataaattaagtacaggcaggaatttggttgggagcatcttgtatgatctccgtatgatgtgatattgatggagatagtggtcctcattcttgggggttgccattcccacattcccccttcaacaaacagtgtaacaggtccttcccagatttagggtacttttattgatggatatgttttccttttattcacataaccccttgaaaccctgtcttgtcctcctgttatttgcttctgctgtacaagatgtagcaccttttctcctctttgaacatggtctagtgacacggtagcaccagttgcaggaaggagccagacttgttctcagagcactgtgttcacacttttcagcaaaaatagctatggttgtgacatatgtattcccttcctctgatttgaaggcaaaaatctacagtgtttcttcacttcttttctgatctggggcatgaaaaaagcaagattgaaatttgaactatgagtctcctgcatggcaacaaaatgtgtgtcaccatcaggccaacaggccagcccttgaatggggatttattactgttgtatctatgttgcatgataaacattcatcaccttcctcctgtagtcctgcctcgtactccccttcccctatgattgaaaagtaaacaaaacccacatttcctatcctggttagaagaaaattaatgttctgacagttgtgatcgcctggagtacttttagacttttagcattcgttttttacctgtttgtggatgtgtgtttgtatgtgcatacgtatgagataggcacatgcatcttctgtatggacaaaggtggggtacctacaggagagcaaaggttaattttgtgcttttagtaaaaacatttaaatacaaagttctttattgggtggaattatatttgatgcaaatatttgatcacttaaaacttttaaaacttctaggtaatttgccacgctttttgactgctcaccaataccctgtaaaaatacgtaattcttcctgtttgtgtaataagatattcatatttgtagttgcattaataatagttatttcttagtccatcagatgttcccgtgtgcctcttttatgccaaattgattgtcatatttcatgttgggaccaagtagtttgcccatggcaaacctaaatttatgacctgctgaggcctctcagaaaactgagcatactagcaagacagctcttcttgatatgtatatacacacatgtatattcttccttgattgtgtagctgtccaaaataataacatatatagagggagctgtattcctttatacaaatctgatggctcctgcagcactttttccttctgaaaatatttacattttgctaacctagtttgttactttaaaaatcagttttgatgaaaggagggaaaagcagatggacttgaaaaagatccaagctcctattagaaaaggtatgaaaatctttatagtaaaattttttataaactaaagttgtaccttttaatatgtagtaaactctcatttatttggggttcgctcttggatctcatccatccattgtgttctctttaatgctgcctgccttttgaggcattcactgccctagacaatgccaccagagatagtgggggaaatgccagatgaaaccaactcttgctctcactagttgtcagcttctctggataagtgaccacagaagcaggagtcctcctgcttgggcatcattgggccagttccttctctttaaatcagatttgtaatggctcccaaattccatcacatcacatttaaattgcagacagtgttttgcacatcatgtatctgttttgtcccataatatgctttttactccctgatcccagtttctgctgttgactcttccattcagttttatttattgtgtgttctcacagtgacaccatttgtcctactatcttcgtcactgccattccgattttaatgtatactcaggaacagctcatgaccatgata

SEQ ID NO: 318186 - DNA, 1824 bp, Homo sapiens
gcgggcggggagcaggcgggggagcgggcgggaagcagtgggagcgcgcgtgcgcgcggccgtgcagcctgggcagtgggtcctgcctgtgacgcgcggcggcggtcggtcctgcctgtaacggcggcggcggctgctgctccagacacctgcggcggcggcggcgaccccgcggcgggcgcggagatgtggcccctggtagcggcgctgttgctgggctcggcgtgctgcggatcagctcagctactatttaataaaacaaaatctgtagaattcacgttttgtaatgacactgtcgtcattccatgctttgttactaatatggaggcacaaaacactactgaagtatacgtaaagtggaaatttaaaggaagagatatttacacctttgatggagctctaaacaagtccactgtccccactgactttagtagtgcaaaaattgaagtctcacaattactaaaaggagatgcctctttgaagatggataagagtgatgctgtctcacacacaggaaactacacttgtgaagtaacagaattaaccagagaaggtgaaacgatcatcgagctaaaatatcgtgttgtttcatggttttctccaaatgaaaatattcttattgttattttcccaatttttgctatactcctgttctggggacagtttggtattaaaacacttaaatatagatccggtggtatggatgagaaaacaattgctttacttgttgctggactagtgatcactgtcattgtcattgttggagccattcttttcgtcccaggtgaatattcattaaagaatgctactggccttggtttaattgtgacttctacagggatattaatattacttcactactatgtgtttagtacagcgattggattaacctccttcgtcattgccatattggttattcaggtgatagcctatatcctcgctgtggttggactgagtctctgtattgcggcgtgtataccaatgcatggccctcttctgatttcaggtttgagtatcttagctctagcacaattacttggactagtttatatgaaatttgtggcttccaatcagaagactatacaacctcctaggaataactgaagtgaagtgatggactccgatttggagagtagtaagacgtgaaaggaatacacttgtgtttaagcaccatggccttgatgattcactgttggggagaagaaacaagaaaagtaactggttgtcacctatgagacccttacgtgattgttagttaagtttttattcaaagcagctgtaatttagttaataaaataattatgatctatgttgtttgcccaattgagatccagttttttgttgttatttttaatcaattaggggcaatagtagaatggacaatttccaagaatgatgcctttcaggtcctagggcctctggcctctaggtaaccagtttaaattggttcagggtgataactacttagcactgccctggtgattacccagagatatctatgaaaaccagtggcttccatcaaacctttgccaactcaggttcacagcagctttgggcagttatggcagtatggcattagctgagaggtgtctgccacttctgggtcaatggaataataaattaagtacaggcaggaatttggttgggagcatcttgtatgatctccgtatgatgtgatattgatggagatagtggtcctcattcttgggggttgccattcccacattcccccttcaacaaacagtgtaacaggtccttcccagatttagggtacttttattgatggaagcgtcgcgcatacgcttccatcaacctcatcttcag

SEQ ID NO: 318187 - DNA, 1835 bp, Homo sapiens
  misc_feature (1835)..(1835): n is a, c, g, or t
gcgggcggggagcaggcgggggagcgggcgggaagcagtgggagcgcgcgtgcgcgcggccgtgcagcctgggcagtgggtcctgcctgtgacgcgcggcggcggtcggtcctgcctgtaacggcggcggcggctgctgctccagacacctgcggcggcggcggcgaccccgcggcgggcgcggagatgtggcccctggtagcggcgctgttgctgggctcggcgtgctgcggatcagctcagctactatttaataaaacaaaatctgtagaattcacgttttgtaatgacactgtcgtcattccatgctttgttactaatatggaggcacaaaacactactgaagtatacgtaaagtggaaatttaaaggaagagatatttacacctttgatggagctctaaacaagtccactgtccccactgactttagtagtgcaaaaattgaagtctcacaattactaaaaggagatgcctctttgaagatggataagagtgatgctgtctcacacacaggaaactacacttgtgaagtaacagaattaaccagagaaggtgaaacgatcatcgagctaaaatatcgtgttgtttcatggttttctccaaatgaaaatattcttattgttattttcccaatttttgctatactcctgttctggggacagtttggtattaaaacacttaaatatagatccggtggtatggatgagaaaacaattgctttacttgttgctggactagtgatcactgtcattgtcattgttggagccattcttttcgtcccaggtgaatattcattaaagaatgctactggccttggtttaattgtgacttctacagggatattaatattacttcactactatgtgtttagtacagcgattggattaacctccttcgtcattgccatattggttattcaggtgatagcctatatcctcgctgtggttggactgagtctctgtattgcggcgtgtataccaatgcatggccctcttctgatttcaggtttgagtatcttagctctagcacaattacttggactagtttatatgaaatttgtggcttccaatcagaagactatacaacctcctaggaataactgaagtgaagtgatggactccgatttggagagtagtaagacgtgaaaggaatacacttgtgtttaagcaccatggccttgatgattcactgttggggagaagaaacaagaaaagtaactggttgtcacctatgagacccttacgtgattgttagttaagtttttattcaaagcagctgtaatttagttaataaaataattatgatctatgtaaaaaaaaaaaaaaaaaaaaaaaaaaaaaaaaaaaaaagggagaaggaaggacgcagaagagagctcccataaggatgccacaaaggggggcgcaaaaacacagaggtgtgatactcgaaaaaatggtgggccacaataagtggagcgagcaagagtgaaacacgataacaacaaccggcccggcacctgtcgacaacgcatacaaaccgggcggacatagccggccaacacagggcgcaaggtagggagagagagtgatacccacacacaaggcccgctagcctgccagtatacccacccacgctggggggacacacaccgtgcggcaaacccaagagactatcaccaacgaagtataagagccgccacaaactgagaagcaacctcccaaacaaagccacaaacgcggcgcgaaaaaacagcggccgcgacaatgcggcacggcaacctgagagacagggccagacaacaacccgcacaccagccgcgacgacacatcccaccccgctaacacccagaagn

SEQ ID NO: 318188 - DNA, 1417 bp, Homo sapiens
gcgggcggggagcaggcgggggagcgggcgggaagcagtgggagcgcgcgtgcgcgcggccgtgcagcctgggcagtgggtcctgcctgtgacgcgcggcggcggtcggtcctgcctgtaacggcggcggcggctgctgctccagacacctgcggcggcggcggcgaccccgcggcgggcgcggagatgtggcccctggtagcggcgctgttgctgggctcggcgtgctgcggatcagctcagctactatttaataaaacaaaatctgtagaattcacgttttgtaatgacactgtcgtcattccatgctttgttactaatatggaggcacaaaacactactgaagtatacgtaaagtggaaatttaaaggaagagatatttacacctttgatggagctctaaacaagtccactgtccccactgactttagtagtgcaaaaattgaagtctcacaattactaaaaggagatgcctctttgaagatggataagagtgatgctgtctcacacacaggaaactacacttgtgaagtaacagaattaaccagagaaggtgaaacgatcatcgagctaaaatatcgtgttgtttcatggttttctccaaatgaaaatattcttattgttattttcccaatttttgctatactcctgttctggggacagtttggtattaaaacacttaaatatagatccggtggtatggatgagaaaacaattgctttacttgttgctggactagtgatcactgtcattgtcattgttggagccattcttttcgtcccaggtgaatattcattaaagaatgctactggccttggtttaattgtgacttctacagggatattaatattacttcactactatgtgtttagtacagcgattggattaacctccttcgtcattgccatattggttattcaggtgatagcctatatcctcgctgtggttggactgagtctctgtattgcggcgtgtataccaatgcatggccctcttctgatttcaggtttgagtatcttagctctagcacaattacttggactagtttatatgaaatttgtggggttcagagggacacctacagtcagttgaaaggcaagaagagacaagcttccaatcagaagactatacaacctcctaggaaagctgtagaggaaccccttaatgcattcaaagaatcaaaaggaatgatgaatgatgaataactgaagtgaagtgatggactccgatttggagagtagtaagacgtgaaaggaatacacttgtgtttaagcaccatggccttgatgattcactgttggggagaagaaacaagaaaagtaactggttgtcacctatgagacccttacgtgattgttagttaagtttttattcaaagcagctgtaatttagttaataaaataattatgatctatgt

SEQ ID NO: 318189 - DNA, 1239 bp, Homo sapiens
gcgggcggggagcaggcgggggagcgggcgggaagcagtgggagcgcgcgtgcgcgcggccgtgcagcctgggcagtgggtcctgcctgtgacgcgcggcggcggtcggtcctgcctgtaacggcggcggcggctgctgctccagacacctgcggcggcggcggcgaccccgcggcgggcgcggagatgtggcccctggtagcggcgctgttgctgggctcggcgtgctgcggatcagctcagctactatttaataaaacaaaatctgtagaattcacgttttgtaatgacactgtcgtcattccatgctttgttactaatatggaggcacaaaacactactgaagtatacgtaaagtggaaatttaaaggaagagatatttacacctttgatggagctctaaacaagtccactgtccccactgactttagtagtgcaaaaattgaagtctcacaattactaaaaggagatgcctctttgaagatggataagagtgatgctgtctcacacacaggaaactacacttgtgaagtaacagaattaaccagagaaggtgaaacgatcatcgagctaaaatatcgtgttgtttcatggttttctccaaatgaaaatattcttattgttattttcccaatttttgctatactcctgttctggggacagtttggtattaaaacacttaaatatagatccggtggtatggatgagaaaacaattgctttacttgttgctggactagtgatcactgtcattgtcattgttggagccattcttttcgtcccaggtgaatattcattaaagaatgctactggccttggtttaattgtgacttctacagggatattaatattacttcactactatgtgtttagtacagcgattggattaacctccttcgtcattgccatattggttattcaggtgatagcctatatcctcgctgtggttggactgagtctctgtattgcggcgtgtataccaatgcatggccctcttctgatttcaggtttgagtatcttagctctagcacaattacttggactagtttatatgaaatttgtggcgtccatcagaagactatgaaccctcctaggaaagctgtagaggaaccccttaatgaataactgaagtgaagtgatggactccgatattggagagtcgtaagacgtgacaggcacccagcttatctttaagcatccgtgaacctcgatgatccctctgttgggccgaccgcccctt

SEQ ID NO: 318190 - DNA, 619 bp, Homo sapiens
gttttgtgtgtttgagggttagggagcagggcagctgccccctgtgtctcaattgttgattagtattttgtgactcgggtaggaaaacttctggctcaatttgtctgatatttttatttcccccccatagactgaggctgatgtgaatccaaaggcctatccccttgccgatgcccacctcaccaagaagctactggacctcgttcagcagtcatgtaactataagcagcttcggaaaggagccaatgagggtaaggcagccacaggatgctctgggggaatgttaaaggcacctgttaccatctggggcctctgatctgatttccagtttgggaggagggctagctgctctcgtctacaaccagtgggaggactttggcattagatgctaaagctgatgggctaagaattttttttagacccaccaattgttaacattttgccacatttaccttctttttcactctataagtgaattttatttttgctgagccatttgaaagcagttgtggagactgtatagtggctgtatgacctcaccagagccatcagaaggaaagggatattaatgctttttcagcatcccttatacggtggatacttaacattcatgaatttc

SEQ ID NO: 318191 - DNA, 1498 bp, Homo sapiens
tgccgcgcggggccatttccgctgctgcttctgtgagtttttccggtgcacgcgagtgcttctgaaacgtcagctgcgctcccctaggagtgctgagcccgcggaaccgcagccatgactgaggctgatgtgaatccaaaggcctatccccttgccgatgcccacctcaccaagaagctactggacctcgttcagcagtcatgtaactataagcagcttcggaaaggagccaatgaggccaccaaaaccctcaacaggggcatctctgagttcatcgtgatggctgcagacgccgagccactggagatcattctgcacctgccgctgctgtgtgaagacaagaatgtgccctacgtgtttgtgcgctccaagcaggccctggggagagcctgtggggtctccaggcctgtcatcgcctgttctgtcaccatcaaagaaggctcgcagctgaaacagcagatccaatccattcagcagtccattgaaaggctcttagtctaaacctgtggcctctgccacgtgctccctgccagcttcccccctgaggttgtgtatcatattatctgtgttagcatgtagtattttcagctactctctattgttataaaatgtagtactaaatctggtttctggattttgtgttgtttttgttctgttttacagggttgctatcccccttcctttcctccctccctctgccatccttcatccttttatcctccctttttggaacaagtgttcagagcagacagaagcagggtggtggcaccgttgaaaggcagaaagagccaggagaaagctgatggagccaggacagagatctggttccagctttcagccactagcttcctgttgtgtgcggggtgtggtggaattaaacagcattcattgtgtgtccctgtgcctggcacacagaatcattcatacgtgttcaagtgatcaaggggtttcatttgctcttgggggattaggtatcatttggggaggaagcatgtgttctgtgaggttgttcggctatgtccaagtgtcgtttactaatgtacccctgctgtttgcttttggtaatgtgatgttgatgttctccccctacccacaaccatgcccttgagggtagcagggcagcagcataccaaagagatgtgctgcaggactccggaggcggcctgggtgggtgagccatggggcagttgacctgggtcttgaaagagtcgggagtgacaagctcagagagcatgaactgatgctggcatgaaggattccaggaagatcatggagacctggctggtagctgtaacagagatggtggagtccaaggaaacagcctgtctctggtgaatgggactttctttggtggacacttggcaccagctctgagagcccttcccctgtgtcctgccaccatgtgggtcagatgtactctctgtcacatgaggagagtgctagttcatgtgttctccattcttgtgagcatcctaataaatctgttccattttgatga

SEQ ID NO: 318192 - DNA, 2088 bp, Homo sapiens
tgccgcgcggggccatttccgctgctgcttctgtgagtttttccggtgcacgcgagtgcttctgaaacgtcagctgcgctcccctaggagtgctgagcccgcggaaccgcagccatgactgaggctgatgtgaatccaaaggcctatccccttgccgatgcccacctcaccaagaagctactggacctcgttcagcagtcatgtaactataagcagcttcggaaaggagccaatgaggccaccaaaaccctcaacaggggcatctctgagttcatcgtgatggctgcagacgccgagccactggagatcattctgcacctgccgctgctgtgtgaagacaagaatgtgccctacgtgtttgtgcgctccaagcaggccctggggagagcctgtggggtctccaggcctgtcatcgcctgttctgtcaccatcaaagaaggctcgcagctgaaacagcagatccaatccattcagcagtccattgaaaggctcttagtctaaacctgtggcctctgccacgtgctccctgccagcttcccccctgaggttgtgtatcatattatctgtgttagcatgtagtattttcagctactctctattgttataaaatgtagtactaaatctggtttctggattttgtgttgtttttgttctgttttacagggttgctatcccccttcctttcctccctccctctgccatccttcatccttttatcctccctttttggaacaagtgttcagagcagacagaagcagggtggtggcaccgttgaaaggcagaaagagccaggagaaagctgatggagccaggacagagatctggttccagctttcagccactagcttcctgttgtgtgcggggtgtggtggaattaaacagcattcattgtgtgtccctgtgcctggcacacagaatcattcatacgtgttcaagtgatcaaggggtttcatttgctcttgggggattaggtatcatttggggaggaagcatgtgttctgtgaggttgttcggctatgtccaagtgtcgtttactaatgtacccctgctgtttgcttttggtaatgtgatgttgatgttctccccctacccacaaccatgcccttgagggtagcagggcagcagcataccaaagagatgtgctgcaggactccggaggcggcctgggtgggtgagccatggggcagttgacctgggtcttgaaagagtcgggagtgacaagctcagagagcatgaactgatgctggcatgaaggattccaggaagatcatggagacctggctggtagctgtaacagagatggtggagtccaaggaaacagcctgtctctggtgaatgggactttctttggtggacacttggcaccagctctgagagcccttcccctgtgtcctgccaccatgtgggtcagatgtactctctgtcacatgaggagagtgctagttcatgtgttctccattcttgtgagcatcctaataaatctgttccattttgatgaaaaaaaaaaaaaaaaaaaaaaaaaaaaaatttttgggcgcgcgacccgtgcgcgccctcccgaagaaagtttcttagaacacccatatcttgatttgggcggcgcggggcccccaaggtatgaggttaagagtgagacaaacgtgggacaaaacgtcgtgtttccctagaagaaacaccgggtgcctagaacaccagaggggcgggaaatattttccccaccatattgaaagaaagcgccccgcggagcggcaccccgggaggcttttggtgaaaaaaatctcccgacatagggggatttccagagaggatcactctcagcgggactctttttcacgagcggggagttccccaaggcgaactgcgcaatattccacatattaaggccccccgctctggggagacccccaaccccacgagacacacacaagcaccaaccagacagaaaaaacacgaaaaaccaacaaaacgacaaacaacacacagcacaccaccaccacacacagacacactaccaagaaaaaacaaaccccacaaccaaccacaaacgaacacaaaccacagaacaaacgaaaacacaaaagcacaaca

SEQ ID NO: 318193 - DNA, 1655 bp, Homo sapiens
  misc_feature (12)..(12): n is a, c, g, or t
  misc_feature (20)..(20): n is a, c, g, or t
  misc_feature (22)..(22): n is a, c, g, or t
aatcgctaggtncgaggcgngngtaggcggaacgcagccatgttgtcctgggaccaagacaaattcgcctaagataaggagttacgtagaagacagggcgtcctggtgtacgggctggccctggacgtcacttccgctggcggcagtggcgtcacttcctgctcttgggggcggggcatccgtgtccttgcggtgctgggcagcagaccgtccaaaccgacacgcgtggtatcctcgcggtgtccggcaagagactaccaagacagacgctatgactgaggctgatgtgaatccaaaggcctatccccttgccgatgcccacctcaccaagaagctactggacctcgttcagcagtcatgtaactataagcagcttcggaaaggagccaatgaggccaccaaaaccctcaacaggggcatctctgagttcatcgtgatggctgcagacgccgagccactggagatcattctgcacctgccgctgctgtgtgaagacaagaatgtgccctacgtgtttgtgcgctccaagcaggccctggggagagcctgtggggtctccaggcctgtcatcgcctgttctgtcaccatcaaagaaggctcgcagctgaaacagcagatccaatccattcagcagtccattgaaaggctcttagtctaaacctgtggcctctgccacgtgctccctgccagcttcccccctgaggttgtgtatcatattatctgtgttagcatgtagtattttcagctactctctattgttataaaatgtagtactaaatctggtttctggattttgtgttgtttttgttctgttttacagggttgctatcccccttcctttcctccctccctctgccatccttcatccttttatcctccctttttggaacaagtgttcagagcagacagaagcagggtggtggcaccgttgaaaggcagaaagagccaggagaaagctgatggagccaggacagagatctggttccagctttcagccactagcttcctgttgtgtgcggggtgtggtggaattaaacagcattcattgtgtgtccctgtgcctggcacacagaatcattcatacgtgttcaagtgatcaaggggtttcatttgctcttgggggattaggtatcatttggggaggaagcatgtgttctgtgaggttgttcggctatgtccaagtgtcgtttactaatgtacccctgctgtttgcttttggtaatgtgatgttgatgttctccccctacccacaaccatgcccttgagggtagcagggcagcagcataccaaagagatgtgctgcaggactccggaggcggcctgggtgggtgagccatggggcagttgacctgggtcttgaaagagtcgggagtgacaagctcagagagcatgaactgatgctggcatgaaggattccaggaagatcatggagacctggctggtagctgtaacagagatggtggagtccaaggaaacagcctgtctctggtgaatgggactttctttggtggacacttggcaccagctctgagagcccttcccctgtgtcctgccaccatgtgggtcagatgtactctctgtcacatgaggagagtgctagttcatgtgttctccattcttgtgagcatcctaataaatctgttccattttgatga

SEQ ID NO: 318194 - DNA, 1730 bp, Homo sapiens
tgccgcgcggggccatttccgctgctgcttctgtgagtttttccggtgcacgcgagtgcttctgaaacgtcagctgcgctcccctaggagtgctgagcccgcggaaccgcagccatgttgtcctgggaccaagacaaattcgcctaagataaggagttacgtagaagacagggcgtcctggtgtacgggctggccctggacgtcacttccgctggcggcagtggcgtcacttcctgctcttgggggcggggcatccgtgtccttgcggtgctgggcagcagaccgtccaaaccgacacgcgtggtatcctcgcggtgtccggcaagagactaccaagacagacgctatgactgaggctgatgtgaatccaaaggcctatccccttgccgatgcccacctcaccaagaagctactggacctcgttcagcagtcatgtaactataagcagcttcggaaaggagccaatgaggccaccaaaaccctcaacaggggcatctctgagttcatcgtgatggctgcagacgccgagccactggagatcattctgcacctgccgctgctgtgtgaagacaagaatgtgccctacgtgtttgtgcgctccaagcaggccctggggagagcctgtggggtctccaggcctgtcatcgcctgttctgtcaccatcaaagaaggctcgcagctgaaacagcagatccaatccattcagcagtccattgaaaggctcttagtctaaacctgtggcctctgccacgtgctccctgccagcttcccccctgaggttgtgtatcatattatctgtgttagcatgtagtattttcagctactctctattgttataaaatgtagtactaaatctggtttctggattttgtgttgtttttgttctgttttacagggttgctatcccccttcctttcctccctccctctgccatccttcatccttttatcctccctttttggaacaagtgttcagagcagacagaagcagggtggtggcaccgttgaaaggcagaaagagccaggagaaagctgatggagccaggacagagatctggttccagctttcagccactagcttcctgttgtgtgcggggtgtggtggaattaaacagcattcattgtgtgtccctgtgcctggcacacagaatcattcatacgtgttcaagtgatcaaggggtttcatttgctcttgggggattaggtatcatttggggaggaagcatgtgttctgtgaggttgttcggctatgtccaagtgtcgtttactaatgtacccctgctgtttgcttttggtaatgtgatgttgatgttctccccctacccacaaccatgcccttgagggtagcagggcagcagcataccaaagagatgtgctgcaggactccggaggcggcctgggtgggtgagccatggggcagttgacctgggtcttgaaagagtcgggagtgacaagctcagagagcatgaactgatgctggcatgaaggattccaggaagatcatggagacctggctggtagctgtaacagagatggtggagtccaaggaaacagcctgtctctggtgaatgggactttctttggtggacacttggcaccagctctgagagcccttcccctgtgtcctgccaccatgtgggtcagatgtactctctgtcacatgaggagagtgctagttcatgtgttctccattcttgtgagcatcctaataaatctgttccattttgatga

SEQ ID NO: 318195 - DNA, 2104 bp, Homo sapiens
tgccgcgcggggccatttccgctgctgcttctgtgagtttttccggtgcacgcgagtgcttctgaaacgtcagctgcgctcccctaggagtgctgagcccgcggaaccgcagccatggaggagatctcccatgggtctgcgcttagtgcccgccgcgagtcacacgcgccagggacctagaggagcctttggcatttgggggctgtggggaacatgaagtgagcgcgactcacggcctggagtgcaggaaaggcttctcctgcaaggcggtggcttcaaaaaccagaagtctggtagcaccacgtgcggcgtctctaaactcttggtcgtctctgacttttaaacatctagggaaagttctaaaacgtgtgtcctggcgtagtagttttggttggcacttggtgaggagggaagaatttgtaaagcactgtaacttctatagttaatccttccagtggagcttggatcccggcggtagcactccccacaaacctcctcccatgcattttgaagcttagtacgtggctgagcctagaacttgaagcttccaaactcagtgctcgctttaacgcagctccctgaaacgttttggaatcggatggtctcaggttgaactttgcagttttcctcaactgtaaaatggggatgacagtgcatgagggtgttgtgaggatcaaatgaaataaagcatggtaaacatctagtcctgatgcttggtacagaactgaggctgatgtgaatccaaaggcctatccccttgccgatgcccacctcaccaagaagctactggacctcgttcagcagtcatgtaactataagcagcttcggaaaggagccaatgaggccaccaaaaccctcaacaggggcatctctgagttcatcgtgatggctgcagacgccgagccactggagatcattctgcacctgccgctgctgtgtgaagacaagaatgtgccctacgtgtttgtgcgctccaagcaggccctggggagagcctgtggggtctccaggcctgtcatcgcctgttctgtcaccatcaaagaaggctcgcagctgaaacagcagatccaatccattcagcagtccattgaaaggctcttagtctaaacctgtggcctctgccacgtgctccctgccagcttcccccctgaggttgtgtatcatattatctgtgttagcatgtagtattttcagctactctctattgttataaaatgtagtactaaatctggtttctggattttgtgttgtttttgttctgttttacagggttgctatcccccttcctttcctccctccctctgccatccttcatccttttatcctccctttttggaacaagtgttcagagcagacagaagcagggtggtggcaccgttgaaaggcagaaagagccaggagaaagctgatggagccaggacagagatctggttccagctttcagccactagcttcctgttgtgtgcggggtgtggtggaattaaacagcattcattgtgtgtccctgtgcctggcacacagaatcattcatacgtgttcaagtgatcaaggggtttcatttgctcttgggggattaggtatcatttggggaggaagcatgtgttctgtgaggttgttcggctatgtccaagtgtcgtttactaatgtacccctgctgtttgcttttggtaatgtgatgttgatgttctccccctacccacaaccatgcccttgagggtagcagggcagcagcataccaaagagatgtgctgcaggactccggaggcggcctgggtgggtgagccatggggcagttgacctgggtcttgaaagagtcgggagtgacaagctcagagagcatgaactgatgctggcatgaaggattccaggaagatcatggagacctggctggtagctgtaacagagatggtggagtccaaggaaacagcctgtctctggtgaatgggactttctttggtggacacttggcaccagctctgagagcccttcccctgtgtcctgccaccatgtgggtcagatgtactctctgtcacatgaggagagtgctagttcatgtgttctccattcttgtgagcatcctaataaatctgttccattttgatga

SEQ ID NO: 318196 - DNA, 2079 bp, Homo sapiens
catacgaaatctacgatggcgtgggaccctgggattcggatcaacctctcctacccaccctacctcaccccacccccgttgctggggttcaggaggagatctcccatgggtctgcgcttagtgcccgccgcgagtcacacgcgccagggacctagaggagcctttggcatttgggggctgtggggaacatgaagtgagcgcgactcacggcctggagtgcaggaaaggcttctcctgcaaggcggtggcttcaaaaaccagaagtctggtagcaccacgtgcggcgtctctaaactcttggtcgtctctgacttttaaacatctagggaaagttctaaaacgtgtgtcctggcgtagtagttttggttggcacttggtgaggagggaagaatttgtaaagcactgtaacttctatagttaatccttccagtggagcttggatcccggcggtagcactccccacaaacctcctcccatgcattttgaagcttagtacgtggctgagcctagaacttgaagcttccaaactcagtgctcgctttaacgcagctccctgaaacgttttggaatcggatggtctcaggttgaactttgcagttttcctcaactgtaaaatggggatgacagtgcatgagggtgttgtgaggatcaaatgaaataaagcatggtaaacatctagtcctgatgcttggtacagaactgaggctgatgtgaatccaaaggcctatccccttgccgatgcccacctcaccaagaagctactggacctcgttcagcagtcatgtaactataagcagcttcggaaaggagccaatgaggccaccaaaaccctcaacaggggcatctctgagttcatcgtgatggctgcagacgccgagccactggagatcattctgcacctgccgctgctgtgtgaagacaagaatgtgccctacgtgtttgtgcgctccaagcaggccctggggagagcctgtggggtctccaggcctgtcatcgcctgttctgtcaccatcaaagaaggctcgcagctgaaacagcagatccaatccattcagcagtccattgaaaggctcttagtctaaacctgtggcctctgccacgtgctccctgccagcttcccccctgaggttgtgtatcatattatctgtgttagcatgtagtattttcagctactctctattgttataaaatgtagtactaaatctggtttctggattttgtgttgtttttgttctgttttacagggttgctatcccccttcctttcctccctccctctgccatccttcatccttttatcctccctttttggaacaagtgttcagagcagacagaagcagggtggtggcaccgttgaaaggcagaaagagccaggagaaagctgatggagccaggacagagatctggttccagctttcagccactagcttcctgttgtgtgcggggtgtggtggaattaaacagcattcattgtgtgtccctgtgcctggcacacagaatcattcatacgtgttcaagtgatcaaggggtttcatttgctcttgggggattaggtatcatttggggaggaagcatgtgttctgtgaggttgttcggctatgtccaagtgtcgtttactaatgtacccctgctgtttgcttttggtaatgtgatgttgatgttctccccctacccacaaccatgcccttgagggtagcagggcagcagcataccaaagagatgtgctgcaggactccggaggcggcctgggtgggtgagccatggggcagttgacctgggtcttgaaagagtcgggagtgacaagctcagagagcatgaactgatgctggcatgaaggattccaggaagatcatggagacctggctggtagctgtaacagagatggtggagtccaaggaaacagcctgtctctggtgaatgggactttctttggtggacacttggcaccagctctgagagcccttcccctgtgtcctgccaccatgtgggtcagatgtactctctgtcacatgaggagagtgctagttcatgtgttctccattcttgtgagcatcctaataaatctgttccattttgatga

SEQ ID NO: 318197 - DNA, 1747 bp, Homo sapiens
tgccgcgcggggccatttccgctgctgcttctgtgagtttttccggtgcacgcgagtgcttctgaaacgtcagctgcgctcccctaggagtgctgagcccgcggaaccgcagccatggaggagatctcccatgggtctgcgcttagtgcccgccgcgagtcacacgcgccagggacctagaggagcctttggcatttgggggctgtggggaacatgaagtgagcgcgactcacggcctggagtgcaggaaaggcttctcctgcaaggcggtggcttcaaaaaccagaagtctggtagcaccacgtgcggcgtctctaaactcttggtcgtctctgacttttaaacatctagggaaagttctaaaacactgaggctgatgtgaatccaaaggcctatccccttgccgatgcccacctcaccaagaagctactggacctcgttcagcagtcatgtaactataagcagcttcggaaaggagccaatgaggccaccaaaaccctcaacaggggcatctctgagttcatcgtgatggctgcagacgccgagccactggagatcattctgcacctgccgctgctgtgtgaagacaagaatgtgccctacgtgtttgtgcgctccaagcaggccctggggagagcctgtggggtctccaggcctgtcatcgcctgttctgtcaccatcaaagaaggctcgcagctgaaacagcagatccaatccattcagcagtccattgaaaggctcttagtctaaacctgtggcctctgccacgtgctccctgccagcttcccccctgaggttgtgtatcatattatctgtgttagcatgtagtattttcagctactctctattgttataaaatgtagtactaaatctggtttctggattttgtgttgtttttgttctgttttacagggttgctatcccccttcctttcctccctccctctgccatccttcatccttttatcctccctttttggaacaagtgttcagagcagacagaagcagggtggtggcaccgttgaaaggcagaaagagccaggagaaagctgatggagccaggacagagatctggttccagctttcagccactagcttcctgttgtgtgcggggtgtggtggaattaaacagcattcattgtgtgtccctgtgcctggcacacagaatcattcatacgtgttcaagtgatcaaggggtttcatttgctcttgggggattaggtatcatttggggaggaagcatgtgttctgtgaggttgttcggctatgtccaagtgtcgtttactaatgtacccctgctgtttgcttttggtaatgtgatgttgatgttctccccctacccacaaccatgcccttgagggtagcagggcagcagcataccaaagagatgtgctgcaggactccggaggcggcctgggtgggtgagccatggggcagttgacctgggtcttgaaagagtcgggagtgacaagctcagagagcatgaactgatgctggcatgaaggattccaggaagatcatggagacctggctggtagctgtaacagagatggtggagtccaaggaaacagcctgtctctggtgaatgggactttctttggtggacacttggcaccagctctgagagcccttcccctgtgtcctgccaccatgtgggtcagatgtactctctgtcacatgaggagagtgctagttcatgtgttctccattcttgtgagcatcctaataaatctgttccattttgatga

SEQ ID NO: 318198 - DNA, 764 bp, Homo sapiens
  misc_feature (695)..(695): n is a, c, g, or t
tgccgcgcggggccatttccgctgctgcttctgtgagtttttccggtgcacgcgagtgcttctgaaacgtcagctgcgctcccctaggagtgctgagcccgcggaaccgcagccatgactgaggctgatgtgaatccaaaggcctatccccttgccgatgcccacctcaccaagaagctactggacctcgttcagcagtcatgtaactataagcagcttcggaaaggagccaatgaggccaccaaaaccctcaacaggggcatctctgagttcatcgtgatggctgcagacgccgagccactggagatcattctgcacctgccgctgctgtgtgaagacaagaatgtgccctacgtgtttgtgcgctccaagcaggccctggggagagcctgtggggtctccaggcctgtcatcgcctgttctgtcaccatcaaagaaggctcgcagctgaaacagcagatccaatccattcagcagtccattgaaaggctcttagtctaaacctgtggcctctgccacgtgctccctgccagcttcccccctgaggttgtgtatcatattatctgtgttagcatgtagtattttcagctactctctattgttataaaatgtagtactaaatcaaaaaaaaaaaaaaaaaaaaaaaaaaccgggggctttatgggggggggggaaaaaggggtaaggaatgggcntgggcaaaaggggttcggagaccacatttttttgggccccagggggtaaattggggggggcccccaaaa

SEQ ID NO: 318199 - DNA, 1152 bp, Homo sapiens
tgccgcgcggggccatttccgctgctgcttctgtgagtttttccggtgcacgcgagtgcttctgaaacgtcagctgcgctcccctaggagtgctgagcccgcggaaccgcagccatgactgaggctgatgtgaatccaaaggcctatccccttgccgatgcccacctcaccaagaagctactggacctcgttcagcagtcatgtaactataagcagcttcggaaaggagccaatgaggccaccaaaaccctcaacaggggcatctctgagttcatcgtgatggctgcagacgccgagccactggagatcattctgcacctgccgctgctgtgtgaagacaagaatgtgccctacgtgtttgtgcgctccaagcaggccctggggagagcctgtggggtctccaggcctgtcatcgcctgttctgtcaccatcaaagaaggctcgcagctgaaacagcagatccaatccattcagcagtccattgaaaggctcttagtctaaacctgtggcctctgccacgtgctccctgccagcttcccccctgaggttgtgtatcatattatctgtgttagcatgtagtattttcagctactctctattgttataaaatgtagtactaaatcaacaaacaaaaccacaacacttccaaggactactatgtcagattcgcgcagcaacgccggcacacgacacgggcccactggtccaaaggcggacccgaaccagaacttcgccgccaccaggggacacatccgacggacacaccaaaaaagcacgaccgcacacacaaccacacaacaggccagggttaaccgaggataagaaaccccgaaaagaaaaaacaagcacaaaaacgacggggagaagagaaaagagacaaccacacgggggacacgagagaagaacgaggaaccgacctggacaaagagaaatgaagagacacacaaacaagcactggtaccacagaaaagacccaaagcacaacgggaacaccacaaccacgacagagaccggagcaagaaatctcgacagagaaacaagaaaggacaagagaggggcagagaagagagacaaatcagggggacagtgacatacaaaccaaaaaaaacacactaaacgagaaggagtcaacgccccgagtaccgcaacacg

SEQ ID NO: 318200 - DNA, 803 bp, Homo sapiens
tgccgcgcggggccatttccgctgctgcttctgtgagtttttccggtgcacgcgagtgcttctgaaacgtcagctgcgctcccctaggagtgctgagcccgcggaaccgcagccatgactgaggctgatgtgaatccaaaggcctatccccttgccgatgcccacctcaccaagaagctactggacctcgttcagcagtcatgtaactataagcagcttcggaaaggagccaatgaggccaccaaaaccctcaacaggggcatctctgagttcatcgtgatggctgcagacgccgagccactggagatcattctgcacctgccgctgctgtgtgaagacaagaatgtgccctacgtgtttgtgcgctccaagcaggccctggggagagcctgtggggtctccaggcctgtcatcgcctgttctgtcaccatcaaagaaggctcgcagctgaaacagcagatccaatccattcagcagtccattgaaaggctcttagtctaaacctgtggcctctgccacgtgctccctgccagcttcccccctgaggttgtgtatcatattatctgtgttagcatgtagtattttcagctactctctattgttataaaatgtagtactaaatctaccagaaaagaggaaattccatgtaataggaagccggagggtgctcgtttcgggccgggacccagaagtggttgagaggggccgcgctcaggtttttgcccaccaccccgctttttggtgccagggggaaagccggggcgccccaataaggagggaaatggcaaaagacgtcaccctgg

SEQ ID NO: 318201 - DNA, 758 bp, Homo sapiens
  misc_feature (631)..(632): n is a, c, g, or t
  misc_feature (635)..(635): n is a, c, g, or t
tgccgcgcggggccatttccgctgctgcttctgtgagtttttccggtgcacgcgagtgcttctgaaacgtcagctgcgctcccctaggagtgctgagcccgcggaaccgcagccatgactgaggctgatgtgaatccaaaggcctatccccttgccgatgcccacctcaccaagaagctactggacctcgttcagcagtcatgtaactataagcagcttcggaaaggagccaatgaggccaccaaaaccctcaacaggggcatctctgagttcatcgtgatggctgcagacgccgagccactggagatcattctgcacctgccgctgctgtgtgaagacaagaatgtgccctacgtgtttgtgcgctccaagcaggccctggggagagcctgtggggtctccaggcctgtcatcgcctgttctgtcaccatcaaagaaggctcgcagctgaaacagcagatccaatccattcagcagtccattgaaaggctcttagtctaaacctgtggcctctgccacgtgctccctgccagcttcccccctgaggttgtgtatcatattatctgtgttagcatgtagtattttcagctactctctattgttataaaatgtagtactaaatcatctcaannaanaaaaaggccgattacaattactgggcggcgtttacaaagtcgggactgggccctggggttaccaacttattggcctggggacatccccctttgcagatgggggatacgggccgccccgccttc

SEQ ID NO: 318202 - DNA, 697 bp, Homo sapiens
tgccgcgcggggccatttccgctgctgcttctgtgagtttttccggtgcacgcgagtgcttctgaaacgtcagctgcgctcccctaggagtgctgagcccgcggaaccgcagccatgactgaggctgatgtgaatccaaaggcctatccccttgccgatgcccacctcaccaagaagctactggacctcgttcagcagtcatgtaactataagcagcttcggaaaggagccaatgaggccaccaaaaccctcaacaggggcatctctgagttcatcgtgatggctgcagacgccgagccactggagatcattctgcacctgccgctgctgtgtgaagacaagaatgtgccctacgtgtttgtgcgctccaagcaggccctggggagagcctgtggggtctccaggcctgtcatcgcctgttctgtcaccatcaaagaaggctcgcagctgaaacagcagatccaatccattcagcagtccattgaaaggctcttagtctaaacctgtggcctctgccacgtgctccctgccagcttcccccctgaggttgtgtatcatattatctgtgttagcatgtagtattttcagctactctctattgttataaaatgtagtactaaatctggagctatttgccctttcaatagtggatttttcaaatattgtaaactcaaaactacaaaaaccaccttggcat

SEQ ID NO: 318203 - DNA, 1781 bp, Homo sapiens
ggcacagtggctcatacctgtaatttcagcactttgggaggccgaggtgggtggatcacttgaggtcaggagtttgagaccagcctggacaacatggtgaagccctctctctactaaaaatacaaaaattagctaaacacagtggcacgtgcctgtaatcccagctgcttgggagactgaggcaggagaatcacttaaacccgggaagcggaggttgaagtgagccaagatcgcaccactgcactccagctgtgtgacagagcaagactccatctcaaaaaaaaaaaagaagaagaagaagtggtcagattcaggacgtgtttggaggataagtggtggatttaatgtagggcttgagaaaatgccattgtgtatgactgactggtgtttgaatcctttatcatatcccagggccggtctaggacacataattgtgtgtgcctaggcattcttcccagtttgttgtggctgccctgcccaagcccacatcacctattagcttcacgtccttctctccgcagccaccaaaaccctcaacaggggcatctctgagttcatcgtgatggctgcagacgccgagccactggagatcattctgcacctgccgctgctgtgtgaagacaagaatgtgccctacgtgtttgtgcgctccaagcaggccctggggagagcctgtggggtctccaggcctgtcatcgcctgttctgtcaccatcaaagaaggctcgcagctgaaacagcagatccaatccattcagcagtccattgaaaggctcttagtctaaacctgtggcctctgccacgtgctccctgccagcttcccccctgaggttgtgtatcatattatctgtgttagcatgtagtattttcagctactctctattgttataaaatgtagtactaaatctggtttctggattttgtgttgtttttgttctgttttacagggttgctatcccccttcctttcctccctccctctgccatccttcatccttttatcctccctttttggaacaagtgttcagagcagacagaagcagggtggtggcaccgttgaaaggcagaaagagccaggagaaagctgatggagccaggacagagatctggttccagctttcagccactagcttcctgttgtgtgcggggtgtggtggaattaaacagcattcattgtgtgtccctgtgcctggcacacagaatcattcatacgtgttcaagtgatcaaggggtttcatttgctcttgggggattaggtatcatttggggaggaagcatgtgttctgtgaggttgttcggctatgtccaagtgtcgtttactaatgtacccctgctgtttgcttttggtaatgtgatgttgatgttctccccctacccacaaccatgcccttgagggtagcagggcagcagcataccaaagagatgtgctgcaggactccggaggcggcctgggtgggtgagccatggggcagttgacctgggtcttgaaagagtcgggagtgacaagctcagagagcatgaactgatgctggcatgaaggattccaggaagatcatggagacctggctggtagctgtaacagagatggtggagtccaaggaaacagcctgtctctggtgaatgggactttctttggtggacacttggcaccagctctgagagcccttcccctgtgtcctgccaccatgtgggtcagatgtactctctgtcacatgaggagagtgctagttcatgtgttctccattcttgtgagcatcctaataaatctgttccattttgatga

SEQ ID NO: 318204 - DNA, 1660 bp, Homo sapiens
cagctacttgggaggctgaggcaggagaatcacttaaacccggctgcttgggagactgaggcaggagaatcacttaaacccgggaagcggaggttgaagtgagccaagatcgcaccactgcactccagctgtgtgacagagcaagactccatctcaaaaaaaaaaaagaagaagaagaagtggtcagattcaggacgtgtttggaggataagtggtggatttaatgtagggcttgagaaaatgccattgtgtatgactgactggtgtttgaatcctttatcatatcccagggccggtctaggacacataattgtgtgtgcctaggcattcttcccagtttgttgtggctgccctgcccaagcccacatcacctattagcttcacgtccttctctccgcagccaccaaaaccctcaacaggggcatctctgagttcatcgtgatggctgcagacgccgagccactggagatcattctgcacctgccgctgctgtgtgaagacaagaatgtgccctacgtgtttgtgcgctccaagcaggccctggggagagcctgtggggtctccaggcctgtcatcgcctgttctgtcaccatcaaagaaggctcgcagctgaaacagcagatccaatccattcagcagtccattgaaaggctcttagtctaaacctgtggcctctgccacgtgctccctgccagcttcccccctgaggttgtgtatcatattatctgtgttagcatgtagtattttcagctactctctattgttataaaatgtagtactaaatctggtttctggattttgtgttgtttttgttctgttttacagggttgctatcccccttcctttcctccctccctctgccatccttcatccttttatcctccctttttggaacaagtgttcagagcagacagaagcagggtggtggcaccgttgaaaggcagaaagagccaggagaaagctgatggagccaggacagagatctggttccagctttcagccactagcttcctgttgtgtgcggggtgtggtggaattaaacagcattcattgtgtgtccctgtgcctggcacacagaatcattcatacgtgttcaagtgatcaaggggtttcatttgctcttgggggattaggtatcatttggggaggaagcatgtgttctgtgaggttgttcggctatgtccaagtgtcgtttactaatgtacccctgctgtttgcttttggtaatgtgatgttgatgttctccccctacccacaaccatgcccttgagggtagcagggcagcagcataccaaagagatgtgctgcaggactccggaggcggcctgggtgggtgagccatggggcagttgacctgggtcttgaaagagtcgggagtgacaagctcagagagcatgaactgatgctggcatgaaggattccaggaagatcatggagacctggctggtagctgtaacagagatggtggagtccaaggaaacagcctgtctctggtgaatgggactttctttggtggacacttggcaccagctctgagagcccttcccctgtgtcctgccaccatgtgggtcagatgtactctctgtcacatgaggagagtgctagttcatgtgttctccattcttgtgagcatcctaataaatctgttccattttgatga

SEQ ID NO: 318205 - DNA, 1762 bp, Homo sapiens
actacctccctttgtaaaaaaggaaaaaaaaaaagctgtttttcagtagaataattatgtatgcatgatgcttctgcccagaggtgatataggatactctcactttattcattattatttttttaattttattttatttatttatttatttttttatttggagagttttgctcttttaaacccgggaagcggaggttgaagtgagccaagatcgcaccactgcactccagctgtgtgacagagcaagactccatctcaaaaaaaaaaaagaagaagaagaagtggtcagattcaggacgtgtttggaggataagtggtggatttaatgtagggcttgagaaaatgccattgtgtatgactgactggtgtttgaatcctttatcatatcccagggccggtctaggacacataattgtgtgtgcctaggcattcttcccagtttgttgtggctgccctgcccaagcccacatcacctattagcttcacgtccttctctccgcagccaccaaaaccctcaacaggggcatctctgagttcatcgtgatggctgcagacgccgagccactggagatcattctgcacctgccgctgctgtgtgaagacaagaatgtgccctacgtgtttgtgcgctccaagcaggccctggggagagcctgtggggtctccaggcctgtcatcgcctgttctgtcaccatcaaagaaggctcgcagctgaaacagcagatccaatccattcagcagtccattgaaaggctcttagtctaaacctgtggcctctgccacgtgctccctgccagcttcccccctgaggttgtgtatcatattatctgtgttagcatgtagtattttcagctactctctattgttataaaatgtagtactaaatctggtttctggattttgtgttgtttttgttctgttttacagggttgctatcccccttcctttcctccctccctctgccatccttcatccttttatcctccctttttggaacaagtgttcagagcagacagaagcagggtggtggcaccgttgaaaggcagaaagagccaggagaaagctgatggagccaggacagagatctggttccagctttcagccactagcttcctgttgtgtgcggggtgtggtggaattaaacagcattcattgtgtgtccctgtgcctggcacacagaatcattcatacgtgttcaagtgatcaaggggtttcatttgctcttgggggattaggtatcatttggggaggaagcatgtgttctgtgaggttgttcggctatgtccaagtgtcgtttactaatgtacccctgctgtttgcttttggtaatgtgatgttgatgttctccccctacccacaaccatgcccttgagggtagcagggcagcagcataccaaagagatgtgctgcaggactccggaggcggcctgggtgggtgagccatggggcagttgacctgggtcttgaaagagtcgggagtgacaagctcagagagcatgaactgatgctggcatgaaggattccaggaagatcatggagacctggctggtagctgtaacagagatggtggagtccaaggaaacagcctgtctctggtgaatgggactttctttggtggacacttggcaccagctctgagagcccttcccctgtgtcctgccaccatgtgggtcagatgtactctctgtcacatgaggagagtgctagttcatgtgttctccattcttgtgagcatcctaataaatctgttccattttgatga

SEQ ID NO: 318206 - DNA, 1445 bp, Homo sapiens
tgccgcgcggggccatttccgctgctgcttctgtgagtttttccggtgcacgcgagtgcttctgaaacgtcagctgcgctcccctaggagtgctgagcccgcggaaccgcagccatgactgaggctgatgtgaatccaaaggcctatccccttgccgatgcccacctcaccaagaagctactggacctcgttcagcagtcatgtaactataagcagcttcggaaaggagccaatgaggccaccaaaaccctcaacaggggcatctctgagttcatcgtgatggctgcagacgccgagccactggagatcattctgcacctgccgctgctgtgtgaagacaagaatgtgccctacgtgtttgtgcgctccaagcaggccctggggagagcctgtggggtctccaggcctgtcatcgcctgttctgtcaccatcaaagaaggctcgcagctgaaacagcagatccaatccattcagcagtccattgaaaggctcttagtctaaacctgtggcctctgccacgtgctccctgccagcttcccccctgaggttgtgtatcatattatctgtgttagcatgtagtattttcagctactctctattgtttttacagggttgctatcccccttcctttcctccctccctctgccatccttcatccttttatcctccctttttggaacaagtgttcagagcagacagaagcagggtggtggcaccgttgaaaggcagaaagagccaggagaaagctgatggagccaggacagagatctggttccagctttcagccactagcttcctgttgtgtgcggggtgtggtggaattaaacagcattcattgtgtgtccctgtgcctggcacacagaatcattcatacgtgttcaagtgatcaaggggtttcatttgctcttgggggattaggtatcatttggggaggaagcatgtgttctgtgaggttgttcggctatgtccaagtgtcgtttactaatgtacccctgctgtttgcttttggtaatgtgatgttgatgttctccccctacccacaaccatgcccttgagggtagcagggcagcagcataccaaagagatgtgctgcaggactccggaggcggcctgggtgggtgagccatggggcagttgacctgggtcttgaaagagtcgggagtgacaagctcagagagcatgaactgatgctggcatgaaggattccaggaagatcatggagacctggctggtagctgtaacagagatggtggagtccaaggaaacagcctgtctctggtgaatgggactttctttggtggacacttggcaccagctctgagagcccttcccctgtgtcctgccaccatgtgggtcagatgtactctctgtcacatgaggagagtgctagttcatgtgttctccattcttgtgagcatcctaataaatctgttccattttgatga

SEQ ID NO: 318207 - DNA, 1600 bp, Homo sapiens
  misc_feature (12)..(12): n is a, c, g, or t
  misc_feature (20)..(20): n is a, c, g, or t
  misc_feature (22)..(22): n is a, c, g, or t
aatcgctaggtncgaggcgngngtaggcggaacgcagccatgttgtcctgggaccaagacaaattcgcctaagataaggagttacgtagaagacagggcgtcctggtgtacgggctggccctggacgtcacttccgctggcggcagtggcgtcacttcctgctcttgggggcggggcatccgtgtccttgcggtgctgggcagcagaccgtccaaaccgacacgcgtggtatcctcgcggtgtccggcaagagactaccaagacagacgctatgactgaggctgatgtgaatccaaaggcctatccccttgccgatgcccacctcaccaagaagctactggacctcgttcagcagtcatgtaactataagcagcttcggaaaggagccaatgaggcgagccactggagatcattctgcacctgccgctgctgtgtgaagacaagaatgtgccctacgtgtttgtgcgctccaagcaggccctggggagagcctgtggggtctccaggcctgtcatcgcctgttctgtcaccatcaaagaaggctcgcagctgaaacagcagatccaatccattcagcagtccattgaaaggctcttagtctaaacctgtggcctctgccacgtgctccctgccagcttcccccctgaggttgtgtatcatattatctgtgttagcatgtagtattttcagctactctctattgttataaaatgtagtactaaatctggtttctggattttgtgttgtttttgttctgttttacagggttgctatcccccttcctttcctccctccctctgccatccttcatccttttatcctccctttttggaacaagtgttcagagcagacagaagcagggtggtggcaccgttgaaaggcagaaagagccaggagaaagctgatggagccaggacagagatctggttccagctttcagccactagcttcctgttgtgtgcggggtgtggtggaattaaacagcattcattgtgtgtccctgtgcctggcacacagaatcattcatacgtgttcaagtgatcaaggggtttcatttgctcttgggggattaggtatcatttggggaggaagcatgtgttctgtgaggttgttcggctatgtccaagtgtcgtttactaatgtacccctgctgtttgcttttggtaatgtgatgttgatgttctccccctacccacaaccatgcccttgagggtagcagggcagcagcataccaaagagatgtgctgcaggactccggaggcggcctgggtgggtgagccatggggcagttgacctgggtcttgaaagagtcgggagtgacaagctcagagagcatgaactgatgctggcatgaaggattccaggaagatcatggagacctggctggtagctgtaacagagatggtggagtccaaggaaacagcctgtctctggtgaatgggactttctttggtggacacttggcaccagctctgagagcccttcccctgtgtcctgccaccatgtgggtcagatgtactctctgtcacatgaggagagtgctagttcatgtgttctccattcttgtgagcatcctaataaatctgttccattttgatga

SEQ ID NO: 318208 - DNA, 1443 bp, Homo sapiens
tgccgcgcggggccatttccgctgctgcttctgtgagtttttccggtgcacgcgagtgcttctgaaacgtcagctgcgctcccctaggagtgctgagcccgcggaaccgcagccatgactgaggctgatgtgaatccaaaggcctatccccttgccgatgcccacctcaccaagaagctactggacctcgttcagcagtcatgtaactataagcagcttcggaaaggagccaatgaggcgagccactggagatcattctgcacctgccgctgctgtgtgaagacaagaatgtgccctacgtgtttgtgcgctccaagcaggccctggggagagcctgtggggtctccaggcctgtcatcgcctgttctgtcaccatcaaagaaggctcgcagctgaaacagcagatccaatccattcagcagtccattgaaaggctcttagtctaaacctgtggcctctgccacgtgctccctgccagcttcccccctgaggttgtgtatcatattatctgtgttagcatgtagtattttcagctactctctattgttataaaatgtagtactaaatctggtttctggattttgtgttgtttttgttctgttttacagggttgctatcccccttcctttcctccctccctctgccatccttcatccttttatcctccctttttggaacaagtgttcagagcagacagaagcagggtggtggcaccgttgaaaggcagaaagagccaggagaaagctgatggagccaggacagagatctggttccagctttcagccactagcttcctgttgtgtgcggggtgtggtggaattaaacagcattcattgtgtgtccctgtgcctggcacacagaatcattcatacgtgttcaagtgatcaaggggtttcatttgctcttgggggattaggtatcatttggggaggaagcatgtgttctgtgaggttgttcggctatgtccaagtgtcgtttactaatgtacccctgctgtttgcttttggtaatgtgatgttgatgttctccccctacccacaaccatgcccttgagggtagcagggcagcagcataccaaagagatgtgctgcaggactccggaggcggcctgggtgggtgagccatggggcagttgacctgggtcttgaaagagtcgggagtgacaagctcagagagcatgaactgatgctggcatgaaggattccaggaagatcatggagacctggctggtagctgtaacagagatggtggagtccaaggaaacagcctgtctctggtgaatgggactttctttggtggacacttggcaccagctctgagagcccttcccctgtgtcctgccaccatgtgggtcagatgtactctctgtcacatgaggagagtgctagttcatgtgttctccattcttgtgagcatcctaataaatctgttccattttgatga

SEQ ID NO: 318209 - DNA, 1677 bp, Homo sapiens
tgccgcgcggggccatttccgctgctgcttctgtgagtttttccggtgcacgcgagtgcttctgaaacgtcagctgcgctcccctaggagtgctgagcccgcggaaccgcagccatgttgtcctgggaccaagacaaattcgcctaagataaggagttacgtagaagacagggcgtcctggtgtacgggctggccctggacgtcacttccgctggcggcagtggcgtcacttcctgctcttgggggcggggcatccgtgtccttgcggtgctgggcagcagaccgtccaaaccgacacgcgtggtatcctcgcggtgtccggcaagagactaccaagacagacgctatgactgaggctgatgtgaatccaaaggcctatccccttgccgatgcccacctcaccaagaagctactggacctcgttcagcagtcatgtaactataagcagcttcggaaaggagccaatgaggccaccaaaaccctcaacaggggcatctctgagttcatcgtgatggctgcagacgccgagccactggagatcattctgcacctgccgctgctgtgtgaagacaagaatgtgccctacgtgtttgtgcgctccaagcaggccctggggagagcctgtggggtctccaggcctgtcatcgcctgttctgtcaccatcaaagaaggctcgcagctgaaacagcagatccaatccattcagcagtccattgaaaggctcttagtctaaacctgtggcctctgccacgtgctccctgccagcttcccccctgaggttgtgtatcatattatctgtgttagcatgtagtattttcagctactctctattgtttttacagggttgctatcccccttcctttcctccctccctctgccatccttcatccttttatcctccctttttggaacaagtgttcagagcagacagaagcagggtggtggcaccgttgaaaggcagaaagagccaggagaaagctgatggagccaggacagagatctggttccagctttcagccactagcttcctgttgtgtgcggggtgtggtggaattaaacagcattcattgtgtgtccctgtgcctggcacacagaatcattcatacgtgttcaagtgatcaaggggtttcatttgctcttgggggattaggtatcatttggggaggaagcatgtgttctgtgaggttgttcggctatgtccaagtgtcgtttactaatgtacccctgctgtttgcttttggtaatgtgatgttgatgttctccccctacccacaaccatgcccttgagggtagcagggcagcagcataccaaagagatgtgctgcaggactccggaggcggcctgggtgggtgagccatggggcagttgacctgggtcttgaaagagtcgggagtgacaagctcagagagcatgaactgatgctggcatgaaggattccaggaagatcatggagacctggctggtagctgtaacagagatggtggagtccaaggaaacagcctgtctctggtgaatgggactttctttggtggacacttggcaccagctctgagagcccttcccctgtgtcctgccaccatgtgggtcagatgtactctctgtcacatgaggagagtgctagttcatgtgttctccattcttgtgagcatcctaataaatctgttccattttgatga

SEQ ID NO: 318210 - DNA, 1216 bp, Homo sapiens
tgccgcgcggggccatttccgctgctgcttctgtgagtttttccggtgcacgcgagtgcttctgaaacgtcagctgcgctcccctaggagtgctgagcccgcggaaccgcagccatgactgaggctgatgtgaatccaaaggcctatccccttgccgatgcccacctcaccaagaagctactggacctcgttcagcagtcatgtaactataagcagcttcggaaaggagccaatgaggccaccaaaaccctcaacaggggcatctctgagttcatcgtgatggctgcagacgccgagccactggagatcattctgcacctgccgctgctgtgtgaagacaagaatgtgccctacgtgtttgtgcgctccaagcaggccctggggagagcctgtggggtctccaggcctgtcatcgcctgttctgtcaccatcaaagaaggctcgcagctgaaacagcagatccaatccattcagcagtccattgaaaggctcttagtctaaacctgtggcctctgccacgtgctccctgccagcttcccccctgaggaagagtatacataaaaaacaagatagaacaagaagaaatataaacagcaactctacaataaagaaataaaataagaaaaacaaaaaacaaaaaacaagaaaaaaaaaaaaaaaaaaaaaaaaaaacaaaaagacaaaacccccaaccaaaccacccacccacaggccatccaacaacccaatagaaccacccacaagaaaacaaatataacagaagcaggacagaaaggcaaagagtagagtaggcaccgtgaagaaaagtgccagaaaagatgccaagaaaaaaaagcaaataaaatccaaaacagacgaacaaaaaccattcaaacagccacaaacaaccaataagagtaagaacgaaaggaaaagggaaggaagaaaaagcaagcctaggagcagagaggaataagaaccccgaggagcccaagagcacgacagtaagacagaacaaaagcgaagacaaggagaacaagagggatgcagagaaccacaagggggagagaggtgagacaggggaggggaggaagcagaggaagacccgggagaagaggaaggggcaggaaaagaccagtgaagagcgtgtgaacgaagaagagccccaagcgtgaggggagtggtggggtaagggagggaggggtgaggtagcgccgcgcgaagccagaagcagagg

SEQ ID NO: 318211 - DNA, 424 bp, Homo sapiens
  misc_feature (8)..(8): n is a, c, g, or t
  misc_feature (14)..(14): n is a, c, g, or t
  misc_feature (49)..(49): n is a, c, g, or t
  misc_feature (90)..(90): n is a, c, g, or t
ctcttccntttttntggcaattgtgaatggaactgcattcctgatttgnctttcagcttggctgttgttggtgtatgggaatgctagtgntgtttgtatgttgatattgtatcctgaaacttagctgaagttgtttatcagctgaaggaacttttgggccaagaccgtgacatttcctaggtgtagaatcatgtcatctgcaaacagggatagtttgactataggatggtggagtccaaggaaacagcctgtctctggtgaatgggactttctttggtggacacttggcaccagctctgagagcccttcccctgtgtcctgccaccatgtgggtcagatgtactctctgtcacatgaggagagtgctagttcatgtgttctccattcttgtgagcatcctaataaatctgttccattttgatga

SEQ ID NO: 318212 - DNA, 817 bp, Homo sapiens
ctgtcccctctctgtcacctcacagtagtcgttgccggtagcgggtgtgggggcgcgagcagcgcagggcggcctctcccccacccctcagcccgggcccgggctcggtccccccctctccctccgcttcgcactcccgtcgggtacgggaaggtccaagccgctgccgggtgcccgagggccgtcgtggccgccgtcgccacgggtcccaatggagccgccgaatctctatccggtgaagctctacgtgtacgacctgtccaaaggcctggcccggcggctcagccccatcatgctggggagggacattgcttgggcctccagactctgtggttgatgtggggagtacagaagtcacagaagaaatctttctggagtacctctcctccctgggggagtccctgttccgaggtgaggcctacaacctctttgaacacaattgtaacaccttcagcaacgaagtggcacagttcctgactgggcggaagattccttcttacatcacagacctgccctctgaagttctctccacgtaagtgtggcctctgtccctgcccctgccttggccaaccttgaaaatccccattcacggtcagtgcccttcctctggcccccatctgccctcccaaccaggtgggcctgccctgatggcagattctaacacagaaggctgccattctctccacccactgatgcgcacctgtattacctccaccttcagagctagaccagctctgccctggcctaagtgcaaccacagaacttagacacccacttgacactggcttcagtacttgcacaaaattctggcgtctgt

SEQ ID NO: 318213 - DNA, 3284 bp, Homo sapiens
ctgtcccctctctgtcacctcacagtagtcgttgccggtagcgggtgtgggggcgcgagcagcgcagggcggcctctcccccacccctcagcccgggcccgggctcggtccccccctctccctccgcttcgcactcccgtcgggtacgggaaggtccaagccgctgccgggtgcccgagggccgtcgtggccgccgtcgccacgggtcccaatggagccgccgaatctctatccggtgaagctctacgtgtacgacctgtccaaaggcctggcccggcggctcagccccatcatgctggggaaacaactggaaggcatctggcacacatccatagttgtgcacaaggatgagttcttcttcggcagtggtggtatctccagctgccccccgggagggacattgcttgggcctccagactctgtggttgatgtggggagtacagaagtcacagaagaaatctttctggagtacctctcctccctgggggagtccctgttccgaggtgaggcctacaacctctttgaacacaattgtaacaccttcagcaacgaagtggcacagttcctgactgggcggaagattccttcttacatcacagacctgccctctgaagttctctccacgccctttggacaggcacttcggcccctcctggactccattcagatccagcctccaggagggagctccgtgggcagacccaacggccagagctaacaggactgcctgggaccgccctgcctcaccagggcttttcctttttaaacaaaacaaaccctaccagatttctattttataattttacatcagagctaacaaccaggggacggctttttaaatttcccagggaaggagaccgtcaggccgcatgtagacaatgctgctaagaaacagaacaaaatgccaccccttctaatagtattatactaatttattaaggctgtcttgtctgtgcgttcacttcggatgctgtttcctaagcgtcctccacactggagaaagggaggggctttgtttaaacagaaagcgagtcacagtttgcgggagccccaacctagaactctttccagagaacactcacgctctacccaagttgccaacacctgtgggacccaggtgagttttagaacatccgtgacccagaaagttactctagtgttaaatgaaccaaaggatttggtgtacatgggaccggtttcaggatgactaacctaacctaagtgaactctttagccacaaccctcaccttccctcccttaccccaagcaaggccagtgctggagcagccattgcctccggatcaagggagtaacagcaagtatcaggccggagaaaacaggataaagccattcctccttccacctagatggattgccaatcttctgccatcaattttgggaaacctgcctttgtgcccccgaggctgcctttcctcagcatagctgacttgtcatagtggatgaggtctgggctggagcagtagaagccaaggccttttttctgcaagtaatgatgtaggttatttgcagtctctgtaaccaccatccaggccagtacgcagtatttagctggggaccaagggatgggattccctactctaagaaaatacctttattttaattattattattttttgagacggagtctcgctctaccacccgggaggcagagattgcgatgagccgagatcgtaccagtgcactccagcctgggcgacagagtgagactccatctcaaaaaaataaaataatgaagtggaatcaaggtggcaagaaaatttagaatcgtttctgatagggactttcccttatcctaaatgtgttttgaaggcacacgttatttccattgtcattctgactttagaaaggcaggttggggcatgagtgggcattttcctaatgacttgctgctaggaggttataggcagggaacagtctgggagtctctaatccagagagactttcagattccctctcttcacatgaacctccattagttagattttgggaaagtgagcatgaagaagggactcagagctgccaggtacccgagtctcaggtctgacatccttgggccccttctgccacaacttcttgccacttcacggacttgaattatgttgcttcttcctggaagtctggcctgcagcacaggcctttcctctccaaaaagctgctgctcatttctggccccatctgctgctatctttgccatcagccatcacagtttggcatcatcagagtctcagctagaggagctgtcattctgccttagtgtttgcctgcgacctgaccaggggcatgaccagctgggatgtcaagtgacatttgggaacttgtagaggccaaatgattgaaagtttaattcttctcaagacccactgatttgccagtgtgcatggaaataatagattagagcagaaactagcagggactgttgtataatcgtgatctactagcagaattgggcccaaagagaaagaatttctgaggctgggtttcttctgggagggtagcaggttggtcttggccagtgctctgtttcccaccagtgttgttcccttttccagcttgcctggcccggctctgtcttccagggtcctgctccagacccctctgcctggggtctcccctccatccagggggttctgggcatcacagctcctttttttcctttctcctcttccagatccagtttcagctggtttgcttcttccagcaggcacccttaggcccaggagcagctcccctgagagaatttgagtcactcatttccttgaacagcacccccctttatactagcagccatttgtgccattgcctgtgccctagggtttgtggggagagagcgagggatcactgagcagttttcccagagctccatgggaaggcaagctctccctcccaatgggagccccactgtcactaactgtaaactcaggctcaggcttcaactgcctacccccatcctcatatttctgtctgtcccagcacctcaggagcattctcattgtggccggctaactccgcctggatgtgaacaggcaagcacagtgggaaatgagtcacgtacttgtattgcacagtggacacctctagaggtccattggtttaaagggatagggaaggaggagggatgagaccatcaccccctcccagaagtaaatctagtatctgagttttctttatgcccttgagtcaaactaataactgtctagtacggaggtgtttgctggttttcttcggtgttttttctaatgcaataaactcatttctgcctgctg

SEQ ID NO: 318214 - DNA, 3321 bp, Homo sapiens
ctgtcccctctctgtcacctcacagtagtcgttgccggtagcgggtgtgggggcgcgagcagcgcagggcggcctctcccccacccctcagcccgggcccgggctcggtccccccctctccctccgcttcgcactcccgtcgggtacgggaaggtccaagccgctgccgggtgcccgagggccgtcgtggccgccgtcgccacgggtcccaatggagccgccgaatctctatccggtgaagctctacgtgtacgacctgtccaaaggcctggcccggcggctcagccccatcatgctggggaaacaactggaaggcatctggcacacatccatagttgtgcacaaggatgagttcttcttcggcagtggtggtatctccagctgccccccgggagggacattgcttgggcctccagactctgtggttgatgtggggagtacagaagtcacagaagaaatctttctggagtacctctcctccctgggggagtccctgttccgaggtgaggcctacaacctctttgaacacaattgtaacaccttcagcaacgaagtggcacagttcctgactgggcggaagattccttcttacatcacagacctgccctctgaagttctctccacgccctttggacaggcacttcggcccctcctggactccattcagatccagcctccaggagggagctccgtgggcagacccaacggccagagctaacaggactgcctgggaccgccctgcctcaccagggcttttcctttttaaacaaaacaaaccctaccagatttctattttataattttacatcagagctaacaaccaggggacggctttttaaatttcccagggaaggagaccgtcaggccgcatgtagacaatgctgctaagaaacagaacaaaatgccaccccttctaatagtattatactaatttattaaggctgtcttgtctgtgcgttcacttcggatgctgtttcctaagcgtcctccacactggagaaagggaggggctttgtttaaacagaaagcgagtcacagtttgcgggagccccaacctagaactctttccagagaacactcacgctctacccaagttgccaacacctgtgggacccaggtgagttttagaacatccgtgacccagaaagttactctagtgttaaatgaaccaaaggatttggtgtacatgggaccggtttcaggatgactaacctaacctaagtgaactctttagccacaaccctcaccttccctcccttaccccaagcaaggccagtgctggagcagccattgcctccggatcaagggagtaacagcaagtatcaggccggagaaaacaggataaagccattcctccttccacctagatggattgccaatcttctgccatcaattttgggaaacctgcctttgtgcccccgaggctgcctttcctcagcatagctgacttgtcatagtggatgaggtctgggctggagcagtagaagccaaggccttttttctgcaagtaatgatgtaggttatttgcagtctctgtaaccaccatccaggccagtacgcagtatttagctggggaccaagggatgggattccctactctaagaaaatacctttattttaattattattattttttgagacggagtctcgctctaccacccaggctggtgtgcagtggcatgatctcggctcacagccgggaggcagagattgcgatgagccgagatcgtaccagtgcactccagcctgggcgacagagtgagactccatctcaaaaaaataaaataatgaagtggaatcaaggtggcaagaaaatttagaatcgtttctgatagggactttcccttatcctaaatgtgttttgaaggcacacgttatttccattgtcattctgactttagaaaggcaggttggggcatgagtgggcattttcctaatgacttgctgctaggaggttataggcagggaacagtctgggagtctctaatccagagagactttcagattccctctcttcacatgaacctccattagttagattttgggaaagtgagcatgaagaagggactcagagctgccaggtacccgagtctcaggtctgacatccttgggccccttctgccacaacttcttgccacttcacggacttgaattatgttgcttcttcctggaagtctggcctgcagcacaggcctttcctctccaaaaagctgctgctcatttctggccccatctgctgctatctttgccatcagccatcacagtttggcatcatcagagtctcagctagaggagctgtcattctgccttagtgtttgcctgcgacctgaccaggggcatgaccagctgggatgtcaagtgacatttgggaacttgtagaggccaaatgattgaaagtttaattcttctcaagacccactgatttgccagtgtgcatggaaataatagattagagcagaaactagcagggactgttgtataatcgtgatctactagcagaattgggcccaaagagaaagaatttctgaggctgggtttcttctgggagggtagcaggttggtcttggccagtgctctgtttcccaccagtgttgttcccttttccagcttgcctggcccggctctgtcttccagggtcctgctccagacccctctgcctggggtctcccctccatccagggggttctgggcatcacagctcctttttttcctttctcctcttccagatccagtttcagctggtttgcttcttccagcaggcacccttaggcccaggagcagctcccctgagagaatttgagtcactcatttccttgaacagcacccccctttatactagcagccatttgtgccattgcctgtgccctagggtttgtggggagagagcgagggatcactgagcagttttcccagagctccatgggaaggcaagctctccctcccaatgggagccccactgtcactaactgtaaactcaggctcaggcttcaactgcctacccccatcctcatatttctgtctgtcccagcacctcaggagcattctcattgtggccggctaactccgcctggatgtgaacaggcaagcacagtgggaaatgagtcacgtacttgtattgcacagtggacacctctagaggtccattggtttaaagggatagggaaggaggagggatgagaccatcaccccctcccagaagtaaatctagtatctgagttttctttatgcccttgagtcaaactaataactgtctagtacggaggtgtttgctggttttcttcggtgttttttctaatgcaataaactcatttctgcctgctg

SEQ ID NO: 318215 - DNA, 2867 bp, Homo sapiens
ctgtcccctctctgtcacctcacagtagtcgttgccggtagcgggtgtgggggcgcgagcagcgcagggcggcctctcccccacccctcagcccgggcccgggctcggtccccccctctccctccgcttcgcactcccgtcgggtacgggaaggtccaagccgctgccgggtgcccgagggccgtcgtggccgccgtcgccacgggtcccaatggagccgccgaatctctatccggtgaagctctacgtgtacgacctgtccaaaggcctggcccggcggctcagccccatcatgctggggaaacaactggaaggcatctggcacacatccatagttgtgcacaaggatgagttcttcttcggcagtggtggtatctccagctgccccccgggagggacattgcttgggcctccagactctgtggttgatgtggggagtacagaagtcacagaagaaatctttctggagtacctctcctccctgggggagtccctgttccgaggtgaggcctacaacctctttgaacacaattgtaacaccttcagcaacgaagtggcacagttcctgactgggcggaagattccttcttacatcacagacctgccctctgaagttctctccacgccctttggacaggcacttcggcccctcctggactccattcagatccagcctccaggagggagctccgtgggcagacccaacggccagagctaacaggactgcctgggaccgccctgcctcaccagggcttttcctttttaaacaaaacaaaccctaccagatttctattttataattttacatcagagctaacaaccaggggacggctttttaaatttcccagggaaggagaccgtcaggccgcatgtagacaatgctgctaagaaacagaacaaaatgccaccccttctaatagtattatactaatttattaaggctgtcttgtctgtgcgttcacttcggatgctgtttcctaagcgtcctccacactggagaaagggaggggctttgtttaaacagaaagcgagtcacagtttgcgggagccccaacctagaactctttccagagaacactcacgctctacccaagttgccaacacctgtgggacccaggtgagttttagaacatccgtgacccagaaagttactctagtgttaaatgaaccaaaggatttggtgtacatgggaccggtttcaggatgactaacctaacctaagtgaactctttagccacaaccccgggaggcagagattgcgatgagccgagatcgtaccagtgcactccagcctgggcgacagagtgagactccatctcaaaaaaataaaataatgaagtggaatcaaggtggcaagaaaatttagaatcgtttctgatagggactttcccttatcctaaatgtgttttgaaggcacacgttatttccattgtcattctgactttagaaaggcaggttggggcatgagtgggcattttcctaatgacttgctgctaggaggttataggcagggaacagtctgggagtctctaatccagagagactttcagattccctctcttcacatgaacctccattagttagattttgggaaagtgagcatgaagaagggactcagagctgccaggtacccgagtctcaggtctgacatccttgggccccttctgccacaacttcttgccacttcacggacttgaattatgttgcttcttcctggaagtctggcctgcagcacaggcctttcctctccaaaaagctgctgctcatttctggccccatctgctgctatctttgccatcagccatcacagtttggcatcatcagagtctcagctagaggagctgtcattctgccttagtgtttgcctgcgacctgaccaggggcatgaccagctgggatgtcaagtgacatttgggaacttgtagaggccaaatgattgaaagtttaattcttctcaagacccactgatttgccagtgtgcatggaaataatagattagagcagaaactagcagggactgttgtataatcgtgatctactagcagaattgggcccaaagagaaagaatttctgaggctgggtttcttctgggagggtagcaggttggtcttggccagtgctctgtttcccaccagtgttgttcccttttccagcttgcctggcccggctctgtcttccagggtcctgctccagacccctctgcctggggtctcccctccatccagggggttctgggcatcacagctcctttttttcctttctcctcttccagatccagtttcagctggtttgcttcttccagcaggcacccttaggcccaggagcagctcccctgagagaatttgagtcactcatttccttgaacagcacccccctttatactagcagccatttgtgccattgcctgtgccctagggtttgtggggagagagcgagggatcactgagcagttttcccagagctccatgggaaggcaagctctccctcccaatgggagccccactgtcactaactgtaaactcaggctcaggcttcaactgcctacccccatcctcatatttctgtctgtcccagcacctcaggagcattctcattgtggccggctaactccgcctggatgtgaacaggcaagcacagtgggaaatgagtcacgtacttgtattgcacagtggacacctctagaggtccattggtttaaagggatagggaaggaggagggatgagaccatcaccccctcccagaagtaaatctagtatctgagttttctttatgcccttgagtcaaactaataactgtctagtacggaggtgtttgctggttttcttcggtgttttttctaatgcaataaactcatttctgcctgctg

SEQ ID NO: 318216 - DNA, 3000 bp, Homo sapiens
agttttctggcttactgtgtctctctctgtgtgacaggcacacatccatagttgtgcacaaggatgagttcttcttcggcagtggtggtatctccagctgccccccgggagggacattgcttgggcctccagactctgtggttgatgtggggagtacagaagtcacagaagaaatctttctggagtacctctcctccctgggggagtccctgttccgaggtgaggcctacaacctctttgaacacaattgtaacaccttcagcaacgaagtggcacagttcctgactgggcggaagattccttcttacatcacagacctgccctctgaagttctctccacgccctttggacaggcacttcggcccctcctggactccattcagatccagcctccaggagggagctccgtgggcagacccaacggccagagctaacaggactgcctgggaccgccctgcctcaccagggcttttcctttttaaacaaaacaaaccctaccagatttctattttataattttacatcagagctaacaaccaggggacggctttttaaatttcccagggaaggagaccgtcaggccgcatgtagacaatgctgctaagaaacagaacaaaatgccaccccttctaatagtattatactaatttattaaggctgtcttgtctgtgcgttcacttcggatgctgtttcctaagcgtcctccacactggagaaagggaggggctttgtttaaacagaaagcgagtcacagtttgcgggagccccaacctagaactctttccagagaacactcacgctctacccaagttgccaacacctgtgggacccaggtgagttttagaacatccgtgacccagaaagttactctagtgttaaatgaaccaaaggatttggtgtacatgggaccggtttcaggatgactaacctaacctaagtgaactctttagccacaaccctcaccttccctcccttaccccaagcaaggccagtgctggagcagccattgcctccggatcaagggagtaacagcaagtatcaggccggagaaaacaggataaagccattcctccttccacctagatggattgccaatcttctgccatcaattttgggaaacctgcctttgtgcccccgaggctgcctttcctcagcatagctgacttgtcatagtggatgaggtctgggctggagcagtagaagccaaggccttttttctgcaagtaatgatgtaggttatttgcagtctctgtaaccaccatccaggccagtacgcagtatttagctggggaccaagggatgggattccctactctaagaaaatacctttattttaattattattattttttgagacggagtctcgctctaccacccgggaggcagagattgcgatgagccgagatcgtaccagtgcactccagcctgggcgacagagtgagactccatctcaaaaaaataaaataatgaagtggaatcaaggtggcaagaaaatttagaatcgtttctgatagggactttcccttatcctaaatgtgttttgaaggcacacgttatttccattgtcattctgactttagaaaggcaggttggggcatgagtgggcattttcctaatgacttgctgctaggaggttataggcagggaacagtctgggagtctctaatccagagagactttcagattccctctcttcacatgaacctccattagttagattttgggaaagtgagcatgaagaagggactcagagctgccaggtacccgagtctcaggtctgacatccttgggccccttctgccacaacttcttgccacttcacggacttgaattatgttgcttcttcctggaagtctggcctgcagcacaggcctttcctctccaaaaagctgctgctcatttctggccccatctgctgctatctttgccatcagccatcacagtttggcatcatcagagtctcagctagaggagctgtcattctgccttagtgtttgcctgcgacctgaccaggggcatgaccagctgggatgtcaagtgacatttgggaacttgtagaggccaaatgattgaaagtttaattcttctcaagacccactgatttgccagtgtgcatggaaataatagattagagcagaaactagcagggactgttgtataatcgtgatctactagcagaattgggcccaaagagaaagaatttctgaggctgggtttcttctgggagggtagcaggttggtcttggccagtgctctgtttcccaccagtgttgttcccttttccagcttgcctggcccggctctgtcttccagggtcctgctccagacccctctgcctggggtctcccctccatccagggggttctgggcatcacagctcctttttttcctttctcctcttccagatccagtttcagctggtttgcttcttccagcaggcacccttaggcccaggagcagctcccctgagagaatttgagtcactcatttccttgaacagcacccccctttatactagcagccatttgtgccattgcctgtgccctagggtttgtggggagagagcgagggatcactgagcagttttcccagagctccatgggaaggcaagctctccctcccaatgggagccccactgtcactaactgtaaactcaggctcaggcttcaactgcctacccccatcctcatatttctgtctgtcccagcacctcaggagcattctcattgtggccggctaactccgcctggatgtgaacaggcaagcacagtgggaaatgagtcacgtacttgtattgcacagtggacacctctagaggtccattggtttaaagggatagggaaggaggagggatgagaccatcaccccctcccagaagtaaatctagtatctgagttttctttatgcccttgagtcaaactaataactgtctagtacggaggtgtttgctggttttcttcggtgttttttctaatgcaataaactcatttctgcctgctg

SEQ ID NO: 318217 - DNA, 3192 bp, Homo sapiens
ctgtcccctctctgtcacctcacagtagtcgttgccggtagcgggtgtgggggcgcgagcagcgcagggcggcctctcccccacccctcagcccgggcccgggctcggtccccccctctccctccgcttcgcactcccgtcgggtacgggaaggtccaagccgctgccgggtgcccgagggccgtcgtggccgccgtcgccacgggtcccaatggagccgccgaatctctatccggtgaagctctacgtgtacgacctgtccaaaggcctggcccggcggctcagccccatcatgctggggagggacattgcttgggcctccagactctgtggttgatgtggggagtacagaagtcacagaagaaatctttctggagtacctctcctccctgggggagtccctgttccgaggtgaggcctacaacctctttgaacacaattgtaacaccttcagcaacgaagtggcacagttcctgactgggcggaagattccttcttacatcacagacctgccctctgaagttctctccacgccctttggacaggcacttcggcccctcctggactccattcagatccagcctccaggagggagctccgtgggcagacccaacggccagagctaacaggactgcctgggaccgccctgcctcaccagggcttttcctttttaaacaaaacaaaccctaccagatttctattttataattttacatcagagctaacaaccaggggacggctttttaaatttcccagggaaggagaccgtcaggccgcatgtagacaatgctgctaagaaacagaacaaaatgccaccccttctaatagtattatactaatttattaaggctgtcttgtctgtgcgttcacttcggatgctgtttcctaagcgtcctccacactggagaaagggaggggctttgtttaaacagaaagcgagtcacagtttgcgggagccccaacctagaactctttccagagaacactcacgctctacccaagttgccaacacctgtgggacccaggtgagttttagaacatccgtgacccagaaagttactctagtgttaaatgaaccaaaggatttggtgtacatgggaccggtttcaggatgactaacctaacctaagtgaactctttagccacaaccctcaccttccctcccttaccccaagcaaggccagtgctggagcagccattgcctccggatcaagggagtaacagcaagtatcaggccggagaaaacaggataaagccattcctccttccacctagatggattgccaatcttctgccatcaattttgggaaacctgcctttgtgcccccgaggctgcctttcctcagcatagctgacttgtcatagtggatgaggtctgggctggagcagtagaagccaaggccttttttctgcaagtaatgatgtaggttatttgcagtctctgtaaccaccatccaggccagtacgcagtatttagctggggaccaagggatgggattccctactctaagaaaatacctttattttaattattattattttttgagacggagtctcgctctaccacccgggaggcagagattgcgatgagccgagatcgtaccagtgcactccagcctgggcgacagagtgagactccatctcaaaaaaataaaataatgaagtggaatcaaggtggcaagaaaatttagaatcgtttctgatagggactttcccttatcctaaatgtgttttgaaggcacacgttatttccattgtcattctgactttagaaaggcaggttggggcatgagtgggcattttcctaatgacttgctgctaggaggttataggcagggaacagtctgggagtctctaatccagagagactttcagattccctctcttcacatgaacctccattagttagattttgggaaagtgagcatgaagaagggactcagagctgccaggtacccgagtctcaggtctgacatccttgggccccttctgccacaacttcttgccacttcacggacttgaattatgttgcttcttcctggaagtctggcctgcagcacaggcctttcctctccaaaaagctgctgctcatttctggccccatctgctgctatctttgccatcagccatcacagtttggcatcatcagagtctcagctagaggagctgtcattctgccttagtgtttgcctgcgacctgaccaggggcatgaccagctgggatgtcaagtgacatttgggaacttgtagaggccaaatgattgaaagtttaattcttctcaagacccactgatttgccagtgtgcatggaaataatagattagagcagaaactagcagggactgttgtataatcgtgatctactagcagaattgggcccaaagagaaagaatttctgaggctgggtttcttctgggagggtagcaggttggtcttggccagtgctctgtttcccaccagtgttgttcccttttccagcttgcctggcccggctctgtcttccagggtcctgctccagacccctctgcctggggtctcccctccatccagggggttctgggcatcacagctcctttttttcctttctcctcttccagatccagtttcagctggtttgcttcttccagcaggcacccttaggcccaggagcagctcccctgagagaatttgagtcactcatttccttgaacagcacccccctttatactagcagccatttgtgccattgcctgtgccctagggtttgtggggagagagcgagggatcactgagcagttttcccagagctccatgggaaggcaagctctccctcccaatgggagccccactgtcactaactgtaaactcaggctcaggcttcaactgcctacccccatcctcatatttctgtctgtcccagcacctcaggagcattctcattgtggccggctaactccgcctggatgtgaacaggcaagcacagtgggaaatgagtcacgtacttgtattgcacagtggacacctctagaggtccattggtttaaagggatagggaaggaggagggatgagaccatcaccccctcccagaagtaaatctagtatctgagttttctttatgcccttgagtcaaactaataactgtctagtacggaggtgtttgctggttttcttcggtgttttttctaatgcaataaactcatttctgcctgctg

SEQ ID NO: 318218 - DNA, 3095 bp, Homo sapiens
gatcacttgaacccgggaggcggaggttgcagtgagctgagattatactccagcctgggtgacgagagaaactccgtctaaaaaaaaaaaaaaaaaaaaaaagtcagaacagagtgtttgtggtctactgtgggaagccacattaaaacattcagtggagatggtaacttaatgacttcctttgggttggctcttttagggaggagggacattgcttgggcctccagactctgtggttgatgtggggagtacagaagtcacagaagaaatctttctggagtacctctcctccctgggggagtccctgttccgaggtgaggcctacaacctctttgaacacaattgtaacaccttcagcaacgaagtggcacagttcctgactgggcggaagattccttcttacatcacagacctgccctctgaagttctctccacgccctttggacaggcacttcggcccctcctggactccattcagatccagcctccaggagggagctccgtgggcagacccaacggccagagctaacaggactgcctgggaccgccctgcctcaccagggcttttcctttttaaacaaaacaaaccctaccagatttctattttataattttacatcagagctaacaaccaggggacggctttttaaatttcccagggaaggagaccgtcaggccgcatgtagacaatgctgctaagaaacagaacaaaatgccaccccttctaatagtattatactaatttattaaggctgtcttgtctgtgcgttcacttcggatgctgtttcctaagcgtcctccacactggagaaagggaggggctttgtttaaacagaaagcgagtcacagtttgcgggagccccaacctagaactctttccagagaacactcacgctctacccaagttgccaacacctgtgggacccaggtgagttttagaacatccgtgacccagaaagttactctagtgttaaatgaaccaaaggatttggtgtacatgggaccggtttcaggatgactaacctaacctaagtgaactctttagccacaaccctcaccttccctcccttaccccaagcaaggccagtgctggagcagccattgcctccggatcaagggagtaacagcaagtatcaggccggagaaaacaggataaagccattcctccttccacctagatggattgccaatcttctgccatcaattttgggaaacctgcctttgtgcccccgaggctgcctttcctcagcatagctgacttgtcatagtggatgaggtctgggctggagcagtagaagccaaggccttttttctgcaagtaatgatgtaggttatttgcagtctctgtaaccaccatccaggccagtacgcagtatttagctggggaccaagggatgggattccctactctaagaaaatacctttattttaattattattattttttgagacggagtctcgctctaccacccgggaggcagagattgcgatgagccgagatcgtaccagtgcactccagcctgggcgacagagtgagactccatctcaaaaaaataaaataatgaagtggaatcaaggtggcaagaaaatttagaatcgtttctgatagggactttcccttatcctaaatgtgttttgaaggcacacgttatttccattgtcattctgactttagaaaggcaggttggggcatgagtgggcattttcctaatgacttgctgctaggaggttataggcagggaacagtctgggagtctctaatccagagagactttcagattccctctcttcacatgaacctccattagttagattttgggaaagtgagcatgaagaagggactcagagctgccaggtacccgagtctcaggtctgacatccttgggccccttctgccacaacttcttgccacttcacggacttgaattatgttgcttcttcctggaagtctggcctgcagcacaggcctttcctctccaaaaagctgctgctcatttctggccccatctgctgctatctttgccatcagccatcacagtttggcatcatcagagtctcagctagaggagctgtcattctgccttagtgtttgcctgcgacctgaccaggggcatgaccagctgggatgtcaagtgacatttgggaacttgtagaggccaaatgattgaaagtttaattcttctcaagacccactgatttgccagtgtgcatggaaataatagattagagcagaaactagcagggactgttgtataatcgtgatctactagcagaattgggcccaaagagaaagaatttctgaggctgggtttcttctgggagggtagcaggttggtcttggccagtgctctgtttcccaccagtgttgttcccttttccagcttgcctggcccggctctgtcttccagggtcctgctccagacccctctgcctggggtctcccctccatccagggggttctgggcatcacagctcctttttttcctttctcctcttccagatccagtttcagctggtttgcttcttccagcaggcacccttaggcccaggagcagctcccctgagagaatttgagtcactcatttccttgaacagcacccccctttatactagcagccatttgtgccattgcctgtgccctagggtttgtggggagagagcgagggatcactgagcagttttcccagagctccatgggaaggcaagctctccctcccaatgggagccccactgtcactaactgtaaactcaggctcaggcttcaactgcctacccccatcctcatatttctgtctgtcccagcacctcaggagcattctcattgtggccggctaactccgcctggatgtgaacaggcaagcacagtgggaaatgagtcacgtacttgtattgcacagtggacacctctagaggtccattggtttaaagggatagggaaggaggagggatgagaccatcaccccctcccagaagtaaatctagtatctgagttttctttatgcccttgagtcaaactaataactgtctagtacggaggtgtttgctggttttcttcggtgttttttctaatgcaataaactcatttctgcctgctg

SEQ ID NO: 318219 - DNA, 3197 bp, Homo sapiens
ctgtcccctctctgtcacctcacagtagtcgttgccggtagcgggtgtgggggcgcgagcagcgcagggcggcctctcccccacccctcagcccgggcccgggctcggtccccccctctccctccgcttcgcactcccgtcgggtacgggaaggtccaagccgctgccgggtgcccgagggccgtcgtggccgccgtcgccacgggtcccaatggagccgccgaatctctatccggtgaagctctacgtgtacgacctgtccaaaggcctggcccggcggctcagccccatcatgctggggaaacaactggaaggcatctggcacacatccatagttgtgcacaaggatgagttcttcttcggcagtggtggtatctccagctgccccccgggagggacattgcttgggcctccagactctgtggttgatgtggggagtacagaagtcacagaagaaatctttctggagtacctctcctccctgggggagtccctgttccgaggtgaggcctacaacctctttgaacacaattgtaacaccttcagcaacgaagtggcacagttcctgactgggcggaagattccttcttacatcacagacctgccctctgaagttctctccacgccctttggacaggcacttcggcccctcctggactccattcagatccagcctccaggagggagctccgtgggcagacccaacggccagagctaacaggactgcctgggaccgccctgcctcaccagggcttttcctttttaaacaaaacaaaccctaccagatttctattttataattttacatcagagctaacaaccaggggacggctttttaaatttcccagggaaggagaccgtcaggccgcatgtagacaatgctgctaagaaacagaacaaaatgccaccccttctaatagtattatactaatttattaaggctgtcttgtctgtgcgttcacttcggatgctgtttcctaagcgtcctccacactggagaaagggaggggctttgtttaaacagaaagcgagtcacagtttgcgggagccccaacctagaactctttccagagaacactcacgctctacccaagttgccaacacctgtgggacccaggtgagttttagaacatccgtgacccagaaagttactctagtgttaaatgaaccaaaggatttggtgtacatgggaccggtttcaggatgactaacctaacctaagtgaactctttagccacaaccctcaccttccctcccttaccccaagcaaggccagtgctggagcagccattgcctccggatcaagggagtaacagcaagtatcaggccggagaaaacaggataaagccattcctccttccacctagatggattgccaatcttctgccatcaattttgggaaacctgcctttgtgcccccgaggctgcctttcctcagcatagctgacttgtcatagtggatgaggtctgggctggagcagtagaagccaaggccttttttctgcaagtaatgatgtaggttatttgcagtctctgtaaccaccatccaggccagtacgcagtatttagctggggaccaagggatgggattccctactctaagaaaatacctttattttaattattattattttttgagactccatctcaaaaaaataaaataatgaagtggaatcaaggtggcaagaaaatttagaatcgtttctgatagggactttcccttatcctaaatgtgttttgaaggcacacgttatttccattgtcattctgactttagaaaggcaggttggggcatgagtgggcattttcctaatgacttgctgctaggaggttataggcagggaacagtctgggagtctctaatccagagagactttcagattccctctcttcacatgaacctccattagttagattttgggaaagtgagcatgaagaagggactcagagctgccaggtacccgagtctcaggtctgacatccttgggccccttctgccacaacttcttgccacttcacggacttgaattatgttgcttcttcctggaagtctggcctgcagcacaggcctttcctctccaaaaagctgctgctcatttctggccccatctgctgctatctttgccatcagccatcacagtttggcatcatcagagtctcagctagaggagctgtcattctgccttagtgtttgcctgcgacctgaccaggggcatgaccagctgggatgtcaagtgacatttgggaacttgtagaggccaaatgattgaaagtttaattcttctcaagacccactgatttgccagtgtgcatggaaataatagattagagcagaaactagcagggactgttgtataatcgtgatctactagcagaattgggcccaaagagaaagaatttctgaggctgggtttcttctgggagggtagcaggttggtcttggccagtgctctgtttcccaccagtgttgttcccttttccagcttgcctggcccggctctgtcttccagggtcctgctccagacccctctgcctggggtctcccctccatccagggggttctgggcatcacagctcctttttttcctttctcctcttccagatccagtttcagctggtttgcttcttccagcaggcacccttaggcccaggagcagctcccctgagagaatttgagtcactcatttccttgaacagcacccccctttatactagcagccatttgtgccattgcctgtgccctagggtttgtggggagagagcgagggatcactgagcagttttcccagagctccatgggaaggcaagctctccctcccaatgggagccccactgtcactaactgtaaactcaggctcaggcttcaactgcctacccccatcctcatatttctgtctgtcccagcacctcaggagcattctcattgtggccggctaactccgcctggatgtgaacaggcaagcacagtgggaaatgagtcacgtacttgtattgcacagtggacacctctagaggtccattggtttaaagggatagggaaggaggagggatgagaccatcaccccctcccagaagtaaatctagtatctgagttttctttatgcccttgagtcaaactaataactgtctagtacggaggtgtttgctggttttcttcggtgttttttctaatgcaataaactcatttctgcctgctg

SEQ ID NO: 318220 - DNA, 3434 bp, Homo sapiens
ctgtcccctctctgtcacctcacagtagtcgttgccggtagcgggtgtgggggcgcgagcagcgcagggcggcctctcccccacccctcagcccgggcccgggctcggtccccccctctccctccgcttcgcactcccgtcgggtacgggaaggtccaagccgctgccgggtgcccgagggccgtcgtggccgccgtcgccacgggtcccaatggagccgccgaatctctatccggtgaagctctacgtgtacgacctgtccaaaggcctggcccggcggctcagccccatcatgctggggaaacaactggaaggcatctggcacacatccatagttgtgcacaaggatgagttcttcttcggcagtggtggtatctccagctgccccccgggagggacattgcttgggcctccagactctgtggttgatgtggggagtacagaagtcacagaagaaatctttctggagtacctctcctccctgggggagtccctgttccgaggtgaggcctacaacctctttgaacacaattgtaacaccttcagcaacgaagtggcacagttcctgactgggcggaagattccttcttacatcacagacctgccctctgaagttctctccacgccctttggacaggcacttcggcccctcctggactccattcagatccagcctccaggagggagctccgtgggcagacccaacggccagagctaacaggactgcctgggaccgccctgcctcaccagggcttttcctttttaaacaaaacaaaccctaccagatttctattttataattttacatcagagctaacaaccaggggacggctttttaaatttcccagggaaggagaccgtcaggccgcatgtagacaatgctgctaagaaacagaacaaaatgccaccccttctaatagtattatactaatttattaaggctgtcttgtctgtgcgttcacttcggatgctgtttcctaagcgtcctccacactggagaaagggaggggctttgtttaaacagaaagcgagtcacagtttgcgggagccccaacctagaactctttccagagaacactcacgctctacccaagttgccaacacctgtgggacccaggtgagttttagaacatccgtgacccagaaagttactctagtgttaaatgaaccaaaggatttggtgtacatgggaccggtttcaggatgactaacctaacctaagtgaactctttagccacaaccctcaccttccctcccttaccccaagcaaggccagtgctggagcagccattgcctccggatcaagggagtaacagcaagtatcaggccggagaaaacaggataaagccattcctccttccacctagatggattgccaatcttctgccatcaattttgggaaacctgcctttgtgcccccgaggctgcctttcctcagcatagctgacttgtcatagtggatgaggtctgggctggagcagtagaagccaaggccttttttctgcaagtaatgatgtaggttatttgcagtctctgtaaccaccatccaggccagtacgcagtatttagctggggaccaagggatgggattccctactctaagaaaatacctttattttaattattattattttttgagacggagtctcgctctaccacccgggaggcagagattgcgatgagccgagatcgtaccagtgcactccagcctgggcgacagagtgagactccatctcaaaaaaataaaataatgaagtggaatcaaggtggcaagaaaatttagaatcgtttctgatagggactttcccttatcctaaatgtgttttgaaggcacacgttatttccattgtcattctgactttagaaaggcaggttggggcatgagtgggcattttcctaatgacttgctgctaggaggttataggcagggaacagtctgggagtctctaatccagagagactttcagattccctctcttcacatgaacctccattagttagattttgggaaagtgagcatgaagaagggactcagagctgccaggtacccgagtctcaggtctgacatccttgggccccttctgccacaacttcttgccacttcacggacttgaattatgttgcttcttcctggaagtctggcctgcagcacaggcctttcctctccaaaaagctgctgctcatttctggccccatctgctgctatctttgccatcagccatcacagtttggcatcatcagagtctcagctagaggagctgtcattctgccttagtgtttgcctgcgacctgaccaggggcatgaccagctgggatgtcaagtgacatttgggaacttgtagaggccaaatgattgaaagtttaattcttctcaagacccactgatttgccagtgtgcatggaaataatagattagagcagaaactagcagggactgttgtataatcgtgatctactagcagaattgggcccaaagagaaagaatttctgaggctgggtttcttctgggagggtagcaggttggtcttggccagtgctctgtttcccaccagtgttgttcccttttccagcttgcctggcccggctctgtcttccagggtcctgctccagacccctctgcctggggtctcccctccatccagggggttctgggcatcacagctcctttttttcctttctcctcttccagatccagtttcagctggtttgcttcttccagcaggcacccttaggcccaggagcagctcccctgagagaatttgagtcactcatttccttgaacagcacccccctttatactagcagccatttgtgccattgcctgtgccctagggtttgtggggagagagcgagggatcactgagcagttttcccagagctccatgggaaggcaagctctccctcccaatgggagccccactgtcactaactgtaaactcaggctcaggcttcaactgcctacccccatcctcatatttctgtctgtcccagcacctcaggagcattctcattgtggccggctaactccgcctggatgtgaacaggcaagcacagtgggaaatgagtcacgtacttgtattgcacagtggacacctctagaggtccattggtttaaagggatagggaaggaggagggatgagaccatcaccccctcccagaagtaaatctagtatctgagttttctttatgcccttgagtcaaactaataactgtctagtacggaggtgtttgctggttttcttcggtgttttttctaatgcaataaactcatttctgcctgctgcatttgtgtggtgcctgaatcaggtctgcacatgcatccaacatgaagcgaccccaggcttttgggtcccttggagcttaagtctgcggggtctggatgtgtctcctttgcatggttgtgagcctgtagataagaagtgataacagggaa

SEQ ID NO: 318221 - DNA, 2760 bp, Homo sapiens
gcaggtttcgcaggcccagcaaggtgggctgttttttatatctgaggaagcacctcccaggaagagcttgcataggaaacaagactgctgtggcaggctggccctttggacaggcacttcggcccctcctggactccattcagatccagcctccaggagggagctccgtgggcagacccaacggccagagctaacaggactgcctgggaccgccctgcctcaccagggcttttcctttttaaacaaaacaaaccctaccagatttctattttataattttacatcagagctaacaaccaggggacggctttttaaatttcccagggaaggagaccgtcaggccgcatgtagacaatgctgctaagaaacagaacaaaatgccaccccttctaatagtattatactaatttattaaggctgtcttgtctgtgcgttcacttcggatgctgtttcctaagcgtcctccacactggagaaagggaggggctttgtttaaacagaaagcgagtcacagtttgcgggagccccaacctagaactctttccagagaacactcacgctctacccaagttgccaacacctgtgggacccaggtgagttttagaacatccgtgacccagaaagttactctagtgttaaatgaaccaaaggatttggtgtacatgggaccggtttcaggatgactaacctaacctaagtgaactctttagccacaaccctcaccttccctcccttaccccaagcaaggccagtgctggagcagccattgcctccggatcaagggagtaacagcaagtatcaggccggagaaaacaggataaagccattcctccttccacctagatggattgccaatcttctgccatcaattttgggaaacctgcctttgtgcccccgaggctgcctttcctcagcatagctgacttgtcatagtggatgaggtctgggctggagcagtagaagccaaggccttttttctgcaagtaatgatgtaggttatttgcagtctctgtaaccaccatccaggccagtacgcagtatttagctggggaccaagggatgggattccctactctaagaaaatacctttattttaattattattattttttgagacggagtctcgctctaccacccgggaggcagagattgcgatgagccgagatcgtaccagtgcactccagcctgggcgacagagtgagactccatctcaaaaaaataaaataatgaagtggaatcaaggtggcaagaaaatttagaatcgtttctgatagggactttcccttatcctaaatgtgttttgaaggcacacgttatttccattgtcattctgactttagaaaggcaggttggggcatgagtgggcattttcctaatgacttgctgctaggaggttataggcagggaacagtctgggagtctctaatccagagagactttcagattccctctcttcacatgaacctccattagttagattttgggaaagtgagcatgaagaagggactcagagctgccaggtacccgagtctcaggtctgacatccttgggccccttctgccacaacttcttgccacttcacggacttgaattatgttgcttcttcctggaagtctggcctgcagcacaggcctttcctctccaaaaagctgctgctcatttctggccccatctgctgctatctttgccatcagccatcacagtttggcatcatcagagtctcagctagaggagctgtcattctgccttagtgtttgcctgcgacctgaccaggggcatgaccagctgggatgtcaagtgacatttgggaacttgtagaggccaaatgattgaaagtttaattcttctcaagacccactgatttgccagtgtgcatggaaataatagattagagcagaaactagcagggactgttgtataatcgtgatctactagcagaattgggcccaaagagaaagaatttctgaggctgggtttcttctgggagggtagcaggttggtcttggccagtgctctgtttcccaccagtgttgttcccttttccagcttgcctggcccggctctgtcttccagggtcctgctccagacccctctgcctggggtctcccctccatccagggggttctgggcatcacagctcctttttttcctttctcctcttccagatccagtttcagctggtttgcttcttccagcaggcacccttaggcccaggagcagctcccctgagagaatttgagtcactcatttccttgaacagcacccccctttatactagcagccatttgtgccattgcctgtgccctagggtttgtggggagagagcgagggatcactgagcagttttcccagagctccatgggaaggcaagctctccctcccaatgggagccccactgtcactaactgtaaactcaggctcaggcttcaactgcctacccccatcctcatatttctgtctgtcccagcacctcaggagcattctcattgtggccggctaactccgcctggatgtgaacaggcaagcacagtgggaaatgagtcacgtacttgtattgcacagtggacacctctagaggtccattggtttaaagggatagggaaggaggagggatgagaccatcaccccctcccagaagtaaatctagtatctgagttttctttatgcccttgagtcaaactaataactgtctagtacggaggtgtttgctggttttcttcggtgttttttctaatgcaataaactcatttctgcctgctg

SEQ ID NO: 318222 - DNA, 2753 bp, Homo sapiens
ctgtcccctctctgtcacctcacagtagtcgttgccggtagcgggtgtgggggcgcgagcagcgcagggcggcctctcccccacccctcagcccgggcccgggctcggtccccccctctccctccgcttcgcactcccgtcgggtacgggaaggtccaagccgctgccgggtgcccgagggccgtcgtggccgccgtcgccacgggtcccaatggagccgccgaatctctatccggtgaagctctacgtgtacgacctgtccaaaggcctggcccggcggctcagccccatcatgctggggaaacaactggaaggcatctggcacacatccatagttgtgcacaaggatgagttcttcttcggcagtggtggtatctccagctgccccccgggagggacattgcttgggcctccagactctgtggttgatgtggggagtacagaagtcacagaagaaatctttctggagtacctctcctccctgggggagtccctgttccgaggtgaggcctacaacctctttgaacacaattgtaacaccttcagcaacgaagtggcacagttcctgactgggcggaagattccttcttacatcacagacctgccctctgaagttctctccacgccctttggacaggcacttcggcccctcctggactccattcagatccagcctccaggagggagctccgtgggcagacccaacggccagagctaacaggactgcctgggaccgccctgcctcaccagggcttttcctttttaaacaaaacaaaccctaccagatttctattttataattttacatcagagctaacaaccaggggacggctttttaaatttcccagggaaggagaccgtcaggccgcatgtagacaatgctgctaagaaacagaacaaaatgccaccccttctaatagtattatactaatttattaaggctgtcttgtctgtgcgttcacttcggatgctgtttcctaagcgtcctccacactggagaaagggaggggctttgtttaaacagaaagcgagtcacagtttgcgggagccccaacctagaactctttccagagaacactcacgctctacccaagttgccaacacctgtgggacccaggtgagttttagaacatccgtgacccagaaagttactctagtgttaaatgaaccaaaggatttggtgtacatgggaccggtttcaggatgactaacctaacctaagtgaactctttagccacaaccctcaccttccctcccttaccccaagcaaggccagtgctggagcagccattgcctccggatcaagggagtaacagcaagtatcaggccggagaaaacaggataaagccattcctccttccacctagatggattgccaatcttctgccatcaattttgggaaacctgcctttgtgcccccgaggctgcctttcctcagcatagctgacttgtcatagtggatgaggtctgggctggagcagtagaagccaaggccttttttctgcaagtaatgatgtaggttatttgcagtctctgtaaccaccatccaggccagtacgcagtatttagctggggaccaagggatgggattccctactctaagaaaatacctttattttaattattattattttttgagacggagtctcgctctaccacccgggaggcagagattgcgatgagccgagatcgtaccagtgcactccagcctgggcgacagagtgagactccatctcaaaaaaataaaataatgaagtggaatcaaggtggcaagaaaatttagaatcgtttctgatagggactttcccttatcctaaatgtgttttgaaggcacacgttatttccattgtcattctgactttagaaaggcaggttggggcatgagtgggcattttcctaatgacttgctgctaggaggttataggcagggaacagtctgggagtctctaatccagagagactttcagattccctctcttcacatgaacctccattagttagattttgggaaagtgagcatgaagaagggactcagagctgccaggtacccgagtctcaggtctgacatccttgggccccttctgccacaacttcttgccacttcacggacttgaattatgttgcttcttcctggaagtctggcctgcagcacaggcctttcctctccaaaaagctgctgctcatttctggccccatctgctgctatctttgccatcagccatcacagtttggcatcatcagagtctcagctagaggagctgtcattctgccttagtgtttgcctgcgacctgaccaggggcatgaccagctgggatgtcaagtgacatttgggaacttgtagaggccaaatgattgaaagtttaattcttctcaagacccactgatttgccagtgtgcatggaaataatagattagagcagaaactagcagggactgttgtataatcgtgatctactagcagaattgggcccaaagagaaagaatttctgaggctgggtttcttctgggagggtagcaggttggtcttggccagtgctctgtttcccaccagtgttgttcccttttccagcttgcctggcccggctctgtcttccagggtcctgctccagacccctctgcctggggtctcccctccatccagggggttctgggcatcacagctcctttttttcctttctcctcttccagatccagtttcagctggttttcttcggtgttttttctaatgcaataaactcatttctgcctgctg

SEQ ID NO: 318223 - DNA, 2420 bp, Homo sapiens
ctgtcccctctctgtcacctcacagtagtcgttgccggtagcgggtgtgggggcgcgagcagcgcagggcggcctctcccccacccctcagcccgggcccgggctcggtccccccctctccctccgcttcgcactcccgtcgggtacgggaaggtccaagccgctgccgggtgcccgagggccgtcgtggccgccgtcgccacgggtcccaatggagccgccgaatctctatccggtgaagctctacgtgtacgacctgtccaaaggcctggcccggcggctcagccccatcatgctggggaaacaactggaaggcatctggcacacatccatagttgtgcacaaggatgagttcttcttcggcagtggtggtatctccagctgccccccgggagggacattgcttgggcctccagactctgtggttgatgtggggagtacagaagtcacagaagaaatctttctggagtacctctcctccctgggggagtccctgttccgaggtgaggcctacaacctctttgaacacaattgtaacaccttcagcaacgaagtggcacagttcctgactgggcggaagattccttcttacatcacagacctgccctctgaagttctctccacgccctttggacaggcacttcggcccctcctggactccattcagatccagcctccaggagggagctccgtgggcagacccaacggccagagctaacaggactgcctgggaccgccctgcctcaccagggcttttcctttttaaacaaaacaaaccctaccagatttctattttataattttacatcagagctaacaaccaggggacggctttttaaatttcccagggaaggagaccgtcaggccgcatgtagacaatgctgctaagaaacagaacaaaatgccaccccttctaatagtattatactaatttattaaggctgtcttgtctgtgcgttcacttcggatgctgtttcctaagcgtcctccacactggagaaagggaggggctttgtttaaacagaaagcgagtcacagtttgcgggagccccaacctagaactctttccagagaacactcacgctctacccaagttgccaacacctgtgggacccaggtgagttttagaacatccgtgacccagaaagttactctagtgttaaatgaaccaaaggatttggtgtacatgggaccggtttcaggatgactaacctaacctaagtgaactctttagccacaaccctcaccttccctcccttaccccaagcaaggccagtgctggagcagccattgcctccggatcaagggagtaacagcaagtatcaggccggagaaaacaggataaagccattcctccttccacctagatggattgccaatcttctgccatcaattttgggaaacctgcctttgtgcccccgaggctgcctttcctcagcatagctgacttgtcatagtggatgaggtctgggctggagcagtagaagccaaggccttttttctgcaagtaatgatgtaggttatttgcagtctctgtaaccaccatccaggccagtacgcagtatttagctggggaccaagggatgggattccctactctaagaaaatacctttattttaattattattattttttgagacggagtctcgctctaccacccgggaggcagagattgcgatgagccgagatcgtaccagtgcactccagcctgggcgacagagtgagactccatctcaaaaaaataaaataatgaagtggaatcaaggtggcaagaaaatttagaatcgtttctgatagggactttcccttatcctaaatgtgttttgaaggcacacgttatttccattgtcattctgactttagaaaggcaggttggggcatgagtgggcattttcctaatgacttgctgctaggaggttataggcagggaacagtctgggagtctctaatccagagagactttcagattccctctcttcacatgaacctccattagttagattttgggaaagtgagcatgaagaagggactcagagctgccaggtacccgagtctcaggtctgacatccttgggccccttctgccacaacttcttgccacttcacggacttgaattatgttgcttcttcctggaagtctggcctgcagcacaggcctttcctctccaaaaagctgctgctcatttctggccccatctgctgctatctttgccatcagccatcacagtttggcatcatcagagtctcagctagaggagctgtcattctgccttagtgtttgcctgcgacctgaccaggggcatgaccagctgggatgcagcaccaggcagctagagggagagggtcacctgcttcaaggggtgtgggggcaggtgctggggcaacccctctccagcatgtctcctatgtcccccagacga

SEQ ID NO: 318224 - DNA, 1539 bp, Homo sapiens
ctgtcccctctctgtcacctcacagtagtcgttgccggtagcgggtgtgggggcgcgagcagcgcagggcggcctctcccccacccctcagcccgggcccgggctcggtccccccctctccctccgcttcgcactcccgtcgggtacgggaaggtccaagccgctgccgggtgcccgagggccgtcgtggccgccgtcgccacgggtcccaatggagccgccgaatctctatccggtgaagctctacgtgtacgacctgtccaaaggcctggcccggcggctcagccccatcatgctggggaaacaactggaaggcatctggcacacatccatagttgtgcacaaggatgagttcttcttcggcagtggtggtatctccagctgccccccgggagggacattgcttgggcctccagactctgtggttgatgtggggagtacagaagtcacagaagaaatctttctggagtacctctcctccctgggggagtccctgttccgaggtgaggcctacaacctctttgaacacaattgtaacaccttcagcaacgaagtggcacagttcctgactgggcggaagattccttcttacatcacagacctgccctctgaagttctctccacgccctttggacaggcacttcggcccctcctggactccattcagatccagcctccaggagggagctccgtgggcagacccaacggccagagctaacaggactgcctgggaccgccctgcctcaccagggcttttcctttttaaacaaaacaaaccctaccagatttctattttataattttacatcagagctaacaaccaggggacggctttttaaatttcccagggaaggagaccgtcaggccgcatgtagacaatgctgctaagaaacagaacaaaatgccaccccttctaatagtattatactaatttattaaggctgtcttgtctgtgcgttcacttcggatgctgtttcctaagcgtcctccacactggagaaagggaggggctttgtttaaacagaaagcgagtcacagtttgcgggagccccaacctagaactctttccagagaacactcacgctctacccaagttgccaacacctgtgggacccaggtgagttttagaacatccgtgacccagaaagttactctagtgttaaatgaaccaaaggatttggtgtacatgggaccggtttcaggcttcaactgcctacccccatcctcatatttctgtctgtcccagcacctcaggagcattctcattgtggccggctaactccgcctggatgtgaacaggcaagcacagtgggaaatgagtcacgtacttgtattgcacagtggacacctctagaggtccattggtttaaagggatagggaaggaggagggatgagaccatcaccccctcccagaagtaaatctagtatctgagttttctttatgcccttgagtcaaactaataactgtctagtacggaggtgtttgctggttttcttcggtgttttttctaatgcaataaactcatttctgcctgctg

SEQ ID NO: 318225 - DNA, 1619 bp, Homo sapiens
gcggagcatctaagtctcagtactgttcatctgtcatttctgccctgttttaaaatttttttctccatctcaaaaaaataaaataatgaagtggaatcaaggtggcaagaaaatttagaatcgtttctgatagggactttcccttatcctaaatgtgttttgaaggcacacgttatttccattgtcattctgactttagaaaggcaggttggggcatgagtgggcattttcctaatgacttgctgctaggaggttataggcagggaacagtctgggagtctctaatccagagagactttcagattccctctcttcacatgaacctccattagttagattttgggaaagtgagcatgaagaagggactcagagctgccaggtacccgagtctcaggtctgacatccttgggccccttctgccacaacttcttgccacttcacggacttgaattatgttgcttcttcctggaagtctggcctgcagcacaggcctttcctctccaaaaagctgctgctcatttctggccccatctgctgctatctttgccatcagccatcacagtttggcatcatcagagtctcagctagaggagctgtcattctgccttagtgtttgcctgcgacctgaccaggggcatgaccagctgggatgtcaagtgacatttgggaacttgtagaggccaaatgattgaaagtttaattcttctcaagacccactgatttgccagtgtgcatggaaataatagattagagcagaaactagcagggactgttgtataatcgtgatctactagcagaattgggcccaaagagaaagaatttctgaggctgggtttcttctgggagggtagcaggttggtcttggccagtgctctgtttcccaccagtgttgttcccttttccagcttgcctggcccggctctgtcttccagggtcctgctccagacccctctgcctggggtctcccctccatccagggggttctgggcatcacagctcctttttttcctttctcctcttccagatccagtttcagctggtttgcttcttccagcaggcacccttaggcccaggagcagctcccctgagagaatttgagtcactcatttccttgaacagcacccccctttatactagcagccatttgtgccattgcctgtgccctagggtttgtggggagagagcgagggatcactgagcagttttcccagagctccatgggaaggcaagctctccctcccaatgggagccccactgtcactaactgtaaactcaggctcaggcttcaactgcctacccccatcctcatatttctgtctgtcccagcacctcaggagcattctcattgtggccggctaactccgcctggatgtgaacaggcaagcacagtgggaaatgagtcacgtacttgtattgcacagtggacacctctagaggtccattggtttaaagggatagggaaggaggagggatgagaccatcaccccctcccagaagtaaatctagtatctgagttttctttatgcccttgagtcaaactaataactgtctagtacggaggtgtttgctggttttcttcggtgttttttctaatgcaataaactcatttctgcctgctg

SEQ ID NO: 318226 - DNA, 909 bp, Homo sapiens
ctgtcccctctctgtcacctcacagtagtcgttgccggtagcgggtgtgggggcgcgagcagcgcagggcggcctctcccccacccctcagcccgggcccgggctcggtccccccctctccctccgcttcgcactcccgtcgggtacgggaaggtccaagccgctgccgggtgcccgagggccgtcgtggccgccgtcgccacgggtcccaatggagccgccgaatctctatccggtgaagctctacgtgtacgacctgtccaaaggcctggcccggcggctcagccccatcatgctggggaaacaactggaaggcatctggcacacatccatagttgtgcacaaggatgagttcttcttcggcagtggtggtatctccagctgccccccgggagggacattgcttgggcctccagactctgtggttgatgtggggagtacagaagtcacagaagaaatctttctggagtacctctcctccctgggggagtccctgttccgaggtgaggcctacaacctctttgaacacaattgtaacaccttcagcaacgaagtggcacagttcctgactgggcggaagattccttcttacatcacagacctgccctctgaagttctctccacgtaagtgtggcctctgtccctgcccctgccttggccaaccttgaaaatccccattcacggtcagtgcccttcctctggcccccatctgccctcccaaccaggtgggcctgccctgatggcagattctaacacagaaggctgccattctctccacccactgatgcgcacctgtattacctccaccttcagagctagaccagctctgccctggcctaagtgcaaccacagaacttagacacccacttgacactggcttcagtacttgcacaaaattctggcgtctgt

SEQ ID NO: 318227 - DNA, 525 bp, Homo sapiens
ctgtcccctctctgtcacctcacagtagtcgttgccggtagcgggtgtgggggcgcgagcagcgcagggcggcctctcccccacccctcagcccgggcccgggctcggtccccccctctccctccgcttcgcactcccgtcgggtacgggaaggtccaagccgctgccgggtgcccgagggccgtcgtggccgccgtcgccacgggtcccaatggagccgccgaatctctatccggtgaagctctacgtgtacgacctgtccaaaggcctggcccggcggctcagccccatcatgctggggaaacaactggaaggcatctggcacacatccatagttgtgcacaaggatgagttcttcttcggcagtggtggtatctccagctgccccccgggaactgtgtaagctccttgcgagctgagaccttccatctccatcccctgcacagtgtccggctcatcctaggaacgcaactgatgttaagctgaatgatgagggctctgagaagcatcaagacttgcccaaac

SEQ ID NO: 318228 - DNA, 529 bp, Homo sapiens
tgttctgatacagatattccttcaaacatactttctgccgaaatttttagaggaaataagggcttttcattccttctgattaaaatcggcaagcgctgttctcaacctgtattggccaagtttgcagaaggaaaaacagggtttgcagaagggttgggatgaaatacaaacttgagcagattttctctgaaagaggctttagtcagtttcagtaagggggtaaactcttaacaccagagttctgctttcgtgaatgtaaagattctcctgaaactgtgtaggagccatgtcttttcagtttctccttcccttaaaaatcagttattaatggccagaatggcaaataagcagtgcttttctggtgtatgagacgggggaaatcgcaatcctcacattgagctgtgctcaccattccactgcctagcttgagttattccacatagacgcttgctggtttctcatatatgttctgcaaacctttcaatgtacagaggtgaggcctacaacctctttgaacacaattgtaaca

SEQ ID NO: 318229 - DNA, 356 bp, Homo sapiens
atagttgtgcacaaggatgagttcttcttcggcagtggtggtatctccagctgccccccggtgagtgtcttcccctacactctgtcctgcagtctcaggttcctgggggctcctgtagaccaggagctttgcttctactatggacttctggcattgttcctcaaagccacctgaagacttggctcaataaaacctttcccagacaccccagccagttcctctcctctctgttcccatggcacgtgtgggtccttctgtctcacagagagcatgttatggtgaaatgagctgtttctggttctccacagggaactgtgtaagctccttgcgagctgagaccttccatctccatcccc

SEQ ID NO: 318230 - DNA, 119 bp, Homo sapiens
ggttgcagtgagccaagatcgcgccactacactccaggctggcgacggtcagacccgcctcaaaaaaaaaaatgtcccccaaaactccaaaaattaacaacctccccccgccctgccaa

SEQ ID NO: 318231 - DNA, 440 bp, Homo sapiens
tctaattaacctgttaaccttggcacctttttaaagagggaggtggcgagctatggggtgctaccctggagcagtggactcatgccggatggtggggggtctcgtactgtaggcagtggggagccacaaaaatgctttcaatcagggaagcaacataacccagtttccttttagggagttcactccatctgatggatagccactgaattgaagcgggtgagccggcaggctggggcaccaatgttcactatgcccctggcctgactctccaccagtgaggacctgagctaacgtagtggcagtaggggtggtgaggagctagcagatatgtggaagatgacagctagaggaattggttacattgttaagttgttgaacctgaaaaagaaggaagacacagtggcagttcccagaggtctggttgattgattgggtgggag

SEQ ID NO: 318232 - DNA, 342 bp, Homo sapiens
tctcagagcatggaacacaagaatggcatcgagggaggctcccaggcagtcagtagaagggaagaggagaattaaaggtgaggggagcactttggtctgcattttccagtctcttcctgcccagagcccgggcctccacctgtgcctgagatcctgttccccttcccactcacagacattccctaagccacccgatgttccccagtataaaccaggcccctccaggccacaccctgctgggttattctcatcagtgttcctgctgttttctcctttcctgcaaaacacacacacacacacacacaccctcctctcctgcaaaaacacacatattcccttctc

SEQ ID NO: 318233 - DNA, 376 bp, Homo sapiens
aatgatttctgggcttctggcctgcatcattggagggggtagttgaaccatttactgggacaggaggaccggaaaaggccagagtcacagaggagagaatgaatttattccttgagtaaatatttattaaactcctaccatatacttggctctaatataggcatgggagcagagtcaaaacgaaccaaaatcttgaaattatctagcttatgttccagcttggagagatcaaaaaatgagataaatcaataaactatttagtatgagagatggcctagaacactgcctcctacagtgtagctactcagtaagtatcatggagaaaaggacttagggaaggggactagagaggcaggtgttggggatggagttacaa

SEQ ID NO: 318234 - DNA, 797 bp, Homo sapiens
ctgttccaacaagtctgttgggggtgggtgtgcccagggccctggaacctctttaatttgagaaatatttcagggctaggcgaggtggaagatgtacagaagaaataaatggatagggtgcagtggctcaagcctgtaatcccagcactttgggaggctgaggaaggaggaaagcttgagcccaggagtttgaggctgcagtgagcagtgattactccattgcactctagcccaggcaatagagcaagaccccatctctaagaaaaattttaaaatttagcaataaataaatgccttgtgccttaaatttacagataagcttagagattgtatcgtgtattggaaaacaatacaaagcaatatatagtttaaagagtaaatacaggtcaggcgcagtggctcacgggctggacgtgtggctcatgcctgtaatcccagcactttgggaggccaaggtgggcgaatcacgaggtcaggagttcaagaccagcccggtcaagatggtgaaaccctgtctctactaaaaatacaaaaattagccgggcacggtggctggtgcctgtaatcccagctactcgggagggtgaggcaggagaatcgcttgaacctgggcggcagaggttgcagtgagctgagatcacactgctgcactccagctgggtgacagagtgagattctgtctcaaaaaaaaaaaaaaagtaagtactaggctggccatggtggctcacacctgtaatctcagcactttgggaggctgaggcaggaggatcacttgagtccaggatgtcgagactagt

SEQ ID NO: 318235 - DNA, 393 bp, Homo sapiens
aatgacacgtaaattcttgaagtgtttcattttttaagtcacatctagataaacaagaactttcaacagctgaaagaccccaggcaacaacaatccctatttgttagaaatccaactaaatcagtacagttgtgacaaaaagggtaaagaaaaagagaacaagtaagccgaatgaaggaggcggcaggaagacaactatgggtagaagcagttcccttcaaacaacccaagcaaatcctgcttctttggaacttactcctatttccctcctgcactcattatccctcttgtattgctgctgtaactctcgccatctgaacttatctgctgctttgcattttaattgttttctgagggtttgaaacattttgggaccacagatttcccacctgg

SEQ ID NO: 318236 - DNA, 3275 bp, Homo sapiens
ctgtgttcctggcccgcggccgtcgggtgtgagctgcgccgaccgctctgagggttcgtggcccaccgctccttcgcggtccctgccgccaccgtccacgctcagcgttgtagagaagatggtgggtcggaacagcgccatcgccgccggtgtatgcggggcccttttcattgggtactgcatctacttcgaccgcaaaagacgaagtgaccccaacttcaagaacaggcttcgagaacgaagaaagaaacagaagcttgccaaggagagagctgggctttccaagttacctgaccttaaagatgctgaagctgttcagaagttcttccttgaagaaatacagcttggtgaagagttactagctcaaggtgaatatgagaagggcgtagaccatctgacaaatgcaattgctgtgtgtggacagccacagcagttactgcaggtcttacagcaaactcttccaccaccagtgttccagatgcttctgactaagctcccaacaattagtcagagaattgtaagtgctcagagcttggctgaagatgatgtggaatgagaaacaaatgtcaacataataaaatctcagttaaaaatattttaaaaattcttggtagttgagcagctctgggggaataagggcaaatatgcttgttatgaactacactgaaatctaccaaagttaatgtttactttgtgtagatccatttgtctattttatttatttttcccagtgaaaagtgtattttgatagagaacttttcattctataaatacactatgagttactaaaatatcatggattttgtttattcctgaaacatagttacatagttaaactgtacatatgacatggcttatgttaaaaatacccagtgctcagttttgaaagataggcaaaaaaaaaaaagtataggagaaactgaagaatgtacacttttttagagggcacattttgctgtaaatctggaaatttgatagacttgactgtgtttgtgaaaactgagcattaaaggttttgattgatcctttctttccatttaatctctgagacgtaaatatgtgaggtgtgctgctgtgctgggttaacagcttccttccctttctgtgtagcagtcttgaaatgttctgtttaaatcagtaggcttaatgtgttctgggtatttatctccttgtattttaaatatatgtagttgcaaatagcaccaggaattagatttctgtacacccctaatctagccttgtgagcttcgctagttaatgtgtgctcactttccctccatttgttacgtgagagaatgcgtctgctgatcactgaagtgtcccttttagcttctgattcattgggttctgttgggcatctttaaatccaccttaacctgaggaatgtatgtgggcaaccaggccctgcatttttttatattctgaattttgcatgcttgcctgacttagtatttctgaattgatgttttttttaatggtataactatcttgattttcactgaaattatatggttctgtcactactctgtaaattaatccgaaacttttaaggtaactgggatgatctgcttgtaaaaatgcttgttgccttttgctttatcttcagtgtacctccttaatcctgcttcaacttgattatcttgtgaaacgatgagagtaagttgcaaccttgtgactgaaaacttgaaaagagtggagcaggtgggacctcttattctcaaatagtgacatattctccgtagtcacagtttcagaactgagtaaggatccttggtacttggtggcatctgttgaactgaggagcatttctcattgtaaagattgcctttgttctgtctaaaagtctggagaaatcccaaagacttttcctatgtactaggcattttattttgattgacttacaaactcttcttaatcattatcaatctcggtttttttgtggtgcagtggaaggagaaataggtctagtttctgcctctgattagccgcacagccttgaacaaatcacatttcatctttgaacttacctctactgttagactaggcgactcacatttgaggacttttctcgggtatcttgagggtttgtgatcctgaacccttaaacagtgcttttttgttacacaggagggcttttttggggggatgaccagtacagacatgccagttagttttactagtgggatcccaaatccaaagcagtgtagtggtgattggtcagtgactaaccaggcagctaagaagtcttaggcagcagcccagacatgtatagaggggcagttagagggagaacaggggtgggaaagggagcaaggggcagatagctcagcaaggaaagaatgggctcagaaaaaggagggctggctggaggagtgaggggcagcttaagtttggggagggtagaaacgccgtttccttgggaactggagtgcagtatgagctgggtgtcacttggctctgaacatactggctttgctgtaatgcttgaaaaggcgttggtatcttcattttacagttcattaacccaagtacgttttcttatttaaatgacaactttggtgctttaaaatgaggtaccactttttaaagctagctgtgtcgagttaaagaaaaaatcagcagttttttctcccagaaatgtaattgccaaacacttttcatccccatcttaagttttacaaggtgatgtaatcagcttgttgtagtgatgctggccaaatggtgctcagcaggtgagaacaaaaaaaccccagatttcagtgaactaatacacagcttgagcgtttccatgtgctaatgttgcacacttactaaaaaactttggaaatggaaaataatgtattagtgcaacagttgatgtgcttctttgggcaaagatatagttttgttccacaatttgtacttaaaagcgaaagaacattgaaaacatagacttactggctgtagcaatgctggcctgttaactgataactagaacttaggttcacgtttatgtaaagtgtgtaaaacctagtagagcttgcatagtcggcactcagtaaatgtttggttccttttgccccttggtaagtttattttaccatcctcccacctgccattctgactttattaaatcaacatgtggaccagagtgttaatgagatgttattgcagaagagattgagaaaattggtatatcatgcagataacatacaaaatctttttgtaacgtaaaaaatgcagttttattattgcttgtgcctcaactgtttaagtgaatattaaagggcttggag

SEQ ID NO: 318237 - DNA, 228 bp, Homo sapiens
aagcacctcttcctttctcctgtactgcctaactattcatgttttcttatcatcaatactcatttcatatattccctacctcacattctccccttctttccctcccttctccactcccattcagttggttattttataaatgtgattctgtgatcttgtgtatataattacaatgcttacatgtttcttttacactagaatgtgttcctttacagcagtgactttcat

SEQ ID NO: 318238 - DNA, 603 bp, Homo sapiens
tcagaccaccctaccatagggctgctgcagtttgctgaggttctgctccagtctctagttgcctcagtgttttacgtacctgaaggtttcaccagtgaaggctgagaagcagcaaagatggcaaccacctccttcctctggaagctccacccctggtgaatactgacctgttgctggcctgaatgtacctgtaggaggtgactggaaacgccttttaggaggtctcgcccaatcaggagaaatgggatcagggatccacttaaaaaagaagtctggctgctttttggtagagcaagtgtgttgtgttcaaggtgacccttccttgactgaaccatttgtgttctccaaagcaagcaggctggaacagctgattctactgaactgcagagatgatagctgctcctccctccagaagttccatctcagggagagatcagggctctatccatagaaccctggctggagtggctgaagcccctgcagtgactagaaatggattggtgttccacttaaagaagcagtctggccacagtctagcaagatggaccatgctgtactgtattatagtggacactttcttttctgaactgtttgtattctcca

SEQ ID NO: 318239 - DNA, 804 bp, Homo sapiens
aattaaaagcaagtgaatttgttaagtgcaaatggattgcacttaacagaactctgagttctgtgttccccttctctgattatgttttatttcatgggaacactgcactaagcagcacaatttctacaaccatttggggcttcttctatctcctttcatactttccctaccaacagggatgtacaattaaaatggctcagcaacaaccctactttttattccccattatgtagggattatatatttgataggtttttccagttttgtgtatacatttacttttttccagaaggagaacttatggattgtgatggaaaatcagaatctagtcctgagcgggaagctgtggatgatgaaactaagggagtggaaggaacagatggtgtcaaaaagagaaaaaggaaaccatacagaccaggtatagtgcctgaggtagacatttcaatatcatcaacacttggttaattaaagaaaaatacaatactgaagacttcaattaaaattaaatattcaggcttcagaactgtctaaacaaaaatatgtgcacataaattaaagaactaaactatttgaatacgactttttagctctagagttctttattttgaatgtgtgaatacttcacaatgaatcattattgaatgccttgtcccaaatgttaaccattttattaaaggctttactagattggcttttgttcatacttggactttgaaggccatttatatagttcctctggatgtgtacttctgtaacgcttttaattttcagtattcactttctaatatctttttttgaaaaaac

SEQ ID NO: 318240 - DNA, 653 bp, Homo sapiens
taactgtttttaattgtaaaattccagacagagatataaaagttggcattaatacaggggaaagaactcaatgcgaatcattacatgccctgtgtttgtgggtattgtgtgtttcagtcaggccctgaaatcacacaagcgtgtatattggtcagccagtgtttgttgcatgggctaatctttttcttcaaggagcatttggcagggtttacctaagtttggctttgaaactgaatttgcatactcatatttaagtagatctacctgcaggccaatagtgttaacataagctagaagaccattttattatcggggaaaacgctgatgagttatttctgtcgtgggccatcctttgaccagcttgagattgtctgtagtctccatcagatggggtgactttgtgtctgctttgcttcttttcagcttcctggggttgaggcatgtgaaaattataccttccgatacggccgaaatcctctcatggaacttcctcttgccgttaaccccacaggttgtgcccgttctgaacctaaaatgagtgcccatgtcaagaggtttgtgttaaggcgctgtaggttaaggcgctgtaggttaaggcgctgtaggttaaggcgctgtaggttaaggcgctgtaggttaaggcgctgtaggtt

SEQ ID NO: 318241 - DNA, 623 bp, Homo sapiens
ccgtgttggtattcacccagttgaggtagttaaccaacttcaggttctcttccaggctggaggcaagcaggggtgaaggacaccaggcttgtcacatcttctgggtgtgctggatgggtgaggacactctcctcttcccttgcctttctgaagtttctcccacctcagaatgtcagtgtgcccatttcctgacacttgggtatttatggccactctcctgccctcttcctaggatgaagtcactagagggcagtagatcgcagcagcactgatttctgtcctctcttgacatttctttgcttaaaagattacaagcctgtttgtcagtgagtctaactgaaccatatctacacaatagttttagaaaattgtatgattctaaggcattgttttcaagaataaaaatatcattggtgtgttttctttggacaggcagaggaaaccccaaaagccactgagtaatgtgcctaattgttttctttggaatcgccctgcctaaatgatacttatcttttatgactacagagaaataaatttcacaagcaatgtattccagctttatgcttccaggacatggagagcgataacctcatcacatcagagtcaaattgaaaggagtgaga

SEQ ID NO: 318242 - DNA, 14516 bp, Homo sapiens
tgtagtgatgtctcaggcagaataaaatatttaatgtaaattgtagcagcaaacatttaagttatacttaaatgtttaaatcactgttagtgattaacttattttgccttccttgaagcaatttgtcctaaatttccatacgtttgcatttgtttttgctgttctaaaattccttagttgctggctttgaccttttatgttgctgagttttacacatctattttctcaactgccatatcctagggggcttggagtacccataatacagtgagcccaccttcctggtccccagacatttcagaaggtcgggaaatttttaaacccaggcagcttcctggcagtgccatttggagcatcaaagtgggccgtgggtctggatttccaggaaagcggagacctcgaggtgcaggactgtcggggcgaggtggccgaggcaggtcaaagctgaaaagtggaatcggagctgttgtattacctggggtgtctactgcagatatttcatcaaataaggatgatgaagaaaactctatgcacaatacagttgtgttgttttctagcagtgacaagttcactttgaatcaggatatgtgtgtagtttgtggcagttttggccaaggagcagaaggaagattacttgcctgttctcagtgtggtcagtgttaccatccatactgtgtcagtattaagatcactaaagtggttcttagcaaaggttggaggtgtcttgagtgcactgtgtgtgaggcctgtgggaaggcaactgacccaggaagactcctgctgtgtgatgactgtgacataagttatcacacctactgcctagaccctccattgcagacagttcccaaaggaggctggaagtgcaaatggtgtgtttggtgcagacactgtggagcaacatctgcaggtctaagatgtgaatggcagaacaattacacacagtgcgctccttgtgcaagcttatcttcctgtccagtctgctatcgaaactatagagaagaagatcttattctgcaatgtagacaatgtgatagatggatgcatgcagtttgtcagaacttaaatactgaggaagaagtggaaaatgtagcagacattggttttgattgtagcatgtgcagaccctatatgcctgcgtctaatgtgccttcctcagactgctgtgaatcttcacttgtagcacaaattgtcacaaaagtaaaagagctagacccacccaagacttatacccaggatggtgtgtgtttgactgaatcagggatgactcagttacagagcctcacagttacagttccaagaagaaaacggtcaaaaccaaaattgaaattgaagattataaatcagaatagcgtggccgtccttcagacccctccagacatccaatcagagcattcaagggatggtgaaatggatgatagtcgagaaggagaacttatggattgtgatggaaaatcagaatctagtcctgagcgggaagctgtggatgatgaaactaagggagtggaaggaacagatggtgtcaaaaagagaaaaaggaaaccatacagaccaggtattggtggatttatggtgcggcaaagaagtcgaactgggcaagggaaaaccaaaagatctgtgatcagaaaagattcctcaggctctatttccgagcagttaccttgcagagatgatggctggagtgagcagttaccagatactttagttgatgaatctgtttctgttactgaaagcactgaaaaaataaagaagagataccgaaaaaggaaaaataagcttgaagaaactttccctgcctatttacaagaagctttctttggaaaagatcttctagatacaagtagacaaagcaagataagtttagataatctgtcagaagatggagctcagcttttatataaaacaaacatgaacacaggtttcttggatccttccttagatccactacttagttcatcctcggctccaacaaaatctggaactcacggtcctgctgatgacccattagctgatatttctgaagttttaaacacagatgatgacattcttggaataatttcagatgatctagcaaaatcagttgatcattcagatattggtcctgtcactgatgatccttcctctttgcctcagccaaatgtcaatcagagttcacgaccattaagtgaagaacagctagatgggatcctcagtcctgaactagacaaaatggtcacagatggagcaattcttggaaaattatataaaattccagagcttggcggaaaagatgttgaagacttatttacagctgtacttagtcctgcgaacactcagccaactccattgccacagcctcccccaccaacacagctgttgccaatacacaatcaggatgctttttcacggatgcctctcatgaatggccttattggatccagtcctcatctcccacataattctttgccacctggaagcggactgggaactttctctgcaattgcacaatcctcttatcctgatgccagggataaaaattcagcctttaatccaatggcaagtgatcctaacaactcttggacatcatcagctcccactgtggaaggagaaaatgacacaatgtcgaatgcccagagaagcacgcttaagtgggagaaagaggaggctctgggtgaaatggcaactgttgccccagttctctacaccaatattaatttccccaacttaaaggaagaattccctgattggactactagagtgaagcaaattgccaaattgtggagaaaagcaagctcacaagaaagagcaccatatgtgcaaaaagccagagataacagagctgctttacgcattaataaagtacagatgtcaaatgattccatgaaaaggcagcaacagcaagatagcattgatcccagctctcgtattgattcggagctttttaaagatcctttaaagcaaagagaatcagaacatgaacaggaatggaaatttagacagcaaatgcgtcagaaaagtaagcagcaagctaaaattgaagccacacagaaacttgaacaggtgaaaaatgagcagcagcagcagcaacaacagcaatttggttctcagcatcttctggtgcagtctggttcagatacaccaagtagtgggatacagagtcccttgacacctcagcctggcaatggaaatatgtctcctgcacagtcattccataaagaactgtttacaaaacagccacccagtacccctacgtctacatcttcagatgatgtgtttgtaaagccacaagctccacctcctcctccagccccatcccggattcccatccaggatagtctttctcaggctcagacttctcagccaccctcaccgcaagtgttttcacctgggtcctctaactcacgaccaccatctccaatggatccatatgcaaaaatggttggtacccctcgaccacctcctgtgggccatagtttttccagaagaaattctgctgcaccagtggaaaactgtacacctttatcatcggtatctaggccccttcaaatgaatgagacaacagcaaataggccatcccctgtcagagatttatgttcttcttccacgacaaataatgacccctatgcaaaacctccagacacacctaggcctgtgatgacagatcaatttcccaaatccttgggcctatcccggtctcctgtagtttcagaacaaactgcaaaaggccctatagcagctggaaccagtgatcactttactaaaccatctcctagggcagatgtgtttcaaagacaaaggatacctgactcatatgcacgacccttgttgacacctgcacctcttgatagtggtcctggaccttttaagactccaatgcaacctcctccatcctctcaggatccttatggatcagtgtcacaggcatcaaggcgattgtctgttgacccttatgaaaggcctgctttgacaccaagacctatagataatttttctcataatcagtcaaatgatccatatagtcagcctccccttaccccacatccagcagtgaatgaatcttttgcccatccttcaagggctttttcccagcctggaaccatatcaaggccaacatctcaggacccatactcccaacccccaggaactccacgacctgttgtagattcttattcccaatcttcaggaacagctaggtccaatacagacccttactctcaacctcctggaactccccggcctactactgttgacccatatagtcagcagccccaaaccccaagaccatctacacaaactgacttgtttgttacacctgtaacaaatcagaggcattctgatccatatgctcatcctcctggaacaccaagacctggaatttctgtcccttactctcagccaccagcaacaccaaggccaaggatttcagagggttttactaggtcctcaatgacaagaccagtcctcatgccaaatcaggatcctttcctgcaagcagcacaaaaccgaggaccagctttacctggcccgttggtaaggccacctgatacatgttcccagacacctaggccccctggacctggtctttcagacacatttagccgtgtttccccatctgctgcccgtgatccctatgatcagtctccaatgactccaagatctcagtctgactcttttggaacaagtcaaactgcccatgatgttgctgatcagccaaggcctggatcagaggggagcttctgtgcatcttcaaactctccaatgcactcccaaggccagcagttctctggtgtctcccaacttcctggacctgtgccaacttcaggagtaactgatacacagaatactgtaaatatggcccaagcagatacagagaaattgagacagcggcagaagttacgtgaaatcattctccagcagcaacagcagaagaagattgcaggtcgacaggagaaggggtcacaggactcacccgcagtgcctcatccagggcctcttcaacactggcaaccagagaatgttaaccaggctttcaccagacccccacctccctatcctgggaacattaggtctcctgttgcccctcctttaggacctagatatgctgttttcccaaaagatcagcgtggaccctatcctcctgatgttgctagtatggggatgagacctcatggatttagatttggatttccaggaggtagtcatggtaccatgccgagtcaagagcgcttccttgtgcctcctcagcaaatacagggatctggagtttctccacagctaagaagatcagtatctgtagatatgcctaggcctttaaataactcacaaatgaataatccagttggacttcctcagcatttttcaccacagagcttgccagttcagcagcacaacatactgggccaagcatatattgaactgagacatagggctcctgacggaaggcaacggctgcctttcagtgctccacctggcagcgttgtagaggcatcttctaatctgagacatggaaacttcattccccggccagactttccgggccctagacacacagaccccatgcgacgacctccccagggtctacctaatcagctacctgtgcacccagatttggaacaagtgccaccatctcaacaagagcaaggtcattctgtccattcatcttctatggtcatgaggactctgaaccatccactaggtggtgaattttcagaagctcctttgtcaacatctgtaccgtctgaaacaacgtctgataatttacagataaccacccagccttctgatggtctagaggaaaaacttgattctgatgacccttctgtgaaggaactggatgttaaagaccttgagggggttgaagtcaaagacttagatgatgaagatcttgaaaacttaaatttagatacagaggatggcaaggtagttgaattggatactttagataatttggaaactaatgatcccaacctggatgacctcttaaggtcaggagagtttgatatcattgcatatacagatccagaacttgacatgggagataagaaaagcatgtttaatgaggaactagaccttccaattgatgataagttagataatcagtgtgtatctgttgaaccaaaaaaaaaggaacaagaaaacaaaactctggttctctctgataaacattcaccacagaaaaaatccactgttaccaatgaggtaaaaacggaagtactgtctccaaattctaaggtggaatccaaatgtgaaactgaaaaaaatgatgagaataaagataatgttgacactccttgctcacaggcttctgctcactcagacctaaatgatggagaaaagacttctttgcatccttgtgatccagatctatttgagaaaagaaccaatcgagaaactgctggccccagtgcaaatgtcattcaggcatccactcaactacctgctcaagatgtaataaactcttgtggcataactggatcaactccagttctctcaagtttacttgctaatgagaaatctgataattcagacattaggccatcggggtctccaccaccaccaactctgccggcctccccatccaatcatgtgtcaagtttgcctcctttcatagcaccgcctggccgtgttttggataatgccatgaattctaatgtgacagtagtctctagggtaaaccatgttttttctcagggtgtgcaggtaaacccagggctcattccaggtcaatcaacagttaaccacagtctggggacaggaaaacctgcaactcaaactgggcctcaaacaagtcagtctggtaccagtagcatgtctggaccccaacagctaatgattcctcaaacattagcacagcagaatagagagaggccccttcttctagaagaacagcctctacttctacaggatcttttggatcaagaaaggcaagaacagcagcagcaaagacagatgcaagccatgattcgtcagcgatcagaaccgttcttccctaatattgattttgatgcaattacagatcctataatgaaagccaaaatggtggcccttaaaggtataaataaagtgatggcacaaaacaatctgggcatgccaccaatggtgatgagcaggttcccttttatgggccaggtggtaactggaacacagaacagtgaaggacagaaccttggaccacaggccattcctcaggatggcagtataacacatcagatttctaggcctaatcctccaaattttggtccaggctttgtcaatgattcacagcgtaagcagtatgaagagtggctccaggagacccaacagctgcttcaaatgcagcagaagtatcttgaagaacaaattggtgctcacagaaaatctaagaaggccctttcagctaaacaacgtactgccaagaaagctgggcgtgaatttccagaggaagatgcagaacaactcaagcatgttactgaacagcaaagcatggttcagaaacagctagaacagattcgtaaacaacagaaagaacatgctgaattgattgaagattatcggatcaaacagcagcagcaatgtgcaatggccccacctaccatgatgcccagtgtccagccccagccacccctaattccaggtgccactccacccaccatgagccaacccacctttcccatggtgccacagcagcttcagcaccagcagcacacaacagttatttctggccatactagccctgttagaatgcccagtttacctggatggcaacccaacagtgctcctgcccacctgcccctcaatcctcctagaattcagcccccaattgcccagttaccaataaaaacttgtacaccagccccagggacagtctcaaatgcaaatccacagagtggaccaccacctcgggtagaatttgatgacaacaatccctttagtgaaagttttcaagaacgggaacgtaaggaacgtttacgagaacagcaagagagacaacggatccaactcatgcaggaggtagatagacaaagagctttgcagcagaggatggaaatggagcagcatggtatggtgggctctgagataagtagtagtaggacatctgtgtcccagattcccttctacagttccgacttaccttgtgattttatgcaacctctaggaccccttcagcagtctccacaacaccaacagcaaatggggcaggttttacagcagcagaatatacaacaaggatcaattaattcaccctccacccaaactttcatgcagactaatgagcgaaggcaggtaggccctccttcatttgttcctgattcaccatcaatccctgttggaagcccaaatttttcttctgtgaagcagggacatggaaatctttctgggaccagcttccagcagtccccagtgaggccttcttttacacctgctttaccagcagcacctccagtagctaatagcagtctcccatgtggccaagattctactataacccatggacacagttatccgggatcaacccaatcgctcattcagttgtattctgatataatcccagaggaaaaagggaaaaagaaaagaacaagaaagaagaaaagagatgatgatgcagaatccaccaaggctccatcaactccccattcagatataactgccccaccgactccaggcatctcagaaactacctctactcctgcagtgagcacacccagtgagcttcctcaacaagccgaccaagagtcggtggaaccagtcggcccatccactcccaatatggcagcaggccagctatgtacagaattagagaacaaactgcccaatagtgatttctcacaagcaactccaaatcaacagacgtatgcaaattcagaagtagacaagctctccatggaaacccctgccaaaacagaagagataaaactggaaaaggctgagacagagtcctgcccaggccaagaggagcctaaattggaggaacagaatggtagtaaggtagaaggaaacgctgtagcctgtcctgtctcctcagcacagagtcctccccattctgctggggcccctgctgccaaaggagactcagggaatgaacttctgaaacacttgttgaaaaataaaaagtcatcttctcttttgaatcaaaaacctgagggcagtatttgttcagaagatgactgtacaaaggataataaactagttgagaagcagaacccagctgaaggactgcaaactttgggggctcaaatgcaaggtggttttggatgtggcaaccagttgccaaaaacagatggaggaagtgaaaccaagaaacagcgaagcaaacggactcagaggacgggtgagaaagcagcacctcgctcaaagaaaaggaaaaaggacgaagaggagaaacaagctatgtactctagcactgacacgtttacccacttgaaacagcagctctctctgctccctctaatggaaccaatcattggagtgaactttgcgcactttcttccttatggcagtggccaatttaatagtgggaatcgacttctaggaacttttggcagtgctaccctggaaggggtttcggactactattctcagttgatctacaagcagaataatttaagtaatcctccaacaccccctgcctctcttcctcctacaccacctcctatggcttgtcagaagatggccaatggttttgcaacaactgaagaacttgctggaaaagccggagtgttagtgagccatgaagttaccaaaactctaggacctaaaccatttcagctgcccttcagaccccaggacgacttgttggcccgagctcttgctcagggccccaagacagttgatgtgccagcctccctcccaacaccacctcataacaatcaggaagaattaaggatacaggatcactgtggtgatcgagatactcctgacagttttgttccctcatcctctcctgagagtgtggttggggtagaagtgagcaggtatccagatctgtcattggtcaaggaggagcctccagaaccggtgccgtcccccatcattccaattcttcctagcactgctgggaaaagttcagaatcaagaaggaatgacatcaaaactgagccaggcactttatattttgcgtcaccttttggtccttccccaaatggtcccagatcaggtcttatatctgtagcaattactctgcatcctacagctgctgagaacattagcagtgttgtggctgcattttccgaccttcttcacgtccgaatccctaacagctatgaggttagcagtgctccagatgtcccatccatgggtttggtcagtagccacagaatcaacccgggtttggagtatcgacagcatttacttctccgtgggcctccgccaggatctgcaaaccctcccagattagtgagctcttaccggctgaagcagcctaatgtaccatttcctccaacaagcaatggtctttctggatataaggattctagtcatggtattgcagaaagcgcagcactcagaccacagtggtgttgtcattgtaaagtggttattcttggaagtggtgtgcggaaatctttcaaagatctgacccttttgaacaaggattcccgagaaagcaccaagagggtagagaaggacattgtcttctgtagtaataactgctttattctttattcatcaactgcacaagcgaaaaactcagaaaacaaggaatccattccttcattgccacaatcacctatgagagaaacgccttccaaagcatttcatcagtacagcaacaacatctccactttggatgtgcactgtctcccccagctcccagagaaagcttctccccctgcctcaccacccatcgccttccctcctgcttttgaagcagcccaagtcgaggccaagccagatgagctgaaggtgacagtcaagctgaagcctcggctaagagctgtccatggtgggtttgaagattgcaggccgctcaataaaaaatggagaggaatgaaatggaagaagtggagcattcatattgtaatccctaaggggacatttaaaccaccttgtgaggatgaaatagatgaatttctaaagaaattgggcacttcccttaaacctgatcctgtgcccaaagactatcggaaatgttgcttttgtcatgaagaaggtgatggattgacagatggaccagcaaggctactcaaccttgacttggatctgtgggtccacttgaactgcgctctgtggtccacggaggtctatgagactcaggctggtgccttaataaatgtggagctagctctgaggagaggcctacaaatgaaatgtgtcttctgtcacaagacgggtgccactagtggatgccacagatttcgatgcaccaacatttatcacttcacttgcgccattaaagcacaatgcatgttttttaaggacaaaactatgctttgccccatgcacaaaccaaagggaattcatgagcaagaattaagttactttgcagtcttcaggagggtctatgttcagcgtgatgaggtgcgacagattgctagcatcgtgcaacgaggagaacgggaccatacctttcgcgtgggtagcctcatcttccacacaattggtcagctgcttccacagcagatgcaagcattccattctcctaaagcactcttccctgtgggctatgaagccagccggctgtactggagcactcgctatgccaataggcgctgccgctacctgtgctccattgaggagaaggatgggcgcccagtgtttgtcatcaggattgtggaacaaggccatgaagacctggttctaagtgacatctcacctaaaggtgtctgggataagattttggagcctgtggcatgtgtgagaaaaaagtctgaaatgctccagcttttcccagcgtatttaaaaggagaggatctgtttggcctgaccgtctctgcagtggcacgcatagcggaatcacttcctggggttgaggcatgtgaaaattataccttccgatacggccgaaatcctctcatggaacttcctcttgccgttaaccccacaggttgtgcccgttctgaacctaaaatgagtgcccatgtcaagaggtttgtgttaaggcctcacaccttaaacagcaccagcacctcaaagtcatttcagagcacagtcactggagaactgaacgcaccttatagtaaacagtttgttcactccaagtcatcgcagtaccggaagatgaaaactgaatggaaatccaatgtgtatctggcacggtctcggattcaggggctgggcctgtatgctgctcgagacattgagaaacacaccatggtcattgagtacatcgggactatcattcgaaacgaagtagccaacaggaaagagaagctttatgagtctcagaaccgtggtgtgtacatgttccgcatggataacgaccatgtgattgacgcgacgctcacaggagggcccgcaaggtatatcaaccattcgtgtgcacctaattgtgtggctgaagtggtgacttttgagagaggacacaaaattatcatcagctccagtcggagaatccagaaaggagaagagctctgctatgactataagtttgactttgaagatgaccagcacaagattccgtgtcactgtggagctgtgaactgccggaagtggatgaactgaaatgcattccttgctagctcagcgggcggcttgtccctaggaagaggcgattcaacacaccattggaattttgcagacagaaagagatttttgttttctgttttatgactttttgaaaaagcttctgggagttctgatttcctcagtcctttaggttaaagcagcgccaggaggaagctgacagaagcagcgttcctgaagtggccgaggttaaacggaatcacagaatggtccagcacttttgcttttttttcttttccttttcttttttttttgtttgttttttgttttgtttttcccttgtgggtgggtttcattgttttggttttctagtctcactaaggagaaacttttactggggcaaagagccgatggctgccctgccccgggcaggggccttcctatgaatgtaagactgaaatcaccagcgagggggacagagagtgctggccacggccttattaaaaaggggcaggccctctaacttcaaaatgtttttaaataaagtagacaccactgaacaaggaatgtactgaaatgacttccttagggatagagctaagggataataacttgcactaaatacatttaaatacttgattccatgagtcagtttattgtagtttttgatttctgtaaaataagagaaacttttgtatttattattgaataagtgaatgaagctatttttaaataaagttagaagaaagccaagctgctgctgttacctgcagaactaacaaaccctgttactttgtacagatatgtaaatattttgagaaaaaatacagtataaaaatagttattgaccaaatgctaccaggctctgcagcagctcgggggcttataaaatgttcatagggatgttacaatataattttgtgttataaaatatgccattataattatgtaataaccaaaatttcaacctagagtgttgggggttttttggaaaccgcagtctattagtactcaatggttttatacaccttacttctgacagagcggggcgtatgctacgactacaacttttatagctgttttggtaatttaaactaattttttcatattatattgttgcatccctacttcttcagtcaggtttttttgtgcttacaatttgtgataactgtgaataactgcttaaaaatacacccaaatggaggctgaattttttcttcagcaaaagtagttttgattagaactttgtttcagccacagagaatcatgtaaacgtaataggatcatgtagcagaaacttaaatctaaccctttagccttctatttaacacaaaaatttgaaaaagttaaaaaaaaaaaggagatgtgattatgcttacagctgcaggactctggcaatagggtttttggaagatgtaattttaaaatgtgtttgtatgaactgtttgtttacatttctttaataaaaaaaacactgttttgtgtttgcttgtagaaacttaatcagcattttgaaccaggttagctttttattttgtacttaaaattctggtactgacacttcacaggctaagtataaaatgaagttttgtgtgcacaattcaagtggactgtaaactgttggtatattcagtgatgcagttctgaacttgtatatggcatgatgtatttttatcttacagaataaatcaattgtatatatttttctcttgataaatagctgtatgaaatttgtttcctgaatatttttcttctcttgtacaatatcctgacatcctaccagtatttgtcctaccgggtttttgttgttttctgttctgtataatagtatctaatgttggcaaaaattgaattttttgaagtatacagagtgttatgggttttggaatttgtggacacagatttagaagatcaccatttacaaataaaatattttacatcta

SEQ ID NO: 318243 - DNA, 14636 bp, Homo sapiens
tgtagtgatgtctcaggcagaataaaatatttaatgtaaattgtagcagcaaacatttaagttatacttaaatgtttaaatcactgttagtgattaacttattttgccttccttgaagcaatttgtcctaaatttccatacgtttgcatttgtttttgctgttctaaaattccttagttgctggctttgaccttttatgttgctgagttttacacatctattttctcaactgccatatcctagggggcttggagtacccataatacagtgagcccaccttcctggtccccagacatttcagaaggtcgggaaatttttaaacccaggcagcttcctggcagtgccatttggagcatcaaagtgggccgtgggtctggatttccaggaaagcggagacctcgaggtgcaggactgtcggggcgaggtggccgaggcaggtcaaagctgaaaagtggaatcggagctgttgtattacctggggtgtctactgcagatatttcatcaaataaggatgatgaagaaaactctatgcacaatacagttgtgttgttttctagcagtgacaagttcactttgaatcaggatatgtgtgtagtttgtggcagttttggccaaggagcagaaggaagattacttgcctgttctcagtgtggtcagtgttaccatccatactgtgtcagtattaagatcactaaagtggttcttagcaaaggttggaggtgtcttgagtgcactgtgtgtgaggcctgtgggaaggcaactgacccaggaagactcctgctgtgtgatgactgtgacataagttatcacacctactgcctagaccctccattgcagacagttcccaaaggaggctggaagtgcaaatggtgtgtttggtgcagacactgtggagcaacatctgcaggtctaagatgtgaatggcagaacaattacacacagtgcgctccttgtgcaagcttatcttcctgtccagtctgctatcgaaactatagagaagaagatcttattctgcaatgtagacaatgtgatagatggatgcatgcagtttgtcagaacttaaatactgaggaagaagtggaaaatgtagcagacattggttttgattgtagcatgtgcagaccctatatgcctgcgtctaatgtgccttcctcagactgctgtgaatcttcacttgtagcacaaattgtcacaaaagtaaaagagctagacccacccaagacttatacccaggatggtgtgtgtttgactgaatcagggatgactcagttacagagcctcacagttacagttccaagaagaaaacggtcaaaaccaaaattgaaattgaagattataaatcagaatagcgtggccgtccttcagacccctccagacatccaatcagagcattcaagggatggtgaaatggatgatagtcgagaaggagaacttatggattgtgatggaaaatcagaatctagtcctgagcgggaagctgtggatgatgaaactaagggagtggaaggaacagatggtgtcaaaaagagaaaaaggaaaccatacagaccaggtattggtggatttatggtgcggcaaagaagtcgaactgggcaagggaaaaccaaaagatctgtgatcagaaaagattcctcaggctctatttccgagcagttaccttgcagagatgatggctggagtgagcagttaccagatactttagttgatgaatctgtttctgttactgaaagcactgaaaaaataaagaagagataccgaaaaaggaaaaataagcttgaagaaactttccctgcctatttacaagaagctttctttggaaaagatcttctagatacaagtagacaaagcaagataagtttagataatctgtcagaagatggagctcagcttttatataaaacaaacatgaacacaggtttcttggatccttccttagatccactacttagttcatcctcggctccaacaaaatctggaactcacggtcctgctgatgacccattagctgatatttctgaagttttaaacacagatgatgacattcttggaataatttcagatgatctagcaaaatcagttgatcattcagatattggtcctgtcactgatgatccttcctctttgcctcagccaaatgtcaatcagagttcacgaccattaagtgaagaacagctagatgggatcctcagtcctgaactagacaaaatggtcacagatggagcaattcttggaaaattatataaaattccagagcttggcggaaaagatgttgaagacttatttacagctgtacttagtcctgcgaacactcagccaactccattgccacagcctcccccaccaacacagctgttgccaatacacaatcaggatgctttttcacggatgcctctcatgaatggccttattggatccagtcctcatctcccacataattctttgccacctggaagcggactgggaactttctctgcaattgcacaatcctcttatcctgatgccagggataaaaattcagcctttaatccaatggcaagtgatcctaacaactcttggacatcatcagctcccactgtggaaggagaaaatgacacaatgtcgaatgcccagagaagcacgcttaagtgggagaaagaggaggctctgggtgaaatggcaactgttgccccagttctctacaccaatattaatttccccaacttaaaggaagaattccctgattggactactagagtgaagcaaattgccaaattgtggagaaaagcaagctcacaagaaagagcaccatatgtgcaaaaagccagagataacagagctgctttacgcattaataaagtacagatgtcaaatgattccatgaaaaggcagcaacagcaagatagcattgatcccagctctcgtattgattcggagctttttaaagatcctttaaagcaaagagaatcagaacatgaacaggaatggaaatttagacagcaaatgcgtcagaaaagtaagcagcaagctaaaattgaagccacacagaaacttgaacaggtgaaaaatgagcagcagcagcagcaacaacagcaatttggttctcagcatcttctggtgcagtctggttcagatacaccaagtagtgggatacagagtcccttgacacctcagcctggcaatggaaatatgtctcctgcacagtcattccataaagaactgtttacaaaacagccacccagtacccctacgtctacatcttcagatgatgtgtttgtaaagccacaagctccacctcctcctccagccccatcccggattcccatccaggatagtctttctcaggctcagacttctcagccaccctcaccgcaagtgttttcacctgggtcctctaactcacgaccaccatctccaatggatccatatgcaaaaatggttggtacccctcgaccacctcctgtgggccatagtttttccagaagaaattctgctgcaccagtggaaaactgtacacctttatcatcggtatctaggccccttcaaatgaatgagacaacagcaaataggccatcccctgtcagagatttatgttcttcttccacgacaaataatgacccctatgcaaaacctccagacacacctaggcctgtgatgacagatcaatttcccaaatccttgggcctatcccggtctcctgtagtttcagaacaaactgcaaaaggccctatagcagctggaaccagtgatcactttactaaaccatctcctagggcagatgtgtttcaaagacaaaggatacctgactcatatgcacgacccttgttgacacctgcacctcttgatagtggtcctggaccttttaagactccaatgcaacctcctccatcctctcaggatccttatggatcagtgtcacaggcatcaaggcgattgtctgttgacccttatgaaaggcctgctttgacaccaagacctatagataatttttctcataatcagtcaaatgatccatatagtcagcctccccttaccccacatccagcagtgaatgaatcttttgcccatccttcaagggctttttcccagcctggaaccatatcaaggccaacatctcaggacccatactcccaacccccaggaactccacgacctgttgtagattcttattcccaatcttcaggaacagctaggtccaatacagacccttactctcaacctcctggaactccccggcctactactgttgacccatatagtcagcagccccaaaccccaagaccatctacacaaactgacttgtttgttacacctgtaacaaatcagaggcattctgatccatatgctcatcctcctggaacaccaagacctggaatttctgtcccttactctcagccaccagcaacaccaaggccaaggatttcagagggttttactaggtcctcaatgacaagaccagtcctcatgccaaatcaggatcctttcctgcaagcagcacaaaaccgaggaccagctttacctggcccgttggtaaggccacctgatacatgttcccagacacctaggccccctggacctggtctttcagacacatttagccgtgtttccccatctgctgcccgtgatccctatgatcagtctccaatgactccaagatctcagtctgactcttttggaacaagtcaaactgcccatgatgttgctgatcagccaaggcctggatcagaggggagcttctgtgcatcttcaaactctccaatgcactcccaaggccagcagttctctggtgtctcccaacttcctggacctgtgccaacttcaggagtaactgatacacagaatactgtaaatatggcccaagcagatacagagaaattgagacagcggcagaagttacgtgaaatcattctccagcagcaacagcagaagaagattgcaggtcgacaggagaaggggtcacaggactcacccgcagtgcctcatccagggcctcttcaacactggcaaccagagaatgttaaccaggctttcaccagacccccacctccctatcctgggaacattaggtctcctgttgcccctcctttaggacctagatatgctgttttcccaaaagatcagcgtggaccctatcctcctgatgttgctagtatggggatgagacctcatggatttagatttggatttccaggaggtagtcatggtaccatgccgagtcaagagcgcttccttgtgcctcctcagcaaatacagggatctggagtttctccacagctaagaagatcagtatctgtagatatgcctaggcctttaaataactcacaaatgaataatccagttggacttcctcagcatttttcaccacagagcttgccagttcagcagcacaacatactgggccaagcatatattgaactgagacatagggctcctgacggaaggcaacggctgcctttcagtgctccacctggcagcgttgtagaggcatcttctaatctgagacatggaaacttcattccccggccagactttccgggccctagacacacagaccccatgcgacgacctccccagggtctacctaatcagctacctgtgcacccagatttggaacaagtgccaccatctcaacaagagcaaggtcattctgtccattcatcttctatggtcatgaggactctgaaccatccactaggtggtgaattttcagaagctcctttgtcaacatctgtaccgtctgaaacaacgtctgataatttacagataaccacccagccttctgatggtctagaggaaaaacttgattctgatgacccttctgtgaaggaactggatgttaaagaccttgagggggttgaagtcaaagacttagatgatgaagatcttgaaaacttaaatttagatacagaggatggcaaggtagttgaattggatactttagataatttggaaactaatgatcccaacctggatgacctcttaaggtcaggagagtttgatatcattgcatatacagatccagaacttgacatgggagataagaaaagcatgtttaatgaggaactagaccttccaattgatgataagttagataatcagtgtgtatctgttgaaccaaaaaaaaaggaacaagaaaacaaaactctggttctctctgataaacattcaccacagaaaaaatccactgttaccaatgaggtaaaaacggaagtactgtctccaaattctaaggtggaatccaaatgtgaaactgaaaaaaatgatgagaataaagataatgttgacactccttgctcacaggcttctgctcactcagacctaaatgatggagaaaagacttctttgcatccttgtgatccagatctatttgagaaaagaaccaatcgagaaactgctggccccagtgcaaatgtcattcaggcatccactcaactacctgctcaagatgtaataaactcttgtggcataactggatcaactccagttctctcaagtttacttgctaatgagaaatctgataattcagacattaggccatcggggtctccaccaccaccaactctgccggcctccccatccaatcatgtgtcaagtttgcctcctttcatagcaccgcctggccgtgttttggataatgccatgaattctaatgtgacagtagtctctagggtaaaccatgttttttctcagggtgtgcaggtaaacccagggctcattccaggtcaatcaacagttaaccacagtctggggacaggaaaacctgcaactcaaactgggcctcaaacaagtcagtctggtaccagtagcatgtctggaccccaacagctaatgattcctcaaacattagcacagcagaatagagagaggccccttcttctagaagaacagcctctacttctacaggatcttttggatcaagaaaggcaagaacagcagcagcaaagacagatgcaagccatgattcgtcagcgatcagaaccgttcttccctaatattgattttgatgcaattacagatcctataatgaaagccaaaatggtggcccttaaaggtataaataaagtgatggcacaaaacaatctgggcatgccaccaatggtgatgagcaggttcccttttatgggccaggtggtaactggaacacagaacagtgaaggacagaaccttggaccacaggccattcctcaggatggcagtataacacatcagatttctaggcctaatcctccaaattttggtccaggctttgtcaatgattcacagcgtaagcagtatgaagagtggctccaggagacccaacagctgcttcaaatgcagcagaagtatcttgaagaacaaattggtgctcacagaaaatctaagaaggccctttcagctaaacaacgtactgccaagaaagctgggcgtgaatttccagaggaagatgcagaacaactcaagcatgttactgaacagcaaagcatggttcagaaacagctagaacagattcgtaaacaacagaaagaacatgctgaattgattgaagattatcggatcaaacagcagcagcaatgtgcaatggccccacctaccatgatgcccagtgtccagccccagccacccctaattccaggtgccactccacccaccatgagccaacccacctttcccatggtgccacagcagcttcagcaccagcagcacacaacagttatttctggccatactagccctgttagaatgcccagtttacctggatggcaacccaacagtgctcctgcccacctgcccctcaatcctcctagaattcagcccccaattgcccagttaccaataaaaacttgtacaccagccccagggacagtctcaaatgcaaatccacagagtggaccaccacctcgggtagaatttgatgacaacaatccctttagtgaaagttttcaagaacgggaacgtaaggaacgtttacgagaacagcaagagagacaacggatccaactcatgcaggaggtagatagacaaagagctttgcagcagaggatggaaatggagcagcatggtatggtgggctctgagataagtagtagtaggacatctgtgtcccagattcccttctacagttccgacttaccttgtgattttatgcaacctctaggaccccttcagcagtctccacaacaccaacagcaaatggggcaggttttacagcagcagaatatacaacaaggatcaattaattcaccctccacccaaactttcatgcagactaatgagcgaaggcaggtaggccctccttcatttgttcctgattcaccatcaatccctgttggaagcccaaatttttcttctgtgaagcagggacatggaaatctttctgggaccagcttccagcagtccccagtgaggccttcttttacacctgctttaccagcagcacctccagtagctaatagcagtctcccatgtggccaagattctactataacccatggacacagttatccgggatcaacccaatcgctcattcagttgtattctgatataatcccagaggaaaaagggaaaaagaaaagaacaagaaagaagaaaagagatgatgatgcagaatccaccaaggctccatcaactccccattcagatataactgccccaccgactccaggcatctcagaaactacctctactcctgcagtgagcacacccagtgagcttcctcaacaagccgaccaagagtcggtggaaccagtcggcccatccactcccaatatggcagcaggccagctatgtacagaattagagaacaaactgcccaatagtgatttctcacaagcaactccaaatcaacagacgtatgcaaattcagaagtagacaagctctccatggaaacccctgccaaaacagaagagataaaactggaaaaggctgagacagagtcctgcccaggccaagaggagcctaaattggaggaacagaatggtagtaaggtagaaggaaacgctgtagcctgtcctgtctcctcagcacagagtcctccccattctgctggggcccctgctgccaaaggagactcagggaatgaacttctgaaacacttgttgaaaaataaaaagtcatcttctcttttgaatcaaaaacctgagggcagtatttgttcagaagatgactgtacaaaggataataaactagttgagaagcagaacccagctgaaggactgcaaactttgggggctcaaatgcaaggtggttttggatgtggcaaccagttgccaaaaacagatggaggaagtgaaaccaagaaacagcgaagcaaacggactcagaggacgggtgagaaagcagcacctcgctcaaagaaaaggaaaaaggacgaagaggagaaacaagctatgtactctagcactgacacgtttacccacttgaaacagcagctctctctgctccctctaatggaaccaatcattggagtgaactttgcgcactttcttccttatggcagtggccaatttaatagtgggaatcgacttctaggaacttttggcagtgctaccctggaaggggtttcggactactattctcagttgatctacaagcagaataatttaagtaatcctccaacaccccctgcctctcttcctcctacaccacctcctatggcttgtcagaagatggccaatggttttgcaacaactgaagaacttgctggaaaagccggagtgttagtgagccatgaagttaccaaaactctaggacctaaaccatttcagctgcccttcagaccccaggacgacttgttggcccgagctcttgctcagggccccaagacagttgatgtgccagcctccctcccaacaccacctcataacaatcaggaagaattaaggatacaggatcactgtggtgatcgagatactcctgacagttttgttccctcatcctctcctgagagtgtggttggggtagaagtgagcaggtatccagatctgtcattggtcaaggaggagcctccagaaccggtgccgtcccccatcattccaattcttcctagcactgctgggaaaagttcagaatcaagaaggaatgacatcaaaactgagccaggcactttatattttgcgtcaccttttggtccttccccaaatggtcccagatcaggtcttatatctgtagcaattactctgcatcctacagctgctgagaacattagcagtgttgtggctgcattttccgaccttcttcacgtccgaatccctaacagctatgaggttagcagtgctccagatgtcccatccatgggtttggtcagtagccacagaatcaacccgggtttggagtatcgacagcatttacttctccgtgggcctccgccaggatctgcaaaccctcccagattagtgagctcttaccggctgaagcagcctaatgtaccatttcctccaacaagcaatggtctttctggatataaggattctagtcatggtattgcagaaagcgcagcactcagaccacagtggtgttgtcattgtaaagtggttattcttggaagtggtgtgcggaaatctttcaaagatctgacccttttgaacaaggattcccgagaaagcaccaagagggtagagaaggacattgtcttctgtagtaataactgctttattctttattcatcaactgcacaagcgaaaaactcagaaaacaaggaatccattccttcattgccacaatcacctatgagagaaacgccttccaaagcatttcatcagtacagcaacaacatctccactttggatgtgcactgtctcccccagctcccagagaaagcttctccccctgcctcaccacccatcgccttccctcctgcttttgaagcagcccaagtcgaggccaagccagatgagctgaaggtgacagtcaagctgaagcctcggctaagagctgtccatggtgggtttgaagattgcaggccgctcaataaaaaatggagaggaatgaaatggaagaagtggagcattcatattgtaatccctaaggggacatttaaaccaccttgtgaggatgaaatagatgaatttctaaagaaattgggcacttcccttaaacctgatcctgtgcccaaagactatcggaaatgttgcttttgtcatgaagaaggtgatggattgacagatggaccagcaaggctactcaaccttgacttggatctgtgggtccacttgaactgcgctctgtggtccacggaggtctatgagactcaggctggtgccttaataaatgtggagctagctctgaggagaggcctacaaatgaaatgtgtcttctgtcacaagacgggtgccactagtggatgccacagatttcgatgcaccaacatttatcacttcacttgcgccattaaagcacaatgcatgttttttaaggacaaaactatgctttgccccatgcacaaaccaaagggaattcatgagcaagaattaagttactttgcagtcttcaggagggtctatgttcagcgtgatgaggtgcgacagattgctagcatcgtgcaacgaggagaacgggaccatacctttcgcgtgggtagcctcatcttccacacaattggtcagctgcttccacagcagatgcaagcattccattctcctaaagcactcttccctgtgggctatgaagccagccggctgtactggagcactcgctatgccaataggcgctgccgctacctgtgctccattgaggagaaggatgggcgcccagtgtttgtcatcaggattgtggaacaaggccatgaagacctggttctaagtgacatctcacctaaaggtgtctgggataagattttggagcctgtggcatgtgtgagaaaaaagtctgaaatgctccagcttttcccagcgtatttaaaaggagaggatctgtttggcctgaccgtctctgcagtggcacgcatagcggaatcacttcctggggttgaggcatgtgaaaattataccttccgatacggccgaaatcctctcatggaacttcctcttgccgttaaccccacaggttgtgcccgttctgaacctaaaatgagtgcccatgtcaagaggtttgtgttaaggcctcacaccttaaacagcaccagcacctcaaagtcatttcagagcacagtcactggagaactgaacgcaccttatagtaaacagtttgttcactccaagtcatcgcagtaccggaagatgaaaactgaatggaaatccaatgtgtatctggcacggtctcggattcaggggctgggcctgtatgctgctcgagacattgagaaacacaccatggtcattgagtacatcgggactatcattcgaaacgaagtagccaacaggaaagagaagctttatgagtctcagaaccgtggtgtgtacatgttccgcatggataacgaccatgtgattgacgcgacgctcacaggagggcccgcaaggtatatcaaccattcgtgtgcacctaattgtgtggctgaagtggtgacttttgagagaggacacaaaattatcatcagctccagtcggagaatccagaaaggagaagagctctgctatgactataagtttgactttgaagatgaccagcacaagattccgtgtcactgtggagctgtgaactgccggaagtggatgaactgaaatgcattccttgctagctcagcgggcggcttgtccctaggaagaggcgattcaacacaccattggaattttgcagacagaaagagatttttgttttctgttttatgactttttgaaaaagcttctgggagttctgatttcctcagtcctttaggttaaagcagcgccaggaggaagctgacagaagcagcgttcctgaagtggccgaggttaaacggaatcacagaatggtccagcacttttgcttttttttcttttccttttcttttttttttgtttgttttttgttttgtttttcccttgtgggtgggtttcattgttttggttttctagtctcactaaggagaaacttttactggggcaaagagccgatggctgccctgccccgggcaggggccttcctatgaatgtaagactgaaatcaccagcgagggggacagagagtgctggccacggccttattaaaaaggggcaggccctctaacttcaaaatgtttttaaataaagtagacaccactgaacaaggaatgtactgaaatgacttccttagggatagagctaagggataataacttgcactaaatacatttaaatacttgattccatgagtcagtttattgtagtttttgatttctgtaaaataagagaaacttttgtatttattattgaataagtgaatgaagctatttttaaataaagttagaagaaagccaagctgctgctgttacctgcagaactaacaaaccctgttactttgtacagatatgtaaatattttgagaaaaaatacagtataaaaatagttattgaccaaatgctaccaggctctgcagcagctcgggggcttataaaatgttcatagggatgttacaatataattttgtgttataaaatatgccattataattatgtaataaccaaaatttcaacctagagtgttgggggttttttggaaaccgcagtctattagtactcaatggttttatacaccttacttctgacagagcggggcgtatgctacgactacaacttttatagctgttttggtaatttaaactaattttttcatattatattgttgcatccctacttcttcagtcaggtttttttgtgcttacaatttgtgataactgtgaataactgcttaaaaatacacccaaatggaggctgaattttttcttcagcaaaagtagttttgattagaactttgtttcagccacagagaatcatgtaaacgtaataggatcatgtagcagaaacttaaatctaaccctttagccttctatttaacacaaaaatttgaaaaagttaaaaaaaaaaaggagatgtgattatgcttacagctgcaggactctggcaatagggtttttggaagatgtaattttaaaatgtgtttgtatgaactgtttgtttacatttctttaataaaaaaaacactgttttgtgtttgcttgtagaaacttaatcagcattttgaaccaggttagctttttattttgtacttaaaattctggtactgacacttcacaggctaagtataaaatgaagttttgtgtgcacaattcaagtggactgtaaactgttggtatattcagtgatgcagttctgaacttgtatatggcatgatgtatttttatcttacagaataaatcaattgtatatatttttctcttgataaatagctgtatgaaatttgtttcctgaatatttttcttctcttgtacaatatcctgacatcctaccagtatttgtcctaccgggtttttgttgttttctgttctgtataatagtatctaatgttggcaaaaattgaattttttgaagtatacagagtgttatgggttttggaatttgtggacacagatttagaagatcaccatttacaaataaaatattttacatctaaaaaaaaaaccactaccctaaaaaaaaaactcgagggggggccccggaccaaattcgccctttgtggagtcgattacaattaactgggccgcgtttaaaacgtcttgactgggaaaccct

SEQ ID NO: 318244 - DNA, 14462 bp, Homo sapiens
tgtagtgatgtctcaggcagaataaaatatttaatgtaaattgtagcagcaaacatttaagttatacttaaatgtttaaatcactgttagtgattaacttattttgccttccttgaagcaatttgtcctaaatttccatacgtttgcatttgtttttgctgttctaaaattccttagttgctggctttgaccttttatgttgctgagttttacacatctattttctcaactgccatatcctagggggcttggagtacccataatacagtgagcccaccttcctggtccccagacatttcagaaggtcgggaaatttttaaacccaggcagcttcctggcagtgccatttggagcatcaaagtgggccgtgggtctggatttccaggaaagcggagacctcgaggtgcaggactgtcggggcgaggtggccgaggcaggtcaaagctgaaaagtggaatcggagctgttgtattacctggggtgtctactgcagatatttcatcaaataaggatgatgaagaaaactctatgcacaatacagttgtgttgttttctagcagtgacaagttcactttgaatcaggatatgtgtgtagtttgtggcagttttggccaaggagcagaaggaagattacttgcctgttctcagtgtggtcagtgttaccatccatactgtgtcagtattaagatcactaaagtggttcttagcaaaggttggaggtgtcttgagtgcactgtgtgtgaggcctgtgggaaggcaactgacccaggaagactcctgctgtgtgatgactgtgacataagttatcacacctactgcctagaccctccattgcagacagttcccaaaggaggctggaagtgcaaatggtgtgtttggtgcagacactgtggagcaacatctgcaggtctaagatgtgaatggcagaacaattacacacagtgcgctccttgtgcaagcttatcttcctgtccagtctgctatcgaaactatagagaagaagatcttattctgcaatgtagacaatgtgatagatggatgcatgcagtttgtcagaacttaaatactgaggaagaagtggaaaatgtagcagacattggttttgattgtagcatgtgcagaccctatatgcctgcgtctaatgtgccttcctcagactgctgtgaatcttcacttgtagcacaaattgtcacaaaagtaaaagagctagacccacccaagacttatacccaggatggtgtgtgtttgactgaatcagggatgactcagttacagagcctcacagttacagttccaagaagaaaacggtcaaaaccaaaattgaaattgaagattataaatcagaatagcgtggccgtccttcagacccctccagacatccaatcagagcattcaagggatggtgaaatggatgatagtcgagaaggagaacttatggattgtgatggaaaatcagaatctagtcctgagcgggaagctgtggatgatgaaactaagggagtggaaggaacagatggtgtcaaaaagagaaaaaggaaaccatacagaccaggtattggtggatttatggtgcggcaaagaagtcgaactgggcaagggaaaaccaaaagatctgtgatcagaaaagattcctcaggctctatttccgagcagttaccttgcagagatgatggctggagtgagcagttaccagatactttagttgatgaatctgtttctgttactgaaagcactgaaaaaataaagaagagataccgaaaaaggaaaaataagcttgaagaaactttccctgcctatttacaagaagctttctttggaaaagatcttctagatacaagtagacaaagcaagataagtttagataatctgtcagaagatggagctcagcttttatataaaacaaacatgaacacaggtttcttggatccttccttagatccactacttagttcatcctcggctccaacaaaatctggaactcacggtcctgctgatgacccattagctgatatttctgaagttttaaacacagatgatgacattcttggaataatttcagatgatctagcaaaatcagttgatcattcagatattggtcctgtcactgatgatccttcctctttgcctcagccaaatgtcaatcagagttcacgaccattaagtgaagaacagctagatgggatcctcagtcctgaactagacaaaatggtcacagatggagcaattcttggaaaattatataaaattccagagcttggcggaaaagatgttgaagacttatttacagctgtacttagtcctgcgaacactcagccaactccattgccacagcctcccccaccaacacagctgttgccaatacacaatcaggatgctttttcacggatgcctctcatgaatggccttattggatccagtcctcatctcccacataattctttgccacctggaagcggactgggaactttctctgcaattgcacaatcctcttatcctgatgccagggataaaaattcagcctttaatccaatggcaagtgatcctaacaactcttggacatcatcagctcccactgtggaaggagaaaatgacacaatgtcgaatgcccagagaagcacgcttaagtgggagaaagaggaggctctgggtgaaatggcaactgttgccccagttctctacaccaatattaatttccccaacttaaaggaagaattccctgattggactactagagtgaagcaaattgccaaattgtggagaaaagcaagctcacaagaaagagcaccatatgtgcaaaaagccagagataacagagctgctttacgcattaataaagtacagatgtcaaatgattccatgaaaaggcagcaacagcaagatagcattgatcccagctctcgtattgattcggagctttttaaagatcctttaaagcaaagagaatcagaacatgaacaggaatggaaatttagacagcaaatgcgtcagaaaagtaagcagcaagctaaaattgaagccacacagaaacttgaacaggtgaaaaatgagcagcagcagcagcaacaacagcaatttggttctcagcatcttctggtgcagtctggttcagatacaccaagtagtgggatacagagtcccttgacacctcagcctggcaatggaaatatgtctcctgcacagtcattccataaagaactgtttacaaaacagccacccagtacccctacgtctacatcttcagatgatgtgtttgtaaagccacaagctccacctcctcctccagccccatcccggattcccatccaggatagtctttctcaggctcagacttctcagccaccctcaccgcaagtgttttcacctgggtcctctaactcacgaccaccatctccaatggatccatatgcaaaaatggttggtacccctcgaccacctcctgtgggccatagtttttccagaagaaattctgctgcaccagtggaaaactgtacacctttatcatcggtatctaggccccttcaaatgaatgagacaacagcaaataggccatcccctgtcagagatttatgttcttcttccacgacaaataatgacccctatgcaaaacctccagacacacctaggcctgtgatgacagatcaatttcccaaatccttgggcctatcccggtctcctgtagtttcagaacaaactgcaaaaggccctatagcagctggaaccagtgatcactttactaaaccatctcctagggcagatgtgtttcaaagacaaaggatacctgactcatatgcacgacccttgttgacacctgcacctcttgatagtggtcctggaccttttaagactccaatgcaacctcctccatcctctcaggatccttatggatcagtgtcacaggcatcaaggcgattgtctgttgacccttatgaaaggcctgctttgacaccaagacctatagataatttttctcataatcagtcaaatgatccatatagtcagcctccccttaccccacatccagcagtgaatgaatcttttgcccatccttcaagggctttttcccagcctggaaccatatcaaggccaacatctcaggacccatactcccaacccccaggaactccacgacctgttgtagattcttattcccaatcttcaggaacagctaggtccaatacagacccttactctcaacctcctggaactccccggcctactactgttgacccatatagtcagcagccccaaaccccaagaccatctacacaaactgacttgtttgttacacctgtaacaaatcagaggcattctgatccatatgctcatcctcctggaacaccaagacctggaatttctgtcccttactctcagccaccagcaacaccaaggccaaggatttcagagggttttactaggtcctcaatgacaagaccagtcctcatgccaaatcaggatcctttcctgcaagcagcacaaaaccgaggaccagctttacctggcccgttggtaaggccacctgatacatgttcccagacacctaggccccctggacctggtctttcagacacatttagccgtgtttccccatctgctgcccgtgatccctatgatcagtctccaatgactccaagatctcagtctgactcttttggaacaagtcaaactgcccatgatgttgctgatcagccaaggcctggatcagaggggagcttctgtgcatcttcaaactctccaatgcactcccaaggccagcagttctctggtgtctcccaacttcctggacctgtgccaacttcaggagtaactgatacacagaatactgtaaatatggcccaagcagatacagagaaattgagacagcggcagaagttacgtgaaatcattctccagcagcaacagcagaagaagattgcaggtcgacaggagaaggggtcacaggactcacccgcagtgcctcatccagggcctcttcaacactggcaaccagagaatgttaaccaggctttcaccagacccccacctccctatcctgggaacattaggtctcctgttgcccctcctttaggacctagatatgctgttttcccaaaagatcagcgtggaccctatcctcctgatgttgctagtatggggatgagacctcatggatttagatttggatttccaggaggtagtcatggtaccatgccgagtcaagagcgcttccttgtgcctcctcagcaaatacagggatctggagtttctccacagctaagaagatcagtatctgtagatatgcctaggcctttaaataactcacaaatgaataatccagttggacttcctcagcatttttcaccacagagcttgccagttcagcagcacaacatactgggccaagcatatattgaactgagacatagggctcctgacggaaggcaacggctgcctttcagtgctccacctggcagcgttgtagaggcatcttctaatctgagacatggaaacttcattccccggccagactttccgggccctagacacacagaccccatgcgacgacctccccagggtctacctaatcagctacctgtgcacccagatttggaacaagtgccaccatctcaacaagagcaaggtcattctgtccattcatcttctatggtcatgaggactctgaaccatccactaggtggtgaattttcagaagctcctttgtcaacatctgtaccgtctgaaacaacgtctgataatttacagataaccacccagccttctgatggtctagaggaaaaacttgattctgatgacccttctgtgaaggaactggatgttaaagaccttgagggggttgaagtcaaagacttagatgatgaagatcttgaaaacttaaatttagatacagaggatggcaaggtagttgaattggatactttagataatttggaaactaatgatcccaacctggatgacctcttaaggtcaggagagtttgatatcattgcatatacagatccagaacttgacatgggagataagaaaagcatgtttaatgaggaactagaccttccaattgatgataagttagataatcagtgtgtatctgttgaaccaaaaaaaaaggaacaagaaaacaaaactctggttctctctgataaacattcaccacagaaaaaatccactgttaccaatgaggtaaaaacggaagtactgtctccaaattctaaggtggaatccaaatgtgaaactgaaaaaaatgatgagaataaagataatgttgacactccttgctcacaggcttctgctcactcagacctaaatgatggagaaaagacttctttgcatccttgtgatccagatctatttgagaaaagaaccaatcgagaaactgctggccccagtgcaaatgtcattcaggcatccactcaactacctgctcaagatgtaataaactcttgtggcataactggatcaactccagttctctcaagtttacttgctaatgagaaatctgataattcagacattaggccatcggggtctccaccaccaccaactctgccggcctccccatccaatcatgtgtcaagtttgcctcctttcatagcaccgcctggccgtgttttggataatgccatgaattctaatgtgacagtagtctctagggtaaaccatgttttttctcagggtgtgcaggtaaacccagggctcattccaggtcaatcaacagttaaccacagtctggggacaggaaaacctgcaactcaaactgggcctcaaacaagtcagtctggtaccagtagcatgtctggaccccaacagctaatgattcctcaaacattagcacagcagaatagagagaggccccttcttctagaagaacagcctctacttctacaggatcttttggatcaagaaaggcaagaacagcagcagcaaagacagatgcaagccatgattcgtcagcgatcagaaccgttcttccctaatattgattttgatgcaattacagatcctataatgaaagccaaaatggtggcccttaaaggtataaataaagtgatggcacaaaacaatctgggcatgccaccaatggtgatgagcaggttcccttttatgggccaggtggtaactggaacacagaacagtgaaggacagaaccttggaccacaggccattcctcaggatggcagtataacacatcagatttctaggcctaatcctccaaattttggtccaggctttgtcaatgattcacagcgtaagcagtatgaagagtggctccaggagacccaacagctgcttcaaatgcagcagaagtatcttgaagaacaaattggtgctcacagaaaatctaagaaggccctttcagctaaacaacgtactgccaagaaagctgggcgtgaatttccagaggaagatgcagaacaactcaagcatgttactgaacagcaaagcatggttcagaaacagctagaacagattcgtaaacaacagaaagaacatgctgaattgattgaagattatcggatcaaacagcagcagcaatgtgcaatggccccacctaccatgatgcccagtgtccagccccagccacccctaattccaggtgccactccacccaccatgagccaacccacctttcccatggtgccacagcagcttcagcaccagcagcacacaacagttatttctggccatactagccctgttagaatgcccagtttacctggatggcaacccaacagtgctcctgcccacctgcccctcaatcctcctagaattcagcccccaattgcccagttaccaataaaaacttgtacaccagccccagggacagtctcaaatgcaaatccacagagtggaccaccacctcgggtagaatttgatgacaacaatccctttagtgaaagttttcaagaacgggaacgtaaggaacgtttacgagaacagcaagagagacaacggatccaactcatgcaggaggtagatagacaaagagctttgcagcagaggatggaaatggagcagcatggtatggtgggctctgagataagtagtagtaggacatctgtgtcccagattcccttctacagttccgacttaccttgtgattttatgcaacctctaggaccccttcagcagtctccacaacaccaacagcaaatggggcaggttttacagcagcagaatatacaacaaggatcaattaattcaccctccacccaaactttcatgcagactaatgagcgaaggcaggtaggccctccttcatttgttcctgattcaccatcaatccctgttggaagcccaaatttttcttctgtgaagcagggacatggaaatctttctgggaccagcttccagcagtccccagtgaggccttcttttacacctgctttaccagcagcacctccagtagctaatagcagtctcccatgtggccaagattctactataacccatggacacagttatccgggatcaacccaatcgctcattcagttgtattctgatataatcccagaggaaaaagggaaaaagaaaagaacaagaaagaagaaaagagatgatgatgcagaatccaccaaggctccatcaactccccattcagatataactgccccaccgactccaggcatctcagaaactacctctactcctgcagtgagcacacccagtgagcttcctcaacaagccgaccaagagtcggtggaaccagtcggcccatccactcccaatatggcagcaggccagctatgtacagaattagagaacaaactgcccaatagtgatttctcacaagcaactccaaatcaacagacgtatgcaaattcagaagtagacaagctctccatggaaacccctgccaaaacagaagagataaaactggaaaaggctgagacagagtcctgcccaggccaagaggagcctaaattggaggaacagaatggtagtaaggtagaaggaaacgctgtagcctgtcctgtctcctcagcacagagtcctccccattctgctggggcccctgctgccaaaggagactcagggaatgaacttctgaaacacttgttgaaaaataaaaagtcatcttctcttttgaatcaaaaacctgagggcagtatttgttcagaagatgactgtacaaaggataataaactagttgagaagcagaacccagctgaaggactgcaaactttgggggctcaaatgcaaggtggttttggatgtggcaaccagttgccaaaaacagatggaggaagtgaaaccaagaaacagcgaagcaaacggactcagaggacgggtgagaaagcagcacctcgctcaaagaaaaggaaaaaggacgaagaggagaaacaagctatgtactctagcactgacacgtttacccacttgaaacagcagctctctctgctccctctaatggaaccaatcattggagtgaactttgcgcactttcttccttatggcagtggccaatttaatagtgggaatcgacttctaggaacttttggcagtgctaccctggaaggggtttcggactactattctcagttgatctacaagcagaataatttaagtaatcctccaacaccccctgcctctcttcctcctacaccacctcctatggcttgtcagaagatggccaatggttttgcaacaactgaagaacttgctggaaaagccggagtgttagtgagccatgaagttaccaaaactctaggacctaaaccatttcagctgcccttcagaccccaggacgacttgttggcccgagctcttgctcagggccccaagacagttgatgtgccagcctccctcccaacaccacctcataacaatcaggaagaattaaggatacaggatcactgtggtgatcgagatactcctgacagttttgttccctcatcctctcctgagagtgtggttggggtagaagtgagcaggtatccagatctgtcattggtcaaggaggagcctccagaaccggtgccgtcccccatcattccaattcttcctagcactgctgggaaaagttcagaatcaagaaggaatgacatcaaaactgagccaggcactttatattttgcgtcaccttttggtccttccccaaatggtcccagatcaggtcttatatctgtagcaattactctgcatcctacagctgctgagaacattagcagtgttgtggctgcattttccgaccttcttcacgtccgaatccctaacagctatgaggttagcagtgctccagatgtcccatccatgggtttggtcagtagccacagaatcaacccgggtttggagtatcgacagcatttacttctccgtgggcctccgccaggatctgcaaaccctcccagattagtgagctcttaccggctgaagcagcctaatgtaccatttcctccaacaagcaatggtctttctggatataaggattctagtcatggtattgcagaaagcgcagcactcagaccacagtggtgttgtcattgtaaagtggttattcttggaagtggtgtgcggaaatctttcaaagatctgacccttttgaacaaggattcccgagaaagcaccaagagggtagagaaggacattgtcttctgtagtaataactgctttattctttattcatcaactgcacaagcgaaaaactcagaaaacaaggaatccattccttcattgccacaatcacctatgagagaaacgccttccaaagcatttcatcagtacagcaacaacatctccactttggatgtgcactgtctcccccagctcccagagaaagcttctccccctgcctcaccacccatcgccttccctcctgcttttgaagcagcccaagtcgaggccaagccagatgagctgaaggtgacagtcaagctgaagcctcggctaagagctgtccatggtgggtttgaagattgcaggccgctcaataaaaaatggagaggaatgaaatggaagaagtggagcattcatattgtaatccctaaggggacatttaaaccaccttgtgaggatgaaatagatgaatttctaaagaaattgggcacttcccttaaacctgatcctgtgcccaaagactatcggaaatgttgcttttgtcatgaagaaggtgatggattgacagatggaccagcaaggctactcaaccttgacttggatctgtgggtccacttgaactgcgctctgtggtccacggaggtctatgagactcaggctggtgccttaataaatgtggagctagctctgaggagaggcctacaaatgaaatgtgtcttctgtcacaagacgggtgccactagtggatgccacagatttcgatgcaccaacatttatcacttcacttgcgccattaaagcacaatgcatgttttttaaggacaaaactatgctttgccccatgcacaaaccaaagggaattcatgagcaagaattaagttactttgcagtcttcaggagggtctatgttcagcgtgatgaggtgcgacagattgctagcatcgtgcaacgaggagaacgggaccatacctttcgcgtgggtagcctcatcttccacacaattggtcagctgcttccacagcagatgcaagcattccattctcctaaagcactcttccctgtgggctatgaagccagccggctgtactggagcactcgctatgccaataggcgctgccgctacctgtgctccattgaggagaaggatgggcgcccagtgtttgtcatcaggattgtggaacaaggccatgaagacctggttctaagtgacatctcacctaaaggtgtctgggataagattttggagcctgtggcatgtgtgagaaaaaagtctgaaatgctccagcttttcccagcgtatttaaaaggagaggatctgtttggcctgaccgtctctgcagtggcacgcatagcggaatcacttcctggggttgaggcatgtgaaaattataccttccgatacggccgaaatcctctcatggaacttcctcttgccgttaaccccacaggttgtgcccgttctgaacctaaaatgagtgcccatgtcaagaggtttgtgttaaggcctcacaccttaaacagcaccagcacctcaaagtcatttcagagcacagtcactggagaactgaacgcaccttatagtaaacagtttgttcactccaagtcatcgcagtaccggaagatgaaaactgaatggaaatccaatgtgtatctggcacggtctcggattcaggggctgggcctgtatgctgctcgagacattgagaaacacaccatggtcattgagtacatcgggactatcattcgaaacgaagtagccaacaggaaagagaagctttatgagtctcagaaccgtggtgtgtacatgttccgcatggataacgaccatgtgattgacgcgacgctcacaggagggcccgcaaggtatatcaaccattcgtgtgcacctaattgtgtggctgaagtggtgacttttgagagaggacacaaaattatcatcagctccagtcggagaatccagaaaggagaagagctctgctatgactataagtttgactttgaagatgaccagcacaagattccgtgtcactgtggagctgtgaactgccggaagtggatgaactgaaatgcattccttgctagctcagcgggcggcttgtccctaggaagaggcgattcaacacaccattggaattttgcagacagaaagagatttttgttttctgttttatgactttttgaaaaagcttctgggagttctgatttcctcagtcctttaggttaaagcagcgccaggaggaagctgacagaagcagcgttcctgaagtggccgaggttaaacggaatcacagaatggtccagcacttttgcttttttttcttttccttttcttttttttttgtttgttttttgttttgtttttcccttgtgggtgggtttcattgttttggttttctagtctcactaaggagaaacttttactggggcaaagagccgatggctgccctgccccgggcaggggccttcctatgaatgtaagactgaaatcaccagcgagggggacagagagtgctggccacggccttattaaaaaggggcaggccctctaacttcaaaatgtttttaaataaagtagacaccactgaacaaggaatgtactgaaatgacttccttagggatagagctaagggataataacttgcactaaatacatttaaatacttgattccatgagtcagtttattgtagtttttgatttctttaaataaagttagaagaaagccaagctgctgctgttacctgcagaactaacaaaccctgttactttgtacagatatgtaaatattttgagaaaaaatacagtataaaaatagttattgaccaaatgctaccaggctctgcagcagctcgggggcttataaaatgttcatagggatgttacaatataattttgtgttataaaatatgccattataattatgtaataaccaaaatttcaacctagagtgttgggggttttttggaaaccgcagtctattagtactcaatggttttatacaccttacttctgacagagcggggcgtatgctacgactacaacttttatagctgttttggtaatttaaactaattttttcatattatattgttgcatccctacttcttcagtcaggtttttttgtgcttacaatttgtgataactgtgaataactgcttaaaaatacacccaaatggaggctgaattttttcttcagcaaaagtagttttgattagaactttgtttcagccacagagaatcatgtaaacgtaataggatcatgtagcagaaacttaaatctaaccctttagccttctatttaacacaaaaatttgaaaaagttaaaaaaaaaaaggagatgtgattatgcttacagctgcaggactctggcaatagggtttttggaagatgtaattttaaaatgtgtttgtatgaactgtttgtttacatttctttaataaaaaaaacactgttttgtgtttgcttgtagaaacttaatcagcattttgaaccaggttagctttttattttgtacttaaaattctggtactgacacttcacaggctaagtataaaatgaagttttgtgtgcacaattcaagtggactgtaaactgttggtatattcagtgatgcagttctgaacttgtatatggcatgatgtatttttatcttacagaataaatcaattgtatatatttttctcttgataaatagctgtatgaaatttgtttcctgaatatttttcttctcttgtacaatatcctgacatcctaccagtatttgtcctaccgggtttttgttgttttctgttctgtataatagtatctaatgttggcaaaaattgaattttttgaagtatacagagtgttatgggttttggaatttgtggacacagatttagaagatcaccatttacaaataaaatattttacatcta

SEQ ID NO: 318245 - DNA, 14689 bp, Homo sapiens
tgtagtgatgtctcaggcagaataaaatatttaatgtaaattgtagcagcaaacatttaagttatacttaaatgtttaaatcactgttagtgattaacttattttgccttccttgaagcaatttgtcctaaatttccatacgtttgcatttgtttttgctgttctaaaattccttagttgctggctttgaccttttatgttgctgagttttacacatctattttctcaactgccatatcctagggggcttggagtacccataatacagtgagcccaccttcctggtccccagacatttcagaaggtcgggaaatttttaaacccaggcagcttcctggcagtgccatttggagcatcaaagtgggccgtgggtctggatttccaggaaagcggagacctcgaggtgcaggactgtcggggcgaggtggccgaggcaggtcaaagctgaaaagtggaatcggagctgttgtattacctggggtgtctactgcagatatttcatcaaataaggatgatgaagaaaactctatgcacaatacagttgtgttgttttctagcagtgacaagttcactttgaatcaggatatgtgtgtagtttgtggcagttttggccaaggagcagaaggaagattacttgcctgttctcagtgtggtcagtgttaccatccatactgtgtcagtattaagatcactaaagtggttcttagcaaaggttggaggtgtcttgagtgcactgtgtgtgaggcctgtgggaaggcaactgacccaggaagactcctgctgtgtgatgactgtgacataagttatcacacctactgcctagaccctccattgcagacagttcccaaaggaggctggaagtgcaaatggtgtgtttggtgcagacactgtggagcaacatctgcaggtctaagatgtgaatggcagaacaattacacacagtgcgctccttgtgcaagcttatcttcctgtccagtctgctatcgaaactatagagaagaagatcttattctgcaatgtagacaatgtgatagatggatgcatgcagtttgtcagaacttaaatactgaggaagaagtggaaaatgtagcagacattggttttgattgtagcatgtgcagaccctatatgcctgcgtctaatgtgccttcctcagactgctgtgaatcttcacttgtagcacaaattgtcacaaaagtaaaagagctagacccacccaagacttatacccaggatggtgtgtgtttgactgaatcagggatgactcagttacagagcctcacagttacagttccaagaagaaaacggtcaaaaccaaaattgaaattgaagattataaatcagaatagcgtggccgtccttcagacccctccagacatccaatcagagcattcaagggatggtgaaatggatgatagtcgagaaggagaacttatggattgtgatggaaaatcagaatctagtcctgagcgggaagctgtggatgatgaaactaagggagtggaaggaacagatggtgtcaaaaagagaaaaaggaaaccatacagaccaggtattggtggatttatggtgcggcaaagaagtcgaactgggcaagggaaaaccaaaagatctgtgatcagaaaagattcctcaggctctatttccgagcagttaccttgcagagatgatggctggagtgagcagttaccagatactttagttgatgaatctgtttctgttactgaaagcactgaaaaaataaagaagagataccgaaaaaggaaaaataagcttgaagaaactttccctgcctatttacaagaagctttctttggaaaagatcttctagatacaagtagacaaagcaagataagtttagataatctgtcagaagatggagctcagcttttatataaaacaaacatgaacacaggtttcttggatccttccttagatccactacttagttcatcctcggctccaacaaaatctggaactcacggtcctgctgatgacccattagctgatatttctgaagttttaaacacagatgatgacattcttggaataatttcagatgatctagcaaaatcagttgatcattcagatattggtcctgtcactgatgatccttcctctttgcctcagccaaatgtcaatcagagttcacgaccattaagtgaagaacagctagatgggatcctcagtcctgaactagacaaaatggtcacagatggagcaattcttggaaaattatataaaattccagagcttggcggaaaagatgttgaagacttatttacagctgtacttagtcctgcgaacactcagccaactccattgccacagcctcccccaccaacacagctgttgccaatacacaatcaggatgctttttcacggatgcctctcatgaatggccttattggatccagtcctcatctcccacataattctttgccacctggaagcggactgggaactttctctgcaattgcacaatcctcttatcctgatgccagggataaaaattcagcctttaatccaatggcaagtgatcctaacaactcttggacatcatcagctcccactgtggaaggagaaaatgacacaatgtcgaatgcccagagaagcacgcttaagtgggagaaagaggaggctctgggtgaaatggcaactgttgccccagttctctacaccaatattaatttccccaacttaaaggaagaattccctgattggactactagagtgaagcaaattgccaaattgtggagaaaagcaagctcacaagaaagagcaccatatgtgcaaaaagccagagataacagagctgctttacgcattaataaagtacagatgtcaaatgattccatgaaaaggcagcaacagcaagatagcattgatcccagctctcgtattgattcggagctttttaaagatcctttaaagcaaagagaatcagaacatgaacaggaatggaaatttagacagcaaatgcgtcagaaaagtaagcagcaagctaaaattgaagccacacagaaacttgaacaggtgaaaaatgagcagcagcagcagcaacaacagcaatttggttctcagcatcttctggtgcagtctggttcagatacaccaagtagtgggatacagagtcccttgacacctcagcctggcaatggaaatatgtctcctgcacagtcattccataaagaactgtttacaaaacagccacccagtacccctacgtctacatcttcagatgatgtgtttgtaaagccacaagctccacctcctcctccagccccatcccggattcccatccaggatagtctttctcaggctcagacttctcagccaccctcaccgcaagtgttttcacctgggtcctctaactcacgaccaccatctccaatggatccatatgcaaaaatggttggtacccctcgaccacctcctgtgggccatagtttttccagaagaaattctgctgcaccagtggaaaactgtacacctttatcatcggtatctaggccccttcaaatgaatgagacaacagcaaataggccatcccctgtcagagatttatgttcttcttccacgacaaataatgacccctatgcaaaacctccagacacacctaggcctgtgatgacagatcaatttcccaaatccttgggcctatcccggtctcctgtagtttcagaacaaactgcaaaaggccctatagcagctggaaccagtgatcactttactaaaccatctcctagggcagatgtgtttcaaagacaaaggatacctgactcatatgcacgacccttgttgacacctgcacctcttgatagtggtcctggaccttttaagactccaatgcaacctcctccatcctctcaggatccttatggatcagtgtcacaggcatcaaggcgattgtctgttgacccttatgaaaggcctgctttgacaccaagacctatagataatttttctcataatcagtcaaatgatccatatagtcagcctccccttaccccacatccagcagtgaatgaatcttttgcccatccttcaagggctttttcccagcctggaaccatatcaaggccaacatctcaggacccatactcccaacccccaggaactccacgacctgttgtagattcttattcccaatcttcaggaacagctaggtccaatacagacccttactctcaacctcctggaactccccggcctactactgttgacccatatagtcagcagccccaaaccccaagaccatctacacaaactgacttgtttgttacacctgtaacaaatcagaggcattctgatccatatgctcatcctcctggaacaccaagacctggaatttctgtcccttactctcagccaccagcaacaccaaggccaaggatttcagagggttttactaggtcctcaatgacaagaccagtcctcatgccaaatcaggatcctttcctgcaagcagcacaaaaccgaggaccagctttacctggcccgttggtaaggccacctgatacatgttcccagacacctaggccccctggacctggtctttcagacacatttagccgtgtttccccatctgctgcccgtgatccctatgatcagtctccaatgactccaagatctcagtctgactcttttggaacaagtcaaactgcccatgatgttgctgatcagccaaggcctggatcagaggggagcttctgtgcatcttcaaactctccaatgcactcccaaggccagcagttctctggtgtctcccaacttcctggacctgtgccaacttcaggagtaactgatacacagaatactgtaaatatggcccaagcagatacagagaaattgagacagcggcagaagttacgtgaaatcattctccagcagcaacagcagaagaagattgcaggtcgacaggagaaggggtcacaggactcacccgcagtgcctcatccagggcctcttcaacactggcaaccagagaatgttaaccaggctttcaccagacccccacctccctatcctgggaacattaggtctcctgttgcccctcctttaggacctagatatgctgttttcccaaaagatcagcgtggaccctatcctcctgatgttgctagtatggggatgagacctcatggatttagatttggatttccaggaggtagtcatggtaccatgccgagtcaagagcgcttccttgtgcctcctcagcaaatacagggatctggagtttctccacagctaagaagatcagtatctgtagatatgcctaggcctttaaataactcacaaatgaataatccagttggacttcctcagcatttttcaccacagagcttgccagttcagcagcacaacatactgggccaagcatatattgaactgagacatagggctcctgacggaaggcaacggctgcctttcagtgctccacctggcagcgttgtagaggcatcttctaatctgagacatggaaacttcattccccggccagactttccgggccctagacacacagaccccatgcgacgacctccccagggtctacctaatcagctacctgtgcacccagatttggaacaagtgccaccatctcaacaagagcaaggtcattctgtccattcatcttctatggtcatgaggactctgaaccatccactaggtggtgaattttcagaagctcctttgtcaacatctgtaccgtctgaaacaacgtctgataatttacagataaccacccagccttctgatggtctagaggaaaaacttgattctgatgacccttctgtgaaggaactggatgttaaagaccttgagggggttgaagtcaaagacttagatgatgaagatcttgaaaacttaaatttagatacagaggatggcaaggtagttgaattggatactttagataatttggaaactaatgatcccaacctggatgacctcttaaggtcaggagagtttgatatcattgcatatacagatccagaacttgacatgggagataagaaaagcatgtttaatgaggaactagaccttccaattgatgataagttagataatcagtgtgtatctgttgaaccaaaaaaaaaggaacaagaaaacaaaactctggttctctctgataaacattcaccacagaaaaaatccactgttaccaatgaggtaaaaacggaagtactgtctccaaattctaaggtggaatccaaatgtgaaactgaaaaaaatgatgagaataaagataatgttgacactccttgctcacaggcttctgctcactcagacctaaatgatggagaaaagacttctttgcatccttgtgatccagatctatttgagaaaagaaccaatcgagaaactgctggccccagtgcaaatgtcattcaggcatccactcaactacctgctcaagatgtaataaactcttgtggcataactggatcaactccagttctctcaagtttacttgctaatgagaaatctgataattcagacattaggccatcggggtctccaccaccaccaactctgccggcctccccatccaatcatgtgtcaagtttgcctcctttcatagcaccgcctggccgtgttttggataatgccatgaattctaatgtgacagtagtctctagggtaaaccatgttttttctcagggtgtgcaggtaaacccagggctcattccaggtcaatcaacagttaaccacagtctggggacaggaaaacctgcaactcaaactgggcctcaaacaagtcagtctggtaccagtagcatgtctggaccccaacagctaatgattcctcaaacattagcacagcagaatagagagaggccccttcttctagaagaacagcctctacttctacaggatcttttggatcaagaaaggcaagaacagcagcagcaaagacagatgcaagccatgattcgtcagcgatcagaaccgttcttccctaatattgattttgatgcaattacagatcctataatgaaagccaaaatggtggcccttaaaggtataaataaagtgatggcacaaaacaatctgggcatgccaccaatggtgatgagcaggttcccttttatgggccaggtggtaactggaacacagaacagtgaaggacagaaccttggaccacaggccattcctcaggatggcagtataacacatcagatttctaggcctaatcctccaaattttggtccaggctttgtcaatgattcacagcgtaagcagtatgaagagtggctccaggagacccaacagctgcttcaaatgcagcagaagtatcttgaagaacaaattggtgctcacagaaaatctaagaaggccctttcagctaaacaacgtactgccaagaaagctgggcgtgaatttccagaggaagatgcagaacaactcaagcatgttactgaacagcaaagcatggttcagaaacagctagaacagattcgtaaacaacagaaagaacatgctgaattgattgaagattatcggatcaaacagcagcagcaatgtgcaatggccccacctaccatgatgcccagtgtccagccccagccacccctaattccaggtgccactccacccaccatgagccaacccacctttcccatggtgccacagcagcttcagcaccagcagcacacaacagttatttctggccatactagccctgttagaatgcccagtttacctggatggcaacccaacagtgctcctgcccacctgcccctcaatcctcctagaattcagcccccaattgcccagttaccaataaaaacttgtacaccagccccagggacagtctcaaatgcaaatccacagagtggaccaccacctcgggtagaatttgatgacaacaatccctttagtgaaagttttcaagaacgggaacgtaaggaacgtttacgagaacagcaagagagacaacggatccaactcatgcaggaggtagatagacaaagagctttgcagcagaggatggaaatggagcagcatggtatggtgggctctgagataagtagtagtaggacatctgtgtcccagattcccttctacagttccgacttaccttgtgattttatgcaacctctaggaccccttcagcagtctccacaacaccaacagcaaatggggcaggttttacagcagcagaatatacaacaaggatcaattaattcaccctccacccaaactttcatgcagactaatgagcgaaggcaggtaggccctccttcatttgttcctgattcaccatcaatccctgttggaagcccaaatttttcttctgtgaagcagggacatggaaatctttctgggaccagcttccagcagtccccagtgaggccttcttttacacctgctttaccagcagcacctccagtagctaatagcagtctcccatgtggccaagattctactataacccatggacacagttatccgggatcaacccaatcgctcattcagttgtattctgatataatcccagaggaaaaagggaaaaagaaaagaacaagaaagaagaaaagagatgatgatgcagaatccaccaaggctccatcaactccccattcagatataactgccccaccgactccaggcatctcagaaactacctctactcctgcagtgagcacacccagtgagcttcctcaacaagccgaccaagagtcggtggaaccagtcggcccatccactcccaatatggcagcaggccagctatgtacagaattagagaacaaactgcccaatagtgatttctcacaagcaactccaaatcaacagacgtatgcaaattcagaagtagacaagctctccatggaaacccctgccaaaacagaagagataaaactggaaaaggctgagacagagtcctgcccaggccaagaggagcctaaattggaggaacagaatggtagtaaggtagaaggaaacgctgtagcctgtcctgtctcctcagcacagagtcctccccattctgctggggcccctgctgccaaaggagactcagggaatgaacttctgaaacacttgttgaaaaataaaaagtcatcttctcttttgaatcaaaaacctgagggcagtatttgttcagaagatgactgtacaaaggataataaactagttgagaagcagaacccagctgaaggactgcaaactttgggggctcaaatgcaaggtggttttggatgtggcaaccagttgccaaaaacagatggaggaagtgaaaccaagaaacagcgaagcaaacggactcagaggacgggtgagaaagcagcacctcgctcaaagaaaaggaaaaaggacgaagaggagaaacaagctatgtactctagcactgacacgtttacccacttgaaacagcagctctctctgctccctctaatggaaccaatcattggagtgaactttgcgcactttcttccttatggcagtggccaatttaatagtgggaatcgacttctaggaacttttggcagtgctaccctggaaggggtttcggactactattctcagttgatctacaagcagaataatttaagtaatcctccaacaccccctgcctctcttcctcctacaccacctcctatggcttgtcagaagatggccaatggttttgcaacaactgaagaacttgctggaaaagccggagtgttagtgagccatgaagttaccaaaactctaggacctaaaccatttcagctgcccttcagaccccaggacgacttgttggcccgagctcttgctcagggccccaagacagttgatgtgccagcctccctcccaacaccacctcataacaatcaggaagaattaaggatacaggatcactgtggtgatcgagatactcctgacagttttgttccctcatcctctcctgagagtgtggttggggtagaagtgagcaggtatccagatctgtcattggtcaaggaggagcctccagaaccggtgccgtcccccatcattccaattcttcctagcactgctgggaaaagttcagaatcaagaaggaatgacatcaaaactgagccaggcactttatattttgcgtcaccttttggtccttccccaaatggtcccagatcaggtcttatatctgtagcaattactctgcatcctacagctgctgagaacattagcagtgttgtggctgcattttccgaccttcttcacgtccgaatccctaacagctatgaggttagcagtgctccagatgtcccatccatgggtttggtcagtagccacagaatcaacccgggtttggagtatcgacagcatttacttctccgtgggcctccgccaggatctgcaaaccctcccagattagtgagctcttaccggctgaagcagcctaatgtaccatttcctccaacaagcaatggtctttctggatataaggattctagtcatggtattgcagaaagcgcagcactcagaccacagtggtgttgtcattgtaaagtggttattcttggaagtggtgtgcggaaatctttcaaagatctgacccttttgaacaaggattcccgagaaagcaccaagagggtagagaaggacattgtcttctgtagtaataactgctttattctttattcatcaactgcacaagcgaaaaactcagaaaacaaggaatccattccttcattgccacaatcacctatgagagaaacgccttccaaagcatttcatcagtacagcaacaacatctccactttggatgtgcactgtctcccccagctcccagagaaagcttctccccctgcctcaccacccatcgccttccctcctgcttttgaagcagcccaagtcgaggccaagccagatgagctgaaggtgacagtcaagctgaagcctcggctaagagctgtccatggtgggtttgaagattgcaggccgctcaataaaaaatggagaggaatgaaatggaagaagtggagcattcatattgtaatccctaaggggacatttaaaccaccttgtgaggatgaaatagatgaatttctaaagaaattgggcacttcccttaaacctgatcctgtgcccaaagactatcggaaatgttgcttttgtcatgaagaaggtgatggattgacagatggaccagcaaggctactcaaccttgacttggatctgtgggtccacttgaactgcgctctgtggtccacggaggtctatgagactcaggctggtgccttaataaatgtggagctagctctgaggagaggcctacaaatgaaatgtgtcttctgtcacaagacgggtgccactagtggatgccacagatttcgatgcaccaacatttatcacttcacttgcgccattaaagcacaatgcatgttttttaaggacaaaactatgctttgccccatgcacaaaccaaagggaattcatgagcaagaattaagttactttgcagtcttcaggagggtctatgttcagcgtgatgaggtgcgacagattgctagcatcgtgcaacgaggagaacgggaccatacctttcgcgtgggtagcctcatcttccacacaattggtcagctgcttccacagcagatgcaagcattccattctcctaaagcactcttccctgtgggctatgaagccagccggctgtactggagcactcgctatgccaataggcgctgccgctacctgtgctccattgaggagaaggatgggcgcccagtgtttgtcatcaggattgtggaacaaggccatgaagacctggttctaagtgacatctcacctaaaggtgtctgggataagattttggagcctgtggcatgtgtgagaaaaaagtctgaaatgctccagcttttcccagcgtatttaaaaggagaggatctgtttggcctgaccgtctctgcagtggcacgcatagcggaatcacttcctggggttgaggcatgtgaaaattataccttccgatacggccgaaatcctctcatggaacttcctcttgccgttaaccccacaggttgtgcccgttctgaacctaaaatgagtgcccatgtcaagaggtttgtgttaaggcctcacaccttaaacagcaccagcacctcaaagtcatttcagagcacagtcactggagaactgaacgcaccttatagtaaacagtttgttcactccaagtcatcgcagtaccggaagatgaaaactgaatggaaatccaatgtgtatctggcacggtctcggattcaggggctgggcctgtatgctgctcgagacattgagaaacacaccatggtcattgagtacatcgggactatcattcgaaacgaagtagccaacaggaaagagaagctttatgagtctcagaaccgtggtgtgtacatgttccgcatggataacgaccatgtgattgacgcgacgctcacaggagggcccgcaaggtatatcaaccattcgtgtgcacctaattgtgtggctgaagtggtgacttttgagagaggacacaaaattatcatcagctccagtcggagaatccagaaaggagaagagctctgctatgactataagtttgactttgaagatgaccagcacaagattccgtgtcactgtggagctgtgaactgccggaagtggatgaactgaaatgcattccttgctagctcagcgggcggcttgtccctaggaagaggcgattcaacacaccattggaattttgcagacagaaagagatttttgttttctgttttatgactttttgaaaaagcttctgggagttctgatttcctcagtcctttaggttaaagcagcgccaggaggaagctgacagaagcagcgttcctgaagtggccgaggttaaacggaatcacagaatggtccagcacttttgcttttttttcttttccttttcttttttttttgtttgttttttgttttgtttttcccttgtgggtgggtttcattgttttggttttctagtctcactaaggagaaacttttactggggcaaagagccgatggctgccctgccccgggcaggggccttcctatgaatgtaagactgaaatcaccagcgagggggacagagagtgctggccacggccttattaaaaaggggcaggccctctaacttcaaaatgtttttaaataaagtagacaccactgaacaaggaatgtactgaaatgacttccttagggatagagctaagggataataacttgcactaaatacatttaaatacttgattccatgagtcagtttattgtagtttttgatttctgtaaaataagagaaacttttgtatttattattgaataagtgaatgaagctatttttaaataaagttagaagaaagccaagctgctgctgttacctgcagaactaacaaaccctgttactttgtacagatatgtaaatattttgagaaaaaatacagtataaaaatagttattgaccaaatgctaccaggctctgcagcagctcgggggcttataaaatgttcatagggatgttacaatataattttgtgttataaaatatgccattataattatgtaataaccaaaatttcaacctagagtgttgggggttttttggaaaccgcagtctattagtactcaatggttttatacaccttacttctgacagagcggggcgtatgctacgactacaacttttatagctgttttggtaatttaaactaattttttcatattatattgttgcatccctacttcttcagtcaggtttttttgtgcttacaatttgtgataactgtgaataactgcttaaaaatacacccaaatggaggctgaattttttcttcagcaaaagtagttttgattagaactttgtttcagccacagagaatcatgtaaacgtaataggatcatgtagcagaaacttaaatctaaccctttagccttctatttaacacaaaaatttgaaaaagttaaaaaaaaaaaggagatgtgattatgcttacagctgcaggactctggcaatagggtttttggaagatgtaattttaaaatgtgtttgtatgaactgtttgtttacatttctttaataaaaaaaacactgttttgtgtttgcttgtagaaacttaatcagcattttgaaccaggttagctttttattttgtacttaaaattctggtactgacacttcacaggctaagtataaaatgaagttttgtgtgcacaattcaagtggactgtaaactgttggtatattcagtgatgcagttctgaacttgtatatggcatgatgtatttttatcttacagaataaatcaattgtatatatttttctcttgataaatagctgtatgaaatttgtttcctgaatatttttcttctcttgtacaatatcctgacatcctaccagtatttgtcctaccgggtttttgttgttttctgttctgtataatagtatctaatgttggcaaaaattgaattttttgaagtatacagagtgttatgggttttggaatttgtggacacagatttagaagatcaccatttacaaataaaatattttacatctaccaaaacacacatcaccaccgccaacacccgaccacactttctttgcgctcctctggcgccctcgaaaaagctttcctgacaacctttcctgggaccggagcgcccccatcatgcatgtccacctgggccataagtctgttcccggagcacccgtgcccgtacacactgccga

SEQ ID NO: 318246 - DNA, 14519 bp, Homo sapiens
tgtagtgatgtctcaggcagaataaaatatttaatgtaaattgtagcagcaaacatttaagttatacttaaatgtttaaatcactgttagtgattaacttattttgccttccttgaagcaatttgtcctaaatttccatacgtttgcatttgtttttgctgttctaaaattccttagttgctggctttgaccttttatgttgctgagttttacacatctattttctcaactgccatatcctagggggcttggagtacccataatacagtgagcccaccttcctggtccccagacatttcagaaggtcgggaaatttttaaacccaggcagcttcctggcagtgccatttggagcatcaaagtgggccgtgggtctggatttccaggaaagcggagacctcgaggtgcaggactgtcggggcgaggtggccgaggcaggtcaaagctgaaaagtggaatcggagctgttgtattacctggggtgtctactgcagatatttcatcaaataaggatgatgaagaaaactctatgcacaatacagttgtgttgttttctagcagtgacaagttcactttgaatcaggatatgtgtgtagtttgtggcagttttggccaaggagcagaaggaagattacttgcctgttctcagtgtggtcagtgttaccatccatactgtgtcagtattaagatcactaaagtggttcttagcaaaggttggaggtgtcttgagtgcactgtgtgtgaggcctgtgggaaggcaactgacccaggaagactcctgctgtgtgatgactgtgacataagttatcacacctactgcctagaccctccattgcagacagttcccaaaggaggctggaagtgcaaatggtgtgtttggtgcagacactgtggagcaacatctgcaggtctaagatgtgaatggcagaacaattacacacagtgcgctccttgtgcaagcttatcttcctgtccagtctgctatcgaaactatagagaagaagatcttattctgcaatgtagacaatgtgatagatggatgcatgcagtttgtcagaacttaaatactgaggaagaagtggaaaatgtagcagacattggttttgattgtagcatgtgcagaccctatatgcctgcgtctaatgtgccttcctcagactgctgtgaatcttcacttgtagcacaaattgtcacaaaagtaaaagagctagacccacccaagacttatacccaggatggtgtgtgtttgactgaatcagggatgactcagttacagagcctcacagttacagttccaagaagaaaacggtcaaaaccaaaattgaaattgaagattataaatcagaatagcgtggccgtccttcagacccctccagacatccaatcagagcattcaagggatggtgaaatggatgatagtcgagaaggagaacttatggattgtgatggaaaatcagaatctagtcctgagcgggaagctgtggatgatgaaactaagggagtggaaggaacagatggtgtcaaaaagagaaaaaggaaaccatacagaccaggtattggtggatttatggtgcggcaaagaagtcgaactgggcaagggaaaaccaaaagatctgtgatcagaaaagattcctcaggctctatttccgagcagttaccttgcagagatgatggctggagtgagcagttaccagatactttagttgatgaatctgtttctgttactgaaagcactgaaaaaataaagaagagataccgaaaaaggaaaaataagcttgaagaaactttccctgcctatttacaagaagctttctttggaaaagatcttctagatacaagtagacaaagcaagataagtttagataatctgtcagaagatggagctcagcttttatataaaacaaacatgaacacaggtttcttggatccttccttagatccactacttagttcatcctcggctccaacaaaatctggaactcacggtcctgctgatgacccattagctgatatttctgaagttttaaacacagatgatgacattcttggaataatttcagatgatctagcaaaatcagttgatcattcagatattggtcctgtcactgatgatccttcctctttgcctcagccaaatgtcaatcagagttcacgaccattaagtgaagaacagctagatgggatcctcagtcctgaactagacaaaatggtcacagatggagcaattcttggaaaattatataaaattccagagcttggcggaaaagatgttgaagacttatttacagctgtacttagtcctgcgaacactcagccaactccattgccacagcctcccccaccaacacagctgttgccaatacacaatcaggatgctttttcacggatgcctctcatgaatggccttattggatccagtcctcatctcccacataattctttgccacctggaagcggactgggaactttctctgcaattgcacaatcctcttatcctgatgccagggataaaaattcagcctttaatccaatggcaagtgatcctaacaactcttggacatcatcagctcccactgtggaaggagaaaatgacacaatgtcgaatgcccagagaagcacgcttaagtgggagaaagaggaggctctgggtgaaatggcaactgttgccccagttctctacaccaatattaatttccccaacttaaaggaagaattccctgattggactactagagtgaagcaaattgccaaattgtggagaaaagcaagctcacaagaaagagcaccatatgtgcaaaaagccagagataacagagctgctttacgcattaataaagtacagatgtcaaatgattccatgaaaaggcagcaacagcaagatagcattgatcccagctctcgtattgattcggagctttttaaagatcctttaaagcaaagagaatcagaacatgaacaggaatggaaatttagacagcaaatgcgtcagaaaagtaagcagcaagctaaaattgaagccacacagaaacttgaacaggtgaaaaatgagcagcagcagcagcaacaacagcaatttggttctcagcatcttctggtgcagtctggttcagatacaccaagtagtgggatacagagtcccttgacacctcagcctggcaatggaaatatgtctcctgcacagtcattccataaagaactgtttacaaaacagccacccagtacccctacgtctacatcttcagatgatgtgtttgtaaagccacaagctccacctcctcctccagccccatcccggattcccatccaggatagtctttctcaggctcagacttctcagccaccctcaccgcaagtgttttcacctgggtcctctaactcacgaccaccatctccaatggatccatatgcaaaaatggttggtacccctcgaccacctcctgtgggccatagtttttccagaagaaattctgctgcaccagtggaaaactgtacacctttatcatcggtatctaggccccttcaaatgaatgagacaacagcaaataggccatcccctgtcagagatttatgttcttcttccacgacaaataatgacccctatgcaaaacctccagacacacctaggcctgtgatgacagatcaatttcccaaatccttgggcctatcccggtctcctgtagtttcagaacaaactgcaaaaggccctatagcagctggaaccagtgatcactttactaaaccatctcctagggcagatgtgtttcaaagacaaaggatacctgactcatatgcacgacccttgttgacacctgcacctcttgatagtggtcctggaccttttaagactccaatgcaacctcctccatcctctcaggatccttatggatcagtgtcacaggcatcaaggcgattgtctgttgacccttatgaaaggcctgctttgacaccaagacctatagataatttttctcataatcagtcaaatgatccatatagtcagcctccccttaccccacatccagcagtgaatgaatcttttgcccatccttcaagggctttttcccagcctggaaccatatcaaggccaacatctcaggacccatactcccaacccccaggaactccacgacctgttgtagattcttattcccaatcttcaggaacagctaggtccaatacagacccttactctcaacctcctggaactccccggcctactactgttgacccatatagtcagcagccccaaaccccaagaccatctacacaaactgacttgtttgttacacctgtaacaaatcagaggcattctgatccatatgctcatcctcctggaacaccaagacctggaatttctgtcccttactctcagccaccagcaacaccaaggccaaggatttcagagggttttactaggtcctcaatgacaagaccagtcctcatgccaaatcaggatcctttcctgcaagcagcacaaaaccgaggaccagctttacctggcccgttggtaaggccacctgatacatgttcccagacacctaggccccctggacctggtctttcagacacatttagccgtgtttccccatctgctgcccgtgatccctatgatcagtctccaatgactccaagatctcagtctgactcttttggaacaagtcaaactgcccatgatgttgctgatcagccaaggcctggatcagaggggagcttctgtgcatcttcaaactctccaatgcactcccaaggccagcagttctctggtgtctcccaacttcctggacctgtgccaacttcaggagtaactgatacacagaatactgtaaatatggcccaagcagatacagagaaattgagacagcggcagaagttacgtgaaatcattctccagcagcaacagcagaagaagattgcaggtcgacaggagaaggggtcacaggactcacccgcagtgcctcatccagggcctcttcaacactggcaaccagagaatgttaaccaggctttcaccagacccccacctccctatcctgggaacattaggtctcctgttgcccctcctttaggacctagatatgctgttttcccaaaagatcagcgtggaccctatcctcctgatgttgctagtatggggatgagacctcatggatttagatttggatttccaggaggtagtcatggtaccatgccgagtcaagagcgcttccttgtgcctcctcagcaaatacagggatctggagtttctccacagctaagaagatcagtatctgtagatatgcctaggcctttaaataactcacaaatgaataatccagttggacttcctcagcatttttcaccacagagcttgccagttcagcagcacaacatactgggccaagcatatattgaactgagacatagggctcctgacggaaggcaacggctgcctttcagtgctccacctggcagcgttgtagaggcatcttctaatctgagacatggaaacttcattccccggccagactttccgggccctagacacacagaccccatgcgacgacctccccagggtctacctaatcagctacctgtgcacccagatttggaacaagtgccaccatctcaacaagagcaaggtcattctgtccattcatcttctatggtcatgaggactctgaaccatccactaggtggtgaattttcagaagctcctttgtcaacatctgtaccgtctgaaacaacgtctgataatttacagataaccacccagccttctgatggtctagaggaaaaacttgattctgatgacccttctgtgaaggaactggatgttaaagaccttgagggggttgaagtcaaagacttagatgatgaagatcttgaaaacttaaatttagatacagaggatggcaaggtagttgaattggatactttagataatttggaaactaatgatcccaacctggatgacctcttaaggtcaggagagtttgatatcattgcatatacagatccagaacttgacatgggagataagaaaagcatgtttaatgaggaactagaccttccaattgatgataagttagataatcagtgtgtatctgttgaaccaaaaaaaaaggaacaagaaaacaaaactctggttctctctgataaacattcaccacagaaaaaatccactgttaccaatgaggtaaaaacggaagtactgtctccaaattctaaggtggaatccaaatgtgaaactgaaaaaaatgatgagaataaagataatgttgacactccttgctcacaggcttctgctcactcagacctaaatgatggagaaaagacttctttgcatccttgtgatccagatctatttgagaaaagaaccaatcgagaaactgctggccccagtgcaaatgtcattcaggcatccactcaactacctgctcaagatgtaataaactcttgtggcataactggatcaactccagttctctcaagtttacttgctaatgagaaatctgataattcagacattaggccatcggggtctccaccaccaccaactctgccggcctccccatccaatcatgtgtcaagtttgcctcctttcatagcaccgcctggccgtgttttggataatgccatgaattctaatgtgacagtagtctctagggtaaaccatgttttttctcagggtgtgcaggtaaacccagggctcattccaggtcaatcaacagttaaccacagtctggggacaggaaaacctgcaactcaaactgggcctcaaacaagtcagtctggtaccagtagcatgtctggaccccaacagctaatgattcctcaaacattagcacagcagaatagagagaggccccttcttctagaagaacagcctctacttctacaggatcttttggatcaagaaaggcaagaacagcagcagcaaagacagatgcaagccatgattcgtcagcgatcagaaccgttcttccctaatattgattttgatgcaattacagatcctataatgaaagccaaaatggtggcccttaaaggtataaataaagtgatggcacaaaacaatctgggcatgccaccaatggtgatgagcaggttcccttttatgggccaggtggtaactggaacacagaacagtgaaggacagaaccttggaccacaggccattcctcaggatggcagtataacacatcagatttctaggcctaatcctccaaattttggtccaggctttgtcaatgattcacagcgtaagcagtatgaagagtggctccaggagacccaacagctgcttcaaatgcagcagaagtatcttgaagaacaaattggtgctcacagaaaatctaagaaggccctttcagctaaacaacgtactgccaagaaagctgggcgtgaatttccagaggaagatgcagaacaactcaagcatgttactgaacagcaaagcatggttcagaaacagctagaacagattcgtaaacaacagaaagaacatgctgaattgattgaagattatcggatcaaacagcagcagcaatgtgcaatggccccacctaccatgatgcccagtgtccagccccagccacccctaattccaggtgccactccacccaccatgagccaacccacctttcccatggtgccacagcagcttcagcaccagcagcacacaacagttatttctggccatactagccctgttagaatgcccagtttacctggatggcaacccaacagtgctcctgcccacctgcccctcaatcctcctagaattcagcccccaattgcccagttaccaataaaaacttgtacaccagccccagggacagtctcaaatgcaaatccacagagtggaccaccacctcgggtagaatttgatgacaacaatccctttagtgaaagttttcaagaacgggaacgtaaggaacgtttacgagaacagcaagagagacaacggatccaactcatgcaggaggtagatagacaaagagctttgcagcagaggatggaaatggagcagcatggtatggtgggctctgagataagtagtagtaggacatctgtgtcccagattcccttctacagttccgacttaccttgtgattttatgcaacctctaggaccccttcagcagtctccacaacaccaacagcaaatggggcaggttttacagcagcagaatatacaacaaggatcaattaattcaccctccacccaaactttcatgcagactaatgagcgaaggcaggtaggccctccttcatttgttcctgattcaccatcaatccctgttggaagcccaaatttttcttctgtgaagcagggacatggaaatctttctgggaccagcttccagcagtccccagtgaggccttcttttacacctgctttaccagcagcacctccagtagctaatagcagtctcccatgtggccaagattctactataacccatggacacagttatccgggatcaacccaatcgctcattcagttgtattctgatataatcccagaggaaaaagggaaaaagaaaagaacaagaaagaagaaaagagatgatgatgcagaatccaccaaggctccatcaactccccattcagatataactgccccaccgactccaggcatctcagaaactacctctactcctgcagtgagcacacccagtgagcttcctcaacaagccgaccaagagtcggtggaaccagtcggcccatccactcccaatatggcagcaggccagctatgtacagaattagagaacaaactgcccaatagtgatttctcacaagcaactccaaatcaacagacgtatgcaaattcagaagtagacaagctctccatggaaacccctgccaaaacagaagagataaaactggaaaaggctgagacagagtcctgcccaggccaagaggagcctaaattggaggaacagaatggtagtaaggtagaaggaaacgctgtagcctgtcctgtctcctcagcacagagtcctccccattctgctggggcccctgctgccaaaggagactcagggaatgaacttctgaaacacttgttgaaaaataaaaagtcatcttctcttttgaatcaaaaacctgagggcagtatttgttcagaagatgactgtacaaaggataataaactagttgagaagcagaacccagctgaaggactgcaaactttgggggctcaaatgcaaggtggttttggatgtggcaaccagttgccaaaaacagatggaggaagtgaaaccaagaaacagcgaagcaaacggactcagaggacgggtgagaaagcagcacctcgctcaaagaaaaggaaaaaggacgaagaggagaaacaagctatgtactctagcactgacacgtttacccacttgaaacagcagctctctctgctccctctaatggaaccaatcattggagtgaactttgcgcactttcttccttatggcagtggccaatttaatagtgggaatcgacttctaggaacttttggcagtgctaccctggaaggggtttcggactactattctcagttgatctacaagcagaataatttaagtaatcctccaacaccccctgcctctcttcctcctacaccacctcctatggcttgtcagaagatggccaatggttttgcaacaactgaagaacttgctggaaaagccggagtgttagtgagccatgaagttaccaaaactctaggacctaaaccatttcagctgcccttcagaccccaggacgacttgttggcccgagctcttgctcagggccccaagacagttgatgtgccagcctccctcccaacaccacctcataacaatcaggaagaattaaggatacaggatcactgtggtgatcgagatactcctgacagttttgttccctcatcctctcctgagagtgtggttggggtagaagtgagcaggtatccagatctgtcattggtcaaggaggagcctccagaaccggtgccgtcccccatcattccaattcttcctagcactgctgggaaaagttcagaatcaagaaggaatgacatcaaaactgagccaggcactttatattttgcgtcaccttttggtccttccccaaatggtcccagatcaggtcttatatctgtagcaattactctgcatcctacagctgctgagaacattagcagtgttgtggctgcattttccgaccttcttcacgtccgaatccctaacagctatgaggttagcagtgctccagatgtcccatccatgggtttggtcagtagccacagaatcaacccgggtttggagtatcgacagcatttacttctccgtgggcctccgccaggatctgcaaaccctcccagattagtgagctcttaccggctgaagcagcctaatgtaccatttcctccaacaagcaatggtctttctggatataaggattctagtcatggtattgcagaaagcgcagcactcagaccacagtggtgttgtcattgtaaagtggttattcttggaagtggtgtgcggaaatctttcaaagatctgacccttttgaacaaggattcccgagaaagcaccaagagggtagagaaggacattgtcttctgtagtaataactgctttattctttattcatcaactgcacaagcgaaaaactcagaaaacaaggaatccattccttcattgccacaatcacctatgagagaaacgccttccaaagcatttcatcagtacagcaacaacatctccactttggatgtgcactgtctcccccagctcccagagaaagcttctccccctgcctcaccacccatcgccttccctcctgcttttgaagcagcccaagtcgaggccaagccagatgagctgaaggtgacagtcaagctgaagcctcggctaagagctgtccatggtgggtttgaagattgcaggccgctcaataaaaaatggagaggaatgaaatggaagaagtggagcattcatattgtaatccctaaggggacatttaaaccaccttgtgaggatgaaatagatgaatttctaaagaaattgggcacttcccttaaacctgatcctgtgcccaaagactatcggaaatgttgcttttgtcatgaagaaggtgatggattgacagatggaccagcaaggctactcaaccttgacttggatctgtgggtccacttgaactgcgctctgtggtccacggaggtctatgagactcaggctggtgccttaataaatgtggagctagctctgaggagaggcctacaaatgaaatgtgtcttctgtcacaagacgggtgccactagtggatgccacagatttcgatgcaccaacatttatcacttcacttgcgccattaaagcacaatgcatgttttttaaggacaaaactatgctttgccccatgcacaaaccaaagggaattcatgagcaagaattaagttactttgcagtcttcaggagggtctatgttcagcgtgatgaggtgcgacagattgctagcatcgtgcaacgaggagaacgggaccatacctttcgcgtgggtagcctcatcttccacacaattggtcagctgcttccacagcagatgcaagcattccattctcctaaagcactcttccctgtgggctatgaagccagccggctgtactggagcactcgctatgccaataggcgctgccgctacctgtgctccattgaggagaaggatgggcgcccagtgtttgtcatcaggattgtggaacaaggccatgaagacctggttctaagtgacatctcacctaaaggtgtctgggataagattttggagcctgtggcatgtgtgagaaaaaagtctgaaatgctccagcttttcccagcgtatttaaaaggagaggatctgtttggcctgaccgtctctgcagtggcacgcatagcggaatcacttcctggggttgaggcatgtgaaaattataccttccgatacggccgaaatcctctcatggaacttcctcttgccgttaaccccacaggttgtgcccgttctgaacctaaaatgagtgcccatgtcaagaggtttgtgttaaggcctcacaccttaaacagcaccagcacctcaaagtcatttcagagcacagtcactggagaactgaacgcaccttatagtaaacagtttgttcactccaagtcatcgcagtaccggaagatgaaaactgaatggaaatccaatgtgtatctggcacggtctcggattcaggggctgggcctgtatgctgctcgagacattgagaaacacaccatggtcattgagtacatcgggactatcattcgaaacgaagtagccaacaggaaagagaagctttatgagtctcagaaccgtggtgtgtacatgttccgcatggataacgaccatgtgattgacgcgacgctcacaggagggcccgcaaggtatatcaaccattcgtgtgcacctaattgtgtggctgaagtggtgacttttgagagaggacacaaaattatcatcagctccagtcggagaatccagaaaggagaagagctctgctatgactataagtttgactttgaagatgaccagcacaagattccgtgtcactgtggagctgtgaactgccggaagtggatgaactgaaatgcattccttgctagctcagcgggcggcttgtccctaggaagaggcgattcaacacaccattggaattttgcagacagaaagagatttttgttttctgttttatgactttttgaaaaagcttctgggagttctgatttcctcagtcctttaggttaaagcagcgccaggaggaagctgacagaagcagcgttcctgaagtggccgaggttaaacggaatcacagaatggtccagcacttttgcttttttttcttttccttttcttttttttttgtttgttttttgttttgtttttcccttgtgggtgggtttcattgttttggttttctagtctcactaaggagaaacttttactggggcaaagagccgatggctgccctgccccgggcaggggccttcctatgaatgtaagactgaaatcaccagcgagggggacagagagtgctggccacggccttattaaaaaggggcaggccctctaacttcaaaatgtttttaaataaagtagacaccactgaacaaggaatgtactgaaatgacttccttagggatagagctaagggataataacttgcactaaatacatttaaatacttgattccatgagtcagtttattgtagtttttgatttctgtaaaataagagaaacttttgtatttattattgaataagtgaatgaagctatttttaaataaagttagaagaaagccaagctgctgctgttacctgcagaactaacaaaccctgttactttgtacagatatgtaaatattttgagaaaaaatacagtataaaaatagttattgaccaaatgctaccaggctctgcagcagctcgggggcttataaaatgttcatagggatgttacaatataattttgtgttataaaatatgccattataattatgtaataaccaaaatttcaacctagagtgttgggggttttttggaaaccgcagtctattagtactcaatggttttatacaccttacttctgacagagcggggcgtatgctacgactacaacttttatagctgttttggtaatttaaactaattttttcatattatattgttgcatccctacttcttcagtcaggtttttttgtgcttacaatttgtgataactgtgaataactgcttaaaaatacacccaaatggaggctgaattttttcttcagcaaaagtagttttgattagaactttgtttcagccacagagaatcatgtaaacgtaataggatcatgtagcagaaacttaaatctaaccctttagccttctatttaacacaaaaatttgaaaaagttaaaaaaaaaaaggagatgtgattatgcttacagctgcaggactctggcaatagggtttttggaagatgtaattttaaaatgtgtttgtatgaactgtttgtttacatttctttaataaaaaaaacactgttttgtgtttgcttgtagaaacttaatcagcattttgaaccaggttagctttttattttgtacttaaaattctggtactgacacttcacaggctaagtataaaatgaagttttgtgtgcacaattcaagtggactgtaaactgttggtatattcagtgatgcagttctgaacttgtatatggcatgatgtatttttatcttacagaataaatcaattgtatatatttttctcttgataaatagctgtatgaaatttgtttcctgaatatttttcttctcttgtacaatatcctgacatcctaccagtatttgtcctaccgggtttttgttgttttctgttctgtataatagtatctaatgttggcaaaaattgaattttttgaagtatacagagtgtaaatggtgatcttctaaatctgtgtccacaaattccaaaacccataacactctggtcgacgcggccgcgaat

SEQ ID NO: 318247 - DNA, 14288 bp, Homo sapiens
tgtagtgatgtctcaggcagaataaaatatttaatgtaaattgtagcagcaaacatttaagttatacttaaatgtttaaatcactgttagtgattaacttattttgccttccttgaagcaatttgtcctaaatttccatacgtttgcatttgtttttgctgttctaaaattccttagttgctggctttgaccttttatgttgctgagttttacacatctattttctcaactgccatatcctagggggcttggagtacccataatacagtgagcccaccttcctggtccccagacatttcagaaggtcgggaaatttttaaacccaggcagcttcctggcagtgccatttggagcatcaaagtgggccgtgggtctggatttccaggaaagcggagacctcgaggtgcaggactgtcggggcgaggtggccgaggcaggtcaaagctgaaaagtggaatcggagctgttgtattacctggggtgtctactgcagatatttcatcaaataaggatgatgaagaaaactctatgcacaatacagttgtgttgttttctagcagtgacaagttcactttgaatcaggatatgtgtgtagtttgtggcagttttggccaaggagcagaaggaagattacttgcctgttctcagtgtggtcagtgttaccatccatactgtgtcagtattaagatcactaaagtggttcttagcaaaggttggaggtgtcttgagtgcactgtgtgtgaggcctgtgggaaggcaactgacccaggaagactcctgctgtgtgatgactgtgacataagttatcacacctactgcctagaccctccattgcagacagttcccaaaggaggctggaagtgcaaatggtgtgtttggtgcagacactgtggagcaacatctgcaggtctaagatgtgaatggcagaacaattacacacagtgcgctccttgtgcaagcttatcttcctgtccagtctgctatcgaaactatagagaagaagatcttattctgcaatgtagacaatgtgatagatggatgcatgcagtttgtcagaacttaaatactgaggaagaagtggaaaatgtagcagacattggttttgattgtagcatgtgcagaccctatatgcctgcgtctaatgtgccttcctcagactgctgtgaatcttcacttgtagcacaaattgtcacaaaagtaaaagagctagacccacccaagacttatacccaggatggtgtgtgtttgactgaatcagggatgactcagttacagagcctcacagttacagttccaagaagaaaacggtcaaaaccaaaattgaaattgaagattataaatcagaatagcgtggccgtccttcagacccctccagacatccaatcagagcattcaagggatggtgaaatggatgatagtcgagaaggagaacttatggattgtgatggaaaatcagaatctagtcctgagcgggaagctgtggatgatgaaactaagggagtggaaggaacagatggtgtcaaaaagagaaaaaggaaaccatacagaccaggtattggtggatttatggtgcggcaaagaagtcgaactgggcaagggaaaaccaaaagatctgtgatcagaaaagattcctcaggctctatttccgagcagttaccttgcagagatgatggctggagtgagcagttaccagatactttagttgatgaatctgtttctgttactgaaagcactgaaaaaataaagaagagataccgaaaaaggaaaaataagcttgaagaaactttccctgcctatttacaagaagctttctttggaaaagatcttctagatacaagtagacaaagcaagataagtttagataatctgtcagaagatggagctcagcttttatataaaacaaacatgaacacaggtttcttggatccttccttagatccactacttagttcatcctcggctccaacaaaatctggaactcacggtcctgctgatgacccattagctgatatttctgaagttttaaacacagatgatgacattcttggaataatttcagatgatctagcaaaatcagttgatcattcagatattggtcctgtcactgatgatccttcctctttgcctcagccaaatgtcaatcagagttcacgaccattaagtgaagaacagctagatgggatcctcagtcctgaactagacaaaatggtcacagatggagcaattcttggaaaattatataaaattccagagcttggcggaaaagatgttgaagacttatttacagctgtacttagtcctgcgaacactcagccaactccattgccacagcctcccccaccaacacagctgttgccaatacacaatcaggatgctttttcacggatgcctctcatgaatggccttattggatccagtcctcatctcccacataattctttgccacctggaagcggactgggaactttctctgcaattgcacaatcctcttatcctgatgccagggataaaaattcagcctttaatccaatggcaagtgatcctaacaactcttggacatcatcagctcccactgtggaaggagaaaatgacacaatgtcgaatgcccagagaagcacgcttaagtgggagaaagaggaggctctgggtgaaatggcaactgttgccccagttctctacaccaatattaatttccccaacttaaaggaagaattccctgattggactactagagtgaagcaaattgccaaattgtggagaaaagcaagctcacaagaaagagcaccatatgtgcaaaaagccagagataacagagctgctttacgcattaataaagtacagatgtcaaatgattccatgaaaaggcagcaacagcaagatagcattgatcccagctctcgtattgattcggagctttttaaagatcctttaaagcaaagagaatcagaacatgaacaggaatggaaatttagacagcaaatgcgtcagaaaagtaagcagcaagctaaaattgaagccacacagaaacttgaacaggtgaaaaatgagcagcagcagcagcaacaacagcaatttggttctcagcatcttctggtgcagtctggttcagatacaccaagtagtgggatacagagtcccttgacacctcagcctggcaatggaaatatgtctcctgcacagtcattccataaagaactgtttacaaaacagccacccagtacccctacgtctacatcttcagatgatgtgtttgtaaagccacaagctccacctcctcctccagccccatcccggattcccatccaggatagtctttctcaggctcagacttctcagccaccctcaccgcaagtgttttcacctgggtcctctaactcacgaccaccatctccaatggatccatatgcaaaaatggttggtacccctcgaccacctcctgtgggccatagtttttccagaagaaattctgctgcaccagtggaaaactgtacacctttatcatcggtatctaggccccttcaaatgaatgagacaacagcaaataggccatcccctgtcagagatttatgttcttcttccacgacaaataatgacccctatgcaaaacctccagacacacctaggcctgtgatgacagatcaatttcccaaatccttgggcctatcccggtctcctgtagtttcagaacaaactgcaaaaggccctatagcagctggaaccagtgatcactttactaaaccatctcctagggcagatgtgtttcaaagacaaaggatacctgactcatatgcacgacccttgttgacacctgcacctcttgatagtggtcctggaccttttaagactccaatgcaacctcctccatcctctcaggatccttatggatcagtgtcacaggcatcaaggcgattgtctgttgacccttatgaaaggcctgctttgacaccaagacctatagataatttttctcataatcagtcaaatgatccatatagtcagcctccccttaccccacatccagcagtgaatgaatcttttgcccatccttcaagggctttttcccagcctggaaccatatcaaggccaacatctcaggacccatactcccaacccccaggaactccacgacctgttgtagattcttattcccaatcttcaggaacagctaggtccaatacagacccttactctcaacctcctggaactccccggcctactactgttgacccatatagtcagcagccccaaaccccaagaccatctacacaaactgacttgtttgttacacctgtaacaaatcagaggcattctgatccatatgctcatcctcctggaacaccaagacctggaatttctgtcccttactctcagccaccagcaacaccaaggccaaggatttcagagggttttactaggtcctcaatgacaagaccagtcctcatgccaaatcaggatcctttcctgcaagcagcacaaaaccgaggaccagctttacctggcccgttggtaaggccacctgatacatgttcccagacacctaggccccctggacctggtctttcagacacatttagccgtgtttccccatctgctgcccgtgatccctatgatcagtctccaatgactccaagatctcagtctgactcttttggaacaagtcaaactgcccatgatgttgctgatcagccaaggcctggatcagaggggagcttctgtgcatcttcaaactctccaatgcactcccaaggccagcagttctctggtgtctcccaacttcctggacctgtgccaacttcaggagtaactgatacacagaatactgtaaatatggcccaagcagatacagagaaattgagacagcggcagaagttacgtgaaatcattctccagcagcaacagcagaagaagattgcaggtcgacaggagaaggggtcacaggactcacccgcagtgcctcatccagggcctcttcaacactggcaaccagagaatgttaaccaggctttcaccagacccccacctccctatcctgggaacattaggtctcctgttgcccctcctttaggacctagatatgctgttttcccaaaagatcagcgtggaccctatcctcctgatgttgctagtatggggatgagacctcatggatttagatttggatttccaggaggtagtcatggtaccatgccgagtcaagagcgcttccttgtgcctcctcagcaaatacagggatctggagtttctccacagctaagaagatcagtatctgtagatatgcctaggcctttaaataactcacaaatgaataatccagttggacttcctcagcatttttcaccacagagcttgccagttcagcagcacaacatactgggccaagcatatattgaactgagacatagggctcctgacggaaggcaacggctgcctttcagtgctccacctggcagcgttgtagaggcatcttctaatctgagacatggaaacttcattccccggccagactttccgggccctagacacacagaccccatgcgacgacctccccagggtctacctaatcagctacctgtgcacccagatttggaacaagtgccaccatctcaacaagagcaaggtcattctgtccattcatcttctatggtcatgaggactctgaaccatccactaggtggtgaattttcagaagctcctttgtcaacatctgtaccgtctgaaacaacgtctgataatttacagataaccacccagccttctgatggtctagaggaaaaacttgattctgatgacccttctgtgaaggaactggatgttaaagaccttgagggggttgaagtcaaagacttagatgatgaagatcttgaaaacttaaatttagatacagaggatggcaaggtagttgaattggatactttagataatttggaaactaatgatcccaacctggatgacctcttaaggtcaggagagtttgatatcattgcatatacagatccagaacttgacatgggagataagaaaagcatgtttaatgaggaactagaccttccaattgatgataagttagataatcagtgtgtatctgttgaaccaaaaaaaaaggaacaagaaaacaaaactctggttctctctgataaacattcaccacagaaaaaatccactgttaccaatgaggtaaaaacggaagtactgtctccaaattctaaggtggaatccaaatgtgaaactgaaaaaaatgatgagaataaagataatgttgacactccttgctcacaggcttctgctcactcagacctaaatgatggagaaaagacttctttgcatccttgtgatccagatctatttgagaaaagaaccaatcgagaaactgctggccccagtgcaaatgtcattcaggcatccactcaactacctgctcaagatgtaataaactcttgtggcataactggatcaactccagttctctcaagtttacttgctaatgagaaatctgataattcagacattaggccatcggggtctccaccaccaccaactctgccggcctccccatccaatcatgtgtcaagtttgcctcctttcatagcaccgcctggccgtgttttggataatgccatgaattctaatgtgacagtagtctctagggtaaaccatgttttttctcagggtgtgcaggtaaacccagggctcattccaggtcaatcaacagttaaccacagtctggggacaggaaaacctgcaactcaaactgggcctcaaacaagtcagtctggtaccagtagcatgtctggaccccaacagctaatgattcctcaaacattagcacagcagaatagagagaggccccttcttctagaagaacagcctctacttctacaggatcttttggatcaagaaaggcaagaacagcagcagcaaagacagatgcaagccatgattcgtcagcgatcagaaccgttcttccctaatattgattttgatgcaattacagatcctataatgaaagccaaaatggtggcccttaaaggtataaataaagtgatggcacaaaacaatctgggcatgccaccaatggtgatgagcaggttcccttttatgggccaggtggtaactggaacacagaacagtgaaggacagaaccttggaccacaggccattcctcaggatggcagtataacacatcagatttctaggcctaatcctccaaattttggtccaggctttgtcaatgattcacagcgtaagcagtatgaagagtggctccaggagacccaacagctgcttcaaatgcagcagaagtatcttgaagaacaaattggtgctcacagaaaatctaagaaggccctttcagctaaacaacgtactgccaagaaagctgggcgtgaatttccagaggaagatgcagaacaactcaagcatgttactgaacagcaaagcatggttcagaaacagctagaacagattcgtaaacaacagaaagaacatgctgaattgattgaagattatcggatcaaacagcagcagcaatgtgcaatggccccacctaccatgatgcccagtgtccagccccagccacccctaattccaggtgccactccacccaccatgagccaacccacctttcccatggtgccacagcagcttcagcaccagcagcacacaacagttatttctggccatactagccctgttagaatgcccagtttacctggatggcaacccaacagtgctcctgcccacctgcccctcaatcctcctagaattcagcccccaattgcccagttaccaataaaaacttgtacaccagccccagggacagtctcaaatgcaaatccacagagtggaccaccacctcgggtagaatttgatgacaacaatccctttagtgaaagttttcaagaacgggaacgtaaggaacgtttacgagaacagcaagagagacaacggatccaactcatgcaggaggtagatagacaaagagctttgcagcagaggatggaaatggagcagcatggtatggtgggctctgagataagtagtagtaggacatctgtgtcccagattcccttctacagttccgacttaccttgtgattttatgcaacctctaggaccccttcagcagtctccacaacaccaacagcaaatggggcaggttttacagcagcagaatatacaacaaggatcaattaattcaccctccacccaaactttcatgcagactaatgagcgaaggcaggtaggccctccttcatttgttcctgattcaccatcaatccctgttggaagcccaaatttttcttctgtgaagcagggacatggaaatctttctgggaccagcttccagcagtccccagtgaggccttcttttacacctgctttaccagcagcacctccagtagctaatagcagtctcccatgtggccaagattctactataacccatggacacagttatccgggatcaacccaatcgctcattcagttgtattctgatataatcccagaggaaaaagggaaaaagaaaagaacaagaaagaagaaaagagatgatgatgcagaatccaccaaggctccatcaactccccattcagatataactgccccaccgactccaggcatctcagaaactacctctactcctgcagtgagcacacccagtgagcttcctcaacaagccgaccaagagtcggtggaaccagtcggcccatccactcccaatatggcagcaggccagctatgtacagaattagagaacaaactgcccaatagtgatttctcacaagcaactccaaatcaacagacgtatgcaaattcagaagtagacaagctctccatggaaacccctgccaaaacagaagagataaaactggaaaaggctgagacagagtcctgcccaggccaagaggagcctaaattggaggaacagaatggtagtaaggtagaaggaaacgctgtagcctgtcctgtctcctcagcacagagtcctccccattctgctggggcccctgctgccaaaggagactcagggaatgaacttctgaaacacttgttgaaaaataaaaagtcatcttctcttttgaatcaaaaacctgagggcagtatttgttcagaagatgactgtacaaaggataataaactagttgagaagcagaacccagctgaaggactgcaaactttgggggctcaaatgcaaggtggttttggatgtggcaaccagttgccaaaaacagatggaggaagtgaaaccaagaaacagcgaagcaaacggactcagaggacgggtgagaaagcagcacctcgctcaaagaaaaggaaaaaggacgaagaggagaaacaagctatgtactctagcactgacacgtttacccacttgaaacagcagctctctctgctccctctaatggaaccaatcattggagtgaactttgcgcactttcttccttatggcagtggccaatttaatagtgggaatcgacttctaggaacttttggcagtgctaccctggaaggggtttcggactactattctcagttgatctacaagcagaataatttaagtaatcctccaacaccccctgcctctcttcctcctacaccacctcctatggcttgtcagaagatggccaatggttttgcaacaactgaagaacttgctggaaaagccggagtgttagtgagccatgaagttaccaaaactctaggacctaaaccatttcagctgcccttcagaccccaggacgacttgttggcccgagctcttgctcagggccccaagacagttgatgtgccagcctccctcccaacaccacctcataacaatcaggaagaattaaggatacaggatcactgtggtgatcgagatactcctgacagttttgttccctcatcctctcctgagagtgtggttggggtagaagtgagcaggtatccagatctgtcattggtcaaggaggagcctccagaaccggtgccgtcccccatcattccaattcttcctagcactgctgggaaaagttcagaatcaagaaggaatgacatcaaaactgagccaggcactttatattttgcgtcaccttttggtccttccccaaatggtcccagatcaggtcttatatctgtagcaattactctgcatcctacagctgctgagaacattagcagtgttgtggctgcattttccgaccttcttcacgtccgaatccctaacagctatgaggttagcagtgctccagatgtcccatccatgggtttggtcagtagccacagaatcaacccgggtttggagtatcgacagcatttacttctccgtgggcctccgccaggatctgcaaaccctcccagattagtgagctcttaccggctgaagcagcctaatgtaccatttcctccaacaagcaatggtctttctggatataaggattctagtcatggtattgcagaaagcgcagcactcagaccacagtggtgttgtcattgtaaagtggttattcttggaagtggtgtgcggaaatctttcaaagatctgacccttttgaacaaggattcccgagaaagcaccaagagggtagagaaggacattgtcttctgtagtaataactgctttattctttattcatcaactgcacaagcgaaaaactcagaaaacaaggaatccattccttcattgccacaatcacctatgagagaaacgccttccaaagcatttcatcagtacagcaacaacatctccactttggatgtgcactgtctcccccagctcccagagaaagcttctccccctgcctcaccacccatcgccttccctcctgcttttgaagcagcccaagtcgaggccaagccagatgagctgaaggtgacagtcaagctgaagcctcggctaagagctgtccatggtgggtttgaagattgcaggccgctcaataaaaaatggagaggaatgaaatggaagaagtggagcattcatattgtaatccctaaggggacatttaaaccaccttgtgaggatgaaatagatgaatttctaaagaaattgggcacttcccttaaacctgatcctgtgcccaaagactatcggaaatgttgcttttgtcatgaagaaggtgatggattgacagatggaccagcaaggctactcaaccttgacttggatctgtgggtccacttgaactgcgctctgtggtccacggaggtctatgagactcaggctggtgccttaataaatgtggagctagctctgaggagaggcctacaaatgaaatgtgtcttctgtcacaagacgggtgccactagtggatgccacagatttcgatgcaccaacatttatcacttcacttgcgccattaaagcacaatgcatgttttttaaggacaaaactatgctttgccccatgcacaaaccaaagggaattcatgagcaagaattaagttactttgcagtcttcaggagggtctatgttcagcgtgatgaggtgcgacagattgctagcatcgtgcaacgaggagaacgggaccatacctttcgcgtgggtagcctcatcttccacacaattggtcagctgcttccacagcagatgcaagcattccattctcctaaagcactcttccctgtgggctatgaagccagccggctgtactggagcactcgctatgccaataggcgctgccgctacctgtgctccattgaggagaaggatgggcgcccagtgtttgtcatcaggattgtggaacaaggccatgaagacctggttctaagtgacatctcacctaaaggtgtctgggataagattttggagcctgtggcatgtgtgagaaaaaagtctgaaatgctccagcttttcccagcgtatttaaaaggagaggatctgtttggcctgaccgtctctgcagtggcacgcatagcggaatcacttcctggggttgaggcatgtgaaaattataccttccgatacggccgaaatcctctcatggaacttcctcttgccgttaaccccacaggttgtgcccgttctgaacctaaaatgagtgcccatgtcaagaggtttgtgttaaggcctcacaccttaaacagcaccagcacctcaaagtcatttcagagcacagtcactggagaactgaacgcaccttatagtaaacagtttgttcactccaagtcatcgcagtaccggaagatgaaaactgaatggaaatccaatgtgtatctggcacggtctcggattcaggggctgggcctgtatgctgctcgagacattgagaaacacaccatggtcattgagtacatcgggactatcattcgaaacgaagtagccaacaggaaagagaagctttatgagtctcagaaccgtggtgtgtacatgttccgcatggataacgaccatgtgattgacgcgacgctcacaggagggcccgcaaggtatatcaaccattcgtgtgcacctaattgtgtggctgaagtggtgacttttgagagaggacacaaaattatcatcagctccagtcggagaatccagaaaggagaagagctctgctatgactataagtttgactttgaagatgaccagcacaagattccgtgtcactgtggagctgtgaactgccggaagtggatgaactgaaatgcattccttgctagctcagcgggcggcttgtccctaggaagaggcgattcaacacaccattggaattttgcagacagaaagagatttttgttttctgttttatgactttttgaaaaagcttctgggagttctgatttcctcagtcctttaggttaaagcagcgccaggaggaagctgacagaagcagcgttcctgaagtggccgaggttaaacggaatcacagaatggtccagcacttttgcttttttttcttttccttttcttttttttttgtttgttttttgttttgtttttcccttgtgggtgggtttcattgttttggttttctagtctcactaaggagaaacttttactggggcaaagagccgatggctgccctgccccgggcaggggccttcctatgaatgtaagactgaaatcaccagcgagggggacagagagtgctggccacggccttattaaaaaggggcaggccctctaacttcaaaatgtttttaaataaagtagacaccactgaacaaggaatgtactgaaatgacttccttagggatagagctaagggataataacttgcactaaatacatttaaatacttgattccatgagtcagtttattgtagtttttgatttctgtaaaataagagaaacttttgtatttattattgaataagtgaatgaagctatttttaaataaagttagaagaaagccaagctgctgctgttacctgcagaactaacaaaccctgttactttgtacagatatgtaaatattttgagaaaaaatacagtataaaaatagttattgaccaaatgctaccaggctctgcagcagctcgggggcttataaaatgttcatagggatgttacaatataattttgtgttataaaatatgccattataattatgtaataaccaaaatttcaacctagagtgttgggggttttttggaaaccgcagtctattagtactcaatggttttatacaccttacttctgacagagcggggcgtatgctacgactacaacttttatagctgttttggtaatttaaactaattttttcatattatattgttgcatccctacttcttcagtcaggtttttttgtgcttacaatttgtgataactgtgaataactgcttaaaaatacacccaaatggaggctgaattttttcttcagcaaaagtagttttgattagaactttgtttcagccacagagaatcatgtaaacgtaataggatcatgtagcagaaacttaaatctaaccctttagccttctatttaacacaaaaatttgaaaaagttaaaaaaaaaaaggagatgtgattatgcttacagctgcaggactctggcaatagggtttttggaagatgtaattttaaaatgtgtttgtatgaactgtttgtttacatttctttaataaaaaaaacactgttttgtgtttgcttgtagaaacttaatcagcattttgaaccaggttagctttttattttgtacttaaaattctggtactgacacttcacaggctaagtataaaatgaagttttgtgtgcacaattcaagtggactgtaaactgttggtatattcagtgatgcagttctgaacttgtatatggcatgatgtatttttatcttacagaataaatcaattgtatatatttttctcttgata

SEQ ID NO: 318248 - DNA, 14463 bp, Homo sapiens
tgtagtgatgtctcaggcagaataaaatatttaatgtaaattgtagcagcaaacatttaagttatacttaaatgtttaaatcactgttagtgattaacttattttgccttccttgaagcaatttgtcctaaatttccatacgtttgcatttgtttttgctgttctaaaattccttagttgctggctttgaccttttatgttgctgagttttacacatctattttctcaactgccatatcctagggggcttggagtacccataatacagtgagcccaccttcctggtccccagacatttcagaaggtcgggaaatttttaaacccaggcagcttcctggcagtgccatttggagcatcaaagtgggccgtgggtctggatttccaggaaagcggagacctcgaggtgcaggactgtcggggcgaggtggccgaggcaggtcaaagctgaaaagtggaatcggagctgttgtattacctggggtgtctactgcagatatttcatcaaataaggatgatgaagaaaactctatgcacaatacagttgtgttgttttctagcagtgacaagttcactttgaatcaggatatgtgtgtagtttgtggcagttttggccaaggagcagaaggaagattacttgcctgttctcagtgtggtcagtgttaccatccatactgtgtcagtattaagatcactaaagtggttcttagcaaaggttggaggtgtcttgagtgcactgtgtgtgaggcctgtgggaaggcaactgacccaggaagactcctgctgtgtgatgactgtgacataagttatcacacctactgcctagaccctccattgcagacagttcccaaaggaggctggaagtgcaaatggtgtgtttggtgcagacactgtggagcaacatctgcaggtctaagatgtgaatggcagaacaattacacacagtgcgctccttgtgcaagcttatcttcctgtccagtctgctatcgaaactatagagaagaagatcttattctgcaatgtagacaatgtgatagatggatgcatgcagtttgtcagaacttaaatactgaggaagaagtggaaaatgtagcagacattggttttgattgtagcatgtgcagaccctatatgcctgcgtctaatgtgccttcctcagactgctgtgaatcttcacttgtagcacaaattgtcacaaaagtaaaagagctagacccacccaagacttatacccaggatggtgtgtgtttgactgaatcagggatgactcagttacagagcctcacagttacagttccaagaagaaaacggtcaaaaccaaaattgaaattgaagattataaatcagaatagcgtggccgtccttcagacccctccagacatccaatcagagcattcaagggatggtgaaatggatgatagtcgagaaggagaacttatggattgtgatggaaaatcagaatctagtcctgagcgggaagctgtggatgatgaaactaagggagtggaaggaacagatggtgtcaaaaagagaaaaaggaaaccatacagaccaggtattggtggatttatggtgcggcaaagaagtcgaactgggcaagggaaaaccaaaagatctgtgatcagaaaagattcctcaggctctatttccgagcagttaccttgcagagatgatggctggagtgagcagttaccagatactttagttgatgaatctgtttctgttactgaaagcactgaaaaaataaagaagagataccgaaaaaggaaaaataagcttgaagaaactttccctgcctatttacaagaagctttctttggaaaagatcttctagatacaagtagacaaagcaagataagtttagataatctgtcagaagatggagctcagcttttatataaaacaaacatgaacacaggtttcttggatccttccttagatccactacttagttcatcctcggctccaacaaaatctggaactcacggtcctgctgatgacccattagctgatatttctgaagttttaaacacagatgatgacattcttggaataatttcagatgatctagcaaaatcagttgatcattcagatattggtcctgtcactgatgatccttcctctttgcctcagccaaatgtcaatcagagttcacgaccattaagtgaagaacagctagatgggatcctcagtcctgaactagacaaaatggtcacagatggagcaattcttggaaaattatataaaattccagagcttggcggaaaagatgttgaagacttatttacagctgtacttagtcctgcgaacactcagccaactccattgccacagcctcccccaccaacacagctgttgccaatacacaatcaggatgctttttcacggatgcctctcatgaatggccttattggatccagtcctcatctcccacataattctttgccacctggaagcggactgggaactttctctgcaattgcacaatcctcttatcctgatgccagggataaaaattcagcctttaatccaatggcaagtgatcctaacaactcttggacatcatcagctcccactgtggaaggagaaaatgacacaatgtcgaatgcccagagaagcacgcttaagtgggagaaagaggaggctctgggtgaaatggcaactgttgccccagttctctacaccaatattaatttccccaacttaaaggaagaattccctgattggactactagagtgaagcaaattgccaaattgtggagaaaagcaagctcacaagaaagagcaccatatgtgcaaaaagccagagataacagagctgctttacgcattaataaagtacagatgtcaaatgattccatgaaaaggcagcaacagcaagatagcattgatcccagctctcgtattgattcggagctttttaaagatcctttaaagcaaagagaatcagaacatgaacaggaatggaaatttagacagcaaatgcgtcagaaaagtaagcagcaagctaaaattgaagccacacagaaacttgaacaggtgaaaaatgagcagcagcagcagcaacaacagcaatttggttctcagcatcttctggtgcagtctggttcagatacaccaagtagtgggatacagagtcccttgacacctcagcctggcaatggaaatatgtctcctgcacagtcattccataaagaactgtttacaaaacagccacccagtacccctacgtctacatcttcagatgatgtgtttgtaaagccacaagctccacctcctcctccagccccatcccggattcccatccaggatagtctttctcaggctcagacttctcagccaccctcaccgcaagtgttttcacctgggtcctctaactcacgaccaccatctccaatggatccatatgcaaaaatggttggtacccctcgaccacctcctgtgggccatagtttttccagaagaaattctgctgcaccagtggaaaactgtacacctttatcatcggtatctaggccccttcaaatgaatgagacaacagcaaataggccatcccctgtcagagatttatgttcttcttccacgacaaataatgacccctatgcaaaacctccagacacacctaggcctgtgatgacagatcaatttcccaaatccttgggcctatcccggtctcctgtagtttcagaacaaactgcaaaaggccctatagcagctggaaccagtgatcactttactaaaccatctcctagggcagatgtgtttcaaagacaaaggatacctgactcatatgcacgacccttgttgacacctgcacctcttgatagtggtcctggaccttttaagactccaatgcaacctcctccatcctctcaggatccttatggatcagtgtcacaggcatcaaggcgattgtctgttgacccttatgaaaggcctgctttgacaccaagacctatagataatttttctcataatcagtcaaatgatccatatagtcagcctccccttaccccacatccagcagtgaatgaatcttttgcccatccttcaagggctttttcccagcctggaaccatatcaaggccaacatctcaggacccatactcccaacccccaggaactccacgacctgttgtagattcttattcccaatcttcaggaacagctaggtccaatacagacccttactctcaacctcctggaactccccggcctactactgttgacccatatagtcagcagccccaaaccccaagaccatctacacaaactgacttgtttgttacacctgtaacaaatcagaggcattctgatccatatgctcatcctcctggaacaccaagacctggaatttctgtcccttactctcagccaccagcaacaccaaggccaaggatttcagagggttttactaggtcctcaatgacaagaccagtcctcatgccaaatcaggatcctttcctgcaagcagcacaaaaccgaggaccagctttacctggcccgttggtaaggccacctgatacatgttcccagacacctaggccccctggacctggtctttcagacacatttagccgtgtttccccatctgctgcccgtgatccctatgatcagtctccaatgactccaagatctcagtctgactcttttggaacaagtcaaactgcccatgatgttgctgatcagccaaggcctggatcagaggggagcttctgtgcatcttcaaactctccaatgcactcccaaggccagcagttctctggtgtctcccaacttcctggacctgtgccaacttcaggagtaactgatacacagaatactgtaaatatggcccaagcagatacagagaaattgagacagcggcagaagttacgtgaaatcattctccagcagcaacagcagaagaagattgcaggtcgacaggagaaggggtcacaggactcacccgcagtgcctcatccagggcctcttcaacactggcaaccagagaatgttaaccaggctttcaccagacccccacctccctatcctgggaacattaggtctcctgttgcccctcctttaggacctagatatgctgttttcccaaaagatcagcgtggaccctatcctcctgatgttgctagtatggggatgagacctcatggatttagatttggatttccaggaggtagtcatggtaccatgccgagtcaagagcgcttccttgtgcctcctcagcaaatacagggatctggagtttctccacagctaagaagatcagtatctgtagatatgcctaggcctttaaataactcacaaatgaataatccagttggacttcctcagcatttttcaccacagagcttgccagttcagcagcacaacatactgggccaagcatatattgaactgagacatagggctcctgacggaaggcaacggctgcctttcagtgctccacctggcagcgttgtagaggcatcttctaatctgagacatggaaacttcattccccggccagactttccgggccctagacacacagaccccatgcgacgacctccccagggtctacctaatcagctacctgtgcacccagatttggaacaagtgccaccatctcaacaagagcaaggtcattctgtccattcatcttctatggtcatgaggactctgaaccatccactaggtggtgaattttcagaagctcctttgtcaacatctgtaccgtctgaaacaacgtctgataatttacagataaccacccagccttctgatggtctagaggaaaaacttgattctgatgacccttctgtgaaggaactggatgttaaagaccttgagggggttgaagtcaaagacttagatgatgaagatcttgaaaacttaaatttagatacagaggatggcaaggtagttgaattggatactttagataatttggaaactaatgatcccaacctggatgacctcttaaggtcaggagagtttgatatcattgcatatacagatccagaacttgacatgggagataagaaaagcatgtttaatgaggaactagaccttccaattgatgataagttagataatcagtgtgtatctgttgaaccaaaaaaaaaggaacaagaaaacaaaactctggttctctctgataaacattcaccacagaaaaaatccactgttaccaatgaggtaaaaacggaagtactgtctccaaattctaaggtggaatccaaatgtgaaactgaaaaaaatgatgagaataaagataatgttgacactccttgctcacaggcttctgctcactcagacctaaatgatggagaaaagacttctttgcatccttgtgatccagatctatttgagaaaagaaccaatcgagaaactgctggccccagtgcaaatgtcattcaggcatccactcaactacctgctcaagatgtaataaactcttgtggcataactggatcaactccagttctctcaagtttacttgctaatgagaaatctgataattcagacattaggccatcggggtctccaccaccaccaactctgccggcctccccatccaatcatgtgtcaagtttgcctcctttcatagcaccgcctggccgtgttttggataatgccatgaattctaatgtgacagtagtctctagggtaaaccatgttttttctcagggtgtgcaggtaaacccagggctcattccaggtcaatcaacagttaaccacagtctggggacaggaaaacctgcaactcaaactgggcctcaaacaagtcagtctggtaccagtagcatgtctggaccccaacagctaatgattcctcaaacattagcacagcagaatagagagaggccccttcttctagaagaacagcctctacttctacaggatcttttggatcaagaaaggcaagaacagcagcagcaaagacagatgcaagccatgattcgtcagcgatcagaaccgttcttccctaatattgattttgatgcaattacagatcctataatgaaagccaaaatggtggcccttaaaggtataaataaagtgatggcacaaaacaatctgggcatgccaccaatggtgatgagcaggttcccttttatgggccaggtggtaactggaacacagaacagtgaaggacagaaccttggaccacaggccattcctcaggatggcagtataacacatcagatttctaggcctaatcctccaaattttggtccaggctttgtcaatgattcacagcgtaagcagtatgaagagtggctccaggagacccaacagctgcttcaaatgcagcagaagtatcttgaagaacaaattggtgctcacagaaaatctaagaaggccctttcagctaaacaacgtactgccaagaaagctgggcgtgaatttccagaggaagatgcagaacaactcaagcatgttactgaacagcaaagcatggttcagaaacagctagaacagattcgtaaacaacagaaagaacatgctgaattgattgaagattatcggatcaaacagcagcagcaatgtgcaatggccccacctaccatgatgcccagtgtccagccccagccacccctaattccaggtgccactccacccaccatgagccaacccacctttcccatggtgccacagcagcttcagcaccagcagcacacaacagttatttctggccatactagccctgttagaatgcccagtttacctggatggcaacccaacagtgctcctgcccacctgcccctcaatcctcctagaattcagcccccaattgcccagttaccaataaaaacttgtacaccagccccagggacagtctcaaatgcaaatccacagagtggaccaccacctcgggtagaatttgatgacaacaatccctttagtgaaagttttcaagaacgggaacgtaaggaacgtttacgagaacagcaagagagacaacggatccaactcatgcaggaggtagatagacaaagagctttgcagcagaggatggaaatggagcagcatggtatggtgggctctgagataagtagtagtaggacatctgtgtcccagattcccttctacagttccgacttaccttgtgattttatgcaacctctaggaccccttcagcagtctccacaacaccaacagcaaatggggcaggttttacagcagcagaatatacaacaaggatcaattaattcaccctccacccaaactttcatgcagactaatgagcgaaggcaggtaggccctccttcatttgttcctgattcaccatcaatccctgttggaagcccaaatttttcttctgtgaagcagggacatggaaatctttctgggaccagcttccagcagtccccagtgaggccttcttttacacctgctttaccagcagcacctccagtagctaatagcagtctcccatgtggccaagattctactataacccatggacacagttatccgggatcaacccaatcgctcattcagttgtattctgatataatcccagaggaaaaagggaaaaagaaaagaacaagaaagaagaaaagagatgatgatgcagaatccaccaaggctccatcaactccccattcagatataactgccccaccgactccaggcatctcagaaactacctctactcctgcagtgagcacacccagtgagcttcctcaacaagccgaccaagagtcggtggaaccagtcggcccatccactcccaatatggcagcaggccagctatgtacagaattagagaacaaactgcccaatagtgatttctcacaagcaactccaaatcaacagacgtatgcaaattcagaagtagacaagctctccatggaaacccctgccaaaacagaagagataaaactggaaaaggctgagacagagtcctgcccaggccaagaggagcctaaattggaggaacagaatggtagtaaggtagaaggaaacgctgtagcctgtcctgtctcctcagcacagagtcctccccattctgctggggcccctgctgccaaaggagactcagggaatgaacttctgaaacacttgttgaaaaataaaaagtcatcttctcttttgaatcaaaaacctgagggcagtatttgttcagaagatgactgtacaaaggataataaactagttgagaagcagaacccagctgaaggactgcaaactttgggggctcaaatgcaaggtggttttggatgtggcaaccagttgccaaaaacagatggaggaagtgaaaccaagaaacagcgaagcaaacggactcagaggacgggtgagaaagcagcacctcgctcaaagaaaaggaaaaaggacgaagaggagaaacaagctatgtactctagcactgacacgtttacccacttgaaacagcagctctctctgctccctctaatggaaccaatcattggagtgaactttgcgcactttcttccttatggcagtggccaatttaatagtgggaatcgacttctaggaacttttggcagtgctaccctggaaggggtttcggactactattctcagttgatctacaagcagaataatttaagtaatcctccaacaccccctgcctctcttcctcctacaccacctcctatggcttgtcagaagatggccaatggttttgcaacaactgaagaacttgctggaaaagccggagtgttagtgagccatgaagttaccaaaactctaggacctaaaccatttcagctgcccttcagaccccaggacgacttgttggcccgagctcttgctcagggccccaagacagttgatgtgccagcctccctcccaacaccacctcataacaatcaggaagaattaaggatacaggatcactgtggtgatcgagatactcctgacagttttgttccctcatcctctcctgagagtgtggttggggtagaagtgagcaggtatccagatctgtcattggtcaaggaggagcctccagaaccggtgccgtcccccatcattccaattcttcctagcactgctgggaaaagttcagaatcaagaaggaatgacatcaaaactgagccaggcactttatattttgcgtcaccttttggtccttccccaaatggtcccagatcaggtcttatatctgtagcaattactctgcatcctacagctgctgagaacattagcagtgttgtggctgcattttccgaccttcttcacgtccgaatccctaacagctatgaggttagcagtgctccagatgtcccatccatgggtttggtcagtagccacagaatcaacccgggtttggagtatcgacagcatttacttctccgtgggcctccgccaggatctgcaaaccctcccagattagtgagctcttaccggctgaagcagcctaatgtaccatttcctccaacaagcaatggtctttctggatataaggattctagtcatggtattgcagaaagcgcagcactcagaccacagtggtgttgtcattgtaaagtggttattcttggaagtggtgtgcggaaatctttcaaagatctgacccttttgaacaaggattcccgagaaagcaccaagagggtagagaaggacattgtcttctgtagtaataactgctttattctttattcatcaactgcacaagcgaaaaactcagaaaacaaggaatccattccttcattgccacaatcacctatgagagaaacgccttccaaagcatttcatcagtacagcaacaacatctccactttggatgtgcactgtctcccccagctcccagagaaagcttctccccctgcctcaccacccatcgccttccctcctgcttttgaagcagcccaagtcgaggccaagccagatgagctgaaggtgacagtcaagctgaagcctcggctaagagctgtccatggtgggtttgaagattgcaggccgctcaataaaaaatggagaggaatgaaatggaagaagtggagcattcatattgtaatccctaaggggacatttaaaccaccttgtgaggatgaaatagatgaatttctaaagaaattgggcacttcccttaaacctgatcctgtgcccaaagactatcggaaatgttgcttttgtcatgaagaaggtgatggattgacagatggaccagcaaggctactcaaccttgacttggatctgtgggtccacttgaactgcgctctgtggtccacggaggtctatgagactcaggctggtgccttaataaatgtggagctagctctgaggagaggcctacaaatgaaatgtgtcttctgtcacaagacgggtgccactagtggatgccacagatttcgatgcaccaacatttatcacttcacttgcgccattaaagcacaatgcatgttttttaaggacaaaactatgctttgccccatgcacaaaccaaagggaattcatgagcaagaattaagttactttgcagtcttcaggagggtctatgttcagcgtgatgaggtgcgacagattgctagcatcgtgcaacgaggagaacgggaccatacctttcgcgtgggtagcctcatcttccacacaattggtcagctgcttccacagcagatgcaagcattccattctcctaaagcactcttccctgtgggctatgaagccagccggctgtactggagcactcgctatgccaataggcgctgccgctacctgtgctccattgaggagaaggatgggcgcccagtgtttgtcatcaggattgtggaacaaggccatgaagacctggttctaagtgacatctcacctaaaggtgtctgggataagattttggagcctgtggcatgtgtgagaaaaaagtctgaaatgctccagcttttcccagcgtatttaaaaggagaggatctgtttggcctgaccgtctctgcagtggcacgcatagcggaatcacttcctggggttgaggcatgtgaaaattataccttccgatacggccgaaatcctctcatggaacttcctcttgccgttaaccccacaggttgtgcccgttctgaacctaaaatgagtgcccatgtcaagaggtttgtgttaaggcctcacaccttaaacagcaccagcacctcaaagtcatttcagagcacagtcactggagaactgaacgcaccttatagtaaacagtttgttcactccaagtcatcgcagtaccggaagatgaaaactgaatggaaatccaatgtgtatctggcacggtctcggattcaggggctgggcctgtatgctgctcgagacattgagaaacacaccatggtcattgagtacatcgggactatcattcgaaacgaagtagccaacaggaaagagaagctttatgagtctcagaaccgtggtgtgtacatgttccgcatggataacgaccatgtgattgacgcgacgctcacaggagggcccgcaaggtatatcaaccattcgtgtgcacctaattgtgtggctgaagtggtgacttttgagagaggacacaaaattatcatcagctccagtcggagaatccagaaaggagaagagctctgctatgactataagtttgactttgaagatgaccagcacaagattccgtgtcactgtggagctgtgaactgccggaagtggatgaactgaaatgcattccttgctagctcagcgggcggcttgtccctaggaagaggcgattcaacacaccattggaattttgcagacagaaagagatttttgttttctgttttatgactttttgaaaaagcttctgggagttctgatttcctcagtcctttaggttaaagcagcgccaggaggaagctgacagaagcagcgttcctgaagtggccgaggttaaacggaatcacagaatggtccagcacttttgcttttttttcttttccttttcttttttttttgtttgttttttgttttgtttttcccttgtgggtgggtttcattgttttggttttctagtctcactaaggagaaacttttactggggcaaagagccgatggctgccctgccccgggcaggggccttcctatgaatgtaagactgaaatcaccagcgagggggacagagagtgctggccacggccttattaaaaaggggcaggccctctaacttcaaaatgtttttaaataaagtagacaccactgaacaaggaatgtactgaaatgacttccttagggatagagctaagggataataacttgcactaaatacatttaaatacttgattccatgagtcagtttattgtagtttttgatttctgtaaaataagagaaacttttgtatttattattgaataagtgaatgaagctatttttaaataaagttagaagaaagccaagctgctgctgttacctgcagaactaacaaaccctgttactttgtacagatatgtaaatattttgagaaaaaatacagtataaaaatagttattgaccaaatgctaccaggctctgcagcagctcgggggcttataaaatgttcatagggatgttacaatataattttgtgttataaaatatgccattataattatgtaataaccaaaatttcaacctagagtgttgggggttttttggaaaccgcagtctattagtactcaatggttttatacaccttacttctgacagagcggggcgtatgctacgactacaacttttatagctgttttggtaatttaaactaattttttcatattatattgttgcatccctacttcttcagtcaggtttttttgtgcttacaatttgtgataactgtgaataactgcttaaaaatacacccaaatggaggctgaattttttcttcagcaaaagtagttttgattagaaacttaaatctaaccctttagccttctatttaacacaaaaatttgaaaaagttaaaaaaaaaaaggagatgtgattatgcttacagctgcaggactctggcaatagggtttttggaagatgtaattttaaaatgtgtttgtatgaactgtttgtttacatttctttaataaaaaaaacactgttttgtgtttgcttgtagaaacttaatcagcattttgaaccaggttagctttttattttgtacttaaaattctggtactgacacttcacaggctaagtataaaatgaagttttgtgtgcacaattcaagtggactgtaaactgttggtatattcagtgatgcagttctgaacttgtatatggcatgatgtatttttatcttacagaataaatcaattgtatatatttttctcttgataaatagctgtatgaaatttgtttcctgaatatttttcttctcttgtacaatatcctgacatcctaccagtatttgtcctaccgggtttttgttgttttctgttctgtataatagtatctaatgttggcaaaaattgaattttttgaagtatacagagtgttatgggttttggaatttgtggacacagatttagaagatcaccatttacaaataaaatattttacatcta

SEQ ID NO: 318249 - DNA, 15250 bp, Homo sapiens
acctgggagctgagatggatcgtttacagccaggtgaggaagtggagatagctgagctcactacagattataacaatgaaatggaagttgaaggccctgaagatcaaatggtattctcagagcaggcagctaataaagatgtcaacggtcaggagtccactcctggaattgttccagatgcggttcaagtccacactgaagagcaacagaagagtcatccctcagaaagtcttgacacagatagtcttcttattgctgtatcatcccaacatacagtgaatactgaattggaaaaacagatttctaatgaagttgatagtgaagacctgaaaatgtcttctgaagtgaagcatatttgtggcgaagatcaaattgaagataaaatggaagtgacagaaaacattgaagtcgttacacaccagatcactgtgcagcaagaacaactgcagttgttagaggaacctgaaacagtggtatccagagaagaatcaaggcctccaaaattagtcatggaatctgtcactcttccactagaaaccttagtgtccccacatgaggaaagtatttcattatgtcctgaggaacagttggttatagaaaggctacaaggagaaaaggaacagaaagaaaattctgaactttctactggattgatggactctgaaatgactcctacaattgagggttgtgtgaaagatgtttcataccaaggaggcaaatctataaagttatcatctgagacagagtcatcattttcatcatcagcagacataagcaaggcagatgtgtcttcctccccaacaccttcttcagacttgccttcgcatgacatgctgcataattacccttcagctcttagttcctctgctggaaacatcatgccaacaacttacatctcagtcactccaaaaattggcatgggtaaaccagctattactaagagaaaattttctcctggtagacctcggtccaaacagggggcttggagtacccataatacagtgagcccaccttcctggtccccagacatttcagaaggtcgggaaatttttaaacccaggcagcttcctggcagtgccatttggagcatcaaagtgggccgtgggtctggatttccaggaaagcggagacctcgaggtgcaggactgtcggggcgaggtggccgaggcaggtcaaagctgaaaagtggaatcggagctgttgtattacctggggtgtctactgcagatatttcatcaaataaggatgatgaagaaaactctatgcacaatacagttgtgttgttttctagcagtgacaagttcactttgaatcaggatatgtgtgtagtttgtggcagttttggccaaggagcagaaggaagattacttgcctgttctcagtgtggtcagtgttaccatccatactgtgtcagtattaagatcactaaagtggttcttagcaaaggttggaggtgtcttgagtgcactgtgtgtgaggcctgtgggaaggcaactgacccaggaagactcctgctgtgtgatgactgtgacataagttatcacacctactgcctagaccctccattgcagacagttcccaaaggaggctggaagtgcaaatggtgtgtttggtgcagacactgtggagcaacatctgcaggtctaagatgtgaatggcagaacaattacacacagtgcgctccttgtgcaagcttatcttcctgtccagtctgctatcgaaactatagagaagaagatcttattctgcaatgtagacaatgtgatagatggatgcatgcagtttgtcagaacttaaatactgaggaagaagtggaaaatgtagcagacattggttttgattgtagcatgtgcagaccctatatgcctgcgtctaatgtgccttcctcagactgctgtgaatcttcacttgtagcacaaattgtcacaaaagtaaaagagctagacccacccaagacttatacccaggatggtgtgtgtttgactgaatcagggatgactcagttacagagcctcacagttacagttccaagaagaaaacggtcaaaaccaaaattgaaattgaagattataaatcagaatagcgtggccgtccttcagacccctccagacatccaatcagagcattcaagggatggtgaaatggatgatagtcgagaaggagaacttatggattgtgatggaaaatcagaatctagtcctgagcgggaagctgtggatgatgaaactaagggagtggaaggaacagatggtgtcaaaaagagaaaaaggaaaccatacagaccaggtattggtggatttatggtgcggcaaagaagtcgaactgggcaagggaaaaccaaaagatctgtgatcagaaaagattcctcaggctctatttccgagcagttaccttgcagagatgatggctggagtgagcagttaccagatactttagttgatgaatctgtttctgttactgaaagcactgaaaaaataaagaagagataccgaaaaaggaaaaataagcttgaagaaactttccctgcctatttacaagaagctttctttggaaaagatcttctagatacaagtagacaaagcaagataagtttagataatctgtcagaagatggagctcagcttttatataaaacaaacatgaacacaggtttcttggatccttccttagatccactacttagttcatcctcggctccaacaaaatctggaactcacggtcctgctgatgacccattagctgatatttctgaagttttaaacacagatgatgacattcttggaataatttcagatgatctagcaaaatcagttgatcattcagatattggtcctgtcactgatgatccttcctctttgcctcagccaaatgtcaatcagagttcacgaccattaagtgaagaacagctagatgggatcctcagtcctgaactagacaaaatggtcacagatggagcaattcttggaaaattatataaaattccagagcttggcggaaaagatgttgaagacttatttacagctgtacttagtcctgcgaacactcagccaactccattgccacagcctcccccaccaacacagctgttgccaatacacaatcaggatgctttttcacggatgcctctcatgaatggccttattggatccagtcctcatctcccacataattctttgccacctggaagcggactgggaactttctctgcaattgcacaatcctcttatcctgatgccagggataaaaattcagcctttaatccaatggcaagtgatcctaacaactcttggacatcatcagctcccactgtggaaggagaaaatgacacaatgtcgaatgcccagagaagcacgcttaagtgggagaaagaggaggctctgggtgaaatggcaactgttgccccagttctctacaccaatattaatttccccaacttaaaggaagaattccctgattggactactagagtgaagcaaattgccaaattgtggagaaaagcaagctcacaagaaagagcaccatatgtgcaaaaagccagagataacagagctgctttacgcattaataaagtacagatgtcaaatgattccatgaaaaggcagcaacagcaagatagcattgatcccagctctcgtattgattcggagctttttaaagatcctttaaagcaaagagaatcagaacatgaacaggaatggaaatttagacagcaaatgcgtcagaaaagtaagcagcaagctaaaattgaagccacacagaaacttgaacaggtgaaaaatgagcagcagcagcagcaacaacagcaatttggttctcagcatcttctggtgcagtctggttcagatacaccaagtagtgggatacagagtcccttgacacctcagcctggcaatggaaatatgtctcctgcacagtcattccataaagaactgtttacaaaacagccacccagtacccctacgtctacatcttcagatgatgtgtttgtaaagccacaagctccacctcctcctccagccccatcccggattcccatccaggatagtctttctcaggctcagacttctcagccaccctcaccgcaagtgttttcacctgggtcctctaactcacgaccaccatctccaatggatccatatgcaaaaatggttggtacccctcgaccacctcctgtgggccatagtttttccagaagaaattctgctgcaccagtggaaaactgtacacctttatcatcggtatctaggccccttcaaatgaatgagacaacagcaaataggccatcccctgtcagagatttatgttcttcttccacgacaaataatgacccctatgcaaaacctccagacacacctaggcctgtgatgacagatcaatttcccaaatccttgggcctatcccggtctcctgtagtttcagaacaaactgcaaaaggccctatagcagctggaaccagtgatcactttactaaaccatctcctagggcagatgtgtttcaaagacaaaggatacctgactcatatgcacgacccttgttgacacctgcacctcttgatagtggtcctggaccttttaagactccaatgcaacctcctccatcctctcaggatccttatggatcagtgtcacaggcatcaaggcgattgtctgttgacccttatgaaaggcctgctttgacaccaagacctatagataatttttctcataatcagtcaaatgatccatatagtcagcctccccttaccccacatccagcagtgaatgaatcttttgcccatccttcaagggctttttcccagcctggaaccatatcaaggccaacatctcaggacccatactcccaacccccaggaactccacgacctgttgtagattcttattcccaatcttcaggaacagctaggtccaatacagacccttactctcaacctcctggaactccccggcctactactgttgacccatatagtcagcagccccaaaccccaagaccatctacacaaactgacttgtttgttacacctgtaacaaatcagaggcattctgatccatatgctcatcctcctggaacaccaagacctggaatttctgtcccttactctcagccaccagcaacaccaaggccaaggatttcagagggttttactaggtcctcaatgacaagaccagtcctcatgccaaatcaggatcctttcctgcaagcagcacaaaaccgaggaccagctttacctggcccgttggtaaggccacctgatacatgttcccagacacctaggccccctggacctggtctttcagacacatttagccgtgtttccccatctgctgcccgtgatccctatgatcagtctccaatgactccaagatctcagtctgactcttttggaacaagtcaaactgcccatgatgttgctgatcagccaaggcctggatcagaggggagcttctgtgcatcttcaaactctccaatgcactcccaaggccagcagttctctggtgtctcccaacttcctggacctgtgccaacttcaggagtaactgatacacagaatactgtaaatatggcccaagcagatacagagaaattgagacagcggcagaagttacgtgaaatcattctccagcagcaacagcagaagaagattgcaggtcgacaggagaaggggtcacaggactcacccgcagtgcctcatccagggcctcttcaacactggcaaccagagaatgttaaccaggctttcaccagacccccacctccctatcctgggaacattaggtctcctgttgcccctcctttaggacctagatatgctgttttcccaaaagatcagcgtggaccctatcctcctgatgttgctagtatggggatgagacctcatggatttagatttggatttccaggaggtagtcatggtaccatgccgagtcaagagcgcttccttgtgcctcctcagcaaatacagggatctggagtttctccacagctaagaagatcagtatctgtagatatgcctaggcctttaaataactcacaaatgaataatccagttggacttcctcagcatttttcaccacagagcttgccagttcagcagcacaacatactgggccaagcatatattgaactgagacatagggctcctgacggaaggcaacggctgcctttcagtgctccacctggcagcgttgtagaggcatcttctaatctgagacatggaaacttcattccccggccagactttccgggccctagacacacagaccccatgcgacgacctccccagggtctacctaatcagctacctgtgcacccagatttggaacaagtgccaccatctcaacaagagcaaggtcattctgtccattcatcttctatggtcatgaggactctgaaccatccactaggtggtgaattttcagaagctcctttgtcaacatctgtaccgtctgaaacaacgtctgataatttacagataaccacccagccttctgatggtctagaggaaaaacttgattctgatgacccttctgtgaaggaactggatgttaaagaccttgagggggttgaagtcaaagacttagatgatgaagatcttgaaaacttaaatttagatacagaggatggcaaggtagttgaattggatactttagataatttggaaactaatgatcccaacctggatgacctcttaaggtcaggagagtttgatatcattgcatatacagatccagaacttgacatgggagataagaaaagcatgtttaatgaggaactagaccttccaattgatgataagttagataatcagtgtgtatctgttgaaccaaaaaaaaaggaacaagaaaacaaaactctggttctctctgataaacattcaccacagaaaaaatccactgttaccaatgaggtaaaaacggaagtactgtctccaaattctaaggtggaatccaaatgtgaaactgaaaaaaatgatgagaataaagataatgttgacactccttgctcacaggcttctgctcactcagacctaaatgatggagaaaagacttctttgcatccttgtgatccagatctatttgagaaaagaaccaatcgagaaactgctggccccagtgcaaatgtcattcaggcatccactcaactacctgctcaagatgtaataaactcttgtggcataactggatcaactccagttctctcaagtttacttgctaatgagaaatctgataattcagacattaggccatcggggtctccaccaccaccaactctgccggcctccccatccaatcatgtgtcaagtttgcctcctttcatagcaccgcctggccgtgttttggataatgccatgaattctaatgtgacagtagtctctagggtaaaccatgttttttctcagggtgtgcaggtaaacccagggctcattccaggtcaatcaacagttaaccacagtctggggacaggaaaacctgcaactcaaactgggcctcaaacaagtcagtctggtaccagtagcatgtctggaccccaacagctaatgattcctcaaacattagcacagcagaatagagagaggccccttcttctagaagaacagcctctacttctacaggatcttttggatcaagaaaggcaagaacagcagcagcaaagacagatgcaagccatgattcgtcagcgatcagaaccgttcttccctaatattgattttgatgcaattacagatcctataatgaaagccaaaatggtggcccttaaaggtataaataaagtgatggcacaaaacaatctgggcatgccaccaatggtgatgagcaggttcccttttatgggccaggtggtaactggaacacagaacagtgaaggacagaaccttggaccacaggccattcctcaggatggcagtataacacatcagatttctaggcctaatcctccaaattttggtccaggctttgtcaatgattcacagcgtaagcagtatgaagagtggctccaggagacccaacagctgcttcaaatgcagcagaagtatcttgaagaacaaattggtgctcacagaaaatctaagaaggccctttcagctaaacaacgtactgccaagaaagctgggcgtgaatttccagaggaagatgcagaacaactcaagcatgttactgaacagcaaagcatggttcagaaacagctagaacagattcgtaaacaacagaaagaacatgctgaattgattgaagattatcggatcaaacagcagcagcaatgtgcaatggccccacctaccatgatgcccagtgtccagccccagccacccctaattccaggtgccactccacccaccatgagccaacccacctttcccatggtgccacagcagcttcagcaccagcagcacacaacagttatttctggccatactagccctgttagaatgcccagtttacctggatggcaacccaacagtgctcctgcccacctgcccctcaatcctcctagaattcagcccccaattgcccagttaccaataaaaacttgtacaccagccccagggacagtctcaaatgcaaatccacagagtggaccaccacctcgggtagaatttgatgacaacaatccctttagtgaaagttttcaagaacgggaacgtaaggaacgtttacgagaacagcaagagagacaacggatccaactcatgcaggaggtagatagacaaagagctttgcagcagaggatggaaatggagcagcatggtatggtgggctctgagataagtagtagtaggacatctgtgtcccagattcccttctacagttccgacttaccttgtgattttatgcaacctctaggaccccttcagcagtctccacaacaccaacagcaaatggggcaggttttacagcagcagaatatacaacaaggatcaattaattcaccctccacccaaactttcatgcagactaatgagcgaaggcaggtaggccctccttcatttgttcctgattcaccatcaatccctgttggaagcccaaatttttcttctgtgaagcagggacatggaaatctttctgggaccagcttccagcagtccccagtgaggccttcttttacacctgctttaccagcagcacctccagtagctaatagcagtctcccatgtggccaagattctactataacccatggacacagttatccgggatcaacccaatcgctcattcagttgtattctgatataatcccagaggaaaaagggaaaaagaaaagaacaagaaagaagaaaagagatgatgatgcagaatccaccaaggctccatcaactccccattcagatataactgccccaccgactccaggcatctcagaaactacctctactcctgcagtgagcacacccagtgagcttcctcaacaagccgaccaagagtcggtggaaccagtcggcccatccactcccaatatggcagcaggccagctatgtacagaattagagaacaaactgcccaatagtgatttctcacaagcaactccaaatcaacagacgtatgcaaattcagaagtagacaagctctccatggaaacccctgccaaaacagaagagataaaactggaaaaggctgagacagagtcctgcccaggccaagaggagcctaaattggaggaacagaatggtagtaaggtagaaggaaacgctgtagcctgtcctgtctcctcagcacagagtcctccccattctgctggggcccctgctgccaaaggagactcagggaatgaacttctgaaacacttgttgaaaaataaaaagtcatcttctcttttgaatcaaaaacctgagggcagtatttgttcagaagatgactgtacaaaggataataaactagttgagaagcagaacccagctgaaggactgcaaactttgggggctcaaatgcaaggtggttttggatgtggcaaccagttgccaaaaacagatggaggaagtgaaaccaagaaacagcgaagcaaacggactcagaggacgggtgagaaagcagcacctcgctcaaagaaaaggaaaaaggacgaagaggagaaacaagctatgtactctagcactgacacgtttacccacttgaaacagcagctctctctgctccctctaatggaaccaatcattggagtgaactttgcgcactttcttccttatggcagtggccaatttaatagtgggaatcgacttctaggaacttttggcagtgctaccctggaaggggtttcggactactattctcagttgatctacaagcagaataatttaagtaatcctccaacaccccctgcctctcttcctcctacaccacctcctatggcttgtcagaagatggccaatggttttgcaacaactgaagaacttgctggaaaagccggagtgttagtgagccatgaagttaccaaaactctaggacctaaaccatttcagctgcccttcagaccccaggacgacttgttggcccgagctcttgctcagggccccaagacagttgatgtgccagcctccctcccaacaccacctcataacaatcaggaagaattaaggatacaggatcactgtggtgatcgagatactcctgacagttttgttccctcatcctctcctgagagtgtggttggggtagaagtgagcaggtatccagatctgtcattggtcaaggaggagcctccagaaccggtgccgtcccccatcattccaattcttcctagcactgctgggaaaagttcagaatcaagaaggaatgacatcaaaactgagccaggcactttatattttgcgtcaccttttggtccttccccaaatggtcccagatcaggtcttatatctgtagcaattactctgcatcctacagctgctgagaacattagcagtgttgtggctgcattttccgaccttcttcacgtccgaatccctaacagctatgaggttagcagtgctccagatgtcccatccatgggtttggtcagtagccacagaatcaacccgggtttggagtatcgacagcatttacttctccgtgggcctccgccaggatctgcaaaccctcccagattagtgagctcttaccggctgaagcagcctaatgtaccatttcctccaacaagcaatggtctttctggatataaggattctagtcatggtattgcagaaagcgcagcactcagaccacagtggtgttgtcattgtaaagtggttattcttggaagtggtgtgcggaaatctttcaaagatctgacccttttgaacaaggattcccgagaaagcaccaagagggtagagaaggacattgtcttctgtagtaataactgctttattctttattcatcaactgcacaagcgaaaaactcagaaaacaaggaatccattccttcattgccacaatcacctatgagagaaacgccttccaaagcatttcatcagtacagcaacaacatctccactttggatgtgcactgtctcccccagctcccagagaaagcttctccccctgcctcaccacccatcgccttccctcctgcttttgaagcagcccaagtcgaggccaagccagatgagctgaaggtgacagtcaagctgaagcctcggctaagagctgtccatggtgggtttgaagattgcaggccgctcaataaaaaatggagaggaatgaaatggaagaagtggagcattcatattgtaatccctaaggggacatttaaaccaccttgtgaggatgaaatagatgaatttctaaagaaattgggcacttcccttaaacctgatcctgtgcccaaagactatcggaaatgttgcttttgtcatgaagaaggtgatggattgacagatggaccagcaaggctactcaaccttgacttggatctgtgggtccacttgaactgcgctctgtggtccacggaggtctatgagactcaggctggtgccttaataaatgtggagctagctctgaggagaggcctacaaatgaaatgtgtcttctgtcacaagacgggtgccactagtggatgccacagatttcgatgcaccaacatttatcacttcacttgcgccattaaagcacaatgcatgttttttaaggacaaaactatgctttgccccatgcacaaaccaaagggaattcatgagcaagaattaagttactttgcagtcttcaggagggtctatgttcagcgtgatgaggtgcgacagattgctagcatcgtgcaacgaggagaacgggaccatacctttcgcgtgggtagcctcatcttccacacaattggtcagctgcttccacagcagatgcaagcattccattctcctaaagcactcttccctgtgggctatgaagccagccggctgtactggagcactcgctatgccaataggcgctgccgctacctgtgctccattgaggagaaggatgggcgcccagtgtttgtcatcaggattgtggaacaaggccatgaagacctggttctaagtgacatctcacctaaaggtgtctgggataagattttggagcctgtggcatgtgtgagaaaaaagtctgaaatgctccagcttttcccagcgtatttaaaaggagaggatctgtttggcctgaccgtctctgcagtggcacgcatagcggaatcacttcctggggttgaggcatgtgaaaattataccttccgatacggccgaaatcctctcatggaacttcctcttgccgttaaccccacaggttgtgcccgttctgaacctaaaatgagtgcccatgtcaagaggtttgtgttaaggcctcacaccttaaacagcaccagcacctcaaagtcatttcagagcacagtcactggagaactgaacgcaccttatagtaaacagtttgttcactccaagtcatcgcagtaccggaagatgaaaactgaatggaaatccaatgtgtatctggcacggtctcggattcaggggctgggcctgtatgctgctcgagacattgagaaacacaccatggtcattgagtacatcgggactatcattcgaaacgaagtagccaacaggaaagagaagctttatgagtctcagaaccgtggtgtgtacatgttccgcatggataacgaccatgtgattgacgcgacgctcacaggagggcccgcaaggtatatcaaccattcgtgtgcacctaattgtgtggctgaagtggtgacttttgagagaggacacaaaattatcatcagctccagtcggagaatccagaaaggagaagagctctgctatgactataagtttgactttgaagatgaccagcacaagattccgtgtcactgtggagctgtgaactgccggaagtggatgaactgaaatgcattccttgctagctcagcgggcggcttgtccctaggaagaggcgattcaacacaccattggaattttgcagacagaaagagatttttgttttctgttttatgactttttgaaaaagcttctgggagttctgatttcctcagtcctttaggttaaagcagcgccaggaggaagctgacagaagcagcgttcctgaagtggccgaggttaaacggaatcacagaatggtccagcacttttgcttttttttcttttccttttcttttttttttgtttgttttttgttttgtttttcccttgtgggtgggtttcattgttttggttttctagtctcactaaggagaaacttttactggggcaaagagccgatggctgccctgccccgggcaggggccttcctatgaatgtaagactgaaatcaccagcgagggggacagagagtgctggccacggccttattaaaaaggggcaggccctctaacttcaaaatgtttttaaataaagtagacaccactgaacaaggaatgtactgaaatgacttccttagggatagagctaagggataataacttgcactaaatacatttaaatacttgattccatgagtcagtttattgtagtttttgatttctgtaaaataagagaaacttttgtatttattattgaataagtgaatgaagctatttttaaataaagttagaagaaagccaagctgctgctgttacctgcagaactaacaaaccctgttactttgtacagatatgtaaatattttgagaaaaaatacagtataaaaatagttattgaccaaatgctaccaggctctgcagcagctcgggggcttataaaatgttcatagggatgttacaatataattttgtgttataaaatatgccattataattatgtaataaccaaaatttcaacctagagtgttgggggttttttggaaaccgcagtctattagtactcaatggttttatacaccttacttctgacagagcggggcgtatgctacgactacaacttttatagctgttttggtaatttaaactaattttttcatattatattgttgcatccctacttcttcagtcaggtttttttgtgcttacaatttgtgataactgtgaataactgcttaaaaatacacccaaatggaggctgaattttttcttcagcaaaagtagttttgattagaactttgtttcagccacagagaatcatgtaaacgtaataggatcatgtagcagaaacttaaatctaaccctttagccttctatttaacacaaaaatttgaaaaagttaaaaaaaaaaaggagatgtgattatgcttacagctgcaggactctggcaatagggtttttggaagatgtaattttaaaatgtgtttgtatgaactgtttgtttacatttctttaataaaaaaaacactgttttgtgtttgcttgtagaaacttaatcagcattttgaaccaggttagctttttattttgtacttaaaattctggtactgacacttcacaggctaagtataaaatgaagttttgtgtgcacaattcaagtggactgtaaactgttggtatattcagtgatgcagttctgaacttgtatatggcatgatgtatttttatcttacagaataaatcaattgtatatatttttctcttgataaatagctgtatgaaatttgtttcctgaatatttttcttctcttgtacaatatcctgacatcctaccagtatttgtcctaccgggtttttgttgttttctgttctgtataatagtatctaatgttggcaaaaattgaattttttgaagtatacagagtgttatgggttttggaatttgtggacacagatttagaagatcaccatttacaaataaaatattttacatcta

SEQ ID NO: 318250 - DNA, 15186 bp, Homo sapiens
acctgggagctgagatggatcgtttacagccaggtgaggaagtggagatagctgagctcactacagattataacaatgaaatggaagttgaaggccctgaagatcaaatggtattctcagagcaggcagctaataaagatgtcaacggtcaggagtccactcctggaattgttccagatgcggttcaagtccacactgaagagcaacagaagagtcatccctcagaaagtcttgacacagatagtcttcttattgctgtatcatcccaacatacagtgaatactgaattggaaaaacagatttctaatgaagttgatagtgaagacctgaaaatgtcttctgaagtgaagcatatttgtggcgaagatcaaattgaagataaaatggaagtgacagaaaacattgaagtcgttacacaccagatcactgtgcagcaagaacaactgcagttgttagaggaacctgaaacagtggtatccagagaagaatcaaggcctccaaaattagtcatggaatctgtcactcttccactagaaaccttagtgtccccacatgaggaaagtatttcattatgtcctgaggaacagttggttatagaaaggctacaaggagaaaaggaacagaaagaaaattctgaactttctactggattgatggactctgaaatgactcctacaattgagggttgtgtgaaagatgtttcataccaaggaggcaaatctataaagttatcatctgagacagagtcatcattttcatcatcagcagacataagcaaggcagatgtgtcttcctccccaacaccttcttcagacttgccttcgcatgacatgctgcataattacccttcagctcttagttcctctgctggaaacatcatgccaacaacttacatctcagtcactccaaaaattggcatgggtaaaccagctattactaagagaaaattttctcctggtagacctcggtccaaacagggggcttggagtacccataatacagtgagcccaccttcctggtccccagacatttcagaaggtcgggaaatttttaaacccaggcagcttcctggcagtgccatttggagcatcaaagtgggccgtgggtctggatttccaggaaagcggagacctcgaggtgcaggactgtcggggcgaggtggccgaggcaggtcaaagctgaaaagtggaatcggagctgttgtattacctggggtgtctactgcagatatttcatcaaataaggatgatgaagaaaactctatgcacaatacagttgtgttgttttctagcagtgacaagttcactttgaatcaggatatgtgtgtagtttgtggcagttttggccaaggagcagaaggaagattacttgcctgttctcagtgtggtcagtgttaccatccatactgtgtcagtattaagatcactaaagtggttcttagcaaaggttggaggtgtcttgagtgcactgtgtgtgaggcctgtgggaaggcaactgacccaggaagactcctgctgtgtgatgactgtgacataagttatcacacctactgcctagaccctccattgcagacagttcccaaaggaggctggaagtgcaaatggtgtgtttggtgcagacactgtggagcaacatctgcaggtctaagatgtgaatggcagaacaattacacacagtgcgctccttgtgcaagcttatcttcctgtccagtctgctatcgaaactatagagaagaagatcttattctgcaatgtagacaatgtgatagatggatgcatgcagtttgtcagaacttaaatactgaggaagaagtggaaaatgtagcagacattggttttgattgtagcatgtgcagaccctatatgcctgcgtctaatgtgccttcctcagactgctgtgaatcttcacttgtagcacaaattgtcacaaaagtaaaagagctagacccacccaagacttatacccaggatggtgtgtgtttgactgaatcagggatgactcagttacagagcctcacagttacagttccaagaagaaaacggtcaaaaccaaaattgaaattgaagattataaatcagaatagcgtggccgtccttcagacccctccagacatccaatcagagcattcaagggatggtgaaatggatgatagtcgagaaggagaacttatggattgtgatggaaaatcagaatctagtcctgagcgggaagctgtggatgatgaaactaagggagtggaaggaacagatggtgtcaaaaagagaaaaaggaaaccatacagaccaggtattggtggatttatggtgcggcaaagaagtcgaactgggcaagggaaaaccaaaagatctgtgatcagaaaagattcctcaggctctatttccgagcagttaccttgcagagatgatggctggagtgagcagttaccagatactttagttgatgaatctgtttctgttactgaaagcactgaaaaaataaagaagagataccgaaaaaggaaaaataagcttgaagaaactttccctgcctatttacaagaagctttctttggaaaagatcttctagatacaagtagacaaagcaagataagtttagataatctgtcagaagatggagctcagcttttatataaaacaaacatgaacacaggtttcttggatccttccttagatccactacttagttcatcctcggctccaacaaaatctggaactcacggtcctgctgatgacccattagctgatatttctgaagttttaaacacagatgatgacattcttggaataatttcagatgatctagcaaaatcagttgatcattcagatattggtcctgtcactgatgatccttcctctttgcctcagccaaatgtcaatcagagttcacgaccattaagtgaagaacagctagatgggatcctcagtcctgaactagacaaaatggtcacagatggagcaattcttggaaaattatataaaattccagagcttggcggaaaagatgttgaagacttatttacagctgtacttagtcctgcgaacactcagccaactccattgccacagcctcccccaccaacacagctgttgccaatacacaatcaggatgctttttcacggatgcctctcatgaatggccttattggatccagtcctcatctcccacataattctttgccacctggaagcggactgggaactttctctgcaattgcacaatcctcttatcctgatgccagggataaaaattcagcctttaatccaatggcaagtgatcctaacaactcttggacatcatcagctcccactgtggaaggagaaaatgacacaatgtcgaatgcccagagaagcacgcttaagtgggagaaagaggaggctctgggtgaaatggcaactgttgccccagttctctacaccaatattaatttccccaacttaaaggaagaattccctgattggactactagagtgaagcaaattgccaaattgtggagaaaagcaagctcacaagaaagagcaccatatgtgcaaaaagccagagataacagagctgctttacgcattaataaagtacagatgtcaaatgattccatgaaaaggcagcaacagcaagatagcattgatcccagctctcgtattgattcggagctttttaaagatcctttaaagcaaagagaatcagaacatgaacaggaatggaaatttagacagcaaatgcgtcagaaaagtaagcagcaagctaaaattgaagccacacagaaacttgaacaggtgaaaaatgagcagcagcagcagcaacaacagcaatttggttctcagcatcttctggtgcagtctggttcagatacaccaagtagtgggatacagagtcccttgacacctcagcctggcaatggaaatatgtctcctgcacagtcattccataaagaactgtttacaaaacagccacccagtacccctacgtctacatcttcagatgatgtgtttgtaaagccacaagctccacctcctcctccagccccatcccggattcccatccaggatagtctttctcaggctcagacttctcagccaccctcaccgcaagtgttttcacctgggtcctctaactcacgaccaccatctccaatggatccatatgcaaaaatggttggtacccctcgaccacctcctgtgggccatagtttttccagaagaaattctgctgcaccagtggaaaactgtacacctttatcatcggtatctaggccccttcaaatgaatgagacaacagcaaataggccatcccctgtcagagatttatgttcttcttccacgacaaataatgacccctatgcaaaacctccagacacacctaggcctgtgatgacagatcaatttcccaaatccttgggcctatcccggtctcctgtagtttcagaacaaactgcaaaaggccctatagcagctggaaccagtgatcactttactaaaccatctcctagggcagatgtgtttcaaagacaaaggatacctgactcatatgcacgacccttgttgacacctgcacctcttgatagtggtcctggaccttttaagactccaatgcaacctcctccatcctctcaggatccttatggatcagtgtcacaggcatcaaggcgattgtctgttgacccttatgaaaggcctgctttgacaccaagacctatagataatttttctcataatcagtcaaatgatccatatagtcagcctccccttaccccacatccagcagtgaatgaatcttttgcccatccttcaagggctttttcccagcctggaaccatatcaaggccaacatctcaggacccatactcccaacccccaggaactccacgacctgttgtagattcttattcccaatcttcaggaacagctaggtccaatacagacccttactctcaacctcctggaactccccggcctactactgttgacccatatagtcagcagccccaaaccccaagaccatctacacaaactgacttgtttgttacacctgtaacaaatcagaggcattctgatccatatgctcatcctcctggaacaccaagacctggaatttctgtcccttactctcagccaccagcaacaccaaggccaaggatttcagagggttttactaggtcctcaatgacaagaccagtcctcatgccaaatcaggatcctttcctgcaagcagcacaaaaccgaggaccagctttacctggcccgttggtaaggccacctgatacatgttcccagacacctaggccccctggacctggtctttcagacacatttagccgtgtttccccatctgctgcccgtgatccctatgatcagtctccaatgactccaagatctcagtctgactcttttggaacaagtcaaactgcccatgatgttgctgatcagccaaggcctggatcagaggggagcttctgtgcatcttcaaactctccaatgcactcccaaggccagcagttctctggtgtctcccaacttcctggacctgtgccaacttcaggagtaactgatacacagaatactgtaaatatggcccaagcagatacagagaaattgagacagcggcagaagttacgtgaaatcattctccagcagcaacagcagaagaagattgcaggtcgacaggagaaggggtcacaggactcacccgcagtgcctcatccagggcctcttcaacactggcaaccagagaatgttaaccaggctttcaccagacccccacctccctatcctgggaacattaggtctcctgttgcccctcctttaggacctagatatgctgttttcccaaaagatcagcgtggaccctatcctcctgatgttgctagtatggggatgagacctcatggatttagatttggatttccaggaggtagtcatggtaccatgccgagtcaagagcgcttccttgtgcctcctcagcaaatacagggatctggagtttctccacagctaagaagatcagtatctgtagatatgcctaggcctttaaataactcacaaatgaataatccagttggacttcctcagcatttttcaccacagagcttgccagttcagcagcacaacatactgggccaagcatatattgaactgagacatagggctcctgacggaaggcaacggctgcctttcagtgctccacctggcagcgttgtagaggcatcttctaatctgagacatggaaacttcattccccggccagactttccgggccctagacacacagaccccatgcgacgacctccccagggtctacctaatcagctacctgtgcacccagatttggaacaagtgccaccatctcaacaagagcaaggtcattctgtccattcatcttctatggtcatgaggactctgaaccatccactaggtggtgaattttcagaagctcctttgtcaacatctgtaccgtctgaaacaacgtctgataatttacagataaccacccagccttctgatggtctagaggaaaaacttgattctgatgacccttctgtgaaggaactggatgttaaagaccttgagggggttgaagtcaaagacttagatgatgaagatcttgaaaacttaaatttagatacagaggatggcaaggtagttgaattggatactttagataatttggaaactaatgatcccaacctggatgacctcttaaggtcaggagagtttgatatcattgcatatacagatccagaacttgacatgggagataagaaaagcatgtttaatgaggaactagaccttccaattgatgataagttagataatcagtgtgtatctgttgaaccaaaaaaaaaggaacaagaaaacaaaactctggttctctctgataaacattcaccacagaaaaaatccactgttaccaatgaggtaaaaacggaagtactgtctccaaattctaaggtggaatccaaatgtgaaactgaaaaaaatgatgagaataaagataatgttgacactccttgctcacaggcttctgctcactcagacctaaatgatggagaaaagacttctttgcatccttgtgatccagatctatttgagaaaagaaccaatcgagaaactgctggccccagtgcaaatgtcattcaggcatccactcaactacctgctcaagatgtaataaactcttgtggcataactggatcaactccagttctctcaagtttacttgctaatgagaaatctgataattcagacattaggccatcggggtctccaccaccaccaactctgccggcctccccatccaatcatgtgtcaagtttgcctcctttcatagcaccgcctggccgtgttttggataatgccatgaattctaatgtgacagtagtctctagggtaaaccatgttttttctcagggtgtgcaggtaaacccagggctcattccaggtcaatcaacagttaaccacagtctggggacaggaaaacctgcaactcaaactgggcctcaaacaagtcagtctggtaccagtagcatgtctggaccccaacagctaatgattcctcaaacattagcacagcagaatagagagaggccccttcttctagaagaacagcctctacttctacaggatcttttggatcaagaaaggcaagaacagcagcagcaaagacagatgcaagccatgattcgtcagcgatcagaaccgttcttccctaatattgattttgatgcaattacagatcctataatgaaagccaaaatggtggcccttaaaggtataaataaagtgatggcacaaaacaatctgggcatgccaccaatggtgatgagcaggttcccttttatgggccaggtggtaactggaacacagaacagtgaaggacagaaccttggaccacaggccattcctcaggatggcagtataacacatcagatttctaggcctaatcctccaaattttggtccaggctttgtcaatgattcacagcgtaagcagtatgaagagtggctccaggagacccaacagctgcttcaaatgcagcagaagtatcttgaagaacaaattggtgctcacagaaaatctaagaaggccctttcagctaaacaacgtactgccaagaaagctgggcgtgaatttccagaggaagatgcagaacaactcaagcatgttactgaacagcaaagcatggttcagaaacagctagaacagattcgtaaacaacagaaagaacatgctgaattgattgaagattatcggatcaaacagcagcagcaatgtgcaatggccccacctaccatgatgcccagtgtccagccccagccacccctaattccaggtgccactccacccaccatgagccaacccacctttcccatggtgccacagcagcttcagcaccagcagcacacaacagttatttctggccatactagccctgttagaatgcccagtttacctggatggcaacccaacagtgctcctgcccacctgcccctcaatcctcctagaattcagcccccaattgcccagttaccaataaaaacttgtacaccagccccagggacagtctcaaatgcaaatccacagagtggaccaccacctcgggtagaatttgatgacaacaatccctttagtgaaagttttcaagaacgggaacgtaaggaacgtttacgagaacagcaagagagacaacggatccaactcatgcaggaggtagatagacaaagagctttgcagcagaggatggaaatggagcagcatggtatggtgggctctgagataagtagtagtaggacatctgtgtcccagattcccttctacagttccgacttaccttgtgattttatgcaacctctaggaccccttcagcagtctccacaacaccaacagcaaatggggcaggttttacagcagcagaatatacaacaaggatcaattaattcaccctccacccaaactttcatgcagactaatgagcgaaggcaggtaggccctccttcatttgttcctgattcaccatcaatccctgttggaagcccaaatttttcttctgtgaagcagggacatggaaatctttctgggaccagcttccagcagtccccagtgaggccttcttttacacctgctttaccagcagcacctccagtagctaatagcagtctcccatgtggccaagattctactataacccatggacacagttatccgggatcaacccaatcgctcattcagttgtattctgatataatcccagaggaaaaagggaaaaagaaaagaacaagaaagaagaaaagagatgatgatgcagaatccaccaaggctccatcaactccccattcagatataactgccccaccgactccaggcatctcagaaactacctctactcctgcagtgagcacacccagtgagcttcctcaacaagccgaccaagagtcggtggaaccagtcggcccatccactcccaatatggcagcaggccagctatgtacagaattagagaacaaactgcccaatagtgatttctcacaagcaactccaaatcaacagacgtatgcaaattcagaagtagacaagctctccatggaaacccctgccaaaacagaagagataaaactggaaaaggctgagacagagtcctgcccaggccaagaggagcctaaattggaggaacagaatggtagtaaggtagaaggaaacgctgtagcctgtcctgtctcctcagcacagagtcctccccattctgctggggcccctgctgccaaaggagactcagggaatgaacttctgaaacacttgttgaaaaataaaaagtcatcttctcttttgaatcaaaaacctgagggcagtatttgttcagaagatgactgtacaaaggataataaactagttgagaagcagaacccagctgaaggactgcaaactttgggggctcaaatgcaaggtggttttggatgtggcaaccagttgccaaaaacagatggaggaagtgaaaccaagaaacagcgaagcaaacggactcagaggacgggtgagaaagcagcacctcgctcaaagaaaaggaaaaaggacgaagaggagaaacaagctatgtactctagcactgacacgtttacccacttgaaacagcagctctctctgctccctctaatggaaccaatcattggagtgaactttgcgcactttcttccttatggcagtggccaatttaatagtgggaatcgacttctaggaacttttggcagtgctaccctggaaggggtttcggactactattctcagttgatctacaagcagaataatttaagtaatcctccaacaccccctgcctctcttcctcctacaccacctcctatggcttgtcagaagatggccaatggttttgcaacaactgaagaacttgctggaaaagccggagtgttagtgagccatgaagttaccaaaactctaggacctaaaccatttcagctgcccttcagaccccaggacgacttgttggcccgagctcttgctcagggccccaagacagttgatgtgccagcctccctcccaacaccacctcataacaatcaggaagaattaaggatacaggatcactgtggtgatcgagatactcctgacagttttgttccctcatcctctcctgagagtgtggttggggtagaagtgagcaggtatccagatctgtcattggtcaaggaggagcctccagaaccggtgccgtcccccatcattccaattcttcctagcactgctgggaaaagttcagaatcaagaaggaatgacatcaaaactgagccaggcactttatattttgcgtcaccttttggtccttccccaaatggtcccagatcaggtcttatatctgtagcaattactctgcatcctacagctgctgagaacattagcagtgttgtggctgcattttccgaccttcttcacgtccgaatccctaacagctatgaggttagcagtgctccagatgtcccatccatgggtttggtcagtagccacagaatcaacccgggtttggagtatcgacagcatttacttctccgtgggcctccgccaggatctgcaaaccctcccagattagtgagctcttaccggctgaagcagcctaatgtaccatttcctccaacaagcaatggtctttctggatataaggattctagtcatggtattgcagaaagcgcagcactcagaccacagtggtgttgtcattgtaaagtggttattcttggaagtggtgtgcggaaatctttcaaagatctgacccttttgaacaaggattcccgagaaagcaccaagagggtagagaaggacattgtcttctgtagtaataactgctttattctttattcatcaactgcacaagcgaaaaactcagaaaacaaggaatccattccttcattgccacaatcacctatgagagaaacgccttccaaagcatttcatcagtacagcaacaacatctccactttggatgtgcactgtctcccccagctcccagagaaagcttctccccctgcctcaccacccatcgccttccctcctgcttttgaagcagcccaagtcgaggccaagccagatgagctgaaggtgacagtcaagctgaagcctcggctaagagctgtccatggtgggtttgaagattgcaggccgctcaataaaaaatggagaggaatgaaatggaagaagtggagcattcatattgtaatccctaaggggacatttaaaccaccttgtgaggatgaaatagatgaatttctaaagaaattgggcacttcccttaaacctgatcctgtgcccaaagactatcggaaatgttgcttttgtcatgaagaaggtgatggattgacagatggaccagcaaggctactcaaccttgacttggatctgtgggtccacttgaactgcgctctgtggtccacggaggtctatgagactcaggctggtgccttaataaatgtggagctagctctgaggagaggcctacaaatgaaatgtgtcttctgtcacaagacgggtgccactagtggatgccacagatttcgatgcaccaacatttatcacttcacttgcgccattaaagcacaatgcatgttttttaaggacaaaactatgctttgccccatgcacaaaccaaagggaattcatgagcaagaattaagttactttgcagtcttcaggagggtctatgttcagcgtgatgaggtgcgacagattgctagcatcgtgcaacgaggagaacgggaccatacctttcgcgtgggtagcctcatcttccacacaattggtcagctgcttccacagcagatgcaagcattccattctcctaaagcactcttccctgtgggctatgaagccagccggctgtactggagcactcgctatgccaataggcgctgccgctacctgtgctccattgaggagaaggatgggcgcccagtgtttgtcatcaggattgtggaacaaggccatgaagacctggttctaagtgacatctcacctaaaggtgtctgggataagattttggagcctgtggcatgtgtgagaaaaaagtctgaaatgctccagcttttcccagcgtatttaaaaggagaggatctgtttggcctgaccgtctctgcagtggcacgcatagcggaatcacttcctggggttgaggcatgtgaaaattataccttccgatacggccgaaatcctctcatggaacttcctcttgccgttaaccccacaggttgtgcccgttctgaacctcaaagtcatttcagagcacagtcactggagaactgaacgcaccttatagtaaacagtttgttcactccaagtcatcgcagtaccggaagatgaaaactgaatggaaatccaatgtgtatctggcacggtctcggattcaggggctgggcctgtatgctgctcgagacattgagaaacacaccatggtcattgagtacatcgggactatcattcgaaacgaagtagccaacaggaaagagaagctttatgagtctcagaaccgtggtgtgtacatgttccgcatggataacgaccatgtgattgacgcgacgctcacaggagggcccgcaaggtatatcaaccattcgtgtgcacctaattgtgtggctgaagtggtgacttttgagagaggacacaaaattatcatcagctccagtcggagaatccagaaaggagaagagctctgctatgactataagtttgactttgaagatgaccagcacaagattccgtgtcactgtggagctgtgaactgccggaagtggatgaactgaaatgcattccttgctagctcagcgggcggcttgtccctaggaagaggcgattcaacacaccattggaattttgcagacagaaagagatttttgttttctgttttatgactttttgaaaaagcttctgggagttctgatttcctcagtcctttaggttaaagcagcgccaggaggaagctgacagaagcagcgttcctgaagtggccgaggttaaacggaatcacagaatggtccagcacttttgcttttttttcttttccttttcttttttttttgtttgttttttgttttgtttttcccttgtgggtgggtttcattgttttggttttctagtctcactaaggagaaacttttactggggcaaagagccgatggctgccctgccccgggcaggggccttcctatgaatgtaagactgaaatcaccagcgagggggacagagagtgctggccacggccttattaaaaaggggcaggccctctaacttcaaaatgtttttaaataaagtagacaccactgaacaaggaatgtactgaaatgacttccttagggatagagctaagggataataacttgcactaaatacatttaaatacttgattccatgagtcagtttattgtagtttttgatttctgtaaaataagagaaacttttgtatttattattgaataagtgaatgaagctatttttaaataaagttagaagaaagccaagctgctgctgttacctgcagaactaacaaaccctgttactttgtacagatatgtaaatattttgagaaaaaatacagtataaaaatagttattgaccaaatgctaccaggctctgcagcagctcgggggcttataaaatgttcatagggatgttacaatataattttgtgttataaaatatgccattataattatgtaataaccaaaatttcaacctagagtgttgggggttttttggaaaccgcagtctattagtactcaatggttttatacaccttacttctgacagagcggggcgtatgctacgactacaacttttatagctgttttggtaatttaaactaattttttcatattatattgttgcatccctacttcttcagtcaggtttttttgtgcttacaatttgtgataactgtgaataactgcttaaaaatacacccaaatggaggctgaattttttcttcagcaaaagtagttttgattagaactttgtttcagccacagagaatcatgtaaacgtaataggatcatgtagcagaaacttaaatctaaccctttagccttctatttaacacaaaaatttgaaaaagttaaaaaaaaaaaggagatgtgattatgcttacagctgcaggactctggcaatagggtttttggaagatgtaattttaaaatgtgtttgtatgaactgtttgtttacatttctttaataaaaaaaacactgttttgtgtttgcttgtagaaacttaatcagcattttgaaccaggttagctttttattttgtacttaaaattctggtactgacacttcacaggctaagtataaaatgaagttttgtgtgcacaattcaagtggactgtaaactgttggtatattcagtgatgcagttctgaacttgtatatggcatgatgtatttttatcttacagaataaatcaattgtatatatttttctcttgataaatagctgtatgaaatttgtttcctgaatatttttcttctcttgtacaatatcctgacatcctaccagtatttgtcctaccgggtttttgttgttttctgttctgtataatagtatctaatgttggcaaaaattgaattttttgaagtatacagagtgttatgggttttggaatttgtggacacagatttagaagatcaccatttacaaataaaatattttacatcta

SEQ ID NO: 318251 - DNA, 9902 bp, Homo sapiens
aggagcttgtgctcgtaaggggggggggagcgagcagataaattttctgatgcccatgatgttgctgatcagccaaggcctggatcagaggggagcttctgtgcatcttcaaactctccaatgcactcccaaggccagcagttctctggtgtctcccaacttcctggacctgtgccaacttcaggagtaactgatacacagaatactgtaaatatggcccaagcagatacagagaaattgagacagcggcagaagttacgtgaaatcattctccagcagcaacagcagaagaagattgcaggtcgacaggagaaggggtcacaggactcacccgcagtgcctcatccagggcctcttcaacactggcaaccagagaatgttaaccaggctttcaccagacccccacctccctatcctgggaacattaggtctcctgttgcccctcctttaggacctagatatgctgttttcccaaaagatcagcgtggaccctatcctcctgatgttgctagtatggggatgagacctcatggatttagatttggatttccaggaggtagtcatggtaccatgccgagtcaagagcgcttccttgtgcctcctcagcaaatacagggatctggagtttctccacagctaagaagatcagtatctgtagatatgcctaggcctttaaataactcacaaatgaataatccagttggacttcctcagcatttttcaccacagagcttgccagttcagcagcacaacatactgggccaagcatatattgaactgagacatagggctcctgacggaaggcaacggctgcctttcagtgctccacctggcagcgttgtagaggcatcttctaatctgagacatggaaacttcattccccggccagactttccgggccctagacacacagaccccatgcgacgacctccccagggtctacctaatcagctacctgtgcacccagatttggaacaagtgccaccatctcaacaagagcaaggtcattctgtccattcatcttctatggtcatgaggactctgaaccatccactaggtggtgaattttcagaagctcctttgtcaacatctgtaccgtctgaaacaacgtctgataatttacagataaccacccagccttctgatggtctagaggaaaaacttgattctgatgacccttctgtgaaggaactggatgttaaagaccttgagggggttgaagtcaaagacttagatgatgaagatcttgaaaacttaaatttagatacagaggatggcaaggtagttgaattggatactttagataatttggaaactaatgatcccaacctggatgacctcttaaggtcaggagagtttgatatcattgcatatacagatccagaacttgacatgggagataagaaaagcatgtttaatgaggaactagaccttccaattgatgataagttagataatcagtgtgtatctgttgaaccaaaaaaaaaggaacaagaaaacaaaactctggttctctctgataaacattcaccacagaaaaaatccactgttaccaatgaggtaaaaacggaagtactgtctccaaattctaaggtggaatccaaatgtgaaactgaaaaaaatgatgagaataaagataatgttgacactccttgctcacaggcttctgctcactcagacctaaatgatggagaaaagacttctttgcatccttgtgatccagatctatttgagaaaagaaccaatcgagaaactgctggccccagtgcaaatgtcattcaggcatccactcaactacctgctcaagatgtaataaactcttgtggcataactggatcaactccagttctctcaagtttacttgctaatgagaaatctgataattcagacattaggccatcggggtctccaccaccaccaactctgccggcctccccatccaatcatgtgtcaagtttgcctcctttcatagcaccgcctggccgtgttttggataatgccatgaattctaatgtgacagtagtctctagggtaaaccatgttttttctcagggtgtgcaggtaaacccagggctcattccaggtcaatcaacagttaaccacagtctggggacaggaaaacctgcaactcaaactgggcctcaaacaagtcagtctggtaccagtagcatgtctggaccccaacagctaatgattcctcaaacattagcacagcagaatagagagaggccccttcttctagaagaacagcctctacttctacaggatcttttggatcaagaaaggcaagaacagcagcagcaaagacagatgcaagccatgattcgtcagcgatcagaaccgttcttccctaatattgattttgatgcaattacagatcctataatgaaagccaaaatggtggcccttaaaggtataaataaagtgatggcacaaaacaatctgggcatgccaccaatggtgatgagcaggttcccttttatgggccaggtggtaactggaacacagaacagtgaaggacagaaccttggaccacaggccattcctcaggatggcagtataacacatcagatttctaggcctaatcctccaaattttggtccaggctttgtcaatgattcacagcgtaagcagtatgaagagtggctccaggagacccaacagctgcttcaaatgcagcagaagtatcttgaagaacaaattggtgctcacagaaaatctaagaaggccctttcagctaaacaacgtactgccaagaaagctgggcgtgaatttccagaggaagatgcagaacaactcaagcatgttactgaacagcaaagcatggttcagaaacagctagaacagattcgtaaacaacagaaagaacatgctgaattgattgaagattatcggatcaaacagcagcagcaatgtgcaatggccccacctaccatgatgcccagtgtccagccccagccacccctaattccaggtgccactccacccaccatgagccaacccacctttcccatggtgccacagcagcttcagcaccagcagcacacaacagttatttctggccatactagccctgttagaatgcccagtttacctggatggcaacccaacagtgctcctgcccacctgcccctcaatcctcctagaattcagcccccaattgcccagttaccaataaaaacttgtacaccagccccagggacagtctcaaatgcaaatccacagagtggaccaccacctcgggtagaatttgatgacaacaatccctttagtgaaagttttcaagaacgggaacgtaaggaacgtttacgagaacagcaagagagacaacggatccaactcatgcaggaggtagatagacaaagagctttgcagcagaggatggaaatggagcagcatggtatggtgggctctgagataagtagtagtaggacatctgtgtcccagattcccttctacagttccgacttaccttgtgattttatgcaacctctaggaccccttcagcagtctccacaacaccaacagcaaatggggcaggttttacagcagcagaatatacaacaaggatcaattaattcaccctccacccaaactttcatgcagactaatgagcgaaggcaggtaggccctccttcatttgttcctgattcaccatcaatccctgttggaagcccaaatttttcttctgtgaagcagggacatggaaatctttctgggaccagcttccagcagtccccagtgaggccttcttttacacctgctttaccagcagcacctccagtagctaatagcagtctcccatgtggccaagattctactataacccatggacacagttatccgggatcaacccaatcgctcattcagttgtattctgatataatcccagaggaaaaagggaaaaagaaaagaacaagaaagaagaaaagagatgatgatgcagaatccaccaaggctccatcaactccccattcagatataactgccccaccgactccaggcatctcagaaactacctctactcctgcagtgagcacacccagtgagcttcctcaacaagccgaccaagagtcggtggaaccagtcggcccatccactcccaatatggcagcaggccagctatgtacagaattagagaacaaactgcccaatagtgatttctcacaagcaactccaaatcaacagacgtatgcaaattcagaagtagacaagctctccatggaaacccctgccaaaacagaagagataaaactggaaaaggctgagacagagtcctgcccaggccaagaggagcctaaattggaggaacagaatggtagtaaggtagaaggaaacgctgtagcctgtcctgtctcctcagcacagagtcctccccattctgctggggcccctgctgccaaaggagactcagggaatgaacttctgaaacacttgttgaaaaataaaaagtcatcttctcttttgaatcaaaaacctgagggcagtatttgttcagaagatgactgtacaaaggataataaactagttgagaagcagaacccagctgaaggactgcaaactttgggggctcaaatgcaaggtggttttggatgtggcaaccagttgccaaaaacagatggaggaagtgaaaccaagaaacagcgaagcaaacggactcagaggacgggtgagaaagcagcacctcgctcaaagaaaaggaaaaaggacgaagaggagaaacaagctatgtactctagcactgacacgtttacccacttgaaacagcagctctctctgctccctctaatggaaccaatcattggagtgaactttgcgcactttcttccttatggcagtggccaatttaatagtgggaatcgacttctaggaacttttggcagtgctaccctggaaggggtttcggactactattctcagttgatctacaagcagaataatttaagtaatcctccaacaccccctgcctctcttcctcctacaccacctcctatggcttgtcagaagatggccaatggttttgcaacaactgaagaacttgctggaaaagccggagtgttagtgagccatgaagttaccaaaactctaggacctaaaccatttcagctgcccttcagaccccaggacgacttgttggcccgagctcttgctcagggccccaagacagttgatgtgccagcctccctcccaacaccacctcataacaatcaggaagaattaaggatacaggatcactgtggtgatcgagatactcctgacagttttgttccctcatcctctcctgagagtgtggttggggtagaagtgagcaggtatccagatctgtcattggtcaaggaggagcctccagaaccggtgccgtcccccatcattccaattcttcctagcactgctgggaaaagttcagaatcaagaaggaatgacatcaaaactgagccaggcactttatattttgcgtcaccttttggtccttccccaaatggtcccagatcaggtcttatatctgtagcaattactctgcatcctacagctgctgagaacattagcagtgttgtggctgcattttccgaccttcttcacgtccgaatccctaacagctatgaggttagcagtgctccagatgtcccatccatgggtttggtcagtagccacagaatcaacccgggtttggagtatcgacagcatttacttctccgtgggcctccgccaggatctgcaaaccctcccagattagtgagctcttaccggctgaagcagcctaatgtaccatttcctccaacaagcaatggtctttctggatataaggattctagtcatggtattgcagaaagcgcagcactcagaccacagtggtgttgtcattgtaaagtggttattcttggaagtggtgtgcggaaatctttcaaagatctgacccttttgaacaaggattcccgagaaagcaccaagagggtagagaaggacattgtcttctgtagtaataactgctttattctttattcatcaactgcacaagcgaaaaactcagaaaacaaggaatccattccttcattgccacaatcacctatgagagaaacgccttccaaagcatttcatcagtacagcaacaacatctccactttggatgtgcactgtctcccccagctcccagagaaagcttctccccctgcctcaccacccatcgccttccctcctgcttttgaagcagcccaagtcgaggccaagccagatgagctgaaggtgacagtcaagctgaagcctcggctaagagctgtccatggtgggtttgaagattgcaggccgctcaataaaaaatggagaggaatgaaatggaagaagtggagcattcatattgtaatccctaaggggacatttaaaccaccttgtgaggatgaaatagatgaatttctaaagaaattgggcacttcccttaaacctgatcctgtgcccaaagactatcggaaatgttgcttttgtcatgaagaaggtgatggattgacagatggaccagcaaggctactcaaccttgacttggatctgtgggtccacttgaactgcgctctgtggtccacggaggtctatgagactcaggctggtgccttaataaatgtggagctagctctgaggagaggcctacaaatgaaatgtgtcttctgtcacaagacgggtgccactagtggatgccacagatttcgatgcaccaacatttatcacttcacttgcgccattaaagcacaatgcatgttttttaaggacaaaactatgctttgccccatgcacaaaccaaagggaattcatgagcaagaattaagttactttgcagtcttcaggagggtctatgttcagcgtgatgaggtgcgacagattgctagcatcgtgcaacgaggagaacgggaccatacctttcgcgtgggtagcctcatcttccacacaattggtcagctgcttccacagcagatgcaagcattccattctcctaaagcactcttccctgtgggctatgaagccagccggctgtactggagcactcgctatgccaataggcgctgccgctacctgtgctccattgaggagaaggatgggcgcccagtgtttgtcatcaggattgtggaacaaggccatgaagacctggttctaagtgacatctcacctaaaggtgtctgggataagattttggagcctgtggcatgtgtgagaaaaaagtctgaaatgctccagcttttcccagcgtatttaaaaggagaggatctgtttggcctgaccgtctctgcagtggcacgcatagcggaatcacttcctggggttgaggcatgtgaaaattataccttccgatacggccgaaatcctctcatggaacttcctcttgccgttaaccccacaggttgtgcccgttctgaacctaaaatgagtgcccatgtcaagaggtttgtgttaaggcctcacaccttaaacagcaccagcacctcaaagtcatttcagagcacagtcactggagaactgaacgcaccttatagtaaacagtttgttcactccaagtcatcgcagtaccggaagatgaaaactgaatggaaatccaatgtgtatctggcacggtctcggattcaggggctgggcctgtatgctgctcgagacattgagaaacacaccatggtcattgagtacatcgggactatcattcgaaacgaagtagccaacaggaaagagaagctttatgagtctcagaaccgtggtgtgtacatgttccgcatggataacgaccatgtgattgacgcgacgctcacaggagggcccgcaaggtatatcaaccattcgtgtgcacctaattgtgtggctgaagtggtgacttttgagagaggacacaaaattatcatcagctccagtcggagaatccagaaaggagaagagctctgctatgactataagtttgactttgaagatgaccagcacaagattccgtgtcactgtggagctgtgaactgccggaagtggatgaactgaaatgcattccttgctagctcagcgggcggcttgtccctaggaagaggcgattcaacacaccattggaattttgcagacagaaagagatttttgttttctgttttatgactttttgaaaaagcttctgggagttctgatttcctcagtcctttaggttaaagcagcgccaggaggaagctgacagaagcagcgttcctgaagtggccgaggttaaacggaatcacagaatggtccagcacttttgcttttttttcttttccttttcttttttttttgtttgttttttgttttgtttttcccttgtgggtgggtttcattgttttggttttctagtctcactaaggagaaacttttactggggcaaagagccgatggctgccctgccccgggcaggggccttcctatgaatgtaagactgaaatcaccagcgagggggacagagagtgctggccacggccttattaaaaaggggcaggccctctaacttcaaaatgtttttaaataaagtagacaccactgaacaaggaatgtactgaaatgacttccttagggatagagctaagggataataacttgcactaaatacatttaaatacttgattccatgagtcagtttattgtagtttttgatttctgtaaaataagagaaacttttgtatttattattgaataagtgaatgaagctatttttaaataaagttagaagaaagccaagctgctgctgttacctgcagaactaacaaaccctgttactttgtacagatatgtaaatattttgagaaaaaatacagtataaaaatagttattgaccaaatgctaccaggctctgcagcagctcgggggcttataaaatgttcatagggatgttacaatataattttgtgttataaaatatgccattataattatgtaataaccaaaatttcaacctagagtgttgggggttttttggaaaccgcagtctattagtactcaatggttttatacaccttacttctgacagagcggggcgtatgctacgactacaacttttatagctgttttggtaatttaaactaattttttcatattatattgttgcatccctacttcttcagtcaggtttttttgtgcttacaatttgtgataactgtgaataactgcttaaaaatacacccaaatggaggctgaattttttcttcagcaaaagtagttttgattagaactttgtttcagccacagagaatcatgtaaacgtaataggatcatgtagcagaaacttaaatctaaccctttagccttctatttaacacaaaaatttgaaaaagttaaaaaaaaaaaggagatgtgattatgcttacagctgcaggactctggcaatagggtttttggaagatgtaattttaaaatgtgtttgtatgaactgtttgtttacatttctttaataaaaaaaacactgttttgtgtttgcttgtagaaacttaatcagcattttgaaccaggttagctttttattttgtacttaaaattctggtactgacacttcacaggctaagtataaaatgaagttttgtgtgcacaattcaagtggactgtaaactgttggtatattcagtgatgcagttctgaacttgtatatggcatgatgtatttttatcttacagaataaatcaattgtatatatttttctcttgataaatagctgtatgaaatttgtttcctgaatatttttcttctcttgtacaatatcctgacatcctaccagtatttgtcctaccgggtttttgttgttttctgttctgtataatagtatctaatgttggcaaaaattgaattttttgaagtatacagagtgttatgggttttggaatttgtggacacagatttagaagatcaccatttacaaataaaatattttacatcta

SEQ ID NO: 318252 - DNA, 13259 bp, Homo sapiens
acctgggagctgagatggatcgtttacagccaggtgaggaagtggagatagctgagctcactacagattataacaatgaaatggaagttgaaggccctgaagatcaaatggtattctcagagcaggcagctaataaagatgtcaacggtcaggagtccactcctggaattgttccagatgcggttcaagtccacactgaagagcaacagaagagtcatccctcagaaagtcttgacacagatagtcttcttattgctgtatcatcccaacatacagtgaatactgaattggaaaaacagatttctaatgaagttgatagtgaagacctgaaaatgtcttctgaagtgaagcatatttgtggcgaagatcaaattgaagataaaatggaagtgacagaaaacattgaagtcgttacacaccagatcactgtgcagcaagaacaactgcagttgttagaggaacctgaaacagtggtatccagagaagaatcaaggcctccaaaattagtcatggaatctgtcactcttccactagaaaccttagtgtccccacatgaggaaagtatttcattatgtcctgaggaacagttggttatagaaaggctacaaggagaaaaggaacagaaagaaaattctgaactttctactggattgatggactctgaaatgactcctacaattgagggttgtgtgaaagatgtttcataccaaggaggcaaatctataaagttatcatctgagacagagtcatcattttcatcatcagcagacataagcaaggcagatgtgtcttcctccccaacaccttcttcagacttgccttcgcatgacatgctgcataattacccttcagctcttagttcctctgctggaaacatcatgccaacaacttacatctcagtcactccaaaaattggcatgggtaaaccagctattactaagagaaaattttctcctggtagacctcggtccaaacagggggcttggagtacccataatacagtgagcccaccttcctggtccccagacatttcagaaggtcgggaaatttttaaacccaggcagcttcctggcagtgccatttggagcatcaaagtgggccgtgggtctggatttccaggaaagcggagacctcgaggtgcaggactgtcggggcgaggtggccgaggcaggtcaaagctgaaaagtggaatcggagctgttgtattacctggggtgtctactgcagatatttcatcaaataaggatgatgaagaaaactctatgcacaatacagttgtgttgttttctagcagtgacaagttcactttgaatcaggatatgtgtgtagtttgtggcagttttggccaaggagcagaaggaagattacttgcctgttctcagtgtggtcagtgttaccatccatactgtgtcagtattaagatcactaaagtggttcttagcaaaggttggaggtgtcttgagtgcactgtgtgtgaggcctgtgggaaggcaactgacccaggaagactcctgctgtgtgatgactgtgacataagttatcacacctactgcctagaccctccattgcagacagttcccaaaggaggctggaagtgcaaatggtgtgtttggtgcagacactgtggagcaacatctgcaggtctaagatgtgaatggcagaacaattacacacagtgcgctccttgtgcaagcttatcttcctgtccagtctgctatcgaaactatagagaagaagatcttattctgcaatgtagacaatgtgatagatggatgcatgcagtttgtcagaacttaaatactgaggaagaagtggaaaatgtagcagacattggttttgattgtagcatgtgcagaccctatatgcctgcgtctaatgtgccttcctcagactgctgtgaatcttcacttgtagcacaaattgtcacaaaagtaaaagagctagacccacccaagacttatacccaggatggtgtgtgtttgactgaatcagggatgactcagttacagagcctcacagttacagttccaagaagaaaacggtcaaaaccaaaattgaaattgaagattataaatcagaatagcgtggccgtccttcagacccctccagacatccaatcagagcattcaagggatggtgaaatggatgatagtcgagaaggagaacttatggattgtgatggaaaatcagaatctagtcctgagcgggaagctgtggatgatgaaactaagggagtggaaggaacagatggtgtcaaaaagagaaaaaggaaaccatacagaccaggtattggtggatttatggtgcggcaaagaagtcgaactgggcaagggaaaaccaaaagatctgtgatcagaaaagattcctcaggctctatttccgagcagttaccttgcagagatgatggctggagtgagcagttaccagatactttagttgatgaatctgtttctgttactgaaagcactgaaaaaataaagaagagataccgaaaaaggaaaaataagcttgaagaaactttccctgcctatttacaagaagctttctttggaaaagatcttctagatacaagtagacaaagcaagataagtttagataatctgtcagaagatggagctcagcttttatataaaacaaacatgaacacaggtttcttggatccttccttagatccactacttagttcatcctcggctccaacaaaatctggaactcacggtcctgctgatgacccattagctgatatttctgaagttttaaacacagatgatgacattcttggaataatttcagatgatctagcaaaatcagttgatcattcagatattggtcctgtcactgatgatccttcctctttgcctcagccaaatgtcaatcagagttcacgaccattaagtgaagaacagctagatgggatcctcagtcctgaactagacaaaatggtcacagatggagcaattcttggaaaattatataaaattccagagcttggcggaaaagatgttgaagacttatttacagctgtacttagtcctgcgaacactcagccaactccattgccacagcctcccccaccaacacagctgttgccaatacacaatcaggatgctttttcacggatgcctctcatgaatggccttattggatccagtcctcatctcccacataattctttgccacctggaagcggactgggaactttctctgcaattgcacaatcctcttatcctgatgccagggataaaaattcagcctttaatccaatggcaagtgatcctaacaactcttggacatcatcagctcccactgtggaaggagaaaatgacacaatgtcgaatgcccagagaagcacgcttaagtgggagaaagaggaggctctgggtgaaatggcaactgttgccccagttctctacaccaatattaatttccccaacttaaaggaagaattccctgattggactactagagtgaagcaaattgccaaattgtggagaaaagcaagctcacaagaaagagcaccatatgtgcaaaaagccagagataacagagctgctttacgcattaataaagtacagatgtcaaatgattccatgaaaaggcagcaacagcaagatagcattgatcccagctctcgtattgattcggagctttttaaagatcctttaaagcaaagagaatcagaacatgaacaggaatggaaatttagacagcaaatgcgtcagaaaagtaagcagcaagctaaaattgaagccacacagaaacttgaacaggtgaaaaatgagcagcagcagcagcaacaacagcaatttggttctcagcatcttctggtgcagtctggttcagatacaccaagtagtgggatacagagtcccttgacacctcagcctggcaatggaaatatgtctcctgcacagtcattccataaagaactgtttacaaaacagccacccagtacccctacgtctacatcttcagatgatgtgtttgtaaagccacaagctccacctcctcctccagccccatcccggattcccatccaggatagtctttctcaggctcagacttctcagccaccctcaccgcaagtgttttcacctgggtcctctaactcacgaccaccatctccaatggatccatatgcaaaaatggttggtacccctcgaccacctcctgtgggccatagtttttccagaagaaattctgctgcaccagtggaaaactgtacacctttatcatcggtatctaggccccttcaaatgaatgagacaacagcaaataggccatcccctgtcagagatttatgttcttcttccacgacaaataatgacccctatgcaaaacctccagacacacctaggcctgtgatgacagatcaatttcccaaatccttgggcctatcccggtctcctgtagtttcagaacaaactgcaaaaggccctatagcagctggaaccagtgatcactttactaaaccatctcctagggcagatgtgtttcaaagacaaaggatacctgactcatatgcacgacccttgttgacacctgcacctcttgatagtggtcctggaccttttaagactccaatgcaacctcctccatcctctcaggatccttatggatcagtgtcacaggcatcaaggcgattgtctgttgacccttatgaaaggcctgctttgacaccaagacctatagataatttttctcataatcagtcaaatgatccatatagtcagcctccccttaccccacatccagcagtgaatgaatcttttgcccatccttcaagggctttttcccagcctggaaccatatcaaggccaacatctcaggacccatactcccaacccccaggaactccacgacctgttgtagattcttattcccaatcttcaggaacagctaggtccaatacagacccttactctcaacctcctggaactccccggcctactactgttgacccatatagtcagcagccccaaaccccaagaccatctacacaaactgacttgtttgttacacctgtaacaaatcagaggcattctgatccatatgctcatcctcctggaacaccaagacctggaatttctgtcccttactctcagccaccagcaacaccaaggccaaggatttcagagggttttactaggtcctcaatgacaagaccagtcctcatgccaaatcaggatcctttcctgcaagcagcacaaaaccgaggaccagctttacctggcccgttggtaaggccacctgatacatgttcccagacacctaggccccctggacctggtctttcagacacatttagccgtgtttccccatctgctgcccgtgatccctatgatcagtctccaatgactccaagatctcagtctgactcttttggaacaagtcaaactgcccatgatgttgctgatcagccaaggcctggatcagaggggagcttctgtgcatcttcaaactctccaatgcactcccaaggccagcagttctctggtgtctcccaacttcctggacctgtgccaacttcaggagtaactgatacacagaatactgtaaatatggcccaagcagatacagagaaattgagacagcggcagaagttacgtgaaatcattctccagcagcaacagcagaagaagattgcaggtcgacaggagaaggggtcacaggactcacccgcagtgcctcatccagggcctcttcaacactggcaaccagagaatgttaaccaggctttcaccagacccccacctccctatcctgggaacattaggtctcctgttgcccctcctttaggacctagatatgctgttttcccaaaagatcagcgtggaccctatcctcctgatgttgctagtatggggatgagacctcatggatttagatttggatttccaggaggtagtcatggtaccatgccgagtcaagagcgcttccttgtgcctcctcagcaaatacagggatctggagtttctccacagctaagaagatcagtatctgtagatatgcctaggcctttaaataactcacaaatgaataatccagttggacttcctcagcatttttcaccacagagcttgccagttcagcagcacaacatactgggccaagcatatattgaactgagacatagggctcctgacggaaggcaacggctgcctttcagtgctccacctggcagcgttgtagaggcatcttctaatctgagacatggaaacttcattccccggccagactttccgggccctagacacacagaccccatgcgacgacctccccagggtctacctaatcagctacctgtgcacccagatttggaacaagtgccaccatctcaacaagagcaaggtcattctgtccattcatcttctatggtcatgaggactctgaaccatccactaggtggtgaattttcagaagctcctttgtcaacatctgtaccgtctgaaacaacgtctgataatttacagataaccacccagccttctgatggtctagaggaaaaacttgattctgatgacccttctgtgaaggaactggatgttaaagaccttgagggggttgaagtcaaagacttagatgatgaagatcttgaaaacttaaatttagatacagaggatggcaaggtagttgaattggatactttagataatttggaaactaatgatcccaacctggatgacctcttaaggtcaggagagtttgatatcattgcatatacagatccagaacttgacatgggagataagaaaagcatgtttaatgaggaactagaccttccaattgatgataagttagataatcagtgtgtatctgttgaaccaaaaaaaaaggaacaagaaaacaaaactctggttctctctgataaacattcaccacagaaaaaatccactgttaccaatgaggtaaaaacggaagtactgtctccaaattctaaggtggaatccaaatgtgaaactgaaaaaaatgatgagaataaagataatgttgacactccttgctcacaggcttctgctcactcagacctaaatgatggagaaaagacttctttgcatccttgtgatccagatctatttgagaaaagaaccaatcgagaaactgctggccccagtgcaaatgtcattcaggcatccactcaactacctgctcaagatgtaataaactcttgtggcataactggatcaactccagttctctcaagtttacttgctaatgagaaatctgataattcagacattaggccatcggggtctccaccaccaccaactctgccggcctccccatccaatcatgtgtcaagtttgcctcctttcatagcaccgcctggccgtgttttggataatgccatgaattctaatgtgacagtagtctctagggtaaaccatgttttttctcagggtgtgcaggtaaacccagggctcattccaggtcaatcaacagttaaccacagtctggggacaggaaaacctgcaactcaaactgggcctcaaacaagtcagtctggtaccagtagcatgtctggaccccaacagctaatgattcctcaaacattagcacagcagaatagagagaggccccttcttctagaagaacagcctctacttctacaggatcttttggatcaagaaaggcaagaacagcagcagcaaagacagatgcaagccatgattcgtcagcgatcagaaccgttcttccctaatattgattttgatgcaattacagatcctataatgaaagccaaaatggtggcccttaaaggtataaataaagtgatggcacaaaacaatctgggcatgccaccaatggtgatgagcaggttcccttttatgggccaggtggtaactggaacacagaacagtgaaggacagaaccttggaccacaggccattcctcaggatggcagtataacacatcagatttctaggcctaatcctccaaattttggtccaggctttgtcaatgattcacagcgtaagcagtatgaagagtggctccaggagacccaacagctgcttcaaatgcagcagaagtatcttgaagaacaaattggtgctcacagaaaatctaagaaggccctttcagctaaacaacgtactgccaagaaagctgggcgtgaatttccagaggaagatgcagaacaactcaagcatgttactgaacagcaaagcatggttcagaaacagctagaacagattcgtaaacaacagaaagaacatgctgaattgattgaagattatcggatcaaacagcagcagcaatgtgcaatggccccacctaccatgatgcccagtgtccagccccagccacccctaattccaggtgccactccacccaccatgagccaacccacctttcccatggtgccacagcagcttcagcaccagcagcacacaacagttatttctggccatactagccctgttagaatgcccagtttacctggatggcaacccaacagtgctcctgcccacctgcccctcaatcctcctagaattcagcccccaattgcccagttaccaataaaaacttgtacaccagccccagggacagtctcaaatgcaaatccacagagtggaccaccacctcgggtagaatttgatgacaacaatccctttagtgaaagttttcaagaacgggaacgtaaggaacgtttacgagaacagcaagagagacaacggatccaactcatgcaggaggtagatagacaaagagctttgcagcagaggatggaaatggagcagcatggtatggtgggctctgagataagtagtagtaggacatctgtgtcccagattcccttctacagttccgacttaccttgtgattttatgcaacctctaggaccccttcagcagtctccacaacaccaacagcaaatggggcaggttttacagcagcagaatatacaacaaggatcaattaattcaccctccacccaaactttcatgcagactaatgagcgaaggcaggtaggccctccttcatttgttcctgattcaccatcaatccctgttggaagcccaaatttttcttctgtgaagcagggacatggaaatctttctgggaccagcttccagcagtccccagtgaggccttcttttacacctgctttaccagcagcacctccagtagctaatagcagtctcccatgtggccaagattctactataacccatggacacagttatccgggatcaacccaatcgctcattcagttgtattctgatataatcccagaggaaaaagggaaaaagaaaagaacaagaaagaagaaaagagatgatgatgcagaatccaccaaggctccatcaactccccattcagatataactgccccaccgactccaggcatctcagaaactacctctactcctgcagtgagcacacccagtgagcttcctcaacaagccgaccaagagtcggtggaaccagtcggcccatccactcccaatatggcagcaggccagctatgtacagaattagagaacaaactgcccaatagtgatttctcacaagcaactccaaatcaacagacgtatgcaaattcagaagtagacaagctctccatggaaacccctgccaaaacagaagagataaaactggaaaaggctgagacagagtcctgcccaggccaagaggagcctaaattggaggaacagaatggtagtaaggtagaaggaaacgctgtagcctgtcctgtctcctcagcacagagtcctccccattctgctggggcccctgctgccaaaggagactcagggaatgaacttctgaaacacttgttgaaaaataaaaagtcatcttctcttttgaatcaaaaacctgagggcagtatttgttcagaagatgactgtacaaaggataataaactagttgagaagcagaacccagctgaaggactgcaaactttgggggctcaaatgcaaggtggttttggatgtggcaaccagttgccaaaaacagatggaggaagtgaaaccaagaaacagcgaagcaaacggactcagaggacgggtgagaaagcagcacctcgctcaaagaaaaggaaaaaggacgaagaggagaaacaagctatgtactctagcactgacacgtttacccacttgaaacagcagctctctctgctccctctaatggaaccaatcattggagtgaactttgcgcactttcttccttatggcagtggccaatttaatagtgggaatcgacttctaggaacttttggcagtgctaccctggaaggggtttcggactactattctcagttgatctacaagcagaataatttaagtaatcctccaacaccccctgcctctcttcctcctacaccacctcctatggcttgtcagaagatggccaatggttttgcaacaactgaagaacttgctggaaaagccggagtgttagtgagccatgaagttaccaaaactctaggacctaaaccatttcagctgcccttcagaccccaggacgacttgttggcccgagctcttgctcagggccccaagacagttgatgtgccagcctccctcccaacaccacctcataacaatcaggaagaattaaggatacaggatcactgtggtgatcgagatactcctgacagttttgttccctcatcctctcctgagagtgtggttggggtagaagtgagcaggtatccagatctgtcattggtcaaggaggagcctccagaaccggtgccgtcccccatcattccaattcttcctagcactgctgggaaaagttcagaatcaagaaggaatgacatcaaaactgagccaggcactttatattttgcgtcaccttttggtccttccccaaatggtcccagatcaggtcttatatctgtagcaattactctgcatcctacagctgctgagaacattagcagtgttgtggctgcattttccgaccttcttcacgtccgaatccctaacagctatgaggttagcagtgctccagatgtcccatccatgggtttggtcagtagccacagaatcaacccgggtttggagtatcgacagcatttacttctccgtgggcctccgccaggatctgcaaaccctcccagattagtgagctcttaccggctgaagcagcctaatgtaccatttcctccaacaagcaatggtctttctggatataaggattctagtcatggtattgcagaaagcgcagcactcagaccacagtggtgttgtcattgtaaagtggttattcttggaagtggtgtgcggaaatctttcaaagatctgacccttttgaacaaggattcccgagaaagcaccaagagggtagagaaggacattgtcttctgtagtaataactgctttattctttattcatcaactgcacaagcgaaaaactcagaaaacaaggaatccattccttcattgccacaatcacctatgagagaaacgccttccaaagcatttcatcagtacagcaacaacatctccactttggatgtgcactgtctcccccagctcccagagaaagcttctccccctgcctcaccacccatcgccttccctcctgcttttgaagcagcccaagtcgaggccaagccagatgagctgaaggtgacagtcaagctgaagcctcggctaagagctgtccatggtgggtttgaagattgcaggccgctcaataaaaaatggagaggaatgaaatggaagaagtggagcattcatattgtaatccctaaggggacatttaaaccaccttgtgaggatgaaatagatgaatttctaaagaaattgggcacttcccttaaacctgatcctgtgcccaaagactatcggaaatgttgcttttgtcatgaagaaggtgatggattgacagatggaccagcaaggctactcaaccttgacttggatctgtgggtccacttgaactgcgctctgtggtccacggaggtctatgagactcaggctggtgccttaataaatgtggagctagctctgaggagaggcctacaaatgaaatgtgtcttctgtcacaagacgggtgccactagtggatgccacagatttcgatgcaccaacatttatcacttcacttgcgccattaaagcacaatgcatgttttttaaggacaaaactatgctttgccccatgcacaaaccaaagggaattcatgagcaagaattaagttactttgcagtcttcaggagggtctatgttcagcgtgatgaggtgcgacagattgctagcatcgtgcaacgaggagaacgggaccatacctttcgcgtgggtagcctcatcttccacacaattggtcagctgcttccacagcagatgcaagcattccattctcctaaagcactcttccctgtgggctatgaagccagccggctgtactggagcactcgctatgccaataggcgctgccgctacctgtgctccattgaggagaaggatgggcgcccagtgtttgtcatcaggattgtggaacaaggccatgaagacctggttctaagtgacatctcacctaaaggtgtctgggataagattttggagcctgtggcatgtgtgagaaaaaagtctgaaatgctccagcttttcccagcgtatttaaaaggagaggatctgtttggcctgaccgtctctgcagtggcacgcatagcggaatcacttcctggggttgaggcatgtgaaaattataccttccgatacggccgaaatcctctcatggaacttcctcttgccgttaaccccacaggttgtgcccgttctgaacctaaaatgagtgcccatgtcaagaggtttgtgttaaggcctcacaccttaaacagcaccagcacctcaaagtcatttcagagcacagtcactggagaactgaacgcaccttatagtaaacagtttgttcactccaagtcatcgcagtaccggaagatgaaaactgaatggaaatccaatgtgtatctggcacggtctcggattcaggggctgggcctgtatgctgctcgagacattgagaaacacaccatggtcattgagtacatcgggactatcattcgaaacgctgtcacccgtcaggacagtgtagcatctgactgactagcacgcaccctggtatgctacactagttcgcatctataggatccatctcgataaccggtcactcactaatagggcacctaggctggggttagaccttcgtgaaccagattagttgtaccctactgataatgtggagtggacgcatgctaatcctagtctaccgatacgacgagtgcggcgacatgcgct

SEQ ID NO: 318253 - DNA, 10231 bp, Homo sapiens
acctgggagctgagatggatcgtttacagccaggtgaggaagtggagatagctgagctcactacagattataacaatgaaatggaagttgaaggccctgaagatcaaatggtattctcagagcaggcagctaataaagatgtcaacggtcaggagtccactcctggaattgttccagatgcggttcaagtccacactgaagagcaacagaagagtcatccctcagaaagtcttgacacagatagtcttcttattgctgtatcatcccaacatacagtgaatactgaattggaaaaacagatttctaatgaagttgatagtgaagacctgaaaatgtcttctgaagtgaagcatatttgtggcgaagatcaaattgaagataaaatggaagtgacagaaaacattgaagtcgttacacaccagatcactgtgcagcaagaacaactgcagttgttagaggaacctgaaacagtggtatccagagaagaatcaaggcctccaaaattagtcatggaatctgtcactcttccactagaaaccttagtgtccccacatgaggaaagtatttcattatgtcctgaggaacagttggttatagaaaggctacaaggagaaaaggaacagaaagaaaattctgaactttctactggattgatggactctgaaatgactcctacaattgagggttgtgtgaaagatgtttcataccaaggaggcaaatctataaagttatcatctgagacagagtcatcattttcatcatcagcagacataagcaaggcagatgtgtcttcctccccaacaccttcttcagacttgccttcgcatgacatgctgcataattacccttcagctcttagttcctctgctggaaacatcatgccaacaacttacatctcagtcactccaaaaattggcatgggtaaaccagctattactaagagaaaattttctcctggtagacctcggtccaaacagggggcttggagtacccataatacagtgagcccaccttcctggtccccagacatttcagaaggtcgggaaatttttaaacccaggcagcttcctggcagtgccatttggagcatcaaagtgggccgtgggtctggatttccaggaaagcggagacctcgaggtgcaggactgtcggggcgaggtggccgaggcaggtcaaagctgaaaagtggaatcggagctgttgtattacctggggtgtctactgcagatatttcatcaaataaggatgatgaagaaaactctatgcacaatacagttgtgttgttttctagcagtgacaagttcactttgaatcaggatatgtgtgtagtttgtggcagttttggccaaggagcagaaggaagattacttgcctgttctcagtgtggtcagtgttaccatccatactgtgtcagtattaagatcactaaagtggttcttagcaaaggttggaggtgtcttgagtgcactgtgtgtgaggcctgtgggaaggcaactgacccaggaagactcctgctgtgtgatgactgtgacataagttatcacacctactgcctagaccctccattgcagacagttcccaaaggaggctggaagtgcaaatggtgtgtttggtgcagacactgtggagcaacatctgcaggtctaagatgtgaatggcagaacaattacacacagtgcgctccttgtgcaagcttatcttcctgtccagtctgctatcgaaactatagagaagaagatcttattctgcaatgtagacaatgtgatagatggatgcatgcagtttgtcagaacttaaatactgaggaagaagtggaaaatgtagcagacattggttttgattgtagcatgtgcagaccctatatgcctgcgtctaatgtgccttcctcagactgctgtgaatcttcacttgtagcacaaattgtcacaaaagtaaaagagctagacccacccaagacttatacccaggatggtgtgtgtttgactgaatcagggatgactcagttacagagcctcacagttacagttccaagaagaaaacggtcaaaaccaaaattgaaattgaagattataaatcagaatagcgtggccgtccttcagacccctccagacatccaatcagagcattcaagggatggtgaaatggatgatagtcgagaaggagaacttatggattgtgatggaaaatcagaatctagtcctgagcgggaagctgtggatgatgaaactaagggagtggaaggaacagatggtgtcaaaaagagaaaaaggaaaccatacagaccaggtattggtggatttatggtgcggcaaagaagtcgaactgggcaagggaaaaccaaaagatctgtgatcagaaaagattcctcaggctctatttccgagcagttaccttgcagagatgatggctggagtgagcagttaccagatactttagttgatgaatctgtttctgttactgaaagcactgaaaaaataaagaagagataccgaaaaaggaaaaataagcttgaagaaactttccctgcctatttacaagaagctttctttggaaaagatcttctagatacaagtagacaaagcaagataagtttagataatctgtcagaagatggagctcagcttttatataaaacaaacatgaacacaggtttcttggatccttccttagatccactacttagttcatcctcggctccaacaaaatctggaactcacggtcctgctgatgacccattagctgatatttctgaagttttaaacacagatgatgacattcttggaataatttcagatgatctagcaaaatcagttgatcattcagatattggtcctgtcactgatgatccttcctctttgcctcagccaaatgtcaatcagagttcacgaccattaagtgaagaacagctagatgggatcctcagtcctgaactagacaaaatggtcacagatggagcaattcttggaaaattatataaaattccagagcttggcggaaaagatgttgaagacttatttacagctgtacttagtcctgcgaacactcagccaactccattgccacagcctcccccaccaacacagctgttgccaatacacaatcaggatgctttttcacggatgcctctcatgaatggccttattggatccagtcctcatctcccacataattctttgccacctggaagcggactgggaactttctctgcaattgcacaatcctcttatcctgatgccagggataaaaattcagcctttaatccaatggcaagtgatcctaacaactcttggacatcatcagctcccactgtggaaggagaaaatgacacaatgtcgaatgcccagagaagcacgcttaagtgggagaaagaggaggctctgggtgaaatggcaactgttgccccagttctctacaccaatattaatttccccaacttaaaggaagaattccctgattggactactagagtgaagcaaattgccaaattgtggagaaaagcaagctcacaagaaagagcaccatatgtgcaaaaagccagagataacagagctgctttacgcattaataaagtacagatgtcaaatgattccatgaaaaggcagcaacagcaagatagcattgatcccagctctcgtattgattcggagctttttaaagatcctttaaagcaaagagaatcagaacatgaacaggaatggaaatttagacagcaaatgcgtcagaaaagtaagcagcaagctaaaattgaagccacacagaaacttgaacaggtgaaaaatgagcagcagcagcagcaacaacagcaatttggttctcagcatcttctggtgcagtctggttcagatacaccaagtagtgggatacagagtcccttgacacctcagcctggcaatggaaatatgtctcctgcacagtcattccataaagaactgtttacaaaacagccacccagtacccctacgtctacatcttcagatgatgtgtttgtaaagccacaagctccacctcctcctccagccccatcccggattcccatccaggatagtctttctcaggctcagacttctcagccaccctcaccgcaagtgttttcacctgggtcctctaactcacgaccaccatctccaatggatccatatgcaaaaatggttggtacccctcgaccacctcctgtgggccatagtttttccagaagaaattctgctgcaccagtggaaaactgtacacctttatcatcggtatctaggccccttcaaatgaatgagacaacagcaaataggccatcccctgtcagagatttatgttcttcttccacgacaaataatgacccctatgcaaaacctccagacacacctaggcctgtgatgacagatcaatttcccaaatccttgggcctatcccggtctcctgtagtttcagaacaaactgcaaaaggccctatagcagctggaaccagtgatcactttactaaaccatctcctagggcagatgtgtttcaaagacaaaggatacctgactcatatgcacgacccttgttgacacctgcacctcttgatagtggtcctggaccttttaagactccaatgcaacctcctccatcctctcaggatccttatggatcagtgtcacaggcatcaaggcgattgtctgttgacccttatgaaaggcctgctttgacaccaagacctatagataatttttctcataatcagtcaaatgatccatatagtcagcctccccttaccccacatccagcagtgaatgaatcttttgcccatccttcaagggctttttcccagcctggaaccatatcaaggccaacatctcaggacccatactcccaacccccaggaactccacgacctgttgtagattcttattcccaatcttcaggaacagctaggtccaatacagacccttactctcaacctcctggaactccccggcctactactgttgacccatatagtcagcagccccaaaccccaagaccatctacacaaactgacttgtttgttacacctgtaacaaatcagaggcattctgatccatatgctcatcctcctggaacaccaagacctggaatttctgtcccttactctcagccaccagcaacaccaaggccaaggatttcagagggttttactaggtcctcaatgacaagaccagtcctcatgccaaatcaggatcctttcctgcaagcagcacaaaaccgaggaccagctttacctggcccgttggtaaggccacctgatacatgttcccagacacctaggccccctggacctggtctttcagacacatttagccgtgtttccccatctgctgcccgtgatccctatgatcagtctccaatgactccaagatctcagtctgactcttttggaacaagtcaaactgcccatgatgttgctgatcagccaaggcctggatcagaggggagcttctgtgcatcttcaaactctccaatgcactcccaaggccagcagttctctggtgtctcccaacttcctggacctgtgccaacttcaggagtaactgatacacagaatactgtaaatatggcccaagcagatacagagaaattgagacagcggcagaagttacgtgaaatcattctccagcagcaacagcagaagaagattgcaggtcgacaggagaaggggtcacaggactcacccgcagtgcctcatccagggcctcttcaacactggcaaccagagaatgttaaccaggctttcaccagacccccacctccctatcctgggaacattaggtctcctgttgcccctcctttaggacctagatatgctgttttcccaaaagatcagcgtggaccctatcctcctgatgttgctagtatggggatgagacctcatggatttagatttggatttccaggaggtagtcatggtaccatgccgagtcaagagcgcttccttgtgcctcctcagcaaatacagggatctggagtttctccacagctaagaagatcagtatctgtagatatgcctaggcctttaaataactcacaaatgaataatccagttggacttcctcagcatttttcaccacagagcttgccagttcagcagcacaacatactgggccaagcatatattgaactgagacatagggctcctgacggaaggcaacggctgcctttcagtgctccacctggcagcgttgtagaggcatcttctaatctgagacatggaaacttcattccccggccagactttccgggccctagacacacagaccccatgcgacgacctccccagggtctacctaatcagctacctgtgcacccagatttggaacaagtgccaccatctcaacaagagcaaggtcattctgtccattcatcttctatggtcatgaggactctgaaccatccactaggtggtgaattttcagaagctcctttgtcaacatctgtaccgtctgaaacaacgtctgataatttacagataaccacccagccttctgatggtctagaggaaaaacttgattctgatgacccttctgtgaaggaactggatgttaaagaccttgagggggttgaagtcaaagacttagatgatgaagatcttgaaaacttaaatttagatacagaggatggcaaggtagttgaattggatactttagataatttggaaactaatgatcccaacctggatgacctcttaaggtcaggagagtttgatatcattgcatatacagatccagaacttgacatgggagataagaaaagcatgtttaatgaggaactagaccttccaattgatgataagttagataatcagtgtgtatctgttgaaccaaaaaaaaaggaacaagaaaacaaaactctggttctctctgataaacattcaccacagaaaaaatccactgttaccaatgaggtaaaaacggaagtactgtctccaaattctaaggtggaatccaaatgtgaaactgaaaaaaatgatgagaataaagataatgttgacactccttgctcacaggcttctgctcactcagacctaaatgatggagaaaagacttctttgcatccttgtgatccagatctatttgagaaaagaaccaatcgagaaactgctggccccagtgcaaatgtcattcaggcatccactcaactacctgctcaagatgtaataaactcttgtggcataactggatcaactccagttctctcaagtttacttgctaatgagaaatctgataattcagacattaggccatcggggtctccaccaccaccaactctgccggcctccccatccaatcatgtgtcaagtttgcctcctttcatagcaccgcctggccgtgttttggataatgccatgaattctaatgtgacagtagtctctagggtaaaccatgttttttctcagggtgtgcaggtaaacccagggctcattccaggtcaatcaacagttaaccacagtctggggacaggaaaacctgcaactcaaactgggcctcaaacaagtcagtctggtaccagtagcatgtctggaccccaacagctaatgattcctcaaacattagcacagcagaatagagagaggccccttcttctagaagaacagcctctacttctacaggatcttttggatcaagaaaggcaagaacagcagcagcaaagacagatgcaagccatgattcgtcagcgatcagaaccgttcttccctaatattgattttgatgcaattacagatcctataatgaaagccaaaatggtggcccttaaaggtataaataaagtgatggcacaaaacaatctgggcatgccaccaatggtgatgagcaggttcccttttatgggccaggtggtaactggaacacagaacagtgaaggacagaaccttggaccacaggccattcctcaggatggcagtataacacatcagatttctaggcctaatcctccaaattttggtccaggctttgtcaatgattcacagcgtaagcagtatgaagagtggctccaggagacccaacagctgcttcaaatgcagcagaagtatcttgaagaacaaattggtgctcacagaaaatctaagaaggccctttcagctaaacaacgtactgccaagaaagctgggcgtgaatttccagaggaagatgcagaacaactcaagcatgttactgaacagcaaagcatggttcagaaacagctagaacagattcgtaaacaacagaaagaacatgctgaattgattgaagattatcggatcaaacagcagcagcaatgtgcaatggccccacctaccatgatgcccagtgtccagccccagccacccctaattccaggtgccactccacccaccatgagccaacccacctttcccatggtgccacagcagcttcagcaccagcagcacacaacagttatttctggccatactagccctgttagaatgcccagtttacctggatggcaacccaacagtgctcctgcccacctgcccctcaatcctcctagaattcagcccccaattgcccagttaccaataaaaacttgtacaccagccccagggacagtctcaaatgcaaatccacagagtggaccaccacctcgggtagaatttgatgacaacaatccctttagtgaaagttttcaagaacgggaacgtaaggaacgtttacgagaacagcaagagagacaacggatccaactcatgcaggaggtagatagacaaagagctttgcagcagaggatggaaatggagcagcatggtatggtgggctctgagataagtagtagtaggacatctgtgtcccagattcccttctacagttccgacttaccttgtgattttatgcaacctctaggaccccttcagcagtctccacaacaccaacagcaaatggggcaggttttacagcagcagaatatacaacaaggatcaattaattcaccctccacccaaactttcatgcagactaatgagcgaaggcaggtaggccctccttcatttgttcctgattcaccatcaatccctgttggaagcccaaatttttcttctgtgaagcagggacatggaaatctttctgggaccagcttccagcagtccccagtgaggccttcttttacacctgctttaccagcagcacctccagtagctaatagcagtctcccatgtggccaagattctactataacccatggacacagttatccgggatcaacccaatcgctcattcagttgtattctgatataatcccagaggaaaaagggaaaaagaaaagaacaagaaagaagaaaagagatgatgatgcagaatccaccaaggctccatcaactccccattcagatataactgccccaccgactccaggcatctcagaaactacctctactcctgcagtgagcacacccagtgagcttcctcaacaagccgaccaagagtcggtggaaccagtcggcccatccactcccaatatggcagcaggccagctatgtacagaattagagaacaaactgcccaatagtgatttctcacaagcaactccaaatcaacagacgtatgcaaattcagaagtagacaagctctccatggaaacccctgccaaaacagaagagataaaactggaaaaggctgagacagagtcctgcccaggccaagaggagcctaaattggaggaacagaatggtagtaaggtagaaggaaacgctgtagcctgtcctgtctcctcagcacagagtcctccccattctgctggggcccctgctgccaaaggagactcagggaatgaacttctgaaacacttgttgaaaaataaaaagtcatcttctcttttgaatcaaaaacctgagggcagtatttgttcagaagatgactgtacaaaggataataaactagttgagaagcagaacccagctgaaggactggtaagtgtaaatcataaaaacgacaacttttttcttttgttttaaattatacttacagcagattagtaccagcaactgtatttccacattattctacaacctttttattctaaaggaccattttttattttgtcatttctacctctctggaacccatgtttttacttatatctaaactatattaaataataatttgtttactattttttaaaaagcaaaggcatgtattgcatttcatatataacgtgatgtgtagcaactggttattaccacattgagttgatatgactaaagcaaagtaagtaaatgtctatgtactttattgt

SEQ ID NO: 318254 - DNA, 7205 bp, Homo sapiens
tgtgacttttgcagttacccaagcaaaatatgtttgcttctgcagggccaaactgccctctgtgtaacctcaaccacagtcatcagccagtgttttacttcagtacctatgctgtatagaaatgagtaatgatgcattttgttattccagattcgtaaacaacagaaagaacatgctgaattgattgaagattatcggatcaaacagcagcagcaatgtgcaatggccccacctaccatgatgcccagtgtccagccccagccacccctaattccaggtgccactccacccaccatgagccaacccacctttcccatggtgccacagcagcttcagcaccagcagcacacaacagttatttctggccatactagccctgttagaatgcccagtttacctggatggcaacccaacagtgctcctgcccacctgcccctcaatcctcctagaattcagcccccaattgcccagttaccaataaaaacttgtacaccagccccagggacagtctcaaatgcaaatccacagagtggaccaccacctcgggtagaatttgatgacaacaatccctttagtgaaagttttcaagaacgggaacgtaaggaacgtttacgagaacagcaagagagacaacggatccaactcatgcaggaggtagatagacaaagagctttgcagcagaggatggaaatggagcagcatggtatggtgggctctgagataagtagtagtaggacatctgtgtcccagattcccttctacagttccgacttaccttgtgattttatgcaacctctaggaccccttcagcagtctccacaacaccaacagcaaatggggcaggttttacagcagcagaatatacaacaaggatcaattaattcaccctccacccaaactttcatgcagactaatgagcgaaggcaggtaggccctccttcatttgttcctgattcaccatcaatccctgttggaagcccaaatttttcttctgtgaagcagggacatggaaatctttctgggaccagcttccagcagtccccagtgaggccttcttttacacctgctttaccagcagcacctccagtagctaatagcagtctcccatgtggccaagattctactataacccatggacacagttatccgggatcaacccaatcgctcattcagttgtattctgatataatcccagaggaaaaagggaaaaagaaaagaacaagaaagaagaaaagagatgatgatgcagaatccaccaaggctccatcaactccccattcagatataactgccccaccgactccaggcatctcagaaactacctctactcctgcagtgagcacacccagtgagcttcctcaacaagccgaccaagagtcggtggaaccagtcggcccatccactcccaatatggcagcaggccagctatgtacagaattagagaacaaactgcccaatagtgatttctcacaagcaactccaaatcaacagacgtatgcaaattcagaagtagacaagctctccatggaaacccctgccaaaacagaagagataaaactggaaaaggctgagacagagtcctgcccaggccaagaggagcctaaattggaggaacagaatggtagtaaggtagaaggaaacgctgtagcctgtcctgtctcctcagcacagagtcctccccattctgctggggcccctgctgccaaaggagactcagggaatgaacttctgaaacacttgttgaaaaataaaaagtcatcttctcttttgaatcaaaaacctgagggcagtatttgttcagaagatgactgtacaaaggataataaactagttgagaagcagaacccagctgaaggactgcaaactttgggggctcaaatgcaaggtggttttggatgtggcaaccagttgccaaaaacagatggaggaagtgaaaccaagaaacagcgaagcaaacggactcagaggacgggtgagaaagcagcacctcgctcaaagaaaaggaaaaaggacgaagaggagaaacaagctatgtactctagcactgacacgtttacccacttgaaacagcagctctctctgctccctctaatggaaccaatcattggagtgaactttgcgcactttcttccttatggcagtggccaatttaatagtgggaatcgacttctaggaacttttggcagtgctaccctggaaggggtttcggactactattctcagttgatctacaagcagaataatttaagtaatcctccaacaccccctgcctctcttcctcctacaccacctcctatggcttgtcagaagatggccaatggttttgcaacaactgaagaacttgctggaaaagccggagtgttagtgagccatgaagttaccaaaactctaggacctaaaccatttcagctgcccttcagaccccaggacgacttgttggcccgagctcttgctcagggccccaagacagttgatgtgccagcctccctcccaacaccacctcataacaatcaggaagaattaaggatacaggatcactgtggtgatcgagatactcctgacagttttgttccctcatcctctcctgagagtgtggttggggtagaagtgagcaggtatccagatctgtcattggtcaaggaggagcctccagaaccggtgccgtcccccatcattccaattcttcctagcactgctgggaaaagttcagaatcaagaaggaatgacatcaaaactgagccaggcactttatattttgcgtcaccttttggtccttccccaaatggtcccagatcaggtcttatatctgtagcaattactctgcatcctacagctgctgagaacattagcagtgttgtggctgcattttccgaccttcttcacgtccgaatccctaacagctatgaggttagcagtgctccagatgtcccatccatgggtttggtcagtagccacagaatcaacccgggtttggagtatcgacagcatttacttctccgtgggcctccgccaggatctgcaaaccctcccagattagtgagctcttaccggctgaagcagcctaatgtaccatttcctccaacaagcaatggtctttctggatataaggattctagtcatggtattgcagaaagcgcagcactcagaccacagtggtgttgtcattgtaaagtggttattcttggaagtggtgtgcggaaatctttcaaagatctgacccttttgaacaaggattcccgagaaagcaccaagagggtagagaaggacattgtcttctgtagtaataactgctttattctttattcatcaactgcacaagcgaaaaactcagaaaacaaggaatccattccttcattgccacaatcacctatgagagaaacgccttccaaagcatttcatcagtacagcaacaacatctccactttggatgtgcactgtctcccccagctcccagagaaagcttctccccctgcctcaccacccatcgccttccctcctgcttttgaagcagcccaagtcgaggccaagccagatgagctgaaggtgacagtcaagctgaagcctcggctaagagctgtccatggtgggtttgaagattgcaggccgctcaataaaaaatggagaggaatgaaatggaagaagtggagcattcatattgtaatccctaaggggacatttaaaccaccttgtgaggatgaaatagatgaatttctaaagaaattgggcacttcccttaaacctgatcctgtgcccaaagactatcggaaatgttgcttttgtcatgaagaaggtgatggattgacagatggaccagcaaggctactcaaccttgacttggatctgtgggtccacttgaactgcgctctgtggtccacggaggtctatgagactcaggctggtgccttaataaatgtggagctagctctgaggagaggcctacaaatgaaatgtgtcttctgtcacaagacgggtgccactagtggatgccacagatttcgatgcaccaacatttatcacttcacttgcgccattaaagcacaatgcatgttttttaaggacaaaactatgctttgccccatgcacaaaccaaagggaattcatgagcaagaattaagttactttgcagtcttcaggagggtctatgttcagcgtgatgaggtgcgacagattgctagcatcgtgcaacgaggagaacgggaccatacctttcgcgtgggtagcctcatcttccacacaattggtcagctgcttccacagcagatgcaagcattccattctcctaaagcactcttccctgtgggctatgaagccagccggctgtactggagcactcgctatgccaataggcgctgccgctacctgtgctccattgaggagaaggatgggcgcccagtgtttgtcatcaggattgtggaacaaggccatgaagacctggttctaagtgacatctcacctaaaggtgtctgggataagattttggagcctgtggcatgtgtgagaaaaaagtctgaaatgctccagcttttcccagcgtatttaaaaggagaggatctgtttggcctgaccgtctctgcagtggcacgcatagcggaatcacttcctggggttgaggcatgtgaaaattataccttccgatacggccgaaatcctctcatggaacttcctcttgccgttaaccccacaggttgtgcccgttctgaacctaaaatgagtgcccatgtcaagaggtttgtgttaaggcctcacaccttaaacagcaccagcacctcaaagtcatttcagagcacagtcactggagaactgaacgcaccttatagtaaacagtttgttcactccaagtcatcgcagtaccggaagatgaaaactgaatggaaatccaatgtgtatctggcacggtctcggattcaggggctgggcctgtatgctgctcgagacattgagaaacacaccatggtcattgagtacatcgggactatcattcgaaacgaagtagccaacaggaaagagaagctttatgagtctcagaaccgtggtgtgtacatgttccgcatggataacgaccatgtgattgacgcgacgctcacaggagggcccgcaaggtatatcaaccattcgtgtgcacctaattgtgtggctgaagtggtgacttttgagagaggacacaaaattatcatcagctccagtcggagaatccagaaaggagaagagctctgctatgactataagtttgactttgaagatgaccagcacaagattccgtgtcactgtggagctgtgaactgccggaagtggatgaactgaaatgcattccttgctagctcagcgggcggcttgtccctaggaagaggcgattcaacacaccattggaattttgcagacagaaagagatttttgttttctgttttatgactttttgaaaaagcttctgggagttctgatttcctcagtcctttaggttaaagcagcgccaggaggaagctgacagaagcagcgttcctgaagtggccgaggttaaacggaatcacagaatggtccagcacttttgcttttttttcttttccttttcttttttttttgtttgttttttgttttgtttttcccttgtgggtgggtttcattgttttggttttctagtctcactaaggagaaacttttactggggcaaagagccgatggctgccctgccccgggcaggggccttcctatgaatgtaagactgaaatcaccagcgagggggacagagagtgctggccacggccttattaaaaaggggcaggccctctaacttcaaaatgtttttaaataaagtagacaccactgaacaaggaatgtactgaaatgacttccttagggatagagctaagggataataacttgcactaaatacatttaaatacttgattccatgagtcagtttattgtagtttttgatttctgtaaaataagagaaacttttgtatttattattgaataagtgaatgaagctatttttaaataaagttagaagaaagccaagctgctgctgttacctgcagaactaacaaaccctgttactttgtacagatatgtaaatattttgagaaaaaatacagtataaaaatagttattgaccaaatgctaccaggctctgcagcagctcgggggcttataaaatgttcatagggatgttacaatataattttgtgttataaaatatgccattataattatgtaataaccaaaatttcaacctagagtgttgggggttttttggaaaccgcagtctattagtactcaatggttttatacaccttacttctgacagagcggggcgtatgctacgactacaacttttatagctgttttggtaatttaaactaattttttcatattatattgttgcatccctacttcttcagtcaggtttttttgtgcttacaatttgtgataactgtgaataactgcttaaaaatacacccaaatggaggctgaattttttcttcagcaaaagtagttttgattagaactttgtttcagccacagagaatcatgtaaacgtaataggatcatgtagcagaaacttaaatctaaccctttagccttctatttaacacaaaaatttgaaaaagttaaaaaaaaaaaggagatgtgattatgcttacagctgcaggactctggcaatagggtttttggaagatgtaattttaaaatgtgtttgtatgaactgtttgtttacatttctttaataaaaaaaacactgttttgtgtttgcttgtagaaacttaatcagcattttgaaccaggttagctttttattttgtacttaaaattctggtactgacacttcacaggctaagtataaaatgaagttttgtgtgcacaattcaagtggactgtaaactgttggtatattcagtgatgcagttctgaacttgtatatggcatgatgtatttttatcttacagaataaatcaattgtatatatttttctcttgataaatagctgtatgaaatttgtttcctgaatatttttcttctcttgtacaatatcctgacatcctaccagtatttgtcctaccgggtttttgttgttttctgttctgtataatagtatctaatgttggcaaaaattgaattttttgaagtatacagagtgttatgggttttggaatttgtggacacagatttagaagatcaccatttacaaataaaatattttacatcta

SEQ ID NO: 318255 - DNA, 5973 bp, Homo sapiens
gaaaaggtttatttgttatcatctacgttctctcccattgactttaagtatgtggccattatttttcagtcaaatacggttgtgaactaatttgaagaaccagtgttttttctttttattgttgtctggtgctatctgttctctcacctaagatgcataggctgtaaagcttttctggagcctgtgaattgtttcagcacacctcatatttcactagttcctaaggggaaccaaaaataactcaccaagaccactatgcagaggctcctatagccatctacaagcatttccttcccttctgcagtaagtaagcaggaataaggggttccccagccccagggaggtcagcatgaggggtaatgctttgccagaaagggctgtggccttactaatgagttctgctctttcctcaagcttcgcagcttactgatttccatactcgagaataacgtttgaagaaaaggatggtgtttttggaaaaccagcattgacaccactctatcttccctacttatttaataccttttagtgccatgttaggatgacgcgtcatagcttggcactgcatgaactaaaaaccaaatatgcaaattgttcacttattttttaccctttccaattacattagcaaactttgggggctcaaatgcaaggtggttttggatgtggcaaccagttgccaaaaacagatggaggaagtgaaaccaagaaacagcgaagcaaacggactcagaggacgggtgagaaagcagcacctcgctcaaagaaaaggaaaaaggacgaagaggagaaacaagctatgtactctagcactgacacgtttacccacttgaaacagcagctctctctgctccctctaatggaaccaatcattggagtgaactttgcgcactttcttccttatggcagtggccaatttaatagtgggaatcgacttctaggaacttttggcagtgctaccctggaaggggtttcggactactattctcagttgatctacaagcagaataatttaagtaatcctccaacaccccctgcctctcttcctcctacaccacctcctatggcttgtcagaagatggccaatggttttgcaacaactgaagaacttgctggaaaagccggagtgttagtgagccatgaagttaccaaaactctaggacctaaaccatttcagctgcccttcagaccccaggacgacttgttggcccgagctcttgctcagggccccaagacagttgatgtgccagcctccctcccaacaccacctcataacaatcaggaagaattaaggatacaggatcactgtggtgatcgagatactcctgacagttttgttccctcatcctctcctgagagtgtggttggggtagaagtgagcaggtatccagatctgtcattggtcaaggaggagcctccagaaccggtgccgtcccccatcattccaattcttcctagcactgctgggaaaagttcagaatcaagaaggaatgacatcaaaactgagccaggcactttatattttgcgtcaccttttggtccttccccaaatggtcccagatcaggtcttatatctgtagcaattactctgcatcctacagctgctgagaacattagcagtgttgtggctgcattttccgaccttcttcacgtccgaatccctaacagctatgaggttagcagtgctccagatgtcccatccatgggtttggtcagtagccacagaatcaacccgggtttggagtatcgacagcatttacttctccgtgggcctccgccaggatctgcaaaccctcccagattagtgagctcttaccggctgaagcagcctaatgtaccatttcctccaacaagcaatggtctttctggatataaggattctagtcatggtattgcagaaagcgcagcactcagaccacagtggtgttgtcattgtaaagtggttattcttggaagtggtgtgcggaaatctttcaaagatctgacccttttgaacaaggattcccgagaaagcaccaagagggtagagaaggacattgtcttctgtagtaataactgctttattctttattcatcaactgcacaagcgaaaaactcagaaaacaaggaatccattccttcattgccacaatcacctatgagagaaacgccttccaaagcatttcatcagtacagcaacaacatctccactttggatgtgcactgtctcccccagctcccagagaaagcttctccccctgcctcaccacccatcgccttccctcctgcttttgaagcagcccaagtcgaggccaagccagatgagctgaaggtgacagtcaagctgaagcctcggctaagagctgtccatggtgggtttgaagattgcaggccgctcaataaaaaatggagaggaatgaaatggaagaagtggagcattcatattgtaatccctaaggggacatttaaaccaccttgtgaggatgaaatagatgaatttctaaagaaattgggcacttcccttaaacctgatcctgtgcccaaagactatcggaaatgttgcttttgtcatgaagaaggtgatggattgacagatggaccagcaaggctactcaaccttgacttggatctgtgggtccacttgaactgcgctctgtggtccacggaggtctatgagactcaggctggtgccttaataaatgtggagctagctctgaggagaggcctacaaatgaaatgtgtcttctgtcacaagacgggtgccactagtggatgccacagatttcgatgcaccaacatttatcacttcacttgcgccattaaagcacaatgcatgttttttaaggacaaaactatgctttgccccatgcacaaaccaaagggaattcatgagcaagaattaagttactttgcagtcttcaggagggtctatgttcagcgtgatgaggtgcgacagattgctagcatcgtgcaacgaggagaacgggaccatacctttcgcgtgggtagcctcatcttccacacaattggtcagctgcttccacagcagatgcaagcattccattctcctaaagcactcttccctgtgggctatgaagccagccggctgtactggagcactcgctatgccaataggcgctgccgctacctgtgctccattgaggagaaggatgggcgcccagtgtttgtcatcaggattgtggaacaaggccatgaagacctggttctaagtgacatctcacctaaaggtgtctgggataagattttggagcctgtggcatgtgtgagaaaaaagtctgaaatgctccagcttttcccagcgtatttaaaaggagaggatctgtttggcctgaccgtctctgcagtggcacgcatagcggaatcacttcctggggttgaggcatgtgaaaattataccttccgatacggccgaaatcctctcatggaacttcctcttgccgttaaccccacaggttgtgcccgttctgaacctaaaatgagtgcccatgtcaagaggtttgtgttaaggcctcacaccttaaacagcaccagcacctcaaagtcatttcagagcacagtcactggagaactgaacgcaccttatagtaaacagtttgttcactccaagtcatcgcagtaccggaagatgaaaactgaatggaaatccaatgtgtatctggcacggtctcggattcaggggctgggcctgtatgctgctcgagacattgagaaacacaccatggtcattgagtacatcgggactatcattcgaaacgaagtagccaacaggaaagagaagctttatgagtctcagaaccgtggtgtgtacatgttccgcatggataacgaccatgtgattgacgcgacgctcacaggagggcccgcaaggtatatcaaccattcgtgtgcacctaattgtgtggctgaagtggtgacttttgagagaggacacaaaattatcatcagctccagtcggagaatccagaaaggagaagagctctgctatgactataagtttgactttgaagatgaccagcacaagattccgtgtcactgtggagctgtgaactgccggaagtggatgaactgaaatgcattccttgctagctcagcgggcggcttgtccctaggaagaggcgattcaacacaccattggaattttgcagacagaaagagatttttgttttctgttttatgactttttgaaaaagcttctgggagttctgatttcctcagtcctttaggttaaagcagcgccaggaggaagctgacagaagcagcgttcctgaagtggccgaggttaaacggaatcacagaatggtccagcacttttgcttttttttcttttccttttcttttttttttgtttgttttttgttttgtttttcccttgtgggtgggtttcattgttttggttttctagtctcactaaggagaaacttttactggggcaaagagccgatggctgccctgccccgggcaggggccttcctatgaatgtaagactgaaatcaccagcgagggggacagagagtgctggccacggccttattaaaaaggggcaggccctctaacttcaaaatgtttttaaataaagtagacaccactgaacaaggaatgtactgaaatgacttccttagggatagagctaagggataataacttgcactaaatacatttaaatacttgattccatgagtcagtttattgtagtttttgatttctgtaaaataagagaaacttttgtatttattattgaataagtgaatgaagctatttttaaataaagttagaagaaagccaagctgctgctgttacctgcagaactaacaaaccctgttactttgtacagatatgtaaatattttgagaaaaaatacagtataaaaatagttattgaccaaatgctaccaggctctgcagcagctcgggggcttataaaatgttcatagggatgttacaatataattttgtgttataaaatatgccattataattatgtaataaccaaaatttcaacctagagtgttgggggttttttggaaaccgcagtctattagtactcaatggttttatacaccttacttctgacagagcggggcgtatgctacgactacaacttttatagctgttttggtaatttaaactaattttttcatattatattgttgcatccctacttcttcagtcaggtttttttgtgcttacaatttgtgataactgtgaataactgcttaaaaatacacccaaatggaggctgaattttttcttcagcaaaagtagttttgattagaactttgtttcagccacagagaatcatgtaaacgtaataggatcatgtagcagaaacttaaatctaaccctttagccttctatttaacacaaaaatttgaaaaagttaaaaaaaaaaaggagatgtgattatgcttacagctgcaggactctggcaatagggtttttggaagatgtaattttaaaatgtgtttgtatgaactgtttgtttacatttctttaataaaaaaaacactgttttgtgtttgcttgtagaaacttaatcagcattttgaaccaggttagctttttattttgtacttaaaattctggtactgacacttcacaggctaagtataaaatgaagttttgtgtgcacaattcaagtggactgtaaactgttggtatattcagtgatgcagttctgaacttgtatatggcatgatgtatttttatcttacagaataaatcaattgtatatatttttctcttgataaatagctgtatgaaatttgtttcctgaatatttttcttctcttgtacaatatcctgacatcctaccagtatttgtcctaccgggtttttgttgttttctgttctgtataatagtatctaatgttggcaaaaattgaattttttgaagtatacagagtgttatgggttttggaatttgtggacacagatttagaagatcaccatttacaaataaaatattttacatcta

SEQ ID NO: 318256 - DNA, 3032 bp, Homo sapiens
taactgtttttaattgtaaaattccagacagagatataaaagttggcattaatacaggggaaagaactcaatgcgaatcattacatgccctgtgtttgtgggtattgtgtgtttcagtcaggccctgaaatcacacaagcgtgtatattggtcagccagtgtttgttgcatgggctaatctttttcttcaaggagcatttggcagggtttacctaagtttggctttgaaactgaatttgcatactcatatttaagtagatctacctgcaggccaatagtgttaacataagctagaagaccattttattatcggggaaaacgctgatgagttatttctgtcgtgggccatcctttgaccagcttgagattgtctgtagtctccatcagatggggtgactttgtgtctgctttgcttcttttcagcttcctggggttgaggcatgtgaaaattataccttccgatacggccgaaatcctctcatggaacttcctcttgccgttaaccccacaggttgtgcccgttctgaacctaaaatgagtgcccatgtcaagaggtttgtgttaaggcctcacaccttaaacagcaccagcacctcaaagtcatttcagagcacagtcactggagaactgaacgcaccttatagtaaacagtttgttcactccaagtcatcgcagtaccggaagatgaaaactgaatggaaatccaatgtgtatctggcacggtctcggattcaggggctgggcctgtatgctgctcgagacattgagaaacacaccatggtcattgagtacatcgggactatcattcgaaacgaagtagccaacaggaaagagaagctttatgagtctcagaaccgtggtgtgtacatgttccgcatggataacgaccatgtgattgacgcgacgctcacaggagggcccgcaaggtatatcaaccattcgtgtgcacctaattgtgtggctgaagtggtgacttttgagagaggacacaaaattatcatcagctccagtcggagaatccagaaaggagaagagctctgctatgactataagtttgactttgaagatgaccagcacaagattccgtgtcactgtggagctgtgaactgccggaagtggatgaactgaaatgcattccttgctagctcagcgggcggcttgtccctaggaagaggcgattcaacacaccattggaattttgcagacagaaagagatttttgttttctgttttatgactttttgaaaaagcttctgggagttctgatttcctcagtcctttaggttaaagcagcgccaggaggaagctgacagaagcagcgttcctgaagtggccgaggttaaacggaatcacagaatggtccagcacttttgcttttttttcttttccttttcttttttttttgtttgttttttgttttgtttttcccttgtgggtgggtttcattgttttggttttctagtctcactaaggagaaacttttactggggcaaagagccgatggctgccctgccccgggcaggggccttcctatgaatgtaagactgaaatcaccagcgagggggacagagagtgctggccacggccttattaaaaaggggcaggccctctaacttcaaaatgtttttaaataaagtagacaccactgaacaaggaatgtactgaaatgacttccttagggatagagctaagggataataacttgcactaaatacatttaaatacttgattccatgagtcagtttattgtagtttttgatttctgtaaaataagagaaacttttgtatttattattgaataagtgaatgaagctatttttaaataaagttagaagaaagccaagctgctgctgttacctgcagaactaacaaaccctgttactttgtacagatatgtaaatattttgagaaaaaatacagtataaaaatagttattgaccaaatgctaccaggctctgcagcagctcgggggcttataaaatgttcatagggatgttacaatataattttgtgttataaaatatgccattataattatgtaataaccaaaatttcaacctagagtgttgggggttttttggaaaccgcagtctattagtactcaatggttttatacaccttacttctgacagagcggggcgtatgctacgactacaacttttatagctgttttggtaatttaaactaattttttcatattatattgttgcatccctacttcttcagtcaggtttttttgtgcttacaatttgtgataactgtgaataactgcttaaaaatacacccaaatggaggctgaattttttcttcagcaaaagtagttttgattagaactttgtttcagccacagagaatcatgtaaacgtaataggatcatgtagcagaaacttaaatctaaccctttagccttctatttaacacaaaaatttgaaaaagttaaaaaaaaaaaggagatgtgattatgcttacagctgcaggactctggcaatagggtttttggaagatgtaattttaaaatgtgtttgtatgaactgtttgtttacatttctttaataaaaaaaacactgttttgtgtttgcttgtagaaacttaatcagcattttgaaccaggttagctttttattttgtacttaaaattctggtactgacacttcacaggctaagtataaaatgaagttttgtgtgcacaattcaagtggactgtaaactgttggtatattcagtgatgcagttctgaacttgtatatggcatgatgtatttttatcttacagaataaatcaattgtatatatttttctcttgataaatagctgtatgaaatttgtttcctgaatatttttcttctcttgtacaatatcctgacatcctaccagtatttgtcctaccgggtttttgttgttttctgttctgtataatagtatctaatgttggcaaaaattgaattttttgaagtatacagagtgttatgggttttggaatttgtggacacagatttagaagatcaccatttacaaataaaatattttacatcta

SEQ ID NO: 318257 - DNA, 8239 bp, Homo sapiens
acctgggagctgagatggatcgtttacagccaggtgaggaagtggagatagctgagctcactacagattataacaatgaaatggaagttgaaggccctgaagatcaaatggtattctcagagcaggcagctaataaagatgtcaacggtcaggagtccactcctggaattgttccagatgcggttcaagtccacactgaagagcaacagaagagtcatccctcagaaagtcttgacacagatagtcttcttattgctgtatcatcccaacatacagtgaatactgaattggaaaaacagatttctaatgaagttgatagtgaagacctgaaaatgtcttctgaagtgaagcatatttgtggcgaagatcaaattgaagataaaatggaagtgacagaaaacattgaagtcgttacacaccagatcactgtgcagcaagaacaactgcagttgttagaggaacctgaaacagtggtatccagagaagaatcaaggcctccaaaattagtcatggaatctgtcactcttccactagaaaccttagtgtccccacatgaggaaagtatttcattatgtcctgaggaacagttggttatagaaaggctacaaggagaaaaggaacagaaagaaaattctgaactttctactggattgatggactctgaaatgactcctacaattgagggttgtgtgaaagatgtttcataccaaggaggcaaatctataaagttatcatctgagacagagtcatcattttcatcatcagcagacataagcaaggcagatgtgtcttcctccccaacaccttcttcagacttgccttcgcatgacatgctgcataattacccttcagctcttagttcctctgctggaaacatcatgccaacaacttacatctcagtcactccaaaaattggcatgggtaaaccagctattactaagagaaaattttctcctggtagacctcggtccaaacagggggcttggagtacccataatacagtgagcccaccttcctggtccccagacatttcagaaggtcgggaaatttttaaacccaggcagcttcctggcagtgccatttggagcatcaaagtgggccgtgggtctggatttccaggaaagcggagacctcgaggtgcaggactgtcggggcgaggtggccgaggcaggtcaaagctgaaaagtggaatcggagctgttgtattacctggggtgtctactgcagatatttcatcaaataaggatgatgaagaaaactctatgcacaatacagttgtgttgttttctagcagtgacaagttcactttgaatcaggatatgtgtgtagtttgtggcagttttggccaaggagcagaaggaagattacttgcctgttctcagtgtggtcagtgttaccatccatactgtgtcagtattaagatcactaaagtggttcttagcaaaggttggaggtgtcttgagtgcactgtgtgtgaggcctgtgggaaggcaactgacccaggaagactcctgctgtgtgatgactgtgacataagttatcacacctactgcctagaccctccattgcagacagttcccaaaggaggctggaagtgcaaatggtgtgtttggtgcagacactgtggagcaacatctgcaggtctaagatgtgaatggcagaacaattacacacagtgcgctccttgtgcaagcttatcttcctgtccagtctgctatcgaaactatagagaagaagatcttattctgcaatgtagacaatgtgatagatggatgcatgcagtttgtcagaacttaaatactgaggaagaagtggaaaatgtagcagacattggttttgattgtagcatgtgcagaccctatatgcctgcgtctaatgtgccttcctcagactgctgtgaatcttcacttgtagcacaaattgtcacaaaagtaaaagagctagacccacccaagacttatacccaggatggtgtgtgtttgactgaatcagggatgactcagttacagagcctcacagttacagttccaagaagaaaacggtcaaaaccaaaattgaaattgaagattataaatcagaatagcgtggccgtccttcagacccctccagacatccaatcagagcattcaagggatggtgaaatggatgatagtcgagaaggagaacttatggattgtgatggaaaatcagaatctagtcctgagcgggaagctgtggatgatgaaactaagggagtggaaggaacagatggtgtcaaaaagagaaaaaggaaaccatacagaccaggtattggtggatttatggtgcggcaaagaagtcgaactgggcaagggaaaaccaaaagatctgtgatcagaaaagattcctcaggctctatttccgagcagttaccttgcagagatgatggctggagtgagcagttaccagatactttagttgatgaatctgtttctgttactgaaagcactgaaaaaataaagaagagataccgaaaaaggaaaaataagcttgaagaaactttccctgcctatttacaagaagctttctttggaaaagatcttctagatacaagtagacaaagcaagataagtttagataatctgtcagaagatggagctcagcttttatataaaacaaacatgaacacaggtttcttggatccttccttagatccactacttagttcatcctcggctccaacaaaatctggaactcacggtcctgctgatgacccattagctgatatttctgaagttttaaacacagatgatgacattcttggaataatttcagatgatctagcaaaatcagttgatcattcagatattggtcctgtcactgatgatccttcctctttgcctcagccaaatgtcaatcagagttcacgaccattaagtgaagaacagctagatgggatcctcagtcctgaactagacaaaatggtcacagatggagcaattcttggaaaattatataaaattccagagcttggcggaaaagatgttgaagacttatttacagctgtacttagtcctgcgaacactcagccaactccattgccacagcctcccccaccaacacagctgttgccaatacacaatcaggatgctttttcacggatgcctctcatgaatggccttattggatccagtcctcatctcccacataattctttgccacctggaagcggactgggaactttctctgcaattgcacaatcctcttatcctgatgccagggataaaaattcagcctttaatccaatggcaagtgatcctaacaactcttggacatcatcagctcccactgtggaaggagaaaatgacacaatgtcgaatgcccagagaagcacgcttaagtgggagaaagaggaggctctgggtgaaatggcaactgttgccccagttctctacaccaatattaatttccccaacttaaaggaagaattccctgattggactactagagtgaagcaaattgccaaattgtggagaaaagcaagctcacaagaaagagcaccatatgtgcaaaaagccagagataacagagctgctttacgcattaataaagtacagatgtcaaatgattccatgaaaaggcagcaacagcaagatagcattgatcccagctctcgtattgattcggagctttttaaagatcctttaaagcaaagagaatcagaacatgaacaggaatggaaatttagacagcaaatgcgtcagaaaagtaagcagcaagctaaaattgaagccacacagaaacttgaacaggtgaaaaatgagcagcagcagcagcaacaacagcaatttggttctcagcatcttctggtgcagtctggttcagatacaccaagtagtgggatacagagtcccttgacacctcagcctggcaatggaaatatgtctcctgcacagtcattccataaagaactgtttacaaaacagccacccagtacccctacgtctacatcttcagatgatgtgtttgtaaagccacaagctccacctcctcctccagccccatcccggattcccatccaggatagtctttctcaggctcagacttctcagccaccctcaccgcaagtgttttcacctgggtcctctaactcacgaccaccatctccaatggatccatatgcaaaaatggttggtacccctcgaccacctcctgtgggccatagtttttccagaagaaattctgctgcaccagtggaaaactgtacacctttatcatcggtatctaggccccttcaaatgaatgagacaacagcaaataggccatcccctgtcagagatttatgttcttcttccacgacaaataatgacccctatgcaaaacctccagacacacctaggcctgtgatgacagatcaatttcccaaatccttgggcctatcccggtctcctgtagtttcagaacaaactgcaaaaggccctatagcagctggaaccagtgatcactttactaaaccatctcctagggcagatgtgtttcaaagacaaaggatacctgactcatatgcacgacccttgttgacacctgcacctcttgatagtggtcctggaccttttaagactccaatgcaacctcctccatcctctcaggatccttatggatcagtgtcacaggcatcaaggcgattgtctgttgacccttatgaaaggcctgctttgacaccaagacctatagataatttttctcataatcagtcaaatgatccatatagtcagcctccccttaccccacatccagcagtgaatgaatcttttgcccatccttcaagggctttttcccagcctggaaccatatcaaggccaacatctcaggacccatactcccaacccccaggaactccacgacctgttgtagattcttattcccaatcttcaggaacagctaggtccaatacagacccttactctcaacctcctggaactccccggcctactactgttgacccatatagtcagcagccccaaaccccaagaccatctacacaaactgacttgtttgttacacctgtaacaaatcagaggcattctgatccatatgctcatcctcctggaacaccaagacctggaatttctgtcccttactctcagccaccagcaacaccaaggccaaggatttcagagggttttactaggtcctcaatgacaagaccagtcctcatgccaaatcaggatcctttcctgcaagcagcacaaaaccgaggaccagctttacctggcccgttggtaaggccacctgatacatgttcccagacacctaggccccctggacctggtctttcagacacatttagccgtgtttccccatctgctgcccgtgatccctatgatcagtctccaatgactccaagatctcagtctgactcttttggaacaagtcaaactgcccatgatgttgctgatcagccaaggcctggatcagaggggagcttctgtgcatcttcaaactctccaatgcactcccaaggccagcagttctctggtgtctcccaacttcctggacctgtgccaacttcaggagtaactgatacacagaatactgtaaatatggcccaagcagatacagagaaattgagacagcggcagaagttacgtgaaatcattctccagcagcaacagcagaagaagattgcaggtcgacaggagaaggggtcacaggactcacccgcagtgcctcatccagggcctcttcaacactggcaaccagagaatgttaaccaggctttcaccagacccccacctccctatcctgggaacattaggtctcctgttgcccctcctttaggacctagatatgctgttttcccaaaagatcagcgtggaccctatcctcctgatgttgctagtatggggatgagacctcatggatttagatttggatttccaggaggtagtcatggtaccatgccgagtcaagagcgcttccttgtgcctcctcagcaaatacagggatctggagtttctccacagctaagaagatcagtatctgtagatatgcctaggcctttaaataactcacaaatgaataatccagttggacttcctcagcatttttcaccacagagcttgccagttcagcagcacaacatactgggccaagcatatattgaactgagacatagggctcctgacggaaggcaacggctgcctttcagtgctccacctggcagcgttgtagaggcatcttctaatctgagacatggaaacttcattccccggccagactttccgggccctagacacacagaccccatgcgacgacctccccagggtctacctaatcagctacctgtgcacccagatttggaacaagtgccaccatctcaacaagagcaaggtcattctgtccattcatcttctatggtcatgaggactctgaaccatccactaggtggtgaattttcagaagctcctttgtcaacatctgtaccgtctgaaacaacgtctgataatttacagataaccacccagccttctgatggtctagaggaaaaacttgattctgatgacccttctgtgaaggaactggatgttaaagaccttgagggggttgaagtcaaagacttagatgatgaagatcttgaaaacttaaatttagatacagaggatggcaaggtagttgaattggatactttagataatttggaaactaatgatcccaacctggatgacctcttaaggtcaggagagtttgatatcattgcatatacagatccagaacttgacatgggagataagaaaagcatgtttaatgaggaactagaccttccaattgatgataagttagataatcagtgtgtatctgttgaaccaaaaaaaaaggaacaagaaaacaaaactctggttctctctgataaacattcaccacagaaaaaatccactgttaccaatgaggtaaaaacggaagtactgtctccaaattctaaggtggaatccaaatgtgaaactgaaaaaaatgatgagaataaagataatgttgacactccttgctcacaggcttctgctcactcagacctaaatgatggagaaaagacttctttgcatccttgtgatccagatctatttgagaaaagaaccaatcgagaaactgctggccccagtgcaaatgtcattcaggcatccactcaactacctgctcaagatgtaataaactcttgtggcataactggatcaactccagttctctcaagtttacttgctaatgagaaatctgataattcagacattaggccatcggggtctccaccaccaccaactctgccggcctccccatccaatcatgtgtcaagtttgcctcctttcatagcaccgcctggccgtgttttggataatgccatgaattctaatgtgacagtagtctctagggtaaaccatgttttttctcagggtgtgcaggtaaacccagggctcattccaggtcaatcaacagttaaccacagtctggggacaggaaaacctgcaactcaaactgggcctcaaacaagtcagtctggtaccagtagcatgtctggaccccaacagctaatgattcctcaaacattagcacagcagaatagagagaggccccttcttctagaagaacagcctctacttctacaggatcttttggatcaagaaaggcaagaacagcagcagcaaagacagatgcaagccatgattcgtcagcgatcagaaccgttcttccctaatattgattttgatgcaattacagatcctataatgaaagccaaaatggtggcccttaaaggtataaataaagtgatggcacaaaacaatctgggcatgccaccaatggtgatgagcaggttcccttttatgggccaggtggtaactggaacacagaacagtgaaggacagaaccttggaccacaggccattcctcaggatggcagtataacacatcagatttctaggcctaatcctccaaattttggtccaggctttgtcaatgattcacagcgtaagcagtatgaagagtggctccaggagacccaacagctgcttcaaatgcagcagaagtatcttgaagaacaaattggtgctcacagaaaatctaagaaggccctttcagctaaacaacgtactgccaagaaagctgggcgtgaatttccagaggaagatgcagaacaactcaagcatgttactgaacagcaaagcatggttcagaaacagctagaacaggtaataaataggtttgcaaaatagaaactaccaacaattaatga

SEQ ID NO: 318258 - DNA, 6301 bp, Homo sapiens
acctgggagctgagatggatcgtttacagccaggtgaggaagtggagatagctgagctcactacagattataacaatgaaatggaagttgaaggccctgaagatcaaatggtattctcagagcaggcagctaataaagatgtcaacggtcaggagtccactcctggaattgttccagatgcggttcaagtccacactgaagagcaacagaagagtcatccctcagaaagtcttgacacagatagtcttcttattgctgtatcatcccaacatacagtgaatactgaattggaaaaacagatttctaatgaagttgatagtgaagacctgaaaatgtcttctgaagtgaagcatatttgtggcgaagatcaaattgaagataaaatggaagtgacagaaaacattgaagtcgttacacaccagatcactgtgcagcaagaacaactgcagttgttagaggaacctgaaacagtggtatccagagaagaatcaaggcctccaaaattagtcatggaatctgtcactcttccactagaaaccttagtgtccccacatgaggaaagtatttcattatgtcctgaggaacagttggttatagaaaggctacaaggagaaaaggaacagaaagaaaattctgaactttctactggattgatggactctgaaatgactcctacaattgagggttgtgtgaaagatgtttcataccaaggaggcaaatctataaagttatcatctgagacagagtcatcattttcatcatcagcagacataagcaaggcagatgtgtcttcctccccaacaccttcttcagacttgccttcgcatgacatgctgcataattacccttcagctcttagttcctctgctggaaacatcatgccaacaacttacatctcagtcactccaaaaattggcatgggtaaaccagctattactaagagaaaattttctcctggtagacctcggtccaaacagggggcttggagtacccataatacagtgagcccaccttcctggtccccagacatttcagaaggtcgggaaatttttaaacccaggcagcttcctggcagtgccatttggagcatcaaagtgggccgtgggtctggatttccaggaaagcggagacctcgaggtgcaggactgtcggggcgaggtggccgaggcaggtcaaagctgaaaagtggaatcggagctgttgtattacctggggtgtctactgcagatatttcatcaaataaggatgatgaagaaaactctatgcacaatacagttgtgttgttttctagcagtgacaagttcactttgaatcaggatatgtgtgtagtttgtggcagttttggccaaggagcagaaggaagattacttgcctgttctcagtgtggtcagtgttaccatccatactgtgtcagtattaagatcactaaagtggttcttagcaaaggttggaggtgtcttgagtgcactgtgtgtgaggcctgtgggaaggcaactgacccaggaagactcctgctgtgtgatgactgtgacataagttatcacacctactgcctagaccctccattgcagacagttcccaaaggaggctggaagtgcaaatggtgtgtttggtgcagacactgtggagcaacatctgcaggtctaagatgtgaatggcagaacaattacacacagtgcgctccttgtgcaagcttatcttcctgtccagtctgctatcgaaactatagagaagaagatcttattctgcaatgtagacaatgtgatagatggatgcatgcagtttgtcagaacttaaatactgaggaagaagtggaaaatgtagcagacattggttttgattgtagcatgtgcagaccctatatgcctgcgtctaatgtgccttcctcagactgctgtgaatcttcacttgtagcacaaattgtcacaaaagtaaaagagctagacccacccaagacttatacccaggatggtgtgtgtttgactgaatcagggatgactcagttacagagcctcacagttacagttccaagaagaaaacggtcaaaaccaaaattgaaattgaagattataaatcagaatagcgtggccgtccttcagacccctccagacatccaatcagagcattcaagggatggtgaaatggatgatagtcgagaaggagaacttatggattgtgatggaaaatcagaatctagtcctgagcgggaagctgtggatgatgaaactaagggagtggaaggaacagatggtgtcaaaaagagaaaaaggaaaccatacagaccaggtattggtggatttatggtgcggcaaagaagtcgaactgggcaagggaaaaccaaaagatctgtgatcagaaaagattcctcaggctctatttccgagcagttaccttgcagagatgatggctggagtgagcagttaccagatactttagttgatgaatctgtttctgttactgaaagcactgaaaaaataaagaagagataccgaaaaaggaaaaataagcttgaagaaactttccctgcctatttacaagaagctttctttggaaaagatcttctagatacaagtagacaaagcaagataagtttagataatctgtcagaagatggagctcagcttttatataaaacaaacatgaacacaggtttcttggatccttccttagatccactacttagttcatcctcggctccaacaaaatctggaactcacggtcctgctgatgacccattagctgatatttctgaagttttaaacacagatgatgacattcttggaataatttcagatgatctagcaaaatcagttgatcattcagatattggtcctgtcactgatgatccttcctctttgcctcagccaaatgtcaatcagagttcacgaccattaagtgaagaacagctagatgggatcctcagtcctgaactagacaaaatggtcacagatggagcaattcttggaaaattatataaaattccagagcttggcggaaaagatgttgaagacttatttacagctgtacttagtcctgcgaacactcagccaactccattgccacagcctcccccaccaacacagctgttgccaatacacaatcaggatgctttttcacggatgcctctcatgaatggccttattggatccagtcctcatctcccacataattctttgccacctggaagcggactgggaactttctctgcaattgcacaatcctcttatcctgatgccagggataaaaattcagcctttaatccaatggcaagtgatcctaacaactcttggacatcatcagctcccactgtggaaggagaaaatgacacaatgtcgaatgcccagagaagcacgcttaagtgggagaaagaggaggctctgggtgaaatggcaactgttgccccagttctctacaccaatattaatttccccaacttaaaggaagaattccctgattggactactagagtgaagcaaattgccaaattgtggagaaaagcaagctcacaagaaagagcaccatatgtgcaaaaagccagagataacagagctgctttacgcattaataaagtacagatgtcaaatgattccatgaaaaggcagcaacagcaagatagcattgatcccagctctcgtattgattcggagctttttaaagatcctttaaagcaaagagaatcagaacatgaacaggaatggaaatttagacagcaaatgcgtcagaaaagtaagcagcaagctaaaattgaagccacacagaaacttgaacaggtgaaaaatgagcagcagcagcagcaacaacagcaatttggttctcagcatcttctggtgcagtctggttcagatacaccaagtagtgggatacagagtcccttgacacctcagcctggcaatggaaatatgtctcctgcacagtcattccataaagaactgtttacaaaacagccacccagtacccctacgtctacatcttcagatgatgtgtttgtaaagccacaagctccacctcctcctccagccccatcccggattcccatccaggatagtctttctcaggctcagacttctcagccaccctcaccgcaagtgttttcacctgggtcctctaactcacgaccaccatctccaatggatccatatgcaaaaatggttggtacccctcgaccacctcctgtgggccatagtttttccagaagaaattctgctgcaccagtggaaaactgtacacctttatcatcggtatctaggccccttcaaatgaatgagacaacagcaaataggccatcccctgtcagagatttatgttcttcttccacgacaaataatgacccctatgcaaaacctccagacacacctaggcctgtgatgacagatcaatttcccaaatccttgggcctatcccggtctcctgtagtttcagaacaaactgcaaaaggccctatagcagctggaaccagtgatcactttactaaaccatctcctagggcagatgtgtttcaaagacaaaggatacctgactcatatgcacgacccttgttgacacctgcacctcttgatagtggtcctggaccttttaagactccaatgcaacctcctccatcctctcaggatccttatggatcagtgtcacaggcatcaaggcgattgtctgttgacccttatgaaaggcctgctttgacaccaagacctatagataatttttctcataatcagtcaaatgatccatatagtcagcctccccttaccccacatccagcagtgaatgaatcttttgcccatccttcaagggctttttcccagcctggaaccatatcaaggccaacatctcaggacccatactcccaacccccaggaactccacgacctgttgtagattcttattcccaatcttcaggaacagctaggtccaatacagacccttactctcaacctcctggaactccccggcctactactgttgacccatatagtcagcagccccaaaccccaagaccatctacacaaactgacttgtttgttacacctgtaacaaatcagaggcattctgatccatatgctcatcctcctggaacaccaagacctggaatttctgtcccttactctcagccaccagcaacaccaaggccaaggatttcagagggttttactaggtcctcaatgacaagaccagtcctcatgccaaatcaggatcctttcctgcaagcagcacaaaaccgaggaccagctttacctggcccgttggtaaggccacctgatacatgttcccagacacctaggccccctggacctggtctttcagacacatttagccgtgtttccccatctgctgcccgtgatccctatgatcagtctccaatgactccaagatctcagtctgactcttttggaacaagtcaaactgcccatgatgttgctgatcagccaaggcctggatcagaggggagcttctgtgcatcttcaaactctccaatgcactcccaaggccagcagttctctggtgtctcccaacttcctggacctgtgccaacttcaggagtaactgatacacagaatactgtaaatatggcccaagcagatacagagaaattgagacagcggcagaagttacgtgaaatcattctccagcagcaacagcagaagaagattgcaggtcgacaggagaaggggtcacaggactcacccgcagtgcctcatccagggcctcttcaacactggcaaccagagaatgttaaccaggctttcaccagacccccacctccctatcctgggaacattaggtctcctgttgcccctcctttaggacctagatatgctgttttcccaaaagatcagcgtggaccctatcctcctgatgttgctagtatggggatgagacctcatggatttagatttggatttccaggaggtagtcatggtaccatgccgagtcaagagcgcttccttgtgcctcctcagcaaatacagggatctggagtttctccacagctaagaagatcagtatctgtagatatgcctaggcctttaaataactcacaaatgaataatccagttggacttcctcagcatttttcaccacagagcttgccagttcagcagcacaacatactgggccaagcatatattgaactgagacatagggctcctgacggaaggcaacggctgcctttcagtgctccacctggcagcgttgtagaggcatcttctaatctgagacatggtacggctgtaagcggccagacggttacgagcacgttgacaccactgatcacccatgtgacgactttacatgggtcatcagtgta

SEQ ID NO: 318259 - DNA, 708 bp, Homo sapiens
ttagatttaagtttctgctacatgatcctattacgtttacatgtttctctgtggctgaaacaaagttctaatcaaaactacttttgctgaagaaaaaattcagcctccatttgggtgtatttttaagcagttattcacagttatcacaaattgtaagcaccaacaaacctgactgaagatgtaattttaaaatgtgtttgtatgaactgtttgtttacatttctttaataaaaaaaacactgttttgtgtttgcttgtagaaacttaatcagcattttgaaccaggttagctttttattttgtacttaaaattctggtactgacacttcacaggctaagtataaaatgaagttttgtgtgcacaattcaagtggactgtaaactgttggtatattcagtgatgcagttctgaacttgtatatggcatgatgtatttttatcttacagaataaatcaattgtatatatttttctcttgataaatagctgtatgaaatttgtttcctgaatatttttcttctcttgtacaatatcctgacatcctaccagtatttgtcctaccgggtttttgttgttttctgttctgtataatagtatctaatgttggcaaaaattgaattttttgaagtatacagagtgttatgggttttggaatttgtggacacagatttagaagatcaccatttacaaataaaatattttacatcta

SEQ ID NO: 318260 - DNA, 2625 bp, Homo sapiens
acctgggagctgagatggatcgtttacagccaggtgaggaagtggagatagctgagctcactacagattataacaatgaaatggaagttgaaggccctgaagatcaaatggtattctcagagcaggcagctaataaagatgtcaacggtcaggagtccactcctggaattgttccagatgcggttcaagtccacactgaagagcaacagaagagtcatccctcagaaagtcttgacacagatagtcttcttattgctgtatcatcccaacatacagtgaatactgaattggaaaaacagatttctaatgaagttgatagtgaagacctgaaaatgtcttctgaagtgaagcatatttgtggcgaagatcaaattgaagataaaatggaagtgacagaaaacattgaagtcgttacacaccagatcactgtgcagcaagaacaactgcagttgttagaggaacctgaaacagtggtatccagagaagaatcaaggcctccaaaattagtcatggaatctgtcactcttccactagaaaccttagtgtccccacatgaggaaagtatttcattatgtcctgaggaacagttggttatagaaaggctacaaggagaaaaggaacagaaagaaaattctgaactttctactggattgatggactctgaaatgactcctacaattgagggttgtgtgaaagatgtttcataccaaggaggcaaatctataaagttatcatctgagacagagtcatcattttcatcatcagcagacataagcaaggcagatgtgtcttcctccccaacaccttcttcagacttgccttcgcatgacatgctgcataattacccttcagctcttagttcctctgctggaaacatcatgccaacaacttacatctcagtcactccaaaaattggcatgggtaaaccagctattactaagagaaaattttctcctggtagacctcggtccaaacagggggcttggagtacccataatacagtgagcccaccttcctggtccccagacatttcagaaggtcgggaaatttttaaacccaggcagcttcctggcagtgccatttggagcatcaaagtgggccgtgggtctggatttccaggaaagcggagacctcgaggtgcaggactgtcggggcgaggtggccgaggcaggtcaaagctgaaaagtggaatcggagctgttgtattacctggggtgtctactgcagatatttcatcaaataaggatgatgaagaaaactctatgcacaatacagttgtgttgttttctagcagtgacaagttcactttgaatcaggatatgtgtgtagtttgtggcagttttggccaaggagcagaaggaagattacttgcctgttctcagtgtggtcagtgttaccatccatactgtgtcagtattaagatcactaaagtggttcttagcaaaggttggaggtgtcttgagtgcactgtgtgtgaggcctgtgggaaggcaactgacccaggaagactcctgctgtgtgatgactgtgacataagttatcacacctactgcctagaccctccattgcagacagttcccaaaggaggctggaagtgcaaatggtgtgtttggtgcagacactgtggagcaacatctgcaggtctaagatgtgaatggcagaacaattacacacagtgcgctccttgtgcaagcttatcttcctgtccagtctgctatcgaaactatagagaagaagatcttattctgcaatgtagacaatgtgatagatggatgcatgcagtttgtcagaacttaaatactgaggaagaagtggaaaatgtagcagacattggttttgattgtagcatgtgcagaccctatatgcctgcgtctaatgtgccttcctcagactgctgtgaatcttcacttgtagcacaaattgtcacaaaagtaaaagagctagacccacccaagacttatacccaggatggtgtgtgtttgactgaatcagggatgactcagttacagagcctcacagttacagttccaagaagaaaacggtcaaaaccaaaattgaaattgaagattataaatcagaatagcgtggccgtccttcagacccctccagacatccaatcagagcattcaagggatggtgaaatggatgatagtcgaggtaatactaatttattttccatgaaatatgtgtgcaagaattaaagcatataaagtaacttttgaaatatgtgtatgatttaccaaagggtaaatcacactgacttagttaacccctgatgtgactgacccttgccatttccaaatgagtgatcttcttagaccttgccttttcaggttctcttcctttcacacattttagaacagacctaccttacagaaatctcaaggagcaccatatctttgaagatcacaggtggggaactacagagggcttgactttagtttgctagataacgacacaaaccttctcagatactgtgagcttggataataccatgtttcagttaaggtagttgatgcatacattctagaaatggaaaagctttcatttaatgttacttcaggtataacttcatattcaccagtgtgcatcataaagtattggtttataaacattttcttgatc

SEQ ID NO: 318261 - DNA, 2074 bp, Homo sapiens
acctgggagctgagatggatcgtttacagccaggtgaggaagtggagatagctgagctcactacagattataacaatgaaatggaagttgaaggccctgaagatcaaatggtattctcagagcaggcagctaataaagatgtcaacggtcaggagtccactcctggaattgttccagatgcggttcaagtccacactgaagagcaacagaagagtcatccctcagaaagtcttgacacagatagtcttcttattgctgtatcatcccaacatacagtgaatactgaattggaaaaacagatttctaatgaagttgatagtgaagacctgaaaatgtcttctgaagtgaagcatatttgtggcgaagatcaaattgaagataaaatggaagtgacagaaaacattgaagtcgttacacaccagatcactgtgcagcaagaacaactgcagttgttagaggaacctgaaacagtggtatccagagaagaatcaaggcctccaaaattagtcatggaatctgtcactcttccactagaaaccttagtgtccccacatgaggaaagtatttcattatgtcctgaggaacagttggttatagaaaggctacaaggagaaaaggaacagaaagaaaattctgaactttctactggattgatggactctgaaatgactcctacaattgagggttgtgtgaaagatgtttcataccaaggaggcaaatctataaagttatcatctgagacagagtcatcattttcatcatcagcagacataagcaaggcagatgtgtcttcctccccaacaccttcttcagacttgccttcgcatgacatgctgcataattacccttcagctcttagttcctctgctggaaacatcatgccaacaacttacatctcagtcactccaaaaattggcatgggtaaaccagctattactaagagaaaattttctcctggtagacctcggtccaaacagggggcttggagtacccataatacagtgagcccaccttcctggtccccagacatttcagaaggtcgggaaatttttaaacccaggcagcttcctggcagtgccatttggagcatcaaagtgggccgtgggtctggatttccaggaaagcggagacctcgaggtgcaggactgtcggggcgaggtggccgaggcaggtcaaagctgaaaagtggaatcggagctgttgtattacctggggtgtctactgcagatatttcatcaaataaggatgatgaagaaaactctatgcacaatacagttgtgttgttttctagcagtgacaagttcactttgaatcaggatatgtgtgtagtttgtggcagttttggccaaggagcagaaggaagattacttgcctgttctcagtgtggtcagtgttaccatccatactgtgtcagtattaagatcactaaagtggttcttagcaaaggttggaggtgtcttgagtgcactgtgtgtgaggcctgtgggaaggcaactgacccaggaagactcctgctgtgtgatgactgtgacataagttatcacacctactgcctagaccctccattgcagacagttcccaaaggaggctggaagtgcaaatggtactctagggtttgtttgccttgttagtctttcaagttcagagctttctcataccactttggtttttaaaaattagccacacctatttaattgaataatacacatattctatgatagataccagtaatcagaaaaattttcacatacacattaaatcatttcccccattatgttcgtatgtagcttcctgaattacagtaactgagtaactaagaaaataaaattgagacttttcggggggatttggatttcaggtgtgtttggtgcagacactgtggagcaacatctgcaggtctaagatgtgaatggcagaacaattacacacagtgcgctccttgtgcaagcttatcttcctgtccagtctgctatcgaaactatagagaagaagatcttattctgcaatgtagacaatgtgataggtattgtgctattttttcatctttttaaagcttttctctttgaaatgtagc

SEQ ID NO: 318262 - DNA, 728 bp, Homo sapiens
ccgtgttggtattcacccagttgaggtagttaaccaacttcaggttctcttccaggctggaggcaagcaggggtgaaggacaccaggcttgtcacatcttctgggtgtgctggatgggtgaggacactctcctcttcccttgcctttctgaagtttctcccacctcagaatgtcagtgtgcccatttcctgacacttgggtatttatggccactctcctgccctcttcctaggatgaagtcactagagggcagtagatcgcagcagcactgatttctgtcctctcttgacatttctttgcttaaaagattacaagcctgtttgtcagtgagtctaactgaaccatatctacacaatagttttagaaaattgtatgattctaaggcattgttttcaagaataaaaatatcattggtgtgttttctttggacaggcagaggaaaccccaaaagccactgagtaatgtgcctaattgttttctttggaatcgccctgcctaaatgatacttatcttttatgactacagagaaataaatttcacaagcaatgtattccagaaaagacctttaacatgtaaatgactttgagtaaagcttgagttaacacctatgctttatgcttccaggacatggagagcgataacctcatcacatcagagtcaaattgaaaggagtgagaaacgatcaagaaagaaaccatatagatgattttttaactgtttttaattgt

SEQ ID NO: 318263 - DNA, 245 bp, Homo sapiens
catgtttctttatttttgccctagtgtcagataatcgactctgtaaccattgcttagaagataaattttttttattaattaaagaataatgttaatgaaccatgttgtaatgagttgatactgcataatttttcaccatgtgccaccttgtgtcatcagtcagttttaattactaacaaaagttgattgcctttaggtctttctggatataaggattctagtcatggtattgcagaaagcgcagc

SEQ ID NO: 318264 - DNA, 500 bp, Homo sapiens
tggagggaagcccctggaagtaagctttctgaccacctgtaggaactgacggggtctgtcagatgttacaatatctaaaatagtttaatgtgttactagatatttaatgttaattggaatccctttatgaggatttctgtttataaatttctttttttggatattagttcgttagagctaatttttttcctgaggttctttaagtctaaataaaatttgttggattttcttagaatctatgtatcatgcaaagaggatttatcctaagtgtgtatttttcttcagtggttcactgttgccttctgggtgaataatacagcatttgcatttggttttagaacattagcagtgttgtggctgcattttccgaccttcttcacgtccgaatccctaacagctatgaggttagcagtgctccagatgtcccatccatgggtttggtcagtagccacagaatcaacccgggtttggagtatcgacagcatttacttctccgtggg

SEQ ID NO: 318265 - DNA, 188 bp, Homo sapiens
gcaatctggtagcgctgacatcaaacaaattaactttctgttgctttttccccccatgatggtagttttcttccttaacctaaatatgattgctttttcttttctattttaatagcaaatgcgtcagaaaagtaagcagcaagctaaaattgaagccacacagaaacttgaacaggtgaaaaatgagc

SEQ ID NO: 318266 - DNA, 240 bp, Homo sapiens
tatctgctgtactctaggtttttagcaaatggcttaatatctgagaaaatactgaaattttaaaaaacatatttactatatttaggtcctgctgatgacccattagctgatatttctgaagttttaaacacagatgatgacattcttggaataatttcagatgatctagcaaaatcagttgatcattcaggtatatatgaatactgtttaccctttttctggtttctgatgtgagcgaga

SEQ ID NO: 318267 - DNA, 539 bp, Homo sapiens
gaattacagactttatttctctattttaatcatattgttatatactaagtacaggtaaatagtgctatacatttttgtgtgagtattctgaatgtacctttaaatttattttccttactcttgtagatattggtcctgtcactgatgatccttcctctttgcctcagccaaatgtcaatcagagttcacgaccattaagtgaagaacagctagatgggatcctcagtcctgaactagacaaaatggtcacagatggtaaaatatttgccctacatctaggctttctaaaagacctgagtaaatatgatttttaaagatttttgcatggttataatttaacttctaattatttctgtcagttaaatactattttatatcagtatattgaattagtagctgttaatgtttctttttttttttaatttattctaggagcaattcttggaaaattatataaaattccaggtaaatgtgttttgattttctagttaatgaaaatggcgttccccataccaggaccctactagtcttttaatctt

SEQ ID NO: 318268 - DNA, 4417 bp, Homo sapiens
aagaggcgtcggctccacccctctcagagtcgcggtctgacgcgagatgacagcaacgagttcggtatgtctatgcaaataagcgccctcttgtgggccaatggggagcggaggtgccggaaccacggaccaatggggcgggggcgctggggctcaccatataaggagcggcctcgccataaaaggaaacattgtatctctttatatggggggaagggtcgggggatccctccgccgccagcgcgtggtcccggccccctccacccgccgtctcggccgcggccagcagcccctgccccccgggggacgctgacggccgcccggcgcgccgccctagcagacggacagggggcgctgcgcgcggcctggggcaacccgggccacaggggcaggaaagtgagggcccaggtcggcccgggcgtgcaggggccccgggttcgcagcggcggccgcggcagcgatagcggcactagcagcagcgggagtgccgggttgagccgggaagccgatggcggcggctgcggcggctccgattcctcgctgactgcccgtccgccctcctgcatcgagcgccatgttaccgacccaagctggggccgcggcggctctgggccggggctcggccctggggggcagcctgaaccggaccccgacggggcggccgggcggcggcggcgggacacgcggggctaacgggggccgggtccccgggaatggcgcggggctcgggcccggccgcctggagcgggaggctgcggcagcggcggcaaccaccccggcgcccaccgcgggggccctctacagcggcagcgagggcgactcggagtcgggcgaggaggaggagctgggcgccgagcggcgcggcctgaagcggagcctgagcgagatggagatcggtatggtggtcggtgggcccgaggcgtcggcagcggccaccgggggctacgggccggtgagcggcgcggtgagcggggccaagccgggtaagaagacccggggccgcgtgaagatcaagatggagttcatcgacaacaagctgcggcgctacacgaccttcagcaagaggaagacgggcatcatgaagaaggcctatgagctgtccacgctgacagggacacaggtgctgttgctggtggccagtgagacaggccatgtgtatacctttgccacccgaaaactgcagcccatgatcaccagtgagaccggcaaggcactgattcagacctgcctcaactcgccagactctccaccccgttcagaccccacaacagaccagagaatgagtgccactggctttgaagagacagatctcacctaccaggtgtcggagtctgacagcagtggggagaccaaggacacactgaagccggcgttcacagtcaccaacctgccgggtacaacctccaccatccaaacagcacctagcacctctaccaccatgcaagtcagcagcggcccctcctttcccatcaccaactacctggcaccagtgtctgctagtgtcagccccagtgctgtcagcagtgccaatgggactgtgctgaagagtacaggcagcggccctgtctcctctgggggccttatgcagctgcctaccagcttcaccctcatgcctggtggggcagtggcccagcaggtcccagtgcaggccattcaagtgcaccaggccccacagcaagcgtctccctcccgtgacagcagcacagacctcacgcagacctcctccagcgggacagtgacgctgcccgccaccatcatgacgtcatccgtgcccacaactgtgggtggccacatgatgtaccctagcccgcatgcggtgatgtatgcccccacctcgggcctgggtgatggcagcctcaccgtgctgaatgccttctcccaggcaccatccaccatgcaggtgtcacacagccaggtccaggagccaggtggcgtcccccaggtgttcctgacagcatcatctgggacagtgcagatccctgtttcagcagttcagctccaccagatggctgtgatagggcagcaggccgggagcagcagcaacctcaccgagctacaggtggtgaacctggacaccgcccacagcaccaagagtgaatgatccgcccgccgccctggacagatggcccaagggatggcaccacttatttattgttgccttttcacgttttctttacacacacgttgacgggccgcaggagggaggcggggaggaggaacgggcagccacaggactgagccctctcactccagccaaagaaatgggcctgcctgcctccacccgtcctccctcagcctccccttcttcccgccccacctcccatttctgttgctggaggggctgtcctccttcctgggaccccctcgccagcttggctcgatgtttgccatgagtattagcttacccaatgggaccgtgccccacctccccacacacaggccttctgtggggctgggcaccgtgtcctcctctgaggaagcagttggggccctcttgccagcctccttgctgaccccaggtcagccctgtgtctgtcacaggctgggtcaaaagagccctggctctgcccctcagggggccagctggggagatgggggcttcttcctcacactgctgtcctctcccccttcagctcctgagtagctgggcctgtgcactgggcaggttcctggggccgcctgccctgccttgccgctccccttggacctccaggggctcctgggttggagggaaccaccagcgttcccttctcccccttgtcttcccccctctcctcccagctgctttacttaaagttgattttgaactttttatttgaggagacgaagtgaaaacaaatctataaatatatatttttaaaatatttaacttttttttatggcgtttttctcgtccccctccctgcccaaactccccttccctggggagccctcaggctccccagaactggctgggcccctggggacagagccaccccatgagctcggggtccaccagtgtgtgggggagattctgggtttgcccagtcctgggttgtttccaggagaaagccgggggaggggccctcaggccattccccaacggggtggggagggtgacccacagctctgggcctctttttgccctttagggctgttgctagggagagggaagagggagaccaaatgtcggggttggggtgggagggcgtcaggcagaggcaactgacttcatttgtgccacacgcatgggcattgcagccttgcgctgtcccaggcatgcagctgcctggggcccaagttgcagtgagcagggtggggtctgggagggggtgagaggcaggaatgggggtcagaagaagtgggagcagcttcttgggctgagtgcagccaaaggggagccagaaatgggcagttctcccagggagtgagcagctactgtaacttttttaaattaagacaaaaagccttgaagaaaatgactttatttttctaagtgtaacctcagtatttatgtaatttgtacaggggccatgccccacccccctcctccccctttggggtagaccttgagggtgggccagcataggggggagggtcttttaccctgtgtcagagcctaccttcaccacctatatccagaaggggagctttttcagaaacagggcagcagtggggtgaaattttcttaacccctaagactgccttcagtaggaacaagctggcttctgtgattaggtgaagggatgggggaagattttatgcacagcctagttatcaaggggatgatttgccgacatgtttgagaaccccctaacctctaaccctcattgctgtcttgccccagtttggggtgccaagatggaagtcacctttctgggctttctcctggagatagctggggcttatgggtggctttcaaggctggggcatggcaaatcaggggccagagagcaggggagcttgggactcaggtctgtaactgcccagccccttttctctgctcttgtttcactccaccatcactcactcactccccactcccccacccatggggaggagacctttgatgaattcttcctctccttcccacaaaagacagacccagtgagtgaatcaggcaaagtgcttataatgtgtgttgtgtgagcgtggccttgggaggacatgcgtgtgtcagggatgagttgaggtgatatttttatgtgcagcgacccttggtgtttcccttcctcggtggctctggggtatgtgtgtgtgggtgtgtgcgcctgagtgagtgtgtgtgcttgaatgtgagtgtgtatgtcagtggtttctacttcccctgggatgctgacccaggaatagtggacatggtcacagtcctatgtacagagctttcttttgtattaaaaaaaaatactctttcaataaatgtatcatttttgtgcacaga

SEQ ID NO: 318269 - DNA, 4282 bp, Homo sapiens
aagaggcgtcggctccacccctctcagagtcgcggtctgacgcgagatgacagcaacgagttcggtatgtctatgcaaataagcgccctcttgtgggccaatggggagcggaggtgccggaaccacggaccaatggggcgggggcgctggggctcaccatataaggagcggcctcgccataaaaggaaacattgtatctctttatatggggggaagggtcgggggatccctccgccgccagcgcgtggtcccggccccctccacccgccgtctcggccgcggccagcagcccctgccccccgggggacgctgacggccgcccggcgcgccgccactagcagcagcgggagtgccgggttgagccgggaagccgatggcggcggctgcggcggctccgattcctcgctgactgcccgtccgccctcctgcatcgagcgccatgttaccgacccaagctggggccgcggcggctctgggccggggctcggccctggggggcagcctgaaccggaccccgacggggcggccgggcggcggcggcgggacacgcggggctaacgggggccgggtccccgggaatggcgcggggctcgggcccggccgcctggagcgggaggctgcggcagcggcggcaaccaccccggcgcccaccgcgggggccctctacagcggcagcgagggcgactcggagtcgggcgaggaggaggagctgggcgccgagcggcgcggcctgaagcggagcctgagcgagatggagatcggtatggtggtcggtgggcccgaggcgtcggcagcggccaccgggggctacgggccggtgagcggcgcggtgagcggggccaagccgggtaagaagacccggggccgcgtgaagatcaagatggagttcatcgacaacaagctgcggcgctacacgaccttcagcaagaggaagacgggcatcatgaagaaggcctatgagctgtccacgctgacagggacacaggtgctgttgctggtggccagtgagacaggccatgtgtatacctttgccacccgaaaactgcagcccatgatcaccagtgagaccggcaaggcactgattcagacctgcctcaactcgccagactctccaccccgttcagaccccacaacagaccagagaatgagtgccactggctttgaagagacagatctcacctaccaggtgtcggagtctgacagcagtggggagaccaaggacacactgaagccggcgttcacagtcaccaacctgccgggtacaacctccaccatccaaacagcacctagcacctctaccaccatgcaagtcagcagcggcccctcctttcccatcaccaactacctggcaccagtgtctgctagtgtcagccccagtgctgtcagcagtgccaatgggactgtgctgaagagtacaggcagcggccctgtctcctctgggggccttatgcagctgcctaccagcttcaccctcatgcctggtggggcagtggcccagcaggtcccagtgcaggccattcaagtgcaccaggccccacagcaagcgtctccctcccgtgacagcagcacagacctcacgcagacctcctccagcgggacagtgacgctgcccgccaccatcatgacgtcatccgtgcccacaactgtgggtggccacatgatgtaccctagcccgcatgcggtgatgtatgcccccacctcgggcctgggtgatggcagcctcaccgtgctgaatgccttctcccaggcaccatccaccatgcaggtgtcacacagccaggtccaggagccaggtggcgtcccccaggtgttcctgacagcatcatctgggacagtgcagatccctgtttcagcagttcagctccaccagatggctgtgatagggcagcaggccgggagcagcagcaacctcaccgagctacaggtggtgaacctggacaccgcccacagcaccaagagtgaatgatccgcccgccgccctggacagatggcccaagggatggcaccacttatttattgttgccttttcacgttttctttacacacacgttgacgggccgcaggagggaggcggggaggaggaacgggcagccacaggactgagccctctcactccagccaaagaaatgggcctgcctgcctccacccgtcctccctcagcctccccttcttcccgccccacctcccatttctgttgctggaggggctgtcctccttcctgggaccccctcgccagcttggctcgatgtttgccatgagtattagcttacccaatgggaccgtgccccacctccccacacacaggccttctgtggggctgggcaccgtgtcctcctctgaggaagcagttggggccctcttgccagcctccttgctgaccccaggtcagccctgtgtctgtcacaggctgggtcaaaagagccctggctctgcccctcagggggccagctggggagatgggggcttcttcctcacactgctgtcctctcccccttcagctcctgagtagctgggcctgtgcactgggcaggttcctggggccgcctgccctgccttgccgctccccttggacctccaggggctcctgggttggagggaaccaccagcgttcccttctcccccttgtcttcccccctctcctcccagctgctttacttaaagttgattttgaactttttatttgaggagacgaagtgaaaacaaatctataaatatatatttttaaaatatttaacttttttttatggcgtttttctcgtccccctccctgcccaaactccccttccctggggagccctcaggctccccagaactggctgggcccctggggacagagccaccccatgagctcggggtccaccagtgtgtgggggagattctgggtttgcccagtcctgggttgtttccaggagaaagccgggggaggggccctcaggccattccccaacggggtggggagggtgacccacagctctgggcctctttttgccctttagggctgttgctagggagagggaagagggagaccaaatgtcggggttggggtgggagggcgtcaggcagaggcaactgacttcatttgtgccacacgcatgggcattgcagccttgcgctgtcccaggcatgcagctgcctggggcccaagttgcagtgagcagggtggggtctgggagggggtgagaggcaggaatgggggtcagaagaagtgggagcagcttcttgggctgagtgcagccaaaggggagccagaaatgggcagttctcccagggagtgagcagctactgtaacttttttaaattaagacaaaaagccttgaagaaaatgactttatttttctaagtgtaacctcagtatttatgtaatttgtacaggggccatgccccacccccctcctccccctttggggtagaccttgagggtgggccagcataggggggagggtcttttaccctgtgtcagagcctaccttcaccacctatatccagaaggggagctttttcagaaacagggcagcagtggggtgaaattttcttaacccctaagactgccttcagtaggaacaagctggcttctgtgattaggtgaagggatgggggaagattttatgcacagcctagttatcaaggggatgatttgccgacatgtttgagaaccccctaacctctaaccctcattgctgtcttgccccagtttggggtgccaagatggaagtcacctttctgggctttctcctggagatagctggggcttatgggtggctttcaaggctggggcatggcaaatcaggggccagagagcaggggagcttgggactcaggtctgtaactgcccagccccttttctctgctcttgtttcactccaccatcactcactcactccccactcccccacccatggggaggagacctttgatgaattcttcctctccttcccacaaaagacagacccagtgagtgaatcaggcaaagtgcttataatgtgtgttgtgtgagcgtggccttgggaggacatgcgtgtgtcagggatgagttgaggtgatatttttatgtgcagcgacccttggtgtttcccttcctcggtggctctggggtatgtgtgtgtgggtgtgtgcgcctgagtgagtgtgtgtgcttgaatgtgagtgtgtatgtcagtggtttctacttcccctgggatgctgacccaggaatagtggacatggtcacagtcctatgtacagagctttcttttgtattaaaaaaaaatactctttcaataaatgtatcatttttgtgcacaga

SEQ ID NO: 318270 - DNA, 3405 bp, Homo sapiens
cgcaaccgtggggaaaggcgcagaggtgggagtgaccggcgccagagaggaagagggcccttgctgagtgaaggggcctatgagctgtccacgctgacagggacacaggtgctgttgctggtggccagtgagacaggccatgtgtatacctttgccacccgaaaactgcagcccatgatcaccagtgagaccggcaaggcactgattcagacctgcctcaactcgccagactctccaccccgttcagaccccacaacagaccagagaatgagtgccactggctttgaagagacagatctcacctaccaggtgtcggagtctgacagcagtggggagaccaaggacacactgaagccggcgttcacagtcaccaacctgccgggtacaacctccaccatccaaacagcacctagcacctctaccaccatgcaagtcagcagcggcccctcctttcccatcaccaactacctggcaccagtgtctgctagtgtcagccccagtgctgtcagcagtgccaatgggactgtgctgaagagtacaggcagcggccctgtctcctctgggggccttatgcagctgcctaccagcttcaccctcatgcctggtggggcagtggcccagcaggtcccagtgcaggccattcaagtgcaccaggccccacagcaagcgtctccctcccgtgacagcagcacagacctcacgcagacctcctccagcgggacagtgacgctgcccgccaccatcatgacgtcatccgtgcccacaactgtgggtggccacatgatgtaccctagcccgcatgcggtgatgtatgcccccacctcgggcctgggtgatggcagcctcaccgtgctgaatgccttctcccaggcaccatccaccatgcaggtgtcacacagccaggtccaggagccaggtggcgtcccccaggtgttcctgacagcatcatctgggacagtgcagatccctgtttcagcagttcagctccaccagatggctgtgatagggcagcaggccgggagcagcagcaacctcaccgagctacaggtggtgaacctggacaccgcccacagcaccaagagtgaatgatccgcccgccgccctggacagatggcccaagggatggcaccacttatttattgttgccttttcacgttttctttacacacacgttgacgggccgcaggagggaggcggggaggaggaacgggcagccacaggactgagccctctcactccagccaaagaaatgggcctgcctgcctccacccgtcctccctcagcctccccttcttcccgccccacctcccatttctgttgctggaggggctgtcctccttcctgggaccccctcgccagcttggctcgatgtttgccatgagtattagcttacccaatgggaccgtgccccacctccccacacacaggccttctgtggggctgggcaccgtgtcctcctctgaggaagcagttggggccctcttgccagcctccttgctgaccccaggtcagccctgtgtctgtcacaggctgggtcaaaagagccctggctctgcccctcagggggccagctggggagatgggggcttcttcctcacactgctgtcctctcccccttcagctcctgagtagctgggcctgtgcactgggcaggttcctggggccgcctgccctgccttgccgctccccttggacctccaggggctcctgggttggagggaaccaccagcgttcccttctcccccttgtcttcccccctctcctcccagctgctttacttaaagttgattttgaactttttatttgaggagacgaagtgaaaacaaatctataaatatatatttttaaaatatttaacttttttttatggcgtttttctcgtccccctccctgcccaaactccccttccctggggagccctcaggctccccagaactggctgggcccctggggacagagccaccccatgagctcggggtccaccagtgtgtgggggagattctgggtttgcccagtcctgggttgtttccaggagaaagccgggggaggggccctcaggccattccccaacggggtggggagggtgacccacagctctgggcctctttttgccctttagggctgttgctagggagagggaagagggagaccaaatgtcggggttggggtgggagggcgtcaggcagaggcaactgacttcatttgtgccacacgcatgggcattgcagccttgcgctgtcccaggcatgcagctgcctggggcccaagttgcagtgagcagggtggggtctgggagggggtgagaggcaggaatgggggtcagaagaagtgggagcagcttcttgggctgagtgcagccaaaggggagccagaaatgggcagttctcccagggagtgagcagctactgtaacttttttaaattaagacaaaaagccttgaagaaaatgactttatttttctaagtgtaacctcagtatttatgtaatttgtacaggggccatgccccacccccctcctccccctttggggtagaccttgagggtgggccagcataggggggagggtcttttaccctgtgtcagagcctaccttcaccacctatatccagaaggggagctttttcagaaacagggcagcagtggggtgaaattttcttaacccctaagactgccttcagtaggaacaagctggcttctgtgattaggtgaagggatgggggaagattttatgcacagcctagttatcaaggggatgatttgccgacatgtttgagaaccccctaacctctaaccctcattgctgtcttgccccagtttggggtgccaagatggaagtcacctttctgggctttctcctggagatagctggggcttatgggtggctttcaaggctggggcatggcaaatcaggggccagagagcaggggagcttgggactcaggtctgtaactgcccagccccttttctctgctcttgtttcactccaccatcactcactcactccccactcccccacccatggggaggagacctttgatgaattcttcctctccttcccacaaaagacagacccagtgagtgaatcaggcaaagtgcttataatgtgtgttgtgtgagcgtggccttgggaggacatgcgtgtgtcagggatgagttgaggtgatatttttatgtgcagcgacccttggtgtttcccttcctcggtggctctggggtatgtgtgtgtgggtgtgtgcgcctgagtgagtgtgtgtgcttgaatgtgagtgtgtatgtcagtggtttctacttcccctgggatgctgacccaggaatagtggacatggtcacagtcctatgtacagagctttcttttgtattaaaaaaaaatactctttcaataaatgtatcatttttgtgcacaga

SEQ ID NO: 318271 - DNA, 4312 bp, Homo sapiens
aagaggcgtcggctccacccctctcagagtcgcggtctgacgcgagatgacagcaacgagttcggtatgtctatgcaaataagcgccctcttgtgggccaatggggagcggaggtgccggaaccacggaccaatggggcgggggcgctggggctcaccatataaggagcggcctcgccataaaaggaaacattgtatctctttatatggggggaagggtcgggggatccctccgccgccagcgcgtggtcccggccccctccacccgccgtctcggccgcggccagcagcccctgccccccgggggacgctgacggccgcccggcgcgccgccctagcagacggacagggggcgctgcgcgcggcctggggcaacccgggccacaggggcaggaaagtgagggcccaggtcggcccgggcgtgcaggggccccgggttcgcagcggcggccgcggcagcgatagcggcactagcagcagcgggagtgccgggttgagccgggaagccgatggcggcggctgcggcggctccgattcctcgctgactgcccgtccgccctcctgcatcgagcgccatgttaccgacccaagctggggccgcggcggctctgggccggggctcggccctggggggcagcctgaaccggaccccgacggggcggccgggcggcggcggcgggacacgcggggctaacgggggccgggtccccgggaatggcgcggggctcgggcccggccgcctggagcgggaggctgcggcagcggcggcaaccaccccggcgcccaccgcgggggccctctacagcggcagcgagggcgactcggagtcgggcgaggaggaggagctgggcgccgagcggcgcggcctgaagcggagcctgagcgagatggagatcggtatggtggtcggtgggcccgaggcgtcggcagcggccaccgggggctacgggccggtgagcggcgcggtgagcggggccaagccgggtaagaagacccggggccgcgtgaagatcaagatggagttcatcgacaacaagctgcggcgctacacgaccttcagcaagaggaagacgggcatcatgaagaaggcctatgagctgtccacgctgacagggacacaggtgctgttgctggtggccagtgagacaggccatgtgtatacctttgccacccgaaaactgcagcccatgatcaccagtgagaccggcaaggcactgattcagacctgcctcaactcgccagactctccaccccgttcagaccccacaacagaccagagaatgagtgccactggctttgaagagacagatctcacctaccaggtgtcggagtctgacagcagtggggagaccaaggacacactgaagccggcgttcacagtcaccaacctgccgggtacaacctccaccatccaaacagcacctagcacctctaccaccatgcaagtcagcagcggcccctcctttcccatcaccaactacctggcaccagtgtctgctagtgtcagccccagtgctgtcagcagtgccaatgggactgtgctgaagagtacaggcagcggccctgtctcctctgggggccttatgcagctgcctaccagcttcaccctcatgcctggtggggcagtggcccagcaggtcccagtgcaggccattcaagtgcaccaggccccacagcaagcgtctccctcccgtgacagcagcacagacctcacgcagacctcctccagcgggacagtgacgctgcccgccaccatcatgacgtcatccgtgcccacaactgtgggtggccacatgatgtaccctagcccgcatgcggtgatgtatgcccccacctcgggcctgggtgatggcagcctcaccgtgctgaatgccttctcccaggcaccatccaccatgcaggtgtcacacagccaggtccaggagccaggtggcgtcccccaggtgttcctgacagcatcatctgggacagtgcagatccctgtttcagcagttcagctccaccagatggctgtgatagggcagcaggccgggagcagcagcaacctcaccgagctacaggtggtgaacctggacaccgcccacagcaccaagagtgaatgatccgcccgccgccctggacagatggcccaagggatggcaccacttatttattgttgccttttcacgttttctttacacacacgttgacgggccgcaggagggaggcggggaggaggaacgggcagccacaggactgagccctctcactccagccaaagaaatgggcctgcctgcctccacccgtcctccctcagcctccccttcttcccgccccacctcccatttctgttgctggaggggctgtcctccttcctgggaccccctcgccagcttggctcgatgtttgccatgagtattagcttacccaatgggaccgtgccccacctccccacacacaggccttctgtggggctgggcaccgtgtcctcctctgaggaagcagttggggccctcttgccagcctcactgctgtcctctcccccttcagctcctgagtagctgggcctgtgcactgggcaggttcctggggccgcctgccctgccttgccgctccccttggacctccaggggctcctgggttggagggaaccaccagcgttcccttctcccccttgtcttcccccctctcctcccagctgctttacttaaagttgattttgaactttttatttgaggagacgaagtgaaaacaaatctataaatatatatttttaaaatatttaacttttttttatggcgtttttctcgtccccctccctgcccaaactccccttccctggggagccctcaggctccccagaactggctgggcccctggggacagagccaccccatgagctcggggtccaccagtgtgtgggggagattctgggtttgcccagtcctgggttgtttccaggagaaagccgggggaggggccctcaggccattccccaacggggtggggagggtgacccacagctctgggcctctttttgccctttagggctgttgctagggagagggaagagggagaccaaatgtcggggttggggtgggagggcgtcaggcagaggcaactgacttcatttgtgccacacgcatgggcattgcagccttgcgctgtcccaggcatgcagctgcctggggcccaagttgcagtgagcagggtggggtctgggagggggtgagaggcaggaatgggggtcagaagaagtgggagcagcttcttgggctgagtgcagccaaaggggagccagaaatgggcagttctcccagggagtgagcagctactgtaacttttttaaattaagacaaaaagccttgaagaaaatgactttatttttctaagtgtaacctcagtatttatgtaatttgtacaggggccatgccccacccccctcctccccctttggggtagaccttgagggtgggccagcataggggggagggtcttttaccctgtgtcagagcctaccttcaccacctatatccagaaggggagctttttcagaaacagggcagcagtggggtgaaattttcttaacccctaagactgccttcagtaggaacaagctggcttctgtgattaggtgaagggatgggggaagattttatgcacagcctagttatcaaggggatgatttgccgacatgtttgagaaccccctaacctctaaccctcattgctgtcttgccccagtttggggtgccaagatggaagtcacctttctgggctttctcctggagatagctggggcttatgggtggctttcaaggctggggcatggcaaatcaggggccagagagcaggggagcttgggactcaggtctgtaactgcccagccccttttctctgctcttgtttcactccaccatcactcactcactccccactcccccacccatggggaggagacctttgatgaattcttcctctccttcccacaaaagacagacccagtgagtgaatcaggcaaagtgcttataatgtgtgttgtgtgagcgtggccttgggaggacatgcgtgtgtcagggatgagttgaggtgatatttttatgtgcagcgacccttggtgtttcccttcctcggtggctctggggtatgtgtgtgtgggtgtgtgcgcctgagtgagtgtgtgtgcttgaatgtgagtgtgtatgtcagtggtttctacttcccctgggatgctgacccaggaatagtggacatggtcacagtcctatgtacagagctttcttttgtattaaaaaaaaatactctttcaataaatgtatcatttttgtgcacaga

SEQ ID NO: 318272 - DNA, 4634 bp, Homo sapiens
  misc_feature (4420)..(4424): n is a, c, g, or t
aagaggcgtcggctccacccctctcagagtcgcggtctgacgcgagatgacagcaacgagttcggtatgtctatgcaaataagcgccctcttgtgggccaatggggagcggaggtgccggaaccacggaccaatggggcgggggcgctggggctcaccatataaggagcggcctcgccataaaaggaaacattgtatctctttatatggggggaagggtcgggggatccctccgccgccagcgcgtggtcccggccccctccacccgccgtctcggccgcggccagcagcccctgccccccgggggacgctgacggccgcccggcgcgccgccctagcagacggacagggggcgctgcgcgcggcctggggcaacccgggccacaggggcaggaaagtgagggcccaggtcggcccgggcgtgcaggggccccgggttcgcagcggcggccgcggcagcgatagcggcactagcagcagcgggagtgccgggttgagccgggaagccgatggcggcggctgcggcggctccgattcctcgctgactgcccgtccgccctcctgcatcgagcgccatgttaccgacccaagctggggccgcggcggctctgggccggggctcggccctggggggcagcctgaaccggaccccgacggggcggccgggcggcggcggcgggacacgcggggctaacgggggccgggtccccgggaatggcgcggggctcgggcccggccgcctggagcgggaggctgcggcagcggcggcaaccaccccggcgcccaccgcgggggccctctacagcggcagcgagggcgactcggagtcgggcgaggaggaggagctgggcgccgagcggcgcggcctgaagcggagcctgagcgagatggagatcggtatggtggtcggtgggcccgaggcgtcggcagcggccaccgggggctacgggccggtgagcggcgcggtgagcggggccaagccgggtaagaagacccggggccgcgtgaagatcaagatggagttcatcgacaacaagctgcggcgctacacgaccttcagcaagaggaagacgggcatcatgaagaaggcctatgagctgtccacgctgacagggacacaggtgctgttgctggtggccagtgagacaggccatgtgtatacctttgccacccgaaaactgcagcccatgatcaccagtgagaccggcaaggcactgattcagacctgcctcaactcgccagactctccaccccgttcagaccccacaacagaccagagaatgagtgccactggctttgaagagacagatctcacctaccaggtgtcggagtctgacagcagtggggagaccaaggacacactgaagccggcgttcacagtcaccaacctgccgggtacaacctccaccatccaaacagcacctagcacctctaccaccatgcaagtcagcagcggcccctcctttcccatcaccaactacctggcaccagtgtctgctagtgtcagccccagtgctgtcagcagtgccaatgggactgtgctgaagagtacaggcagcggccctgtctcctctgggggccttatgcagctgcctaccagcttcaccctcatgcctggtggggcagtggcccagcaggtcccagtgcaggccattcaagtgcaccaggccccacagcaagcgtctccctcccgtgacagcagcacagacctcacgcagacctcctccagcgggacagtgacgctgcccgccaccatcatgacgtcatccgtgcccacaactgtgggtggccacatgatgtaccctagcccgcatgcggtgatgtatgcccccacctcgggcctgggtgatggcagcctcaccgtgctgaatgccttctcccaggcaccatccaccatgcaggtgtcacacagccaggtccaggagccaggtggcgtcccccaggtgttcctgacagcatcatctgggacagtgcagatccctgtttcagcagttcagctccaccagatggctgtgatagggcagcaggccgggagcagcagcaacctcaccgagctacaggtggtgaacctggacaccgcccacagcaccaagagtgaatgatccgcccgccgccctggacagatggcccaagggatggcaccacttatttattgttgccttttcacgttttctttacacacacgttgacgggccgcaggagggaggcggggaggaggaacgggcagccacaggactgagccctctcactccagccaaagaaatgggcctgcctgcctccacccgtcctccctcagcctccccttcttcccgccccacctcccatttctgttgctggaggggctgtcctccttcctgggaccccctcgccagcttggctcgatgtttgccatgagtattagcttacccaatgggaccgtgccccacctccccacacacaggccttctgtggggctgggcaccgtgtcctcctctgaggaagcagttggggccctcttgccagcctccttgctgaccccaggtcagccctgtgtctgtcacaggctgggtcaaaagagccctggctctgcccctcagggggccagctggggagatgggggcttcttcctcacactgctgtcctctcccccttcagctcctgagtagctgggcctgtgcactgggcaggttcctggggccgcctgccctgccttgccgctccccttggacctccaggggctcctgggttggagggaaccaccagcgttcccttctcccccttgtcttcccccctctcctcccagctgctttacttaaagttgattttgaactttttatttgaggagacgaagtgaaaacaaatctataaatatatatttttaaaatatttaacttttttttatggcgtttttctcgtccccctccctgcccaaactccccttccctggggagccctcaggctccccagaactggctgggcccctggggacagagccaccccatgagctcggggtccaccagtgtgtgggggagattctgggtttgcccagtcctgggttgtttccaggagaaagccgggggaggggccctcaggccattccccaacggggtggggagggtgacccacagctctgggcctctttttgccctttagggctgttgctagggagagggaagagggagaccaaatgtcggggttggggtgggagggcgtcaggcagaggcaactgacttcatttgtgccacacgcatgggcattgcagccttgcgctgtcccaggcatgcagctgcctggggcccaagttgcagtgagcagggtggggtctgggagggggtgagaggcaggaatgggggtcagaagaagtgggagcagcttcttgggctgagtgcagccaaaggggagccagaaatgggcagttctcccagggagtgagcagctactgtaacttttttaaattaagacaaaaagccttgaagaaaatgactttatttttctaagtgtaacctcagtatttatgtaatttgtacaggggccatgccccacccccctcctccccctttggggtagaccttgagggtgggccagcataggggggagggtcttttaccctgtgtcagagcctaccttcaccacctatatccagaaggggagctttttcagaaacagggcagcagtggggtgaaattttcttaacccctaagactgccttcagtaggaacaagctggcttctgtgattaggtgaagggatgggggaagattttatgcacagcctagttatcaaggggatgatttgccgacatgtttgagaaccccctaacctctaaccctcattgctgtcttgccccagtttggggtgccaagatggaagtcacctttctgggctttctcctggagatagctggggcttatgggtggctttcaaggctggggcatggcaaatcaggggccagagagcaggggagcttgggactcaggtctgtaactgcccagccccttttctctgctcttgtttcactccaccatcactcactcactccccactcccccacccatggggaggagacctttgatgaattcttcctctccttcccacaaaagacagacccagtgagtgaatcaggcaaagtgcttataatgtgtgttgtgtgagcgtggccttgggaggacatgcgtgtgtcagggatgagttgaggtgatatttttatgtgcagcgacccttggtgtttcccttcctcggtggctctggggtatgtgtgtgtgggtgtgtgcgcctgagtgagtgtgtgtgcttgaatgtgagtgtgtatgtcagtggtttctacttcccctgggatgctgacccaggaatagtggacatggtcacagtcctatgtacagagctttcttttgtattaaaaaaaaatactctttcaataaatgtatcatttttgtgcacagacgnnnnnagaagaaaaaaaaaaaaaaagaaaaaaaaaaaataaaaaaaaataaaaaaaattataaaatataaaaacaaaaataagaaaaagaaaaaaatactagttgtgggggggggcgggccttgtacttttggggaggggccctctccccccgtggggggggggaaaaaaattggcggggggggggggaaagaaaaatggtgggggggggggggg

SEQ ID NO: 318273 - DNA, 1156 bp, Homo sapiens
ggaaaaagttactacacatgctaggctttctcggtggggtctgggagggggtgagaggcaggaatgggggtcagaagaagtgggagcagcttcttgggctgagtgcagccaaaggggagccagaaatgggcagttctcccagggagtgagcagctactgtaacttttttaaattaagacaaaaagccttgaagaaaatgactttatttttctaagtgtaacctcagtatttatgtaatttgtacaggggccatgccccacccccctcctccccctttggggtagaccttgagggtgggccagcataggggggagggtcttttaccctgtgtcagagcctaccttcaccacctatatccagaaggggagctttttcagaaacagggcagcagtggggtgaaattttcttaacccctaagactgccttcagtaggaacaagctggcttctgtgattaggtgaagggatgggggaagattttatgcacagcctagttatcaaggggatgatttgccgacatgtttgagaaccccctaacctctaaccctcattgctgtcttgccccagtttggggtgccaagatggaagtcacctttctgggctttctcctggagatagctggggcttatgggtggctttcaaggctggggcatggcaaatcaggggccagagagcaggggagcttgggactcaggtctgtaactgcccagccccttttctctgctcttgtttcactccaccatcactcactcactccccactcccccacccatggggaggagacctttgatgaattcttcctctccttcccacaaaagacagacccagtgagtgaatcaggcaaagtgcttataatgtgtgttgtgtgagcgtggccttgggaggacatgcgtgtgtcagggatgagttgaggtgatatttttatgtgcagcgacccttggtgtttcccttcctcggtggctctggggtatgtgtgtgtgggtgtgtgcgcctgagtgagtgtgtgtgcttgaatgtgagtgtgtatgtcagtggtttctacttcccctgggatgctgacccaggaatagtggacatggtcacagtcctatgtacagagctttcttttgtattaaaaaaaaatactctttcaataaatgtatcatttttgtgcacaga

SEQ ID NO: 318274 - DNA, 4273 bp, Homo sapiens
aagaggcgtcggctccacccctctcagagtcgcggtctgacgcgagatgacagcaacgagttcggtatgtctatgcaaataagcgccctcttgtgggccaatggggagcggaggtgccggaaccacggaccaatggggcgggggcgctggggctcaccatataaggagcggcctcgccataaaaggaaacattgtatctctttatatggggggaagggtcgggggatccctccgccgccagcgcgtggtcccggccccctccacccgccgtctcggccgcggccagcagcccctgccccccgggggacgctgacggccgcccggcgcgccgccctagcagacggacagggggcgctgcgcgcggcctggggcaacccgggccacaggggcaggaaagtgagggcccaggtcggcccgggcgtgcaggggccccgggttcgcagcggcggccgcggcagcgatagcggcactagcagcagcgggagtgccgggttgagccgggaagccgatggcggcggctgcggcggctccgattcctcgctgactgcccgtccgccctcctgcatcgagcgccatgttaccgacccaagctggggccgcggcggctctgggccggggctcggccctggggggcagcctgaaccggaccccgacggggcggccgggcggcggcggcgggacacgcggggctaacgggggccgggtccccgggaatggcgcggggctcgggcccggccgcctggagcgggaggctgcggcagcggcggcaaccaccccggcgcccaccgcgggggccctctacagcggcagcgagggcgactcggagtcgggcgaggaggaggagctgggcgccgagcggcgcggcctgaagcggagcctgagcgagatggagatcggtatggtggtcggtgggcccgaggcgtcggcagcggccaccgggggctacgggccggtgagcggcgcggtgagcggggccaagccgggtaagaagacccggggccgcgtgaagatcaagatggagttcatcgacaacaagctgcggcgctacacgaccttcagcaagaggaagacgggcatcatgaagaaggcctatgagctgtccacgctgacagggacacaggtgctgttgctggtggccagtgagacaggccatgtgtatacctttgccacccgaaaactgcagcccatgatcaccagtgagaccggcaaggcactgattcagacctgcctcaactcgccagactctccaccccgttcagaccccacaacagaccagagaatgagtgccactggctttgaagagacagatctcacctaccaggtgtcggagtctgacagcagtggggagaccaaggacacactgaagccggcgttcacagtcaccaacctgccgggtacaacctccaccatccaaacagcacctagcacctctaccaccatgcaagtcagcagcggcccctcctttcccatcaccaactacctggcaccagtgtctgctagtgtcagccccagtgctgtcagcagtgccaatgggactgtgctgaagagtacaggcagcggccctgtctcctctgggggccttatgcagctgcctaccagcttcaccctcatgcctggtggggcagtggcccagcaggtcccagtgcaggccattcaagtgcaccaggccccacagcaagcgtctccctcccgtgacagcagcacagacctcacgcagacctcctccagcgggacagtgacgctgcccgccaccatcatgacgtcatccgtgcccacaactgtgggtggccacatgatgtaccctagcccgcatgcggtgatgtatgcccccacctcgggcctgggtgatggcagcctcaccgtgctgaatgccttctcccaggcaccatccaccatgcaggtgtcacacagccaggtccaggagccaggtggcgtcccccaggtgttcctgacagcatcatctgggacagtgcagatccctgtttcagcagttcagctccaccagatggctgtgatagggcagcaggccgggagcagcagcaacctcaccgagctacaggtggtgaacctggacaccgcccacagcaccaagagtgaatgatccgcccgccgccctggacagatggcccaagggatggcaccacttatttattgttgccttttcacgttttctttacacacacgttgacgggccgcaggagggaggcggggaggaggaacgggcagccacaggactgagccctctcactccagccaaagaaatgggcctgcctgcctccacccgtcctccctcagcctccccttcttcccgccccacctcccatttctgttgctggaggggctgtcctccttcctgggaccccctcgccagcttggctcgatgtttgccatgagtattagcttacccaatgggaccgtgccccacctccccacacacaggccttctgtggggctgggcaccgtgtcctcctctgaggaagcagttggggccctcttgccagcctccttgctgaccccaggtcagccctgtgtctgtcacaggctgggtcaaaagagccctggctctgcccctcagggggccagctggggagatgggggcttcttcctcacactgctgtcctctcccccttcagctcctgagtagctgggcctgtgcactgggcaggttcctggggccgcctgccctgccttgccgctccccttggacctccaggggctcctgggttggagggaaccaccagcgttcccttctcccccttgtcttcccccctctcctcccagctgctttacttaaagttgattttgaactttttatttgaggagacgaagtgaaaacaaatctataaatatatatttttaaaatatttaacttttttttatggcgtttttctcgtccccctccctgcccaaactccccttccctggggagccctcaggctccccagaactggctgggcccctggggacagagccaccccatgagctcggggtccaccagtgtgtgggggagattctgggtttgcccagtcctgggttgtttccaggagaaagccgggggaggggccctcaggccattccccaacggggtggggagggtgacccacagctctgggcctctttttgccctttagggctgttgctagggagagggaagagggagaccaaatgtcggggttggggtgggagggcgtcaggcagaggcaactgacttcatttgtgccacacgcatgggcattgcagccttgcgctgtcccaggcatgcagctgcctggggcccaagttgcagtgagcagggtggggtctgggagggggtgagaggcaggaatgggggtcagaagaagtgggagcagcttcttgggctgagtgcagccaaaggggagccagaaatgggcagttctcccagggagtgagcagctactgtaacttttttaaattaagacaaaaagccttgaagaaaatgactttatttttctaagtgtaacctcagtatttatgtaatttgtacaggggccatgccccacccccctcctccccctttggggtagaccttgagggtgggccagcataggggggagggtcttttaccctgtgtcagagcctaccttcaccacctatatccagaaggggagctttttcagaaacagggcagcagtggggtgaaattttcttaacccctaagactgccttcagtaggaacaagctggcttctgtgattaggtgaagggatgggggaagattttatgcacagcctagttatcaaggggatgatttgccgacatgtttgagaaccccctaacctctaaccctcattgctgtcttgccccagtttggggtgccaagatggaagtcacctttctgggctttctcctggagatagctggggcttatgggtggctttcaaggctggggcatggcaaatcaggggccagagagcaggggagcttgggactcaggtctgtaactgcccagccccttttctctgctcttgtttcactccaccatcactcactcactccccactcccccacccatggggaggagacctttgatgaattcttcctctccttcccacaaaagacagacccagtgagtgaatcaggcaaagtgcttataattgtgtgtgcttgaatgtgagtgtgtatgtcagtggtttctacttcccctgggatgctgacccaggaatagtggacatggtcacagtcctatgtacagagctttcttttgtattaaaaaaaaatactctttcaataaatgtatcatttttgtgcacaga

SEQ ID NO: 318275 - DNA, 1493 bp, Homo sapiens
  misc_feature (1279)..(1283): n is a, c, g, or t
aagaggcgtcggctccacccctctcagagtcgcggtctgacgcgagatgacagcaacgagttcggtatgtctatgcaaataagcgccctcttgtgggccaatggggagcggaggtgccggaaccacggaccaatggggcgggggcgctggggctcaccatataaggagcggcctcgccataaaaggaaacattgtatctctttatatggggggaagggtcgggggatccctccgccgccagcgcgtggtcccggccccctccacccgccgtctcggccgcggccagcagcccctgccccccgggggacgctgacggccgcccggcgcgccgccctagcagacggacagggggcgctgcgcgcggcctggggcaacccgggccacaggggcaggaaagtgagggcccaggtcggcccgggcgtgcaggggccccgggttcgcagcggcggccgcggcagcgatagcggcactagcagcagcgggagtgccgggttgagccgggaagccgatggcggcggctgcggcggctccgattcctcgctgactgcccgtccgccctcctgcatcgagcgccatgttaccgacccaagctggggccgcggcggctctgggccggggctcggccctggggggcagcctgaaccggaccccgacggggcggccgggcggcggcggcgggacacgcggggctaacgggggccgggtccccgggaatggcgcggggctcgggcccggccgcctggagcgggaggctgcggcagcggcggcaaccaccccggcgcccaccgcgggggccctctacagcggcagcgagggcgactcggagtcgggcgaggaggaggagctgggcgccgagcggcgcggcctgaagcggagcctgagcgagatggagatcggtatggtggtcggtgggcccgaggcgtcggcagcggccaccgggggctacgggccggtgagcggcgcggtgagcggggccaagccgggtaagaagacccggggccgcgtgaagatcaagatggagttcatcgacaacaagctgcggcgctacacgacccttggtgtttcccttcctcggtggctctggggtatgtgtgtgtgggtgtgtgcgcctgagtgagtgtgtgtgcttgaatgtgagtgtgtatgtcagtggtttctacttcccctgggatgctgacccaggaatagtggacatggtcacagtcctatgtacagagctttcttttgtattaaaaaaaaatactctttcaataaatgtatcatttttgtgcacagacgnnnnnagaagaaaaaaaaaaaaaaagaaaaaaaaaaaataaaaaaaaataaaaaaaattataaaatataaaaacaaaaataagaaaaagaaaaaaatactagttgtgggggggggcgggccttgtacttttggggaggggccctctccccccgtggggggggggaaaaaaattggcggggggggggggaaagaaaaatggtgggggggggggggg

SEQ ID NO: 318276 - DNA, 386 bp, Homo sapiens
ttctgacctgggaaatggcaagagggctctgggggcctggaattcctagggacggaatgggagttatcagtggggaccagtgccgagctgacacatgtctgtgtttgccagtgacgctgcccgccaccatcatgacgtcatccgtgcccacaactgtgggtggccacatgatgtaccctagcccgcatgcggtgatgtatgcccccacctcgggcctgggtgatggcagcctcaccgtgctgaatgccttctcccaggcaccatccaccatgcaggtgtcacacagccaggtccaggagccaggtgagtagaggagcagggctaaggaaaggaggaccgtttccttctttatacacacacacacacacacatacacacacatatgc

SEQ ID NO: 318277 - DNA, 347 bp, Homo sapiens
agcacctagcacctctaccaccatgcaagtcagcagcggcccctcctttcccatcaccaactacctggcaccagtgtctgctagtgtcagccccagtgctgtcagcagtgccaatgggactgtgctgaagagtacaggcagcggccctgtctcctctgggggccttatgcagctgcctaccagcttcaccctcatgcctggtgagtcacgaggggcagggagagattcgtccttcctggggcaaatcaagcatgctaagagtgtgtttagggctggcaccaagagaacctctttccctgctcagaaggaaggtgaataggggccagagcctgagcgaagcctcttat

SEQ ID NO: 318278 - DNA, 3631 bp, Homo sapiens
cgccggggtgacgtctgccgccggcgcgggcgggtgacgcgactgggcccgttgtctgtgtgtgggactgaggggccccgggggcggtgggggctcccggtgggggcagcggtggggagggagggcctggacatggcgctgaggggccgccccgcgggaagatgaataagggctggctggagctggagagcgacccaggcctcttcaccctgctcgtggaagatttcggtgtcaagggggtgcaagtggaggagatctacgaccttcagagcaaatgtcagggccctgtatatggatttatcttcctgttcaaatggatcgaagagcgccggtcccggcgaaaggtctctaccttggtggatgatacgtccgtgattgatgatgatattgtgaataacatgttctttgcccaccagctgatacccaactcttgtgcaactcatgccttgctgagcgtgctcctgaactgcagcagcgtggacctgggacccaccctgagtcgcatgaaggacttcaccaagggtttcagccctgagagcaaaggatatgcgattggcaatgccccggagttggccaaggcccataatagccatgccaggcccgagccacgccacctccctgagaagcagaatggccttagtgcagtgcggaccatggaggcgttccactttgtcagctatgtgcctatcacaggccggctctttgagctggatgggctgaaggtctaccccattgaccatgggccctggggggaggacgaggagtggacagacaaggcccggcgggtcatcatggagcgtatcggcctcgccactgcaggggagccctaccacgacatccgcttcaacctgatggcagtggtgcccgaccgcaggatcaagtatgaggccaggctgcatgtgctgaaggtgaaccgtcagacagtactagaggctctgcagcagctgataagagtaacacagccagagctgattcagacccacaagtctcaagagtcacagctgcctgaggagtccaagtcagccagcaacaagtccccgctggtgctggaagcaaacagggcccctgcagcctctgagggcaaccacacagatggtgcagaggaggcggctggttcatgcgcacaagccccatcccacagccctcccaacaaacccaagctagtggtgaagcctccaggcagcagcctcaatggggttcaccccaaccccactcccattgtccagcggctgccggcctttctagacaatcacaattatgccaagtcccccatgcaggaggaagaagacctggcggcaggtgtgggccgcagccgagttccagtccgcccaccccagcagtactcagatgatgaggatgactatgaggatgacgaggaggatgacgtgcagaacaccaactctgcccttaggtataaggggaagggaacagggaagccaggggcattgagcggttctgctgatgggcaactgtcagtgctgcagcccaacaccatcaacgtcttggctgagaagctcaaagagtcccagaaggacctctcaattcctctgtccatcaagactagcagcggggctgggagtccggctgtggcagtgcccacacactcgcagccctcacccacccccagcaatgagagtacagacacggcctctgagatcggcagtgctttcaactcgccactgcgctcgcctatccgctcagccaacccgacgcggccctccagccctgtcacctcccacatctccaaggtgctttttggagaggatgacagcctgctgcgtgttgactgcatacgctacaaccgtgctgtccgtgatctgggtcctgtcatcagcacaggcctgctgcacctggctgaggatggggtgctgagtcccctggcgctgacagagggtgggaagggttcctcgccctccatcagaccaatccaaggcagccaggggtccagcagcccagtggagaaggaggtcgtggaagccacggacagcagagagaagacggggatggtgaggcctggcgagcccttgagtggggagaaatactcacccaaggagctgctggcactgctgaagtgtgtggaggctgagattgcaaactatgaggcgtgcctcaaggaggaggtagagaagaggaagaagttcaagattgatgaccagagaaggacccacaactacgatgagttcatctgcacctttatctccatgctggctcaggaaggcatgctggccaacctagtggagcagaacatctccgtgcggcggcgccaaggggtcagcatcggccggctccacaagcagcggaagcctgaccggcggaaacgctctcgcccctacaaggccaagcgccagtgaggactgctggccctgactctgcagcccactcttgccgtgtggccctcaccagggtccttccctgccccacttccccttttcccagtattactgaatagtcccagctggagagtccaggccctgggaatgggaggaaccaggccacattccttccatcgtgccctgaggcctgacacggcagatcagccccatagtgctcaggaggcagcatctggagttggggcacagcgaggtactgcagcttcctccacagccggctgtggagcagcaggacctggcccttctgcctgggcagcagaatatatattttacctatcagagacatctatttttctgggctccaacccaacatgccaccatgttgacataagttcctacctgactatgctttctctcctaggagctgtcctggtgggcccaggtccttgtatcatgccacggtcccaactacagggtcctagctgggggcctgggtgggccctgggctctgggccctgctgctctagccccagccaccagcctgtccctgttgtaaggaagccaggtcttctctcttcattcctcttaggagagtgccaaactcagggacccagcactgggctgggttgggagtagggtgtcccagtggggttggggtgagcaggctgctgggatcccatggcctgagcagagcatgtgggaactgttcagtggcctgtgaactgtcttccttgttctagccaggctgttcaagactgctctccatagcaaggttctagggctcttcgccttcagtgttgtggccctagctatgggcctaaattgggctctaggtctctgtccctggcgcttgaggctcagaagagcctctgtccagcccctcagtattaccatgtctccctctcaggggtagcagagacagggttgcttataggaagctggcaccactcagctcttcctgctactccagtttcctcagcctctgcaaggcactcagggtgggggacagcaggatcaagacaacccgttggagcccctgtgttccagaggacctgatgccaaggggtaatgggcccagcagtgcctctggagcccaggccccaacacagccccatggcctctgccagatggctttgaaaaaggtgatccaagcaggcccctttatctgtacatagtgactgagtggggggtgctggcaagtgtggcagctgcctctgggctgagcacagcttgacccctctagcccctgtaaatactggatcaatgaatgaataaaactctcctaagaatctcctgagaaa

SEQ ID NO: 318279 - DNA, 4334 bp, Homo sapiens
cgccggggtgacgtctgccgccggcgcgggcgggtgacgcgactgggcccgttgtctgtgtgtgggactgaggggccccgggggcggtgggggctcccggtgggggcagcggtggggagggagggcctggacatggcgctgaggggccgccccgcgggaagatgaataagggctggctggagctggagagcgacccaggcctcttcaccctgctcgtggaagatttcggtgtcaagggggtgcaagtggaggagatctacgaccttcagagcaaatgtcagggccctgtatatggatttatcttcctgttcaaatggatcgaagagcgccggtcccggcgaaaggtctctaccttggtggatgatacgtccgtgattgatgatgatattgtgaataacatgttctttgcccaccagctgatacccaactcttgtgcaactcatgccttgctgagcgtgctcctgaactgcagcagcgtggacctgggacccaccctgagtcgcatgaaggacttcaccaagggtttcagccctgagagcaaaggatatgcgattggcaatgccccggagttggccaaggcccataatagccatgccaggcccgagccacgccacctccctgagaagcagaatggccttagtgcagtgcggaccatggaggcgttccactttgtcagctatgtgcctatcacaggccggctctttgagctggatgggctgaaggtctaccccattgaccatgggccctggggggaggacgaggagtggacagacaaggcccggcgggtcatcatggagcgtatcggcctcgccactgcaggggagccctaccacgacatccgcttcaacctgatggcagtggtgcccgaccgcaggatcaagtatgaggccaggctgcatgtgctgaaggtgaaccgtcagacagtactagaggctctgcagcagctgataagagtaacacagccagagctgattcagacccacaagtctcaagagtcacagctgcctgaggagtccaagtcagccagcaacaagtccccgctggtgctggaagcaaacagggcccctgcagcctctgagggcaaccacacagatggtgcagaggaggcggctggttcatgcgcacaagccccatcccacagccctcccaacaaacccaagctagtggtgaagcctccaggcagcagcctcaatggggttcaccccaaccccactcccattgtccagcggctgccggcctttctagacaatcacaattatgccaagtcccccatgcaggaggaagaagacctggcggcaggtgtgggccgcagccgagttccagtccgcccaccccagcagtactcagatgatgaggatgactatgaggatgacgaggaggatgacgtgcagaacaccaactctgcccttaggtataaggggaagggaacagggaagccaggggcattgagcggttctgctgatgggcaactgtcagtgctgcagcccaacaccatcaacgtcttggctgagaagctcaaagagtcccagaaggacctctcaattcctctgtccatcaagactagcagcggggctgggagtccggctgtggcagtgcccacacactcgcagccctcacccacccccagcaatgagagtacagacacggcctctgagatcggcagtgctttcaactcgccactgcgctcgcctatccgctcagccaacccgacgcggccctccagccctgtcacctcccacatctccaaggtgctttttggagaggatgacagcctgctgcgtgttgactgcatacgctacaaccgtgctgtccgtgatctgggtcctgtcatcagcacaggcctgctgcacctggctgaggatggggtgctgagtcccctggcgctgacagagggtgggaagggttcctcgccctccatcagaccaatccaaggcagccaggggtccagcagcccagtggagaaggaggtcgtggaagccacggacagcagagagaagacggggatggtgaggcctggcgagcccttgagtggggagaaatactcacccaaggagctgctggcactgctgaagtgtgtggaggctgagattgcaaactatgaggcgtgcctcaaggaggaggtagagaagaggaagaagttcaagattgatgaccagagaaggacccacaactacgatgagttcatctgcacctttatctccatgctggctcaggaaggcatgctggccaacctagtggagcagaacatctccgtgcggcggcgccaaggggtcagcatcggccggctccacaagcagcggaagcctgaccggcggaaacgctctcgcccctacaaggccaagcgccagtgaggactgctggccctgactctgcagcccactcttgccgtgtggccctcaccagggtccttccctgccccacttccccttttcccagtattactgaatagtcccagctggagagtccaggccctgggaatgggaggaaccaggccacattccttccatcgtgccctgaggcctgacacggcagatcagccccatagtgctcaggaggcagcatctggagttggggcacagcgaggtactgcagcttcctccacagccggctgtggagcagcaggacctggcccttctgcctgggcagcagaatatatattttacctatcagagacatctatttttctgggctccaacccaacatgccaccatgttgacataagttcctacctgactatgctttctctcctaggagctgtcctggtgggcccaggtccttgtatcatgccacggtcccaactacagggtcctagctgggggcctgggtgggccctgggctctgggccctgctgctctagccccagccaccagcctgtccctgttgtaaggaagccaggtcttctctcttcattcctcttaggagagtgccaaactcagggacccagcactgggctgggttgggagtagggtgtcccagtggggttggggtgagcaggctgctgggatcccatggcctgagcagagcatgtgggaactgttcagtggcctgtgaactgtcttccttgttctagccaggctgttcaagactgctctccatagcaaggttctagggctcttcgccttcagtgttgtggccctagctatgggcctaaattgggctctaggtctctgtccctggcgcttgaggctcagaagagcctctgtccagcccctcagtattaccatgtctccctctcaggggtagcagagacagggttgcttataggaagctggcaccactcagctcttcctgctactccagtttcctcagcctctgcaaggcactcagggtgggggacagcaggatcaagacaacccgttggagcccctgtgttccagaggacctgatgccaaggggtaatgggcccagcagtgcctctggagcccaggccccaacacagccccatggcctctgccagatggctttgaaaaaggtgatccaagcaggcccctttatctgtacatagtgactgagtggggggtgctggcaagtgtggcagctgcctctgggctgagcacagcttgacccctctagcccctgtaaatactggatcaatgaatgaataaaactctcctaagaatctcctgagaaaaaaaacaaacacaaaaaaacaaaacaaaaaaaaaaaaaaaaaaaaaaaaaaaaaagaataaaacaaacgaatagaaaccacagaccaggaggcgggcggacatataaaaataccacacgcggcggagagcaacaatgtatacagacaacccaccaagtactatgcgaaagagcagcggacacaaaagaggagggcggacccattacaaagcacagagcagaccacggcaacgaacaaaaccaacagtagcgaagtaggaaaacagcgagtgacgcacacttaggggaagacgccacaaacaagtggcggaggagcaacatgggggcaaaccccaccaaccagaaaataaaaacgccccggagacaaaaacaaaaagatgaggcgaagcgataaaggggctaaacccacacaagactaaggcaacctggcacagaaaaaaccggcagcccgaagagagataatagacacaacaattaaaagcgcggggaacaaaaaacaaaggaccaacacgacgaaaacaacgacgagaagacacaccaagaagcaaaaaagacagcacagcacccggcagcagacagacgcgaacgaaccacagcgagacaaagcaagacacgcaaaacacaggaacaaaaagaacggatacaaacagcagaacagacagaagaacagacacacaagagaacacacgcagcagaacaccaaa

SEQ ID NO: 318280 - DNA, 3610 bp, Homo sapiens
cgccggggtgacgtctgccgccggcgcgggcgggtgacgcgactgggcccgttgtctgtgtgtgggactgaggggccccgggggcggtgggggctcccggtgggggcagcggtggggagggagggcctggacatggcgctgaggggccgccccgcgggaagatgaataagggctggctggagctggagagcgacccaggcctcttcaccctgctcgtggaagatttcggtgtcaagggggtgcaagtggaggagatctacgaccttcagagcaaatgtcagggccctgtatatggatttatcttcctgttcaaatggatcgaagagcgccggtcccggcgaaaggtctctaccttggtggatgatacgtccgtgattgatgatgatattgtgaataacatgttctttgcccaccagctgatacccaactcttgtgcaactcatgccttgctgagcgtgctcctgaactgcagcagcgtggacctgggacccaccctgagtcgcatgaaggacttcaccaagggtttcagccctgagagcaaaggatatgcgattggcaatgccccggagttggccaaggcccataatagccatgccaggcccgagccacgccacctccctgagaagcagaatggccttagtgcagtgcggaccatggaggcgttccactttgtcagctatgtgcctatcacaggccggctctttgagctggatgggctgaaggtctaccccattgaccatgggccctggggggaggacgaggagtggacagacaaggcccggcgggtcatcatggagcgtatcggcctcgccactgcaggggagccctaccacgacatccgcttcaacctgatggcagtggtgcccgaccgcaggatcaagtatgaggccaggctgcatgtgctgaaggtgaaccgtcagacagtactagaggctctgcagcagctgataagagtaacacagccagagctgattcagacccacaagtctcaagagtcacagctgcctgaggagtccaagtcagccagcaacaagtccccgctggtgctggaagcaaacagggcccctgcagcctctgagggcaaccacacagatggtgcagaggaggcggctggttcatgcgcacaagccccatcccacagccctcccaacaaacccaagctagtggtgaagcctccaggcagcagcctcaatggggttcaccccaaccccactcccattgtccagcggctgccggcctttctagacaatcacaattatgccaagtcccccatgcaggaggaagaagacctggcggcaggtgtgggccgcagccgagttccagtccgcccaccccagcagtactcagatgatgaggatgactatgaggatgacgaggaggatgacgtgcagaacaccaactctgcccttaggtataaggggaagggaacagggaagccaggggcattgagcggttctgctgatgggcaactgtcagtgctgcagcccaacaccatcaacgtcttggctgagaagctcaaagagtcccagaaggacctctcaattcctctgtccatcaagactagcagcggggctgggagtccggctgtggcagtgcccacacactcgcagccctcacccacccccagcaatgagagtacagacacggcctctgagatcggcagtgctttcaactcgccactgcgctcgcctatccgctcagccaacccgacgcggccctccagccctgtcacctcccacatctccaaggtgctttttggagaggatgacagcctgctgcgtgttgactgcatacgctacaaccgtgctgtccgtgatctgggtcctgtcatcagcacaggcctgctgcacctggctgaggatggggtgctgagtcccctggcgctgacagagggtgggaagggttcctcgccctccatcagaccaatccaaggcagccaggggtccagcagcccagtggagaaggaggtcgtggaagccacggacagcagagagaagacggggatggtgaggcctggcgagcccttgagtggggagaaatactcacccaaggagctgctggcactgctgaagtgtgtggaggctgagattgcaaactatgaggcgtgcctcaaggaggaggtagagaagaggaagaagttcaagattgatgaccagagaaggacccacaactacgatgagttcatctgcacctttatctccatgctggctcaggaaggcatgctggccaacctagtggagcagaacatctccgtgcggcggcgccaaggggtcagcatcggccggctccacaagcagcggaagcctgaccggcggaaacgctctcgcccctacaaggccaagcgccagtgaggactgctggccctgactctgcagcccactcttgccgtgtggccctcaccagggtccttcccagtattactgaatagtcccagctggagagtccaggccctgggaatgggaggaaccaggccacattccttccatcgtgccctgaggcctgacacggcagatcagccccatagtgctcaggaggcagcatctggagttggggcacagcgaggtactgcagcttcctccacagccggctgtggagcagcaggacctggcccttctgcctgggcagcagaatatatattttacctatcagagacatctatttttctgggctccaacccaacatgccaccatgttgacataagttcctacctgactatgctttctctcctaggagctgtcctggtgggcccaggtccttgtatcatgccacggtcccaactacagggtcctagctgggggcctgggtgggccctgggctctgggccctgctgctctagccccagccaccagcctgtccctgttgtaaggaagccaggtcttctctcttcattcctcttaggagagtgccaaactcagggacccagcactgggctgggttgggagtagggtgtcccagtggggttggggtgagcaggctgctgggatcccatggcctgagcagagcatgtgggaactgttcagtggcctgtgaactgtcttccttgttctagccaggctgttcaagactgctctccatagcaaggttctagggctcttcgccttcagtgttgtggccctagctatgggcctaaattgggctctaggtctctgtccctggcgcttgaggctcagaagagcctctgtccagcccctcagtattaccatgtctccctctcaggggtagcagagacagggttgcttataggaagctggcaccactcagctcttcctgctactccagtttcctcagcctctgcaaggcactcagggtgggggacagcaggatcaagacaacccgttggagcccctgtgttccagaggacctgatgccaaggggtaatgggcccagcagtgcctctggagcccaggccccaacacagccccatggcctctgccagatggctttgaaaaaggtgatccaagcaggcccctttatctgtacatagtgactgagtggggggtgctggcaagtgtggcagctgcctctgggctgagcacagcttgacccctctagcccctgtaaatactggatcaatgaatgaataaaactctcctaagaatctcctgagaaa

SEQ ID NO: 318281 - DNA, 3577 bp, Homo sapiens
cgccggggtgacgtctgccgccggcgcgggcgggtgacgcgactgggcccgttgtctgtgtgtgggactgaggggccccgggggcggtgggggctcccggtgggggcagcggtggggagggagggcctggacatggcgctgaggggccgccccgcgggaagatgaataagggctggctggagctggagagcgacccaggcctcttcaccctgctcgtggaagatttcggtgtcaagggggtgcaagtggaggagatctacgaccttcagagcaaatgtcagggccctgtatatggatttatcttcctgttcaaatggatcgaagagcgccggtcccggcgaaaggtctctaccttggtggatgatacgtccgtgattgatgatgatattgtgaataacatgttctttgcccaccagctgatacccaactcttgtgcaactcatgccttgctgagcgtgctcctgaactgcagcagcgtggacctgggacccaccctgagtcgcatgaaggacttcaccaagggtttcagccctgagagcaaaggatatgcgattggcaatgccccggagttggccaaggcccataatagccatgccaggcccgagccacgccacctccctgagaagcagaatggccttagtgcagtgcggaccatggaggcgttccactttgtcagctatgtgcctatcacaggccggctctttgagctggatgggctgaaggtctaccccattgaccatgggccctggggggaggacgaggagtggacagacaaggcccggcgggtcatcatggagcgtatcggcctcgccactgcagggatcaagtatgaggccaggctgcatgtgctgaaggtgaaccgtcagacagtactagaggctctgcagcagctgataagagtaacacagccagagctgattcagacccacaagtctcaagagtcacagctgcctgaggagtccaagtcagccagcaacaagtccccgctggtgctggaagcaaacagggcccctgcagcctctgagggcaaccacacagatggtgcagaggaggcggctggttcatgcgcacaagccccatcccacagccctcccaacaaacccaagctagtggtgaagcctccaggcagcagcctcaatggggttcaccccaaccccactcccattgtccagcggctgccggcctttctagacaatcacaattatgccaagtcccccatgcaggaggaagaagacctggcggcaggtgtgggccgcagccgagttccagtccgcccaccccagcagtactcagatgatgaggatgactatgaggatgacgaggaggatgacgtgcagaacaccaactctgcccttaggtataaggggaagggaacagggaagccaggggcattgagcggttctgctgatgggcaactgtcagtgctgcagcccaacaccatcaacgtcttggctgagaagctcaaagagtcccagaaggacctctcaattcctctgtccatcaagactagcagcggggctgggagtccggctgtggcagtgcccacacactcgcagccctcacccacccccagcaatgagagtacagacacggcctctgagatcggcagtgctttcaactcgccactgcgctcgcctatccgctcagccaacccgacgcggccctccagccctgtcacctcccacatctccaaggtgctttttggagaggatgacagcctgctgcgtgttgactgcatacgctacaaccgtgctgtccgtgatctgggtcctgtcatcagcacaggcctgctgcacctggctgaggatggggtgctgagtcccctggcgctgacagagggtgggaagggttcctcgccctccatcagaccaatccaaggcagccaggggtccagcagcccagtggagaaggaggtcgtggaagccacggacagcagagagaagacggggatggtgaggcctggcgagcccttgagtggggagaaatactcacccaaggagctgctggcactgctgaagtgtgtggaggctgagattgcaaactatgaggcgtgcctcaaggaggaggtagagaagaggaagaagttcaagattgatgaccagagaaggacccacaactacgatgagttcatctgcacctttatctccatgctggctcaggaaggcatgctggccaacctagtggagcagaacatctccgtgcggcggcgccaaggggtcagcatcggccggctccacaagcagcggaagcctgaccggcggaaacgctctcgcccctacaaggccaagcgccagtgaggactgctggccctgactctgcagcccactcttgccgtgtggccctcaccagggtccttccctgccccacttccccttttcccagtattactgaatagtcccagctggagagtccaggccctgggaatgggaggaaccaggccacattccttccatcgtgccctgaggcctgacacggcagatcagccccatagtgctcaggaggcagcatctggagttggggcacagcgaggtactgcagcttcctccacagccggctgtggagcagcaggacctggcccttctgcctgggcagcagaatatatattttacctatcagagacatctatttttctgggctccaacccaacatgccaccatgttgacataagttcctacctgactatgctttctctcctaggagctgtcctggtgggcccaggtccttgtatcatgccacggtcccaactacagggtcctagctgggggcctgggtgggccctgggctctgggccctgctgctctagccccagccaccagcctgtccctgttgtaaggaagccaggtcttctctcttcattcctcttaggagagtgccaaactcagggacccagcactgggctgggttgggagtagggtgtcccagtggggttggggtgagcaggctgctgggatcccatggcctgagcagagcatgtgggaactgttcagtggcctgtgaactgtcttccttgttctagccaggctgttcaagactgctctccatagcaaggttctagggctcttcgccttcagtgttgtggccctagctatgggcctaaattgggctctaggtctctgtccctggcgcttgaggctcagaagagcctctgtccagcccctcagtattaccatgtctccctctcaggggtagcagagacagggttgcttataggaagctggcaccactcagctcttcctgctactccagtttcctcagcctctgcaaggcactcagggtgggggacagcaggatcaagacaacccgttggagcccctgtgttccagaggacctgatgccaaggggtaatgggcccagcagtgcctctggagcccaggccccaacacagccccatggcctctgccagatggctttgaaaaaggtgatccaagcaggcccctttatctgtacatagtgactgagtggggggtgctggcaagtgtggcagctgcctctgggctgagcacagcttgacccctctagcccctgtaaatactggatcaatgaatgaataaaactctcctaagaatctcctgagaaa

SEQ ID NO: 318282 - DNA, 3709 bp, Homo sapiens
cgccggggtgacgtctgccgccggcgcgggcgggtgacgcgactgggcccgttgtctgtgtgtgggactgaggggccccgggggcggtgggggctcccggtgggggcagcggtggggagggagggcctggacatggcgctgaggggccgccccgcgggaagatgaataagggctggctggagctggagagcgacccaggcctcttcaccctgctcgtggaagatttcggtgtcaagggggtgcaagtggaggagatctacgaccttcagagcaaatgtcagggccctgtatatggatttatcttcctgttcaaatggatcgaagagcgccggtcccggcgaaaggtctctaccttggtggatgatacgtccgtgattgatgatgatattgtgaataacatgttctttgcccaccagctgatacccaactcttgtgcaactcatgccttgctgagcgtgctcctgaactgcagcagcgtggacctgggacccaccctgagtcgcatgaaggacttcaccaagggtttcagccctgagagcaaaggatatgcgattggcaatgccccggagttggccaaggcccataatagccatgccaggcccgagccacgccacctccctgagaagcagaatggccttagtgcagtgcggaccatggaggcgttccactttgtcagctatgtgcctatcacaggccggctctttgagctggatgggctgaaggtctaccccattgaccatgggccctggggggaggacgaggagtggacagacaaggcccggcgggtcatcatggagcgtatcggcctcgccactgcaggggagccctaccacgacatccgcttcaacctgatggcagtggtgcccgaccgcaggatcaagtatgaggccaggctgcatgtgctgaaggtgaaccgtcagacagtactagaggctctgcagcagctgataagagtaacacagccagagctgattcagacccacaagtctcaagagtcacagctgcctgaggagtccaagtcagccagcaacaagtccccgctggtgctggaagcaaacagggcccctgcagcctctgagggcaaccacacagatggtgcagaggaggcggctggttcatgcgcacaagccccatcccacagccctcccaacaaacccaagctagtggtgaagcctccaggcagcagcctcaatggggttcaccccaaccccactcccattgtccagcggctgccggcctttctagacaatcacaattatgccaagtcccccatgcaggaggaagaagacctggcggcaggtgtgggccgcagccgagttccagtccgcccaccccagcagtactcagatgatgaggatgactatgaggatgacgaggaggatgacgtgcagaacaccaactctgcccttaggtataaggggaagggaacagggaagccaggggcattgagcggttctgctgatgggcaactgtcagtgctgcagcccaacaccatcaacgtcttggctgagaagctcaaagagtcccagaaggacctctcaattcctctgtccatcaagactagcagcggggctgggagtccggctgtggcagtgcccacacactcgcagccctcacccacccccagcaatgagagtacagacacggcctctgagatcggcagtgctttcaactcgccactgcgctcgcctatccgctcagccaacccgacgcggccctccagccctgtcacctcccacatctccaaggtgctttttggagaggatgacagcctgctgcgtgttgactgcatacgctacaaccgtgctgtccgtgatctgggtcctgtcatcagcacaggcctgctgcacctggctgaggatggggtgctgagtcccctggcgctgacagagggtgggaagggttcctcgccctccatcagaccaatccaaggcagccaggggtccagcagcccagtggagaaggaggtcgtggaagccacggacagcagagagaagacggggatggtgaggcctggcgagcccttgagtggggagaaatactcacccaaggagctgctggcactgctgaagtgtgtggaggctgagattgcaaactatgaggcgtgcctcaaggaggaggtagagaagaggaagaagttcaagattgatgaccagagaaggacccacaactacgatgagttcatctgcacctttatctccatgctggctcaggaaggcatgctggccaacctagtggagcagaacatctccgtgcggcggcgccaaggggtcagcatcggccggctccacaagcagcggaagcctgaccggcggaaacgctctcgcccctacaaggccaagcgccagtgaggactgctggccctgactctgcagcccactcttgccgtgtggccctcaccagggtccttccctgccccacttccccttttcccagtattactgaatagtcccagctggagagtccaggccctgggaatgggaggaaccaggccacattccttccatcgtgccctgaggcctgacacggcagatcagccccatagtgctcaggaggcagcatctggagttggggcacagcgaggtactgcagcttcctccacagccggctgtggagcagcaggacctggcccttctgcctgggcagcagaatatatattttacctatcagagacatctatttttctgggctccaacccaacatgccaccatgttgacataagttcctacctgactatgctttctctcctaggagctgtcctggtgggcccaggtccttgtatcatgccacggtcccaactacagggtcctagctgggggcctgggtgggccctgggctctgggccctgctgctctagccccagccaccagcctgtccctgttgtaaggaagccaggtcttctctcttcattcctcttaggagagtgccaaactcagggacccagcactgggctgggttgggagtagggtgtcccagtggggttggggtgagcaggctgctgggatcccatggcctgagcagagcatgtgggaactgttcagtggcctgtgaactgtcttccttgttctagccaggctgttcaagactgctctccatagcaaggttctagggctcttcgccttcagtgttgtggccctagctatgggcctaaattgggctctaggtctctgtccctggcgcttgaggctcagaagagcctctgtccagcccctcagtattaccatgtctccctctcaggggtagcagagacagggttgcttataggaagctggcaccactcagctcttcctgctactccagtttcctcagcctctgcaaggcactcagggtgggggacagcaggatcaagacaacccgttggagcccctgtgttccagaggacctgatgccaaggggtaatgggcccagcagtgcctctggagcccaggccccaacacagccccatggcctctgccagatggctttgaaaaaggtgatccaagcaggcccctttatctgtacatagtgactgagtggggggtgctggcaagtgtggcagctgcctctgggctgagcacagcttgacccctctagcccctgtaaatactggatcaatgaatgaataaaactctcctaagaatctcctgagaaactagaaaaaaaacaaacaaaaacaacacgacaacacacaccaaacaaacaacagggaaaacaacaggcggcacactgg

SEQ ID NO: 318283 - DNA, 3700 bp, Homo sapiens
cgccggggtgacgtctgccgccggcgcgggcgggtgacgcgactgggcccgttgtctgtgtgtgggactgaggggccccgggggcggtgggggctcccggtgggggcagcggtggggagggagggcctggacatggcgctgaggggccgccccgcgggaagatgaataagggctggctggagctggagagcgacccaggcctcttcaccctgctcgtggaagatttcggtgtcaagggggtgcaagtggaggagatctacgaccttcagagcaaatgtcagggccctgtatatggatttatcttcctgttcaaatggatcgaagagcgccggtcccggcgaaaggtctctaccttggtggatgatacgtccgtgattgatgatgatattgtgaataacatgttctttgcccaccagctgatacccaactcttgtgcaactcatgccttgctgagcgtgctcctgaactgcagcagcgtggacctgggacccaccctgagtcgcatgaaggacttcaccaagggtttcagccctgagagcaaaggatatgcgattggcaatgccccggagttggccaaggcccataatagccatgccaggcccgagccacgccacctccctgagaagcagaatggccttagtgcagtgcggaccatggaggcgttccactttgtcagctatgtgcctatcacaggccggctctttgagctggatgggctgaaggtctaccccattgaccatgggccctggggggaggacgaggagtggacagacaaggcccggcgggtcatcatggagcgtatcggcctcgccactgcaggggagccctaccacgacatccgcttcaacctgatggcagtggtgcccgaccgcaggatcaagtatgaggccaggctgcatgtgctgaaggtgaaccgtcagacagtactagaggctctgcagcagctgataagagtaacacagccagagctgattcagacccacaagtctcaagagtcacagctgcctgaggagtccaagtcagccagcaacaagtccccgctggtgctggaagcaaacagggcccctgcagcctctgagggcaaccacacagatggtgcagaggaggcggctggttcatgcgcacaagccccatcccacagccctcccaacaaacccaagctagtggtgaagcctccaggcagcagcctcaatggggttcaccccaaccccactcccattgtccagcggctgccggcctttctagacaatcacaattatgccaagtcccccatgcaggaggaagaagacctggcggcaggtgtgggccgcagccgagttccagtccgcccaccccagcagtactcagatgatgaggatgactatgaggatgacgaggaggatgacgtgcagaacaccaactctgcccttaggtataaggggaagggaacagggaagccaggggcattgagcggttctgctgatgggcaactgtcagtgctgcagcccaacaccatcaacgtcttggctgagaagctcaaagagtcccagaaggacctctcaattcctctgtccatcaagactagcagcggggctgggagtccggctgtggcagtgcccacacactcgcagccctcacccacccccagcaatgagagtacagacacggcctctgagatcggcagtgctttcaactcgccactgcgctcgcctatccgctcagccaacccgacgcggccctccagccctgtcacctcccacatctccaaggtgctttttggagaggatgacagcctgctgcgtgttgactgcatacgctacaaccgtgctgtccgtgatctgggtcctgtcatcagcacaggcctgctgcacctggctgaggatggggtgctgagtcccctggcgctgacagagggtgggaagggttcctcgccctccatcagaccaatccaaggcagccaggggtccagcagcccagtggagaaggaggtcgtggaagccacggacagcagagagaagacggggatggtgaggcctggcgagcccttgagtggggagaaatactcacccaagctgcctattgctcgtggggctttgttgctggcccgccccgatcagaggtgcaatgctgggttttggcaggagctgctggcactgctgaagtgtgtggaggctgagattgcaaactatgaggcgtgcctcaaggaggaggtagagaagaggaagaagttcaagattgatgaccagagaaggacccacaactacgatgagttcatctgcacctttatctccatgctggctcaggaaggcatgctggccaacctagtggagcagaacatctccgtgcggcggcgccaaggggtcagcatcggccggctccacaagcagcggaagcctgaccggcggaaacgctctcgcccctacaaggccaagcgccagtgaggactgctggccctgactctgcagcccactcttgccgtgtggccctcaccagggtccttccctgccccacttccccttttcccagtattactgaatagtcccagctggagagtccaggccctgggaatgggaggaaccaggccacattccttccatcgtgccctgaggcctgacacggcagatcagccccatagtgctcaggaggcagcatctggagttggggcacagcgaggtactgcagcttcctccacagccggctgtggagcagcaggacctggcccttctgcctgggcagcagaatatatattttacctatcagagacatctatttttctgggctccaacccaacatgccaccatgttgacataagttcctacctgactatgctttctctcctaggagctgtcctggtgggcccaggtccttgtatcatgccacggtcccaactacagggtcctagctgggggcctgggtgggccctgggctctgggccctgctgctctagccccagccaccagcctgtccctgttgtaaggaagccaggtcttctctcttcattcctcttaggagagtgccaaactcagggacccagcactgggctgggttgggagtagggtgtcccagtggggttggggtgagcaggctgctgggatcccatggcctgagcagagcatgtgggaactgttcagtggcctgtgaactgtcttccttgttctagccaggctgttcaagactgctctccatagcaaggttctagggctcttcgccttcagtgttgtggccctagctatgggcctaaattgggctctaggtctctgtccctggcgcttgaggctcagaagagcctctgtccagcccctcagtattaccatgtctccctctcaggggtagcagagacagggttgcttataggaagctggcaccactcagctcttcctgctactccagtttcctcagcctctgcaaggcactcagggtgggggacagcaggatcaagacaacccgttggagcccctgtgttccagaggacctgatgccaaggggtaatgggcccagcagtgcctctggagcccaggccccaacacagccccatggcctctgccagatggctttgaaaaaggtgatccaagcaggcccctttatctgtacatagtgactgagtggggggtgctggcaagtgtggcagctgcctctgggctgagcacagcttgacccctctagcccctgtaaatactggatcaatgaatgaataaaactctcctaagaatctcctgagaaa

SEQ ID NO: 318284 - DNA, 3748 bp, Homo sapiens
cgccggggtgacgtctgccgccggcgcgggcgggtgacgcgactgggcccgttgtctgtgtgtgggactgaggggccccgggggcggtgggggctcccggtgggggcagcggtggggagggagggcctggacatggcgctgaggggccgccccgcgggaagatgaataagggctggctggagctggagagcgacccaggcctcttcaccctgctcgtggaagatttcggtgtcaagggggtgcaagtggaggagatctacgaccttcagagcaaatgtcagggccctgtatatggatttatcttcctgttcaaatggatcgaagagcgccggtcccggcgaaaggtctctaccttggtggatgatacgtccgtgattgatgatgatattgtgaataacatgttctttgcccaccagctgatacccaactcttgtgcaactcatgccttgctgagcgtgctcctgaactgcagcagcgtggacctgggacccaccctgagtcgcatgaaggacttcaccaagggtttcagccctgagagcaaaggatatgcgattggcaatgccccggagttggccaaggcccataatagccatgccaggcccgagccacgccacctccctgagaagcagaatggccttagtgcagtgcggaccatggaggcgttccactttgtcagctatgtgcctatcacaggccggctctttgagctggatgggctgaaggtctaccccattgaccatgggccctggggggaggacgaggagtggacagacaaggcccggcgggtcatcatggagcgtatcggcctcgccactgcaggggagccctaccacgacatccgcttcaacctgatggcagtggtgcccgaccgcaggatcaagtatgaggccaggctgcatgtgctgaaggtgaaccgtcagacagtactagaggctctgcagcagctgataagagtaacacagccagagctgattcagacccacaagtctcaagagtcacagctgcctgaggagtccaagtcagccagcaacaagtccccgctggtgctggaagcaaacagggcccctgcagcctctgagggcaaccacacagatggtgcagaggaggcggctggttcatgcgcacaagccccatcccacagccctcccaacaaacccaagctagtggtgaagcctccaggcagcagcctcaatggggttcaccccaaccccactcccattgtccagcggctgccggcctttctagacaatcacaattatgccaagtcccccatgcaggaggaagaagacctggcggcaggtgtgggccgcagccgagttccagtccgcccaccccagcagtactcagatgatgaggatgactatgaggatgacgaggaggatgacgtgcagaacaccaactctgcccttaggtataaggggaagggaacagggaagccaggggcattgagcggttctgctgatgggcaactgtcagtgctgcagcccaacaccatcaacgtcttggctgagaagctcaaagagtcccagaaggacctctcaattcctctgtccatcaagactagcagcggggctgggagtccggctgtggcagtgcccacacactcgcagccctcacccacccccagcaatgagagtacagacacggcctctgagatcggcagtgctttcaactcgccactgcgctcgcctatccgctcagccaacccgacgcggccctccagccctgtcacctcccacatctccaaggtgctttttggagaggatgacagcctgctgcgtgttgactgcatacgctacaaccgtgctgtccgtgatctgggtcctgtcatcagcacaggcctgctgcacctggctgaggatggggtgctgagtcccctggcgctgacaggtgggccttggactggctcactggccacttggtgcacccaggagggaggagggaagtggccaagtgaccacaaagtgtcctgcactctgatgattttcttgtgacctctcttcccagagggtgggaagggttcctcgccctccatcagaccaatccaaggcagccaggggtccagcagcccagtggagaaggaggtcgtggaagccacggacagcagagagaagacggggatggtgaggcctggcgagcccttgagtggggagaaatactcacccaaggagctgctggcactgctgaagtgtgtggaggctgagattgcaaactatgaggcgtgcctcaaggaggaggtagagaagaggaagaagttcaagattgatgaccagagaaggacccacaactacgatgagttcatctgcacctttatctccatgctggctcaggaaggcatgctggccaacctagtggagcagaacatctccgtgcggcggcgccaaggggtcagcatcggccggctccacaagcagcggaagcctgaccggcggaaacgctctcgcccctacaaggccaagcgccagtgaggactgctggccctgactctgcagcccactcttgccgtgtggccctcaccagggtccttccctgccccacttccccttttcccagtattactgaatagtcccagctggagagtccaggccctgggaatgggaggaaccaggccacattccttccatcgtgccctgaggcctgacacggcagatcagccccatagtgctcaggaggcagcatctggagttggggcacagcgaggtactgcagcttcctccacagccggctgtggagcagcaggacctggcccttctgcctgggcagcagaatatatattttacctatcagagacatctatttttctgggctccaacccaacatgccaccatgttgacataagttcctacctgactatgctttctctcctaggagctgtcctggtgggcccaggtccttgtatcatgccacggtcccaactacagggtcctagctgggggcctgggtgggccctgggctctgggccctgctgctctagccccagccaccagcctgtccctgttgtaaggaagccaggtcttctctcttcattcctcttaggagagtgccaaactcagggacccagcactgggctgggttgggagtagggtgtcccagtggggttggggtgagcaggctgctgggatcccatggcctgagcagagcatgtgggaactgttcagtggcctgtgaactgtcttccttgttctagccaggctgttcaagactgctctccatagcaaggttctagggctcttcgccttcagtgttgtggccctagctatgggcctaaattgggctctaggtctctgtccctggcgcttgaggctcagaagagcctctgtccagcccctcagtattaccatgtctccctctcaggggtagcagagacagggttgcttataggaagctggcaccactcagctcttcctgctactccagtttcctcagcctctgcaaggcactcagggtgggggacagcaggatcaagacaacccgttggagcccctgtgttccagaggacctgatgccaaggggtaatgggcccagcagtgcctctggagcccaggccccaacacagccccatggcctctgccagatggctttgaaaaaggtgatccaagcaggcccctttatctgtacatagtgactgagtggggggtgctggcaagtgtggcagctgcctctgggctgagcacagcttgacccctctagcccctgtaaatactggatcaatgaatgaataaaactctcctaagaatctcctgagaaa

SEQ ID NO: 318285 - DNA, 2731 bp, Homo sapiens
gcttcttttttcccatctcattctttgccctgtctcattgcgggatcatgacttagagcttgctgactcccattgcaccagctggctgggctgttcttctctgggaagtgctggttcacagggccggggagactgtgagcttttcttggagatcctactggaggtcctgcctgtgttcttgccctgtctcagatggtgcagaggaggcggctggttcatgcgcacaagccccatcccacagccctcccaacaaacccaagctagtggtgaagcctccaggcagcagcctcaatggggttcaccccaaccccactcccattgtccagcggctgccggcctttctagacaatcacaattatgccaagtcccccatgcaggaggaagaagacctggcggcaggtgtgggccgcagccgagttccagtccgcccaccccagcagtactcagatgatgaggatgactatgaggatgacgaggaggatgacgtgcagaacaccaactctgcccttaggtataaggggaagggaacagggaagccaggggcattgagcggttctgctgatgggcaactgtcagtgctgcagcccaacaccatcaacgtcttggctgagaagctcaaagagtcccagaaggacctctcaattcctctgtccatcaagactagcagcggggctgggagtccggctgtggcagtgcccacacactcgcagccctcacccacccccagcaatgagagtacagacacggcctctgagatcggcagtgctttcaactcgccactgcgctcgcctatccgctcagccaacccgacgcggccctccagccctgtcacctcccacatctccaaggtgctttttggagaggatgacagcctgctgcgtgttgactgcatacgctacaaccgtgctgtccgtgatctgggtcctgtcatcagcacaggcctgctgcacctggctgaggatggggtgctgagtcccctggcgctgacagagggtgggaagggttcctcgccctccatcagaccaatccaaggcagccaggggtccagcagcccagtggagaaggaggtcgtggaagccacggacagcagagagaagacggggatggtgaggcctggcgagcccttgagtggggagaaatactcacccaaggagctgctggcactgctgaagtgtgtggaggctgagattgcaaactatgaggcgtgcctcaaggaggaggtagagaagaggaagaagttcaagattgatgaccagagaaggacccacaactacgatgagttcatctgcacctttatctccatgctggctcaggaaggcatgctggccaacctagtggagcagaacatctccgtgcggcggcgccaaggggtcagcatcggccggctccacaagcagcggaagcctgaccggcggaaacgctctcgcccctacaaggccaagcgccagtgaggactgctggccctgactctgcagcccactcttgccgtgtggccctcaccagggtccttccctgccccacttccccttttcccagtattactgaatagtcccagctggagagtccaggccctgggaatgggaggaaccaggccacattccttccatcgtgccctgaggcctgacacggcagatcagccccatagtgctcaggaggcagcatctggagttggggcacagcgaggtactgcagcttcctccacagccggctgtggagcagcaggacctggcccttctgcctgggcagcagaatatatattttacctatcagagacatctatttttctgggctccaacccaacatgccaccatgttgacataagttcctacctgactatgctttctctcctaggagctgtcctggtgggcccaggtccttgtatcatgccacggtcccaactacagggtcctagctgggggcctgggtgggccctgggctctgggccctgctgctctagccccagccaccagcctgtccctgttgtaaggaagccaggtcttctctcttcattcctcttaggagagtgccaaactcagggacccagcactgggctgggttgggagtagggtgtcccagtggggttggggtgagcaggctgctgggatcccatggcctgagcagagcatgtgggaactgttcagtggcctgtgaactgtcttccttgttctagccaggctgttcaagactgctctccatagcaaggttctagggctcttcgccttcagtgttgtggccctagctatgggcctaaattgggctctaggtctctgtccctggcgcttgaggctcagaagagcctctgtccagcccctcagtattaccatgtctccctctcaggggtagcagagacagggttgcttataggaagctggcaccactcagctcttcctgctactccagtttcctcagcctctgcaaggcactcagggtgggggacagcaggatcaagacaacccgttggagcccctgtgttccagaggacctgatgccaaggggtaatgggcccagcagtgcctctggagcccaggccccaacacagccccatggcctctgccagatggctttgaaaaaggtgatccaagcaggcccctttatctgtacatagtgactgagtggggggtgctggcaagtgtggcagctgcctctgggctgagcacagcttgacccctctagcccctgtaaatactggatcaatgaatgaataaaactctcctaagaatctcctgagaaa

SEQ ID NO: 318286 - DNA, 3080 bp, Homo sapiens
cgccggggtgacgtctgccgccggcgcgggcgggtgacgcgactgggcccgttgtctgtgtgtgggactgaggggccccgggggcggtgggggctcccggtgggggcagcggtggggagggagggcctggacatggcgctgaggggccgccccgcgggaagatgaataagggctggctggagctggagagcgacccaggcctcttcaccctgctcgtggaagatttcggtgtcaagggggtgcaagtggaggagatctacgaccttcagagcaaatgtcagggccctgtatatggatttatcttcctgttcaaatggatcgaagagcgccggtcccggcgaaaggtctctaccttggtggatgatacgtccgtgattgatgatgatattgtgaataacatgttctttgcccaccagctgatacccaactcttgtgcaactcatgccttgctgagcgtgctcctgaactgcagcagcgtggacctgggacccaccctgagtcgcatgaaggacttcaccaagggtttcagccctgagagcaaaggatatgcgattggcaatgccccggagttggccaaggcccataatagccatgccaggcccgagccacgccacctccctgagaagcagaatggccttagtgcagtgcggaccatggaggcgttccactttgtcagctatgtgcctatcacaggccggctctttgagctggatgggctgaaggtctaccccattgaccatgggccctggggggaggacgaggagtggacagacaaggcccggcgggtcatcatggagcgtatcggcctcgccactgcaggggagccctaccacgacatccgcttcaacctgatggcagtggtgcccgaccgcaggatcaagtatgaggccaggctgcatgtgctgaaggtgaaccgtcagacagtactagaggctctgcagcagctgataagagtaacacagccagagctgattcagacccacaagtctcaagagtcacagctgcctgaggagtccaagtcagccagcaacaagtccccgctggtgctggaagcaaacagggcccctgcagcctctgagggcaaccacacagatggtgcagaggaggcggctggttcatgcgcacaagccccatcccacagccctcccaacaaacccaagctagtggtgaagcctccaggcagcagcctcaatggggttcaccccaaccccactcccattgtccagcggctgccggcctttctagacaatcacaattatgccaagtcccccatgcaggaggaagaagacctggcggcaggtgtgggccgcagccgagttccagtccgcccaccccagcagtactcagatgatgaggatgactatgaggatgacgaggaggatgacgtgcagaacaccaactctgcccttaggtataaggggaagggaacagggaagccaggggcattgagcggttctgctgatgggcaactgtcagtgctgcagcccaacaccatcaacgtcttggctgagaagctcaaagagtcccagaaggacctctcaattcctctgtccatcaagactagcagcggggctgggagtccggctgtggcagtgcccacacactcgcagccctcacccacccccagcaatgagagtacagacacggcctctgagatcggcagtgctttcaactcgccactgcgctcgcctatccgctcagccaacccgacgcggccctccagccctgtcacctcccacatctccaaggtgctttttggagaggatgacagcctgctgcgtgttgactgcatacgctacaaccgtgctgtccgtgatctgggtcctgtcatcagcacaggcctgctgcacctggctgaggatggggtgctgagtcccctggcgctgacagagggtgggaagggttcctcgccctccatcagaccaatccaaggcagccaggggtccagcagcccagtggagaaggaggtcgtggaagccacggacagcagagagaagacggggatggtgaggcctggcgagcccttgagtggggagaaatactcacccaaggagctgctggcactgctgaagtgtgtggaggctgagattgcaaactatgaggcgtgcctcaaggaggaggtagagaagaggaagaagttcaagattgatgaccagagaaggacccacaactacgatgagttcatctgcacctttatctccatgctggctcaggaaggcatgctggccaacctagtggagcagaacatctccgtgcggcggcgccaaggggtcagcatcggccggctccacaagcagcggaagcctgaccggcggaaacgctctcgcccctacaaggccaagcgccagtgaggactgctggccctgactctgcagcccactcttgccgtgtggccctcaccagggtccttccctgccccacttccccttttcccagtattactgaatagtcccagctggagagtccaggccctgggaatgggaggaaccaggccacattccttccatcgtgccctgaggcctgacacggcagatcagccccatagtgctcaggaggcagcatctggagttggggcacagcgaggtactgcagcttcctccacagccggctgtggagcagcaggacctggcccttctgcctgggcagcagaatatatattttacctatcagagacatctatttttctgggctccaacccaacatgccaccatgttgacataagttcctacctgactatgctttcttccagtttcctcagcctctgcaaggcactcagggtgggggacagcaggatcaagacaacccgttggagcccctgtgttccagaggacctgatgccaaggggtaatgggcccagcagtgcctctggagcccaggccccaacacagccccatggcctctgccagatggctttgaaaaaggtgatccaagcaggcccctttatctgtacatagtgactgagtggggggtgctggcaagtgtggcagctgcctctgggctgagcacagcttgacccctctagcccctgtaaatactggatcaatgaatgaataaaactctcctaagaatctcctgagaaa

SEQ ID NO: 318287 - DNA, 1714 bp, Homo sapiens
  misc_feature (26)..(26): n is a, c, g, or t
  misc_feature (29)..(29): n is a, c, g, or t
  misc_feature (49)..(49): n is a, c, g, or t
  misc_feature (58)..(58): n is a, c, g, or t
cacttcgatcccgttccgagttcagnaancctagagttaccaagagggntctatgtcncaaggtgggtgggtccagcagcccagtggagaaggaggtcgtggaagccacggacagcagagagaagacggggatggagctgctggcactgctgaagtgtgtggaggctgagattgcaaactatgaggcgtgcctcaaggaggaggtagagaagaggaagaagttcaagattgatgaccagagaaggacccacaactacgatgagttcatctgcacctttatctccatgctggctcaggaaggcatgctggccaacctagtggagcagaacatctccgtgcggcggcgccaaggggtcagcatcggccggctccacaagcagcggaagcctgaccggcggaaacgctctcgcccctacaaggccaagcgccagtgaggactgctggccctgactctgcagcccactcttgccgtgtggccctcaccagggtccttccctgccccacttccccttttcccagtattactgaatagtcccagctggagagtccaggccctgggaatgggaggaaccaggccacattccttccatcgtgccctgaggcctgacacggcagatcagccccatagtgctcaggaggcagcatctggagttggggcacagcgaggtactgcagcttcctccacagccggctgtggagcagcaggacctggcccttctgcctgggcagcagaatatatattttacctatcagagacatctatttttctgggctccaacccaacatgccaccatgttgacataagttcctacctgactatgctttctctcctaggagctgtcctggtgggcccaggtccttgtatcatgccacggtcccaactacagggtcctagctgggggcctgggtgggccctgggctctgggccctgctgctctagccccagccaccagcctgtccctgttgtaaggaagccaggtcttctctcttcattcctcttaggagagtgccaaactcagggacccagcactgggctgggttgggagtagggtgtcccagtggggttggggtgagcaggctgctgggatcccatggcctgagcagagcatgtgggaactgttcagtggcctgtgaactgtcttccttgttctagccaggctgttcaagactgctctccatagcaaggttctagggctcttcgccttcagtgttgtggccctagctatgggcctaaattgggctctaggtctctgtccctggcgcttgaggctcagaagagcctctgtccagcccctcagtattaccatgtctccctctcaggggtagcagagacagggttgcttataggaagctggcaccactcagctcttcctgctactccagtttcctcagcctctgcaaggcactcagggtgggggacagcaggatcaagacaacccgttggagcccctgtgttccagaggacctgatgccaaggggtaatgggcccagcagtgcctctggagcccaggccccaacacagccccatggcctctgccagatggctttgaaaaaggtgatccaagcaggcccctttatctgtacatagtgactgagtggggggtgctggcaagtgtggcagctgcctctgggctgagcacagcttgacccctctagcccctgtaaatactggatcaatgaatgaataaaactctcctaagaatctcctgagaaa

SEQ ID NO: 318288 - DNA, 2174 bp, Homo sapiens
cgccggggtgacgtctgccgccggcgcgggcgggtgacgcgactgggcccgttgtctgtgtgtgggactgaggggccccgggggcggtgggggctcccggtgggggcagcggtggggagggagggcctggacatggcgctgaggggccgccccgcgggaagatgaataagggctggctggagctggagagcgacccaggcctcttcaccctgctcgtggaagatttcggtgtcaagggggtgcaagtggaggagatctacgaccttcagagcaaatgtcagggccctgtatatggatttatcttcctgttcaaatggatcgaagagcgccggtcccggcgaaaggtctctaccttggtggatgatacgtccgtgattgatgatgatattgtgaataacatgttctttgcccaccagctgatacccaactcttgtgcaactcatgccttgctgagcgtgctcctgaactgcagcagcgtggacctgggacccaccctgagtcgcatgaaggacttcaccaagggtttcagccctgagagcaaaggatatgcgattggcaatgccccggagttggccaaggcccataatagccatgccaggcccgagccacgccacctccctgagaagcagaatggccttagtgcagtgcggaccatggaggcgttccactttgtcagctatgtgcctatcacaggccggctctttgagctggatgggctgaaggtctaccccattgaccatgggccctggggggaggacgaggagtggacagacaaggcccggcgggtcatcatggagcgtatcggcctcgccactgcaggggagccctaccacgacatccgcttcaacctgatggcagtggtgcccgaccgcaggatcaagtatgaggccaggctgcatgtgctgaaggtgaaccgtcagacagtactagaggctctgcagcagctgataagagtaacacagccagagctgattcagacccacaagtctcaagagtcacagctgcctgaggagtccaagtcagccagcaacaagtccccgctggtgctggaagcaaacagggcccctgcagcctctgagggcaaccacacagatggtgcagaggaggcggctggttcatgcgcacaagccccatcccacagccctcccaacaaacccaagctagtggtgaagcctccaggcagcagcctcaatggggttcaccccaaccccactcccattgtccagcggctgccggcctttctagacaatcacaattatgccaagtcccccatgcaggaggaagaagacctggcggcaggtgtgggccgcagccgagttccagtccgcccaccccagcagtactcagatgatgaggatgactatgaggatgacgaggaggatgacgtgcagaacaccaactctgcccttaggtataaggggaagggaacagggaagccaggggcattgagcggttctgctgatgggcaactgtcagtgctgcagcccaacaccatcaacgtcttggctgagaagctcaaagagtcccagaaggacctctcaattcctctgtccatcaagactagcagcggggctgggagtccggctgtggcagtgcccacacactcgcagccctcacccacccccagcaatgagagtacagacacggcctctgagatcggcagtgctttcaactcgccactgcgctcgcctatccgctcagccaacccgacgcggccctccagccctgtcacctcccacatctccaaggtgctttttggagaggatgacagcctgctgcgtgttgactgcatacgctacaaccgtgctgtccgtgatctgggtcctgtcatcagcacaggcctgctgcacctggctgaggatggggtgctgagtcccctggcgctgacagagggtgggaagggttcctcgccctccatcagaccaatccaaggcagccaggggtccagcagcccagtggagaaggaggtcgtggaagccacggacagcagagagaagacggggatggtgaggcctggcgagcccttgagtggggagaaatactcacccaaggtgagcctccgttgtggttttctcctttaatcctggcagagggtaaggcctgagctcctcctgcccaggtgccaagttcttgattggaactttggtgtgaagattggctggagcgtatcaggt

SEQ ID NO: 318289 - DNA, 1841 bp, Homo sapiens
cgccggggtgacgtctgccgccggcgcgggcgggtgacgcgactgggcccgttgtctgtgtgtgggactgaggggccccgggggcggtgggggctcccggtgggggcagcggtggggagggagggcctggacatggcgctgaggggccgccccgcgggaagatgaataagggctggctggagctggagagcgacccaggcctcttcaccctgctcgtggaagatttcggtgtcaagggggtgcaagtggaggagatctacgaccttcagagcaaatgtcagggccctgtatatggatttatcttcctgttcaaatggatcgaagagcgccggtcccggcgaaaggtctctaccttggtggatgatacgtccgtgattgatgatgatattgtgaataacatgttctttgcccaccagctgatacccaactcttgtgcaactcatgccttgctgagcgtgctcctgaactgcagcagcgtggacctgggacccaccctgagtcgcatgaaggacttcaccaagggtttcagccctgagagcaaaggatatgcgattggcaatgccccggagttggccaaggcccataatagccatgccaggcccgagccacgccacctccctgagaagcagaatggccttagtgcagtgcggaccatggaggcgttccactttgtcagctatgtgcctatcacaggccggctctttgagctggatgggctgaaggtctaccccattgaccatgggccctggggggaggacgaggagtggacagacaaggcccggcgggtcatcatggagcgtatcggcctcgccactgcaggggagccctaccacgacatccgcttcaacctgatggcagtggtgcccgaccgcaggatcaagtatgaggccaggctgcatgtgctgaaggtgaaccgtcagacagtactagaggctctgcagcagctgataagagtaacacagccagagctgattcagacccacaagtctcaagagtcacagctgcctgaggagtccaagtcagccagcaacaagtccccgctggtgctggaagcaaacagggcccctgcagcctctgagggcaaccacacagatggtgcagaggaggcggctggttcatgcgcacaagccccatcccacagccctcccaacaaacccaagctagtggtgaagcctccaggcagcagcctcaatggggttcaccccaaccccactcccattgtccagcggctgccggcctttctagacaatcacaattatgccaagtcccccatgcaggaggaagaagacctggcggcaggtgtgggccgcagccgagttccagtccgcccaccccagcagtactcagatgatgaggatgactatgaggatgacgaggaggatgacgtgcagaacaccaactctgcccttaggtcagcccagctttctaaggctaccaggttctaggtgcttcggatcccatcctgaatatctcagtctgtgtctgagaatgccctgcagcagataatgttgagcacctgcggagtttggggccctgggggaggctggcatgatggggctgaccccaggtccccaggaagtttttggtgggctggggggtaaggctgagcacgtaagcttatatcatgtcctattggaagtggccttttagccaggccttgaaggattggttggggcagggatggaggagatgtgggtctacggggggcgggccaagacacacagcagcgagagggaaagggcaaagtgaggagaggacagagccccccagagggagactccagcagagaaagggatggggctatcgaggtgaccggacggtgagctcacgagactggagaa

SEQ ID NO: 318290 - DNA, 774 bp, Homo sapiens
cgccggggtgacgtctgccgccggcgcgggcgggtgacgcgactgggcccgttgtctgtgtgtgggactgaggggccccgggggcggtgggggctcccggtgggggcagcggtggggagggagggcctggacatggcgctgaggggccgccccgcgggaagatgaataagggctggctggagctggagagcgacccaggcctcttcaccctgctcgtggaagatttcggtgtcaagggggtgcaagtggaggagatctacgaccttcagagcaaatgtcagggccctgtatatggatttatcttcctgttcaaatggatcgaagagcgccggtcccggcgaaaggtctctaccttggtggatgatacgtccgtgattgatgatgatattgtgaataacatgttctttgcccaccagctgatacccaactcttgtgcaactcatgccttgctgagcgtgctcctgaactgcagcagcgtggacctgggacccaccctgagtcgcatgaaggacttcaccaagggtttcagccctgaggggtaatgggcccagcagtgcctctggagcccaggccccaacacagccccatggcctctgccagatggctttgaaaaaggtgatccaagcaggcccctttatctgtacatagtgactgagtggggggtgctggcaagtgtggcagctgcctctgggctgagcacagcttgacccctctagcccctgtaaatactggatcaatgaatgaataaaactctcctaagaatctcctgagaaa

SEQ ID NO: 318291 - DNA, 2668 bp, Homo sapiens
cgccggggtgacgtctgccgccggcgcgggcgggtgacgcgactgggcccgttgtctgtgtgtgggactgaggggccccgggggcggtgggggctcccggtgggggcagcggtggggagggagggcctggacatggcgctgaggggccgccccgcgggaagatgaataagggctggctggagctggagagcgacccaggcctcttcaccctgctcgtggaagatttcggtgtcaagggggtgcaagtggaggagatctacgaccttcagagcaaatgtcagggccctgtatatggatttatcttcctgttcaaatggatcgaagagcgccggtcccggcgaaaggtctctaccttggtggatgatacgtccgtgattgatgatgatattgtgaataacatgttctttgcccaccagctgatacccaactcttgtgcaactcatgccttgctgagcgtgctcctgaactgcagcagcgtggacctgggacccaccctgagtcgcatgaaggacttcaccaagggtttcagccctgagagcaaaggatatgcgattggcaatgccccggagttggccaaggcccataatagccatgccaggcccgagccacgccacctccctgagaagcagaatggccttagtgcagtgcggaccatggaggcgttccactttgtcagctatgtgcctatcacaggccggctctttgagctggatgggctgaaggtctaccccattgaccatgggccctggggggaggacgaggagtggacagacaaggcccggcgggtcatcatggagcgtatcggcctcgccactgcaggggagccctaccacgacatccgcttcaacctgatggcagtggtgcccgaccgcaggatcaagtatgaggccaggctgcatgtgctgaaggtgaaccgtcagacagtactagaggctctgcagcagctgataagagtaacacagccagagctgattcagacccacaagtctcaagagtcacagctgcctgaggagtccaagtcagccagcaacaagtccccgctggtgctggaagcaaacagggcccctgcagcctctgagggcaaccacacagatggtgcagaggaggcggctggttcatgcgcacaagccccatcccacagccctcccaacaaacccaagctagtggtgaagcctccaggcagcagcctcaatggggttcaccccaaccccactcccattgtccagcggctgccggcctttctagacaatcacaattatgccaagtcccccatgcaggaggaagaagacctggcggcaggtgtgggccgcagccgagttccagtccgcccaccccagcagtactcagatgatgaggatgactatgaggatgacgaggaggatgacgtgcagaacaccaactctgcccttaggtataaggggaagggaacagggaagccaggggcattgagcggttctgctgatgggcaactgtcagtgctgcagcccaacaccatcaacgtcttggctgagaagctcaaagagtcccagaaggacctctcaattcctctgtccatcaagactagcagcggggctgggagtccggctgtggcagtgcccacacactcgcagccctcacccacccccagcaatgagagtacagacacggcctctgagatcggcagtgctttcaactcgccactgcgctcgcctatccgctcagccaacccgacgcggccctccagccctgtcacctcccacatctccaaggtgctttttggagaggatgacagcctgctgcgtgttgactgcatacgctacaaccgtgctgtccgtgatctgggtcctgtcatcagcacaggcctgctgcacctggctgaggatggggtgctgagtcccctggcgctgacagagggtgggaagggttcctcgccctccatcagaccaatccaaggcagccaggggtccagcagcccagtggagaaggaggtcgtggaagccacggacagcagagagaagacggggatggtgaggcctggcgagcccttgagtggggagaaatactcacccaaggagctgctggcactgctgaagtgtgtggaggctgagattgcaaactatgaggcgtgcctcaaggaggaggtagagaagaggaagaagttcaagattgatgaccagagaaggacccacaactacgatgagttcatctgcacctttatctccatgctggctcaggaaggcatgctggccaacctagtggagcagaacatctccgtgcggcggcgccaaggggtcagcatcggccggctccacaagcagcggaagcctgaccggcggaaacgctctcgcccctacaaggccaagcgccagtgaggactgctggccctgactctgcagcccactcttgccgtgtggccctcaccagggtccttccctgccccacttccccttttcccagtattactgaatagtcccagctggagagtccaggccctgggaatgggaggaaccaggccacattccttccatcgtgccctgaggcctgacacggcagatcagccccatagtgctcaggaggcagcatctggagttggggcacagcgaggtactgcagcttcctccacagccggctgtggagcagcaggacctggcccttctgcctgggcagcagaatatatattttacctatc

SEQ ID NO: 318292 - DNA, 4189 bp, Homo sapiens
cgccggggtgacgtctgccgccggcgcgggcgggtgacgcgactgggcccgttgtctgtgtgtgggactgaggggccccgggggcggtgggggctcccggtgggggcagcggtggggagggagggcctggacatggcgctgaggggccgccccgcgggaagatgaataagggctggctggagctggagagcgacccaggcctcttcaccctgctcgtggaagatttcggtgtcaagggggtgcaagtggaggagatctacgaccttcagagcaaatgtcagggccctgtatatggatttatcttcctgttcaaatggatcgaagagcgccggtcccggcgaaaggtctctaccttggtggatgatacgtccgtgattgatgatgatattgtgaataacatgttctttgcccaccagctgatacccaactcttgtgcaactcatgccttgctgagcgtgctcctgaactgcagcagcgtggacctgggacccaccctgagtcgcatgaaggacttcaccaagggtttcagccctgagagcaaaggatatgcgattggcaatgccccggagttggccaaggcccataatagccatgccaggcccgagccacgccacctccctgagaagcagaatggccttagtgcagtgcggaccatggaggcgttccactttgtcagctatgtgcctatcacaggccggctctttgagctggatgggctgaaggtctaccccattgaccatgggccctggggggaggacgaggagtggacagacaaggcccggcgggtcatcatggagcgtatcggcctcgccactgcaggggagccctaccacgacatccgcttcaacctgatggcagtggtgcccgaccgcaggatcaagtatgaggccaggctgcatgtgctgaaggtgaaccgtcagacagtactagaggctctgcagcagctgataagagtaacacagccagagctgattcagacccacaagtctcaagagtcacagctgcctgaggagtccaagtcagccagcaacaagtccccgctggtgctggaagcaaacagggcccctgcagcctctgagggcaaccacacagatggtgcagaggaggcggctggttcatgcgcacaagccccatcccacagccctcccaacaaacccaagctagtggtgaagcctccaggcagcagcctcaatggggttcaccccaaccccactcccattgtccagcggctgccggcctttctagacaatcacaattatgccaagtcccccatgcaggaggaagaagacctggcggcaggtgtgggccgcagccgagttccagtccgcccaccccagcagtactcagatgatgaggatgactatgaggatgacgaggaggatgacgtgcagaacaccaactctgcccttaggtcagcccagctttctaaggctaccaggttctaggtgcttcggatcccatcctgaatatctcagtctgtgtctgagaatgccctgcagcagataatgttgagcacctgcggagtttggggccctgggggaggctggcatgatggggctgaccccaggtccccaggaagtttttggtgggctggggggtaaggctgagcacgtaagcttatatcatgtcctattggaagtggccttttagccaggccttgaaggattggttggggcagggatggaggagatgtgggtggtggggaggcagctttgctggaacacagggcattggcaaaaggccaggagtgggatggctggaatagaggaagtgtcttttgaggacacttggctgcagctgtcagaacttgatgccaggcttagcatggctagttcaagttgcttggaccaagtataaggagttttagggtcagcccctggaggtcgggatgtatttaagccattctgggtactgctgggtatggtcacctggcccgttcccttgcttcacatcttctcgggccccacaggtataaggggaagggaacagggaagccaggggcattgagcggttctgctgatgggcaactgtcagtgctgcagcccaacaccatcaacgtcttggctgagaagctcaaagagtcccagaaggacctctcaattcctctgtccatcaagactagcagcggggctgggagtccggctgtggcagtgcccacacactcgcagccctcacccacccccagcaatgagagtacagacacggcctctgagatcggcagtgctttcaactcgccactgcgctcgcctatccgctcagccaacccgacgcggccctccagccctgtcacctcccacatctccaaggtgctttttggagaggatgacagcctgctgcgtgttgactgcatacgctacaaccgtgctgtccgtgatctgggtcctgtcatcagcacaggcctgctgcacctggctgaggatggggtgctgagtcccctggcgctgacagagggtgggaagggttcctcgccctccatcagaccaatccaaggcagccaggggtccagcagcccagtggagaaggaggtcgtggaagccacggacagcagagagaagacggggatggtgaggcctggcgagcccttgagtggggagaaatactcacccaaggagctgctggcactgctgaagtgtgtggaggctgagattgcaaactatgaggcgtgcctcaaggaggaggtagagaagaggaagaagttcaagattgatgaccagagaaggacccacaactacgatgagttcatctgcacctttatctccatgctggctcaggaaggcatgctggccaacctagtggagcagaacatctccgtgcggcggcgccaaggggtcagcatcggccggctccacaagcagcggaagcctgaccggcggaaacgctctcgcccctacaaggccaagcgccagtgaggactgctggccctgactctgcagcccactcttgccgtgtggccctcaccagggtccttccctgccccacttccccttttcccagtattactgaatagtcccagctggagagtccaggccctgggaatgggaggaaccaggccacattccttccatcgtgccctgaggcctgacacggcagatcagccccatagtgctcaggaggcagcatctggagttggggcacagcgaggtactgcagcttcctccacagccggctgtggagcagcaggacctggcccttctgcctgggcagcagaatatatattttacctatcagagacatctatttttctgggctccaacccaacatgccaccatgttgacataagttcctacctgactatgctttctctcctaggagctgtcctggtgggcccaggtccttgtatcatgccacggtcccaactacagggtcctagctgggggcctgggtgggccctgggctctgggccctgctgctctagccccagccaccagcctgtccctgttgtaaggaagccaggtcttctctcttcattcctcttaggagagtgccaaactcagggacccagcactgggctgggttgggagtagggtgtcccagtggggttggggtgagcaggctgctgggatcccatggcctgagcagagcatgtgggaactgttcagtggcctgtgaactgtcttccttgttctagccaggctgttcaagactgctctccatagcaaggttctagggctcttcgccttcagtgttgtggccctagctatgggcctaaattgggctctaggtctctgtccctggcgcttgaggctcagaagagcctctgtccagcccctcagtattaccatgtctccctctcaggggtagcagagacagggttgcttataggaagctggcaccactcagctcttcctgctactccagtttcctcagcctctgcaaggcactcagggtgggggacagcaggatcaagacaacccgttggagcccctgtgttccagaggacctgatgccaaggggtaatgggcccagcagtgcctctggagcccaggccccaacacagccccatggcctctgccagatggctttgaaaaaggtgatccaagcaggcccctttatctgtacatagtgactgagtggggggtgctggcaagtgtggcagctgcctctgggctgagcacagcttgacccctctagcccctgtaaatactggatcaatgaatgaataaaactctcctaagaatctcctgagaaa

SEQ ID NO: 318293 - DNA, 3342 bp, Homo sapiens
cgccggggtgacgtctgccgccggcgcgggcgggtgacgcgactgggcccgttgtctgtgtgtgggactgaggggccccgggggcggtgggggctcccggtgggggcagcggtggggagggagggcctggacatggcgctgaggggccgccccgcgggaagatgaataagggctggctggagctggagagcgacccaggcctcttcaccctgctcgtggaagatttcggtgtcaagggggtgcaagtggaggagatctacgaccttcagagcaaatgtcagggccctgtatatggatttatcttcctgttcaaatggatcgaagagcgccggtcccggcgaaaggtctctaccttggtggatgatacgtccgtgattgatgatgatattgtgaataacatgttctttgcccaccagctgatacccaactcttgtgcaactcatgccttgctgagcgtgctcctgaactgcagcagcgtggacctgggacccaccctgagtcgcatgaaggacttcaccaagggtttcagccctgagagcaaaggatatgcgattggcaatgccccggagttggccaaggcccataatagccatgccaggcccgagccacgccacctccctgagaagcagaatggccttagtgcagtgcggaccatggaggcgttccactttgtcagctatgtgcctatcacaggccggctctttgagctggatgggctgaaggtctaccccattgaccatgggccctggggggaggacgaggagtggacagacaaggcccggcgggtcatcatggagcgtatcggcctcgccactgcaggggagccctaccacgacatccgcttcaacctgatggcagtggtgcccgaccgcaggatcaagtatgaggccaggctgcatgtgctgaaggtgaaccgtcagacagtactagaggctctgcagcagctgataagagtaacacagccagagctgattcagacccacaagtctcaagagtcacagctgcctgaggagtccaagtcagccagcaacaagtccccgctggtgctggaagcaaacagggcccctgcagcctctgagggcaaccacacagatggtgcagaggaggcggctggttcatgcgcacaagccccatcccacagccctcccaacaaacccaagctagtggtgaagcctccaggcagcagcctcaatggggttcaccccaaccccactcccattgtccagcggctgccggcctttctagacaatcacaattatgccaagtcccccatgcaggaggaagaagacctggcggcaggtgtgggccgcagccgagttccagtccacccacccccagcaatgagagtacagacacggcctctgagatcggcagtgctttcaactcgccactgcgctcgcctatccgctcagccaacccgacgcggccctccagccctgtcacctcccacatctccaaggtgctttttggagaggatgacagcctgctgcgtgttgactgcatacgctacaaccgtgctgtccgtgatctgggtcctgtcatcagcacaggcctgctgcacctggctgaggatggggtgctgagtcccctggcgctgacagagggtgggaagggttcctcgccctccatcagaccaatccaaggcagccaggggtccagcagcccagtggagaaggaggtcgtggaagccacggacagcagagagaagacggggatggtgaggcctggcgagcccttgagtggggagaaatactcacccaaggagctgctggcactgctgaagtgtgtggaggctgagattgcaaactatgaggcgtgcctcaaggaggaggtagagaagaggaagaagttcaagattgatgaccagagaaggacccacaactacgatgagttcatctgcacctttatctccatgctggctcaggaaggcatgctggccaacctagtggagcagaacatctccgtgcggcggcgccaaggggtcagcatcggccggctccacaagcagcggaagcctgaccggcggaaacgctctcgcccctacaaggccaagcgccagtgaggactgctggccctgactctgcagcccactcttgccgtgtggccctcaccagggtccttccctgccccacttccccttttcccagtattactgaatagtcccagctggagagtccaggccctgggaatgggaggaaccaggccacattccttccatcgtgccctgaggcctgacacggcagatcagccccatagtgctcaggaggcagcatctggagttggggcacagcgaggtactgcagcttcctccacagccggctgtggagcagcaggacctggcccttctgcctgggcagcagaatatatattttacctatcagagacatctatttttctgggctccaacccaacatgccaccatgttgacataagttcctacctgactatgctttctctcctaggagctgtcctggtgggcccaggtccttgtatcatgccacggtcccaactacagggtcctagctgggggcctgggtgggccctgggctctgggccctgctgctctagccccagccaccagcctgtccctgttgtaaggaagccaggtcttctctcttcattcctcttaggagagtgccaaactcagggacccagcactgggctgggttgggagtagggtgtcccagtggggttggggtgagcaggctgctgggatcccatggcctgagcagagcatgtgggaactgttcagtggcctgtgaactgtcttccttgttctagccaggctgttcaagactgctctccatagcaaggttctagggctcttcgccttcagtgttgtggccctagctatgggcctaaattgggctctaggtctctgtccctggcgcttgaggctcagaagagcctctgtccagcccctcagtattaccatgtctccctctcaggggtagcagagacagggttgcttataggaagctggcaccactcagctcttcctgctactccagtttcctcagcctctgcaaggcactcagggtgggggacagcaggatcaagacaacccgttggagcccctgtgttccagaggacctgatgccaaggggtaatgggcccagcagtgcctctggagcccaggccccaacacagccccatggcctctgccagatggctttgaaaaaggtgatccaagcaggcccctttatctgtacatagtgactgagtggggggtgctggcaagtgtggcagctgcctctgggctgagcacagcttgacccctctagcccctgtaaatactggatcaatgaatgaataaaactctcctaagaatctcctgagaaa

SEQ ID NO: 318294 - DNA, 3762 bp, Homo sapiens
cgccggggtgacgtctgccgccggcgcgggcgggtgacgcgactgggcccgttgtctgtgtgtgggactgaggggccccgggggcggtgggggctcccggtgggggcagcggtggggagggagggcctggacatggcgctgaggggccgccccgcgggaagatgaataagggctggctggagctggagagcgacccaggcctcttcaccctgctcgtggaagatttcggtgtcaagggggtgcaagtggaggagatctacgaccttcagagcaaatgtcagggccctgtatatggatttatcttcctgttcaaatggatcgaagagcgccggtcccggcgaaaggtctctaccttggtggatgatacgtccgtgattgatgatgatattgtgaataacatgttctttgcccaccagctgatacccaactcttgtgcaactcatgccttgctgagcgtgctcctgaactgcagcagcgtggacctgggacccaccctgagtcgcatgaaggacttcaccaagggtttcagccctgagagcaaaggatatgcgattggcaatgccccggagttggccaaggcccataatagccatgccaggcccgagccacgccacctccctgagaagcagaatggccttagtgcagtgcggaccatggaggcgttccactttgtcagctatgtgcctatcacaggccggctctttgagctggatgggctgaaggtctaccccattgaccatgggccctggggggaggacgaggagtggacagacaaggcccggcgggtcatcatggagcgtatcggcctcgccactgcaggggagccctaccacgacatccgcttcaacctgatggcagtggtgcccgaccgcaggatcaagtatgaggccaggctgcatgtgctgaaggtgaaccgtcagacagtactagaggctctgcagcagctgataagagtaacacagccagagctgattcagacccacaagtctcaagagtcacagctgcctgaggagtccaagtcagccagcaacaagtccccgctggtgctggaagcaaacagggcccctgcagcctctgagggcaaccacacagatggtgcagaggaggcggctggttcatgcgcacaagccccatcccacagccctcccaacaaacccaagctagtggtgaagcctccaggcagcagcctcaatggggttcaccccaaccccactcccattgtccagcggctgccggcctttctagacaatcacaattatgccaagtcccccatgcaggaggaagaagacctggcggcaggtgtgggccgcagccgagttccagtccgcccaccccagcagtactcagatgatgaggatgactatgaggatgacgaggaggatgacgtgcagaacaccaactctgcccttaggtataaggggaagggaacagggaagccaggggcattgagcggttctgctgatgggcaactgtcagtgctgcagcccaacaccatcaacgtcttggctgagaagctcaaagagtcccagaaggacctctcaattcctctgtccatcaagactagcagcggggctgggagtccggctgtggcagtgcccacacactcgcagccctcacccacccccagcaatgagagtacagacacggcctctgagatcggcagtgctttcaactcgccactgcgctcgcctatccgctcagccaacccgacgcggccctccagccctgtcacctcccacatctccaaggtgctttttggagaggatgacagcctgctgcgtgttgactgcatacgctacaaccgtgctgtccgtgatctgggtcctgtcatcagcacaggcctgctgcacctggctgaggatggggtgctgagtcccctggcgctgacagagggtgggaagggttcctcgccctccatcagaccaatccaaggcagccaggggtccagcagcccagtggagaaggaggtcgtggaagccacggacagcagagagaagacggggatggtgaggcctggcgagcccttgagtggggagaaatactcacccaaggagctgctggcactgctgaagtgtgtggaggctgagattgcaaactatgaggcgtgcctcaaggaggaggtagagaagaggaagaagttcaagattgatgaccagagaaggacccacaactacgatgagttcatctgcacctttatctccatgctggctcaggaaggcatgctggccaacctagtggagcagaacatctccgtgcggcggcgccaaggggtcagcatcggccggctccacaagcagcggaagcctgaccggcggaaacgctctcgcccctacaaggccaagcgccagtgaggactgctggccctgactctgcagcccactcttgccgtgtggccctcaccagggtccttccctgccccacttccccttttcccagtattactgaatagtcccagctggagagtccaggccctgggaatgggaggaaccaggccacattccttccatcgtgccctgaggcctgacacggcagatcagccccatagtgctcaggaggcagcatctggagttggggcacagcgaggtactgcagcttcctccacagccggctgtggagcagcaggacctggcccttctgcctgggcagcagaatatatattttacctatcagagacatctatttttctgggctccaacccaacatgccaccatgttgacataagttcctacctgactatgctttctctcctaggagctgtcctggtgggcccaggtccttgtatcatgccacggtcccaactacagggtcctagctgggggcctgggtgggccctgggctctgggccctgctgctctagccccagccaccagcctgtccctgttgtaaggaagccaggtcttctctcttcattcctcttaggagagtgccaaactcagggacccagcactgggctgggttgggagtagggtgtcccagtggggttggggtgagcaggctgctgggatcccatggcctgagcagagcatgtgggaactgttcagtggcctgtgaactgtcttccttgttctagccaggctgttcaagactgctctccatagcaaggttctagggctcttcgccttcagtgttgtggccctagctatgggcctaaattgggctctaggtctctgtccctggcgcttgaggctcagaagagcctctgtccagcccctcagtattaccatgtctccctctcaggggtagcagagacagggttgcttataggaagctggcaccactcagctcttcctgctactccagtttcctcagcctctgcaaggcactcagggtgggggacagcaggatcaagacaacccgttggagcccctgtgttccagaggacctgatgccaaggggtaatgggcccagcagtgcctctggagcccaggccccaacacagccccatggcctctgccagatggctttgaaaaaggtgatccaagcaggcccctttatctgtacatagtgactgagtggggggtgctggcaagtgtggcagctgcctctgggctgagcacagcttgacccctctagcccctgtaaatactggatcaatgaatgaataaaactctcctaagaatctcctgagaaattcagagccaggcctggctctgaacttaggggccatcaatttcatcacaacaattatcaatataaaacccctgccataacccaataccaaacgcccctcttcgtctgatccgtcctaagttcagcaccagg

SEQ ID NO: 318295 - DNA, 3535 bp, Homo sapiens
cgccggggtgacgtctgccgccggcgcgggcgggtgacgcgactgggcccgttgtctgtgtgtgggactgaggggccccgggggcggtgggggctcccggtgggggcagcggtggggagggagggcctggacatggcgctgaggggccgccccgcgggaagatgaataagggctggctggagctggagagcgacccaggcctcttcaccctgctcgtggaagatttcggtgtcaagggggtgcaagtggaggagatctacgaccttcagagcaaatgtcagggccctgtatatggatttatcttcctgttcaaatggatcgaagagcgccggtcccggcgaaaggtctctaccttggtggatgatacgtccgtgattgatgatgatattgtgaataacatgttctttgcccaccagctgatacccaactcttgtgcaactcatgccttgctgagcgtgctcctgaactgcagcagcgtggacctgggacccaccctgagtcgcatgaaggacttcaccaagggtttcagccctgagagcaaaggatatgcgattggcaatgccccggagttggccaaggcccataatagccatgccaggcccgagccacgccacctccctgagaagcagaatggccttagtgcagtgcggaccatggaggcgttccactttgtcagctatgtgcctatcacaggccggctctttgagctggatgggctgaaggtctaccccattgaccatgggccctggggggaggacgaggagtggacagacaaggcccggcgggtcatcatggagcgtatcggcctcgccactgcaggggagccctaccacgacatccgcttcaacctgatggcagtggtgcccgaccgcaggatcaagtatgaggccaggctgcatgtgctgaaggtgaaccgtcagacagtactagaggctctgcagcagctgataagagtaacacagccagagctgattcagacccacaagtctcaagagtcacagctgcctgaggagtccaagtcagccagcaacaagtccccgctggtgctggaagcaaacagggcccctgcagcctctgagggcaaccacacagatggtgcagaggaggcggctggttcatgcgcacaagccccatcccacagccctcccaacaaacccaagctagtggtgaagcctccaggcagcagcctcaatggggttcaccccaaccccactcccattgtccagcggctgccggcctttctagacaatcacaattatgccaagtcccccatgcaggaggaagaagacctggcggcaggtgtgggccgcagccgagttccagtccgcccaccccagcagtactcagatgatgaggatgactatgaggatgacgaggaggatgacgtgcagaacaccaactctgcccttaggtataaggggaagggaacagggaagccaggggcattgagcggttctgctgatgggcaactgtcagtgctgcagcccaacaccatcaacgtcttggctgagaagctcaaagagtcccagaaggacctctcaattcctctgtccatcaagactagcagcggggctgggagtccggctgtggcagtgcccacacactcgcagccctcacccacccccagcaatgagagtacagacacggcctctgagatcggcagtgctttcaactcgccactgcgctcgcctatccgctcagccaacccgacgcggccctccagccctgtcacctcccacatctccaaggtgctttttggagaggatgacagcctgctgcgtgttgactgcatacgctacaaccgtgctgtccgtgatctgggtcctgtcatcagcacaggcctgctgcacctggctgaggatggggtgctgagtcccctggcgctgacagagggtgggaagggttcctcgccctccatcagaccaatccaaggcagccaggggtccagcagcccagtggagaaggaggtcgtggaagccacggacagcagagagaagacggggatggtgaggcctggcgagcccttgagtggggagaaatactcacccaaggagctgctggcactgctgaagtgtgtggaggctgagattgcaaactatgaggcgtgcctcaaggaggaggtagagaagaggaagaagttcaagattgatgaccagagaaggacccacaactacgatgagttcatctgcacctttatctccatgctggctcaggaaggcatgctggccaacctagtggagcagaacatctccgtgcggcggcgccaaggggtcagcatcggccggctccacaagcagcggaagcctgaccggcggaaacgctctcgcccctacaaggccaagcgccagtgaggactgctggccctgactctgcagcccactcttgccgtgtggccctcaccagggtccttccctgccccacttccccttttcccagtattactgaatagtcccagctggagagtccaggccctgggaatgggaggaaccaggccacattccttccatcgtgccctgaggcctgacacggcagatcagccccatagtgctcaggaggcagcatctggagttggggcacagcgaggtactgcagcttcctccacagccggctgtggagcagcaggacctggcccttctgcctgggcagcagaatatatattttacctatcagagacatctatttttctgggctccaacccaacatgccaccatgttgacataagttcctacctgactatgctttctctcctaggagctgtcctggtgggcccaggtccttgtatcatgccacggtcccaactacagggtcctagctgggggcctgggtgggccctgggctctgggccctgctgctctagccccagccaccagcctgtccctgttgtaaggaagccaggtcttctctcttcattcctcttaggagagtgccaaactcagggacccagcactgggctgggttgggagtagggtgtcccagtggggttggggtgagcaggctgctgggatcccatggcctgagcagagcatgtgggaactgttcagtggcctgtgaactgtcttccttgttctagccaggctgttcaagactgctctccatagcaaggttctagggctcttcgccttcagtgttgtggccctagctatgggcctaaattgggctctaggtctctgtccctggcgcttgaggctcagaagagcctctgtccagcccctcagtattaccatgtctccctctcaggggtagcagagacagggttgcttataggaagctggcaccactcagctcttcctgctactccagtttcctcagcctctgcaaggcactcagggtgggggacagcaggatcaagacaacccgttggagcccctgtgttccagaggacctgatgccaaggggtaatgggcccagcagtgcctctggagcccaggccccaacacagccccatggcctctgccagatggctttgaaaaaggtgatccaagcaccccccactcagtcactctgtacagataaaggggcctgcttggagtcgacc

SEQ ID NO: 318296 - DNA, 3508 bp, Homo sapiens
cgccggggtgacgtctgccgccggcgcgggcgggtgacgcgactgggcccgttgtctgtgtgtgggactgaggggccccgggggcggtgggggctcccggtgggggcagcggtggggagggagggcctggacatggcgctgaggggccgccccgcgggaagatgaataagggctggctggagctggagagcgacccaggcctcttcaccctgctcgtggaagatttcggtgtcaagggggtgcaagtggaggagatctacgaccttcagagcaaatgtcagggccctgtatatggatttatcttcctgttcaaatggatcgaagagcgccggtcccggcgaaaggtctctaccttggtggatgatacgtccgtgattgatgatgatattgtgaataacatgttctttgcccaccagctgatacccaactcttgtgcaactcatgccttgctgagcgtgctcctgaactgcagcagcgtggacctgggacccaccctgagtcgcatgaaggacttcaccaagggtttcagccctgagagcaaaggatatgcgattggcaatgccccggagttggccaaggcccataatagccatgccaggcccgagccacgccacctccctgagaagcagaatggccttagtgcagtgcggaccatggaggcgttccactttgtcagctatgtgcctatcacaggccggctctttgagctggatgggctgaaggtctaccccattgaccatgggccctggggggaggacgaggagtggacagacaaggcccggcgggtcatcatggagcgtatcggcctcgccactgcaggggagccctaccacgacatccgcttcaacctgatggcagtggtgcccgaccgcaggatcaagtatgaggccaggctgcatgtgctgaaggtgaaccgtcagacagtactagaggctctgcagcagctgataagagtaacacagccagagctgattcagacccacaagtctcaagagtcacagctgcctgaggagtccaagtcagccagcaacaagtccccgctggtgctggaagcaaacagggcccctgcagcctctgagggcaaccacacagatggtgcagaggaggcggctggttcatgcgcacaagccccatcccacagccctcccaacaaacccaagctagtggtgaagcctccaggcagcagcctcaatggggttcaccccaaccccactcccattgtccagcggctgccggcctttctagacaatcacaattatgccaagtcccccatgcaggaggaagaagacctggcggcaggtgtgggccgcagccgagttccagtccgcccaccccagcagtactcagatgatgaggatgactatgaggatgacgaggaggatgacgtgcagaacaccaactctgcccttaggtataaggggaagggaacagggaagccaggggcattgagcggttctgctgatgggcaactgtcagtgctgcagcccaacaccatcaacgtcttggctgagaagctcaaagagtcccagaaggacctctcaattcctctgtccatcaagactagcagcggggctgggagtccggctgtggcagtgcccacacactcgcagccctcacccacccccagcaatgagagtacagacacggcctctgagatcggcagtgctttcaactcgccactgcgctcgcctatccgctcagccaacccgacgcggccctccagccctgtcacctcccacatctccaaggtgctttttggagaggatgacagcctgctgcgtgttgactgcatacgctacaaccgtgctgtccgtgatctgggtcctgtcatcagcacaggcctgctgcacctggctgaggatggggtgctgagtcccctggcgctgacagagggtgggaagggttcctcgccctccatcagaccaatccaaggcagccaggggtccagcagcccagtggagaaggaggtcgtggaagccacggacagcagagagaagacggggatggtgaggcctggcgagcccttgagtggggagaaatactcacccaaggagctgctggcactgctgaagtgtgtggaggctgagattgcaaactatgaggcgtgcctcaaggaggaggtagagaagaggaagaagttcaagattgatgaccagagaaggacccacaactacgatgagttcatctgcacctttatctccatgctggctcaggaaggcatgctggccaacctagtggagcagaacatctccgtgcggcggcgccaaggggtcagcatcggccggctccacaagcagcggaagcctgaccggcggaaacgctctcgcccctacaaggccaagcgccagtgaggactgctggccctgactctgcagcccactcttgccgtgtggccctcaccagggtccttccctgccccacttccccttttcccagtattactgaatagtcccagctggagagtccaggccctgggaatgggaggaaccaggccacattccttccatcgtgccctgaggcctgacacggcagatcagccccatagtgctcaggaggcagcatctggagttggggcacagcgaggtactgcagcttcctccacagccggctgtggagcagcaggacctggcccttctgcctgggcagcagaatatatattttacctatcagagacatctatttttctgggctccaacccaacatgccaccatgttgacataagttcctacctgactatgctttctctcctaggagctgtcctggtgggcccaggtccttgtatcatgccacggtcccaactacagggtcctagctgggggcctgggtgggccctgggctctgggccctgctgctctagccccagccaccagcctgtccctgttgtaaggaagccaggtcttctctcttcattcctcttaggagagtgccaaactcagggacccagcactgggctgggttgggagtagggtgtcccagtggggttggggtgagcaggctgctgggatcccatggcctgagcagagcatgtgggaactgttcagtggcctgtgaactgtcttccttgttctagccaggctgttcaagactgctctccatagcaaggttctagggctcttcgccttcagtgttgtggccctagctatgggcctaaattgggctctaggtctctgtccctggcgcttgaggctcagaagagcctctgtccagcccctcagtattaccatgtctcccttccagtttcctcagcctctgcaaggcactcagggtgggggacagcaggatcaagacaacccgttggacccaggccccaacacagccccatggcctctgccagatggctttgaaaaaggtgatccaagcaggcccctttatctgtacatagtgactgagtggggggtgctggcaagtgtggcagctgcctctgggctgagcacagcttgacccctctagcccctgtaaatactggatcaatgaatgaataaaactctcctaagaatctcctgagaaa

SEQ ID NO: 318297 - DNA, 1639 bp, Homo sapiens
ggctaggtacgagctggggtgtgtaatcggccgagggagagagagaactttcacccaaggagctgctggcactgctgaagtgtgtggaggctgagattgcaaactatgaggcgtgcctcaaggaggaggtagagaagaggaagaagttcaagattgatgaccagagaaggacccacaactacgatgagttcatctgcacctttatctccatgctggctcaggaaggcatgctggccaacctagtggagcagaacatctccgtgcggcggcgccaaggggtcagcatcggccggctccacaagcagcggaagcctgaccggcggaaacgctctcgcccctacaaggccaagcgccagtgaggactgctggccctgactctgcagcccactcttgccgtgtggccctcaccagggtccttccctgccccacttccccttttcccagtattactgaatagtcccagctggagagtccaggccctgggaatgggaggaaccaggccacattccttccatcgtgccctgaggcctgacacggcagatcagccccatagtgctcaggaggcagcatctggagttggggcacagcgaggtactgcagcttcctccacagccggctgtggagcagcaggacctggcccttctgcctgggcagcagaatatatattttacctatcagagacatctatttttctgggctccaacccaacatgccaccatgttgacataagttcctacctgactatgctttctctcctaggagctgtcctggtgggcccaggtccttgtatcatgccacggtcccaactacagggtcctagctgggggcctgggtgggccctgggctctgggccctgctgctctagccccagccaccagcctgtccctgttgtaaggaagccaggtcttctctcttcattcctcttaggagagtgccaaactcagggacccagcactgggctgggttgggagtagggtgtcccagtggggttggggtgagcaggctgctgggatcccatggcctgagcagagcatgtgggaactgttcagtggcctgtgaactgtcttccttgttctagccaggctgttcaagactgctctccatagcaaggttctagggctcttcgccttcagtgttgtggccctagctatgggcctaaattgggctctaggtctctgtccctggcgcttgaggctcagaagagcctctgtccagcccctcagtattaccatgtctccctctcaggggtagcagagacagggttgcttataggaagctggcaccactcagctcttcctgctactccagtttcctcagcctctgcaaggcactcagggtgggggacagcaggatcaagacaacccgttggagcccctgtgttccagaggacctgatgccaaggggtaatgggcccagcagtgcctctggagcccaggccccaacacagccccatggcctctgccagatggctttgaaaaaggtgatccaagcaggcccctttatctgtacatagtgactgagtggggggtgctggcaagtgtggcagctgcctctgggctgagcacagcttgacccctctagcccctgtaaatactggatcaatgaatgaataaaactctcctaagaatctcctgagaaa

SEQ ID NO: 318298 - DNA, 2291 bp, Homo sapiens
cgccggggtgacgtctgccgccggcgcgggcgggtgacgcgactgggcccgttgtctgtgtgtgggactgaggggccccgggggcggtgggggctcccggtgggggcagcggtggggagggagggcctggacatggcgctgaggggccgccccgcgggaagatgaataagggctggctggagctggagagcgacccaggcctcttcaccctgctcgtggaagatttcggtgtcaagggggtgcaagtggaggagatctacgaccttcagagcaaatgtcagggccctgtatatggatttatcttcctgttcaaatggatcgaagagcgccggtcccggcgaaaggtctctaccttggtggatgatacgtccgtgattgatgatgatattgtgaataacatgttctttgcccaccagctgatacccaactcttgtgcaactcatgccttgctgagcgtgctcctgaactgcagcagcgtggacctgggacccaccctgagtcgcatgaaggacttcaccaagggtttcagccctgagagcaaaggatatgcgattggcaatgccccggagttggccaaggcccataatagccatgccaggcccgagccacgccacctccctgagaagcagaatggccttagtgcagtgcggaccatggaggcgttccactttgtcagctatgtgcctatcacaggccggctctttgagctggatgggctgaaggtctaccccattgaccatgggccctggggggaggacgaggagtggacagacaaggcccggcgggtcatcatggagcgtatcggcctcgccactgcaggggagccctaccacgacatccgcttcaacctgatggcagtggtgcccgaccgcaggatcaagtatgaggccaggctgcatgtgctgaaggtgaaccgtcagacagtactagaggctctgcagcagctgataagagtaacacagccagagctgattcagacccacaagtctcaagagtcacagctgcctgaggagtccaagtcagccagcaacaagtccccgctggtgctggaagcaaacagggcccctgcagcctctgagggcaaccacacagatggtgcagaggaggcggctggttcatgcgcacaagccccatcccacagccctcccaacaaacccaagctagtggtgaagcctccaggcagcagcctcaatggggttcaccccaaccccactcccattgtccagcggctgccggcctttctagacaatcacaattatgccaagtcccccatgcaggaggaagaagacctggcggcaggtgtgggccgcagccgagttccagtccgcccaccccagcagtactcagatgatgaggatgactatgaggatgacgaggaggatgacgtgcagaacaccaactctgcccttaggtataaggggaagggaacagggaagccaggggcattgagcggttctgctgatgggcaactgtcagtgctgcagcccaacaccatcaacgtcttggctgagaagctcaaagagtcccagaaggacctctcaattcctctgtccatcaagactagcagcggggctgggagtccggctgtggcagtgcccacacactcgcagccctcacccacccccagcaatgagagtacagacacggcctctgagatcggcagtgctttcaactcgccactgcgctcgcctatccgctcagccaacccgacgcggccctccagccctgtcacctcccacatctccaaggtgctttttggagaggatgacagcctgctgcgtgttgactgcatacgctacaaccgtgctgtccgtgatctgggtcctgtcatcagcacaggcctgctgcacctggctgaggatggggtgctgagtcccctggcgctgacaggtgggccttggactggctcactggccacttggtgcacccaggagggaggagggaagtggccaagtgaccacaaagtgtcctgcactctgatgattttcttgtgacctctcttcccagagggtgggaagggttcctcgccctccatcagaccaatccaaggcagccaggggtccagcagcccagtggagaaggaggtcgtggaagccacggacagcagagagaagacggggatggtgaggcctggcgagcccttgagtggggagaaatactcacccaaggtgagcctccgttgtggttttctcctttaatcctggcagagggtaaggcctgagctcctcctgcccaggtgccaagttcttgattggaactttggtgtgaagattggctggagcgtatcaggt

SEQ ID NO: 318299 - DNA, 1629 bp, Homo sapiens
cgccggggtgacgtctgccgccggcgcgggcgggtgacgcgactgggcccgttgtctgtgtgtgggactgaggggccccgggggcggtgggggctcccggtgggggcagcggtggggagggagggcctggacatggcgctgaggggccgccccgcgggaagatgaataagggctggctggagctggagagcgacccaggcctcttcaccctgctcgtggaagatttcggtgtcaagggggtgcaagtggaggagatctacgaccttcagagcaaatgtcagggccctgtatatggatttatcttcctgttcaaatggatcgaagagcgccggtcccggcgaaaggtctctaccttggtggatgatacgtccgtgattgatgatgatattgtgaataacatgttctttgcccaccagctgatacccaactcttgtgcaactcatgccttgctgagcgtgctcctgaactgcagcagcgtggacctgggacccaccctgagtcgcatgaaggacttcaccaagggtttcagccctgagagcaaaggatatgcgattggcaatgccccggagttggccaaggcccataatagccatgccaggcccgagccacgccacctccctgagaagcagaatggccttagtgcagtgcggaccatggaggcgttccactttgtcagctatgtgcctatcacaggccggctctttgagctggatgggctgaaggtctaccccattgaccatgggccctggggggaggacgaggagtggacagacaaggcccggcgggtcatcatggagcgtatcggcctcgccactgcaggggagccctaccacgacatccgcttcaacctgatggcagtggtgcccgaccgcaggatcaagtatgaggccaggctgcatgtgctgaaggtgaaccgtcagacagtactagaggctctgcagcagctgataagagtaacacagccagagctgattcagacccacaagtctcaagagtcacagctgcctgaggagtccaagtcagccagcaacaagtccccgctggtgctggaagcaaacagggcccctgcagcctctgagggcaaccacacagatggtgcagaggaggcggctggttcatgcgcacaagccccatcccacagccctcccaacaaacccaagctagtggtgaagcctccaggcagcagcctcaatggggttcaccccaaccccactcccattgtccagcggctgccggcctttctagacaatcacaattatgccaagtcccccatgcaggtaagctgggagcacccttgcaggattctctacttgattctcttgagaggctgcaacaggcaattttcccatgtggttccttggtgttcatccttggcatggctgggtcaagctgcctgggcctgggttgctaggttcctctgcctgatatgaaaaggcccccacaacagcaggagcttagggaggcagggagagctcctttgaatttaatctagttacgtggctgtgggattaaatgtttaggtcacgctccttggtacaacttcatgggttgggttttactggcaaaataaaggcatgtgtttcagggcactctgtttctcttaaaacccctccgtggggttctatccag

SEQ ID NO: 318300 - DNA, 351 bp, Homo sapiens
gggccggggagactgtgagcttttcttggagatcctactggaggtcctgcctgtgttcttgccctgtctcagatggtgcagaggaggcggctggttcatgcgcacaagccccatcccacagccctcccaacaaacccaagctagtggtgaagcctccaggcagcagcctcaatggggttcaccccaaccccactcccattgtccagcggctgccggcctttctagacaatcacaattatgccaagtcccccatgcaggtaagctgggagcacccttgcaggattctctacttgattctcttgagaggctgcaacaggcaattttcccatgtggttccttggtgttcatcct

SEQ ID NO: 318301 - DNA, 907 bp, Homo sapiens
ccttacattggaaaaggtattttaaatttagccttgccgtattatttaaaataccttttccaatgtaagggacaaaaggaacttccttttgtcccttacattggaaaaggtattttaaatttagccttgccgtattatttatagttaggaatttactacattttggtagtctgttttgaaactaagcacttgtgtctgaaagatgcagataatatctatctatttattacacagtgggctctgtttgctgcagaaaagagtgaaacttttaactgcttagcacacttgccagtgaaatatacctgacagagcagaggttataactttggctctaattacttttagtaatggtaagacaacgtgagttttgtttgtttacatgctgtttacaatggcataattttaaaaatatatacaattgagatatttattgcctactattttaaagatgttttatgtgttttcacctttggaatatattgttacatttccttgtacagataattttggtggctttgttaatgtagctagtaatttttatgactactaagtgaccagttttcggtgccttttattgtgggatgcatgattatgtatttattgtacggaagtcactgacgtgtgtatttttgtactttgctgaaagtaatggttgatcctgatgtacatgatgatgaaagacatctttcccaaagggcactgccttgagatcatccttctcaaataaaaagaatgcatttgaaaacaaaaagggggggctaagatcccgagggccagtttaagcgccccgttctgtaaggggccataagcgttataaaaaggaggccggaaaaccgggggaaaatctggtttggaccctcgcgggctaggacaccaaatcagtaaagaagtaaacgtgtggatgtaa

SEQ ID NO: 318302 - DNA, 2449 bp, Homo sapiens
ctgagtttgtgtgatttcaggttatttagagttattaatgtaaacataagaaggcttgtgactcttatcaccctctatagaatataaagactaaaaataaaaactattacctctgggcctgtttttctttgggattagataaagcctttctaccatatcaccaaatactcataaaggctaacacagaaagcttttccaagttaataatttctaaaattaaatatcagggccaggtgtggtggctgacacctgtaatcccagcactttgggaggccgaagtgggtggattacctgaggtcaggagctcgagacaagtcaacatggtgaaacctcatctctgctaaaaatacaaaaactagccaggcatggtgatgcacacctgtaatcccagctactcgggaggctgaggcaggagaattgcttgaacccaggaggcggaggttgcagtgagctgagattgcaccactgcactccagcctgggcgacagagtgagactctgtctcaaaaaaaagaaaaaaaatcaaaataattgtaattaactgaaatgccctgttccttcattcacttgatagacttttctacctgctctatacttggcactcaattagattctggggatacagataaaataagacaaagctcccatctggtagagtccaagtttgttttcacagttatttttccacagtctgtttaaggtattaggaggacttttataaaccgagtgtttttcaggttacttcagagaggagtctccttccacccaaaaaaactaaccaaattattttatcataaagaggtaatcccatttttatgtccacaatttttacatttttgtatcagccaccaataattttgactgttttgtcaagtacatatttcatcaatcctatttccacagccgtacatgtgatcccagtgactgatagatctgtagaatgtgaactcacatttaaagtttattttgggaaggcatatatgccttttgatgacacacacaccaaaatatataagagctgtgcatggtaaacccacagtagaagggaaaaagtaatgctttctggtatacttcagaggctccatttgaagatgtgcgttgatgtttccttgattattttgaatgaggagtaggcggtaatatttaacaggtagcatacgtatctaagcatatagtaaatattactagtacttgtgtgccatgaggcactaatacataggtgaaacaaaaatatttttagttctaaaaaattctctagatatttatggatggttaggcaatagggttccttcatgagaaggaaaaaactgtatctttattgtcagtaagtgtggaaaaaaacccgacttgtatgtgtattcacagtttgataggcatattttgaagtcattgttttccatcaatattaagtatcatccatttctatgttctctagcaaaagaaaattcttagtgtgatacagctttactctttgtttgactttgtacaaggtccacaaaaggaggaggctcaaaagattggacactttaccctgacattcagcacattcattttatctttcgataaagataaccagaaatcatttgcctcttgtttattatcatgttgaaaacacaacagtatagttccttttgtcccttacattggaaaaggtattttaaatttagccttgccgtattatttatagttaggaatttactacattttggtagtctgttttgaaactaagcacttgtgtctgaaagatgcagataatatctatctatttattacacagtgggctctgtttgctgcagaaaagagtgaaacttttaactgcttagcacacttgccagtgaaatatacctgacagagcagaggttataactttggctctaattacttttagtaatggtaagacaacgtgagttttgtttgtttacatgctgtttacaatggcataattttaaaaatatatacaattgagatatttattgcctactattttaaagatgttttatgtgttttcacctttggaatatattgttacatttccttgtacagataattttggtggctttgttaatgtagctagtaatttttatgactactaagtgaccagttttcggtgccttttattgtgggatgcatgattatgtatttattgtacggaagtcactgacgtgtgtatttttgtactttgctgaaagtaatggttgatcctgatgtacatgatgatgaaagacatctttcccaaagggcactgccttgagatcatccttctcaaataaaaagaatgcatttgaaaacaaaaagggggggctaagatcccgagggccagtttaagcgccccgttctgtaaggggccataagcgttataaaaaggaggccggaaaaccgggggaaaatctggtttggaccctcgcgggctaggacaccaaatcagtaaagaagtaaacgtgtggatgtaa

SEQ ID NO: 318303 - DNA, 2718 bp, Homo sapiens
agcggagagtgccgagcagcgcggtgggtgcggctgtgagacggcaggagacttctgccccgcggtgcacgcgaccctcgagacgacagcgcggctactgccagcagcgaaggcgcctcccgcggagcgccccgacggcgcccgctcgcccatgccgagctgagcgcggcagcggcggcgggatgctggcgctgctggccgccagcgtggcgctcgccgtggccgctggggcccaggacagcccggcgcccggtagccgcttcgtgtgcacggcactgcccccagaggcggtgcacgccggctgcccgctgcccgcgatgcccatgcagggcggcgcgcagagtcccgaggaggagctgagggccgcggtgctgcagctgcgcgagaccgtcgtgcagcagaaggagacgctgggcgcgcagcgcgaggccatccgcgagctcacgggcaagctagcgcgctgcgaggggctggcgggcggcaaggcgcgcggcgcgggggccacgggcaaggacactatgggcgacctgccgcgggaccccggccacgtcgtggagcagctcagccgctcgctgcagaccctcaaggaccgcctggagagcctcgagcaccagctcagagcaaacgtgtccaatgctgggctgcccggcgacttccgcgaggtgctccagcagcggctgggggagctggagaggcagcttctgcgcaaggtggcagagctggaggacgagaagtccctgctgcacaatgagacctcggctcaccggcagaagaccgagagcaccctgaacgcgctgctgcagagggtcaccgagctggagcgaggcaatagcgcctttaagtcaccagatgcgttcaaggtgtccctcccactccgcacaaactacctatacggcaagatcaagaagacgctgcctgagctgtacgccttcaccatctgcctgtggctgcggtccagcgcctcaccaggcattggcacccccttctcctatgcggtgccagggcaggccaacgagatcgtgctgatcgagtggggcaacaaccccatcgagctgctcatcaacgacaaggttgcgcagctgcccctgtttgtcagtgacggcaagtggcaccacatctgtgtcacctggacgacacgggatggcatgtgggaggcattccaggacggagagaagctgggcactggggagaacctggccccctggcaccccatcaagcccgggggcgtgctgatccttggacaagagcaggacaccgtggggggtaggtttgatgccactcaggcatttgtcggggagctcagccagttcaacatatgggaccgcgtccttcgcgcacaagaaattgtcaacatcgccaactgctccacaaacatgccgggcaacatcatcccgtgggtggacaataacgtcgatgtgttcggaggggcctccaagtggcccgtggagacgtgtgaggagcgtctccttgacttgtagccgccttctcctctgtccaggaggccgggatcaggctgttgccatggaagttcagggccatagactgccccacttaaactcttgtcagtctgggctcagggttcccagagctcattccccaggaatctctaagaccagggctggggcagtgtctgtcactggcttgtttgttccctaccaatattctgttgctgtttgaagtagtgccagggtcccctgggaagatgcccccaagacacctgccccaagtgggtggatatctgccttcctgctgcaagtggaggcaggtccagcagcccctcttcagagcccctgtaaatgctatcgcagcctgagtcctgccgccttccagttccttggtgtcccgtgcaccccttctgtctgtcccctttcatggctgtgcagccgtcccgctggagtggccatgtcccttgtgcattgagtgcatccccgctggtgactaagctcgcagcaagcggctaccccccgatctgcaaaagggcctctccctttgtgttctatacattgtgaatcttcccgtctgaagaacgcccagcctgcccagacaaagccccgccttccccaaagcagaggggctgtctgtgtctccagaaaggggacatcgggggggaggggggctcagaaaggagaagggctgtgatctccggtcccttcccccatcatccttccttagactgatgctttgactgaatcatcactagctatggcattaaaaggcctctcttctcatctggtgccaaaggttccgttgcagctttttacaaccatccggtgtggtttggaggatttgttttttttttttcccaacagaaaagaacagccattagaagaaggctcccattttctgatgttccgccccactgtgaagagtgtgctcgttttaaattcatgttgattcttgtaagcactggactgtcttcatcaagtatttccctacagaactcctcaagaaaacagagatcatttggctagagattgtctgagtgactccaagctactcactgtattggacgggagtagtaatttattttaaagataaagtgactaagtggggaaatttataaagctaaatattatatattttatttttcatacatgtttgaagtgcaaatctgtggatattccatttgtaggaccaagtcgacatgcccatcctgacattgtatgctacgagaactcttctgatgatggaatttcgattaaagtgcactgaaagatg

SEQ ID NO: 318304 - DNA, 2744 bp, Homo sapiens
agcggagagtgccgagcagcgcggtgggtgcggctgtgagacggcaggagacttctgccccgcggtgcacgcgaccctcgagacgacagcgcggctactgccagcagcgaaggcgcctcccgcggagcgccccgacggcgcccgctcgcccatgccgagctgagcgcggcagcggcggcgggatgctggcgctgctggccgccagcgtggcgctcgccgtggccgctggggcccaggacagcccggcgcccggtagccgcttcgtgtgcacggcactgcccccagaggcggtgcacgccggctgcccgctgcccgcgatgcccatgcagggcggcgcgcagagtcccgaggaggagctgagggccgcggtgctgcagctgcgcgagaccgtcgtgcagcagaaggagacgctgggcgcgcagcgcgaggccatccgcgagctcacgggcaagctagcgcgctgcgaggggctggcgggcggcaaggcgcgcggcgcgggggccacgggcaaggacactatgggcgacctgccgcgggaccccggccacgtcgtggagcagctcagccgctcgctgcagaccctcaaggaccgcctggagagcctcgagcaccagctcagagcaaacgtgtccaatgctgggctgcccggcgacttccgcgaggtgctccagcagcggctgggggagctggagaggcagcttctgcgcaaggtggcagagctggaggacgagaagtccctgctgcacaatgagacctcggctcaccggcagaagaccgagagcaccctgaacgcgctgctgcagagggtcaccgagctggagcgaggcaatagcgcctttaagtcaccagatgcgttcaaggtgtccctcccactccgcacaaactacctatacggcaagatcaagaagacgctgcctgagctgtacgccttcaccatctgcctgtggctgcggtccagcgcctcaccaggcattggcacccccttctcctatgcggtgccagggcaggccaacgagatcgtgctgatcgagtggggcaacaaccccatcgagctgctcatcaacgacaaggttgcgcagctgcccctgtttgtcagtgacggcaagtggcaccacatctgtgtcacctggacgacacgggatggcatgtgggaggcattccaggacggagagaagctgggcactggggagaacctggccccctggcaccccatcaagcccgggggcgtgctgatccttggacaagagcaggacaccgtggggggtaggtttgatgccactcaggcatttgtcggggagctcagccagttcaacatatgggaccgcgtccttcgcgcacaagaaattgtcaacatcgccaactgctccacaaacatgccgggcaacatcatcccgtgggtggacaataacgtcgatgtgttcggaggggcctccaagtggcccgtggagacgtgtgaggagcgtctccttgacttgtagccgccttctcctctgtccaggaggccgggatcaggctgttgccatggaagttcagggccatagactgccccacttaaactcttgtcagtctgggctcagggttcccagagctcattccccaggaatctctaagaccagggctggggcagtgtctgtcactggcttgtttgttccctaccaatattctgttgctgtttgaagtagtgccagggtcccctgggaagatgcccccaagacacctgccccaagtgggtggatatctgccttcctgctgcaagtggaggcaggtccagcagcccctcttcagagcccctgtaaatgctatcgcagcctgagtcctgccgccttccagttccttggtgtcccgtgcaccccttctgtctgtcccctttcatggctgtgcagccgtcccgctggagtggccatgtcccttgtgcattgagtgcatccccgctggtgactaagctcgcagcaagcggctaccccccgatctgcaaaagggcctctccctttgtgttctatacattgtgaatcttcccgtctgaagaacgcccagcctgcccagacaaagccccgccttccccaaagcagaggggctgtctgtgtctccagaaaggggacatcgggggggaggggggctcagaaaggagaagggctgtgatctccggtcccttcccccatcatccttccttagactgatgctttgactgaatcatcactagctatggcattaaaaggcctctcttctcatctggtgccaaaggttccgttgcagctttttacaaccatccggtgtggtttggaggatttgttttttttttttcccaacagaaaagaacagccattagaagaaggctcccattttctgatgttccgccccactgtgaagagtgtgctcgttttaaattcatgttgattcttgtaagcactggactgtcttcatcaagtatttccctacagaactcctcaagaaaacagagatcatttggctagagattgtctgagtgactccaagctactcactgtattggacgggagtagtaatttattttaaagataaagtgactaagtggggaaatttataaagctaaatattatatattttatttttcatacatgtttgaagtgcaaatctgtggatattccatttgtaggaccaagtcgacatgcccatcctgacattgtatgctacgagaactcttctgatgatggaatttcgattaaagtgcactgaaagatgaaaaaaatacatacaacaacaagggg

SEQ ID NO: 318305 - DNA, 2515 bp, Homo sapiens
agcggagagtgccgagcagcgcggtgggtgcggctgtgagacggcaggagacttctgccccgcggtgcacgcgaccctcgagacgacagcgcggctactgccagcagcgaaggcgcctcccgcggagcgccccgacggcgcccgctcgcccatgccgagctgagcgcggcagcggcggcgggatgctggcgctgctggccgccagcgtggcgctcgccgtggccgctggggcccaggacagcccggcgcccggtagccgcttcgtgtgcacggcactgcccccagaggcggtgcacgccggctgcccgctgcccgcgatgcccatgcagggcggcgcgcagagtcccgaggaggagctgagggccgcggtgctgcagctgcgcgagaccgtcgtgcagcagaaggagacgctgggcgcgcagcgcgaggccatccgcgagctcacgggcaagctagcgcgctgcgaggggctggcgggcggcaaggcgcgcggcgcgggggccacgggcaaggacactatgggcgacctgccgcgggaccccggccacgtcgtggagcagctcagccgctcgctgcagaccctcaaggaccgcctggagagcctcgagcaccagctcagagcaaacgtgtccaatgctgggctgcccggcgacttccgcgaggtgctccagcagcggctgggggagctggagaggcagcttctgcgcaaggtggcagagctggaggacgagaagtccctgctgcacaatgagacctcggctcaccggcagaagaccgagagcaccctgaacgcgctgctgcagagggtcaccgagctggagcgaggcaatagcgcctttaagtcaccagatgcgttcaaggtgtccctcccactccgcacaaactacctatacggcaagatcaagaagacgctgcctgagctgtacgccttcaccatctgcctgtggctgcggtccagcgcctcaccaggcattggcaccccatcaagcccgggggcgtgctgatccttggacaagagcaggacaccgtggggggtaggtttgatgccactcaggcatttgtcggggagctcagccagttcaacatatgggaccgcgtccttcgcgcacaagaaattgtcaacatcgccaactgctccacaaacatgccgggcaacatcatcccgtgggtggacaataacgtcgatgtgttcggaggggcctccaagtggcccgtggagacgtgtgaggagcgtctccttgacttgtagccgccttctcctctgtccaggaggccgggatcaggctgttgccatggaagttcagggccatagactgccccacttaaactcttgtcagtctgggctcagggttcccagagctcattccccaggaatctctaagaccagggctggggcagtgtctgtcactggcttgtttgttccctaccaatattctgttgctgtttgaagtagtgccagggtcccctgggaagatgcccccaagacacctgccccaagtgggtggatatctgccttcctgctgcaagtggaggcaggtccagcagcccctcttcagagcccctgtaaatgctatcgcagcctgagtcctgccgccttccagttccttggtgtcccgtgcaccccttctgtctgtcccctttcatggctgtgcagccgtcccgctggagtggccatgtcccttgtgcattgagtgcatccccgctggtgactaagctcgcagcaagcggctaccccccgatctgcaaaagggcctctccctttgtgttctatacattgtgaatcttcccgtctgaagaacgcccagcctgcccagacaaagccccgccttccccaaagcagaggggctgtctgtgtctccagaaaggggacatcgggggggaggggggctcagaaaggagaagggctgtgatctccggtcccttcccccatcatccttccttagactgatgctttgactgaatcatcactagctatggcattaaaaggcctctcttctcatctggtgccaaaggttccgttgcagctttttacaaccatccggtgtggtttggaggatttgttttttttttttcccaacagaaaagaacagccattagaagaaggctcccattttctgatgttccgccccactgtgaagagtgtgctcgttttaaattcatgttgattcttgtaagcactggactgtcttcatcaagtatttccctacagaactcctcaagaaaacagagatcatttggctagagattgtctgagtgactccaagctactcactgtattggacgggagtagtaatttattttaaagataaagtgactaagtggggaaatttataaagctaaatattatatattttatttttcatacatgtttgaagtgcaaatctgtggatattccatttgtaggaccaagtcgacatgcccatcctgacattgtatgctacgagaactcttctgatgatggaatttcgattaaagtgcactgaaagatgaaaaaaatacatacaacaacaagggg

SEQ ID NO: 318306 - DNA, 379 bp, Homo sapiens
gcaatagcgcctttaagtcaccagatgcgttcaaggtgtccctcccactccgcacaaactacctatacggcaagatcaagaagacgctgcctgagctgtacgccttcaccatctgcctgtggctgcggtccagcgcctcaccaggcattggcacccccttctcctatgcggtgccagggcaggccaacgagatcgtgctgatcgagtggggcaacaaccccatcgagctgctcatcaacgacaaggtgaggcccgcctgcaccgccaccctccccagaacccatcatgtggtggagggagccacagcccccaccccagccgtcctcgccctcctcgggccacacagcagtgtcccagacatgggactgcggggctgtcc

SEQ ID NO: 318307 - DNA, 2198 bp, Homo sapiens
gaaccactatcctggtggggggcacctgctgcccaccctgcccccagcgtgcctggggggagcacacctgggcatggaggagtccagggtgctgggccacacaagagaggtgggggagaggcctggacagtaggaagatcttgcccagggtcctggatccgccactctgggggtgaccttggacaaacctctgccttggccctcagtctccccatcaaggtttttccattcaggaggttttgggccatcttcagccaccctaccagccctgaaaaggatgtgactcctgtttctgggaagtgtgtggtgtgttaggtgggcctacagccctggttgtggggagggaaggatggagagacagcacagtgacagagcccagactgcaggctggagtgagggttccacttccccgctgctgtgtgtcctggaccagtgcctctgaaccttggcacttggggcagtggatattaacatctttccaagcccaattcttggggcatcagggcctccggtcctctgggaggtggcaggtcctcagattggagatgccatgggggggggaggtgcctctcctttggagggtatggaagtggagacaggagtggcctggcgcagctgccgtggttcttaggggctgggcccggggagcccatggggcttgtgcctagaaagcctgggctcctcactggggtctagatgtgcagacttcatgtctccccagctccagctctgttctctataggtcagcctccacaatgccagaggcccagggctagccccctccacgtccctcctagatctacagctgcccctttgatgacagcgccattgagtcccctgggctgggggggtcatgcaggggtgaggcagctgcctgccgccggtactcattgcctggccaggcaggacacaggctggcgggcactgagagtgggccccacgaaatccattgtcaggttaccaggatgaagaacccaggctggtcgtggagtgcagggcggggcctgccggaagaattatgggcactgcagcaggagggcagcctgggccattagctcctgatgtcatcgatttgggtgaggggacagggaagtcagaggaagctggccagtggctctcacgcagacttacagcagcggagtggtgcctgattcctggtacagctgctcccactgagtctccagggatctgtggttcaggaccccctgcaaccccctcccagacccctgtactggtgggaggagaggacctagaggaaaggtgctgggcagataagcagccgagggaggccctgggtttagcttatcagtcttctgggccctcctgccccaggaagggcagcgaggaccatggtgttgcccctgtcatcgttatcgtcctggccatgagcttgcaggactgggagggccggagtcagccaggcagacggcagcacagcatttgcctgttggcaggtggccttggtggcttcccaaaggcaatcgctccacgcagaacaaaactcacttttttggggggtgaagcaccttggttcatttgtttagttcgttaattccagcagtctgtttctaagggaaacatggctgcagccggtcctgcccctccacccacccaccaggtgcccagtgttcccaagggccccgaatcccaaccttattcaggcgtcagcatctctgcaccccaaatgcctgttagggaggatagtgaaggctgagccctcctgggctcatcaaaagccagcagtgagagaacacccccatctctctgaggtgaccttgtagggcagtccgtgctgtctggctggcctgggtgaggtgggcagggaccaaggcctggcgcctgggcctcgctggccttgctctgcgtgctgacttcatcctgatagtaccttgattttcctactgtgacttccccttctgtcgacttcctcaccaactttaaaattccgtattgagagcagtttcctaagttacctcaaatcctattcagaagaaggttcttcctggaagttgggagggcggaaaacaagtttagtcacagaagactactccatgtttgagcttctgtttcaagggaagtgagtaactgccggaggagccctgcccctctgcagtgtgtggtgttgccctgatacttttcagattgaggtgttacttacatgtaataaaatgcacagacttaagtgtaaaaaaaaatga

SEQ ID NO: 318308 - DNA, 463 bp, Homo sapiens
cagctcataagttttactttgttttgggttttggagtttttagtttctttgatgtttgttttgctttaatttggtttgtggtttgtgtttgcttgtgtttgcttctgcctttcctaccttctgccttttactccctcagttttcagtcagaagtgtgataatcagatgccatcctccatggccacgcttatgtatgcaatataccgctccaaatgaggaccttggtaacccttgaccctttaattctaactaaccatcacccaatcgtaagtggcattatgggaccatgataccacttttctccagtgtcagtgacagagctcagctgtgtccatcacaagaaaaggtggaatgggcagctgtcttgggggtgtggcaagaggcagaacctcttggacacaaatgttatcttcctcataatggctttattcttttggatcctattaaagtacccctgtagctt

SEQ ID NO: 318309 - DNA, 842 bp, Homo sapiens
tgaactcctgaccttgtgatccgcccgcctcagcctcccaaagtgctgggattacaggcgtgagccaccgcgcccagccatttgtcacatattttgatagtaatatgagcatcattaaaaattgctttatttttatgataaattttctggccattgttgtaactggtctaattaatagttatattaatactagtagtatatttcctttttttaaagcacaacaaagcttacaccttttcttattctttggtttctctcctctcagaatgaccaaagagctcaaattcaatttaggaataggtggctaatagttgcttcttagaaaaattagaaaatctattgcataacaaaaggaaatttcacattagcaaaaggaaaaatacctgtaatctcaagtcagagatacaccaaagttctcagttatattcttccagagtttctctatgcctacaagtacaatgttattaaaattcaagctagatacgattgttgaaggatgtgagtttgagtcctgccttctctgttaaaagaagtgtacattatttttttcataaaaatagattatgcagcagtaatatacctactactgtgtcatgaacatctttgttagcaataatggtttacataaatattttaatatggcgtcatcatagttaacctaatgttgcctaaagcatgtaatacatacttctgatgttaggtggtgatattttaggtctatcctgatccagtattaaaaacattggataaatgggtacaatgtacactatttgggtaatgcctaccctaaaaactcagacttcaccactatgtaatatatcgatgtaacaaaactggatttg

SEQ ID NO: 318310 - DNA, 788 bp, Homo sapiens
tgaactcctgaccttgtgatccgcccgcctcagcctcccaaagtgctgggattacaggcgtgagccaccgcgcccagccatttgtcacatattttgatagtaatatgagcatcattaaaaattgctttatttttatgataaattttctggccattgttgtaactggtctaattaatagttatattaatactagtagtatatttcctttttttaaagcacaacaaagcttacaccttttcttattctttggtttctctcctctcagaatgaccaaagagctcaaattcaatttaggaataggtggctaatagttgcttcttagaaaaattagaaaatctattgcataacaaaaggaaatttcacattagcaaaaggaaaaatacctgtaatctcaagtcagagatacaccaaagttctcagttatattcttccagagtttctctatgcctacaagtacaatgttattaaaattcaagctagatacgattgttgaaggatgtgagtttgagtcctgccttctctgttaaaagaagtgtacattatttttttcatatagcaataatggtttacataaatattttaatatggcgtcatcatagttaacctaatgttgcctaaagcatgtaatacatacttctgatgttaggtggtgatattttaggtctatcctgatccagtattaaaaacattggataaatgggtacaatgtacactatttgggtaatgcctaccctaaaaactcagacttcaccactatgtaatatatcgatgtaacaaaactggatttg

SEQ ID NO: 318311 - DNA, 619 bp, Homo sapiens
cttgagactaatctctttcatcctagtaaatttaatgcactaacagcttttacttcaggctgtttgggattaaagattagaatgggataatgtcacagggggtctttagtatccccatctgggcttgtattatttcagggttgaggctttaaaaaccaatgtactttcctcagattacctcctatatcatcaatcgtgccttcaattcccaaacagtgatcaagacagagatatttggctttaaagaaaaagtggagtttgagcctgaagaatctctgagtatctctgagtcccttcttgctcagacaactaagacattttccctgtttctggttattaaaattcatcattggctcaatatttatttgtcaatttgaaattgaacatttagtttccattacccctcaatagtttgttttttaaccagaagccatagctatgttctcgctagtgacaaaatgctaaacaataaaaagtaaagctgcagttatcaaagcaagaataatacctttaggccaggtgtggtggctcacgcctgtaatcccagcactttgggaggccgaggtgggctcatcactaggtcaggagattgagaccatcctggctaacacggtgaaac

SEQ ID NO: 318312 - DNA, 1514 bp, Homo sapiens
tgcttcctgggcgccgtgggcgcggactgcgcgggctgcgcgggtgccgaggagcgcgaggcgcggggaaggcgcacctggggtggccctggcgtgcgggcggcgacatggaggacggcgtgctcaaggagggcttcctggtcaagaggggccacattgtccacaactggaaggcgcgatggttcatccttcggcagaacacgctggtgtactacaagcttgaggggggtcggagagtgacccctcccaagggccggatcctcctggatggctgcaccatcacctgcccctgcctggagtatgaaaaccgaccgctcctcattaagctgaagactcaaacatccacggagtacttcctggaggcctgttctcgagaggagcgggatgcctgggcctttgagatcaccggggctattcatgcagggcagccggggaaggtccagcagctgcacagcctgagaaactccttcaagctgcccccgcacatcagcctgcatcgcattgtggacaagatgcacgatagcaacaccggaatccgttcaagccccaacatggagcagggaagcacctataaaaagaccttcctcggctcctccctggtggactggctcatctccaacagcttcacggccagccgtctggaggcggtgaccctggcctccatgctcatggaggagaacttcctcaggcctgtgggtgtccgaagcatgggagccattcgctctggggatctggccgagcagttcctggatgactccacagccctgtacacttttgctgagagctacaaaaagaagataagccccaaggaagaaattagcctgagcactgtggagttaagtggcacggtggtgaaacaaggctacctggccaagcagggacacaagaggaaaaactggaaggtgcgtcgctttgttctaaggaaggatccagctttcctgcattactatgacccttccaaagaagagaacaggccagtgggtgggttttctcttcgtggttcactcgtgtctgctctggaagataatggcgttcccactggggttaaagggaatgtccagggaaacctcttcaaagtgattactaaggatgacacacactattacattcaggccagcagcaaggctgagcgagccgagtggattgaagctatcaaaaagctaacatgacaaggacctgagggaaccaggattcctccctcctaccagatgacacagacaagagttcctggagaatgggagtgttaagacttttgacttctttgtaagttttgtactgctttggagagtgaatgctgccaagagttcctcagattacaaacagcagtggtgccatttccttccccatcttcatgttacaaacctggaaaggctagaacagccattaggcgtcagcatcttgacttttccccagcatcacaaacagccatttcctcgggcaccaaagtaggttccctttgttggaacaattacactggccatgccataatgttgaataaaactctcttcttatga

SEQ ID NO: 318313 - DNA, 1732 bp, Homo sapiens
tgcttcctgggcgccgtgggcgcggactgcgcgggctgcgcgggtgccgaggagcgcgaggcgcggggaaggcgcacctggggtggccctggcgtgcgggcggcgacatggaggacggcgtgctcaaggagggcttcctggtcaagaggggccacattgtccacaactggaaggcgcgatggttcatccttcggcagaacacgctggtgtactacaagcttgaggggggtcggagagtgacccctcccaagggccggatcctcctggatggctgcaccatcacctgcccctgcctggagtatgaaaaccgaccgctcctcattaagctgaagactcaaacatccacggagtacttcctggaggcctgttctcgagaggagcgggatgcctgggcctttgagatcaccggggctattcatgcagggcagccggggaaggtccagcagctgcacagcctgagaaactccttcaagctgcccccgcacatcagcctgcatcgcattgtggacaagatgcacgatagcaacaccggaatccgttcaagccccaacatggagcagggaagcacctataaaaagaccttcctcggctcctccctggtggactggctcatctccaacagcttcacggccagccgtctggaggcggtgaccctggcctccatgctcatggaggagaacttcctcaggcctgtgggtgtccgaagcatgggagccattcgctctggggatctggccgagcagttcctggatgactccacagccctgtacacttttgctgagagctacaaaaagaagataagccccaaggaagaaattagcctgagcactgtggagttaagtggcacggtggtgaaacaaggctacctggccaagcagggacacaagaggaaaaactggaaggtgcgtcgctttgttctaaggaaggatccagctttcctgcattactatgacccttccaaagaagagaacaggccagtgggtgggttttctcttcgtggttcactcgtgtctgctctggaagataatggcgttcccactggggttaaagggaatgtccagggaaacctcttcaaagtgattactaaggatgacacacactattacattcaggccagcagcaaggctgagcgagccgagtggattgaagctatcaaaaagctaacatgacaaggacctgagggaaccaggattcctccctcctaccagatgacacagacaagagttcctggagaatgggagtgttaagacttttgacttctttgtaagttttgtactgctttggagagtgaatgctgccaagagttcctcagattacaaacagcagtggtgccatttccttccccatcttcatgttacaaacctggaaaggctagaacagccattaggcgtcagcatcttgacttttccccagcatcacaaacagccatttcctcgggcaccaaagtaggttccctttgttggaacaattacactggccatgccataatgttgaataaaactctcttcttatgaggttctctcttaacttctttggaattagtaaaagctgacaatttgtttctagctattagaatcccaaagtttatagttttcgagcaacgtttcaagtatctctgtcattaagacatagttcatcttaaagtggggatggtggccaaactttgtacattgagaatattgttttgctttagaaaacaagcctgcataaatattatacattacagaagtca

SEQ ID NO: 318314 - DNA, 1460 bp, Homo sapiens
tgcttcctgggcgccgtgggcgcggactgcgcgggctgcgcgggtgccgaggagcgcgaggcgcggggaaggcgcacctggggtggccctggcgtgcgggcggcgacatggaggacggcgtgctcaaggagggcttcctggtcaagaggggccacattgtccacaactggaaggcgcgatggttcatccttcggcagaacacgctggtgtactacaagcttgaggggggtcggagagtgacccctcccaagggccggatcctcctggatggctgcaccatcacctgcccctgcctggagtatgaaaaccgaccgctcctcattaagctgaagactcaaacatccacggagtacttcctggaggcctgttctcgagaggagcgggatgcctgggcctttgagatcaccggggctattcatgcagggcagccggggaaggtccagcagctgcacagcctgagaaactccttcaagctgcccccgcacatcagcctgcatcgcattgtggacaagatgcacgatagcaacaccggaatccgttcaagccccaacatggagcagggaagcacctataaaaagaccttcctcggctcctccctggtggactggctcatctccaacagcttcacggccagccgtctggaggcggtgaccctggcctccatgctcatggaggagaacttcctcaggcctgtgggtgtccgaagcatgggagccattcgctctggggatctggccgagcagttcctggatgactccacagccctgtacacttttgctgagagctacaaaaagaagataagccccaaggaagaaattagcctgagcactgtggagttaagtggcacggtggtgaaacaaggctacctggccaagcagggacacaagaggaaaaactggaaggtgcgtcgctttgttctaaggaaggatccagctttcctgcattactatgacccttccaaagaagagaacaggccagtgggtgggttttctcttcgtggttcactcgtgtctgctctggaagataatggcgttcccactggggttaaagggaatgtccagggaaacctcttcaaagtgattactaaggatgacacacactattacattcaggccagcagcaaggctgagcgagccgagtggattgaagctatcatgacacagacaagagttcctggagaatgggagtgttaagacttttgacttctttgtaagttttgtactgctttggagagtgaatgctgccaagagttcctcagattacaaacagcagtggtgccatttccttccccatcttcatgttacaaacctggaaaggctagaacagccattaggcgtcagcatcttgacttttccccagcatcacaaacagccatttcctcgggcaccaaagtaggttccctttgttggaacaattacactggccatgccataatgttgaataaaactctcttcttatga

SEQ ID NO: 318315 - DNA, 866 bp, Homo sapiens
tgtctgtggaaactggggttccaataagttaaacaatttgagatcaaactccaaattctatgcttgcttttaacataaacatactggattctttgatgtaaatgaaatggtagatctatggcatgctaccatcttgagcatagggagcaggcaagagggcttccaggaatatccagacataaccattggaaggccttagggcactggtgagggacagggaatgggaggaaaaggggacctcatctgataggattctctaactgtaaaccttttatttaataaatacatcattgtatgtttttgtccatgtctcagttgactttctgctggttcaagatgaaagcagacatggctattcaatcactgatttttttcccccttttttctgcctaggggttaaagggaatgtccagggaaacctcttcaaagtgattactaaggatgacacacactattacattcaggccagcagcaaggctgagcgagccgagtggattgaagctatcaaaaagctaacatgacaaggacctgagggaaccaggattcctccctcctaccagatgacacagacaagagttcctggagaatgggagtgttaagacttttgacttctttgtaagttttgtactgctttggagagtgaatgctgccaagagttcctcagattacaaacagcagtggtgccatttccttccccatcttcatgttacaaacctggaaaggctagaacagccattaggcgtcagcatcttgacttttccccagcatcacaaacagccatttcctcgggcaccaaagtaggttccctttgttggaacaattacactggccatgccataatgttgaataaaactctcttcttatga

SEQ ID NO: 318316 - DNA, 812 bp, Homo sapiens
tgtctgtggaaactggggttccaataagttaaacaatttgagatcaaactccaaattctatgcttgcttttaacataaacatactggattctttgatgtaaatgaaatggtagatctatggcatgctaccatcttgagcatagggagcaggcaagagggcttccaggaatatccagacataaccattggaaggccttagggcactggtgagggacagggaatgggaggaaaaggggacctcatctgataggattctctaactgtaaaccttttatttaataaatacatcattgtatgtttttgtccatgtctcagttgactttctgctggttcaagatgaaagcagacatggctattcaatcactgatttttttcccccttttttctgcctaggggttaaagggaatgtccagggaaacctcttcaaagtgattactaaggatgacacacactattacattcaggccagcagcaaggctgagcgagccgagtggattgaagctatcatgacacagacaagagttcctggagaatgggagtgttaagacttttgacttctttgtaagttttgtactgctttggagagtgaatgctgccaagagttcctcagattacaaacagcagtggtgccatttccttccccatcttcatgttacaaacctggaaaggctagaacagccattaggcgtcagcatcttgacttttccccagcatcacaaacagccatttcctcgggcaccaaagtaggttccctttgttggaacaattacactggccatgccataatgttgaataaaactctcttcttatga

SEQ ID NO: 318317 - DNA, 542 bp, Homo sapiens
cagtttgaatctcaaatgcaaagacaagccatgtaggtactgtaaataagtgcaggggtgaaggataataggaattggtggagaatatggcaagctggagaacacacactcacacacctcgtataaactgagtggctaccgcagtgggttatcactgtgcagtaattctggcccagggttgccagaactctcggactttcaagggaagctagaaatggggatattttaaatgtgagatctcccaagttttaaatgctggcaactaagcaacaaatttttaaaaagaccatttgtgttaaaaaataaaataaaaggcacatcataaggccatatacggcctgtgggttaggtttgcaatctcagagtaataaaagaaataacctgaaagtttaaagcagcatagactgtggccagcaagcctaggcgtttggggctcactcacctcggccagtgccgccatccttttattgaatccgatggcatgagaagaaagaacttagactctaaaaaagcgataactacacccaaggaaaagatacaga

SEQ ID NO: 318318 - DNA, 612 bp, Homo sapiens
tttttttgagacggagtctcgctctgttgcccaggctggagtgcagtggcgcgatctcggctcactgcaagctccgcctcccgggttcaagtgattctcctgcctcagcctcccaagtagctaggactacaggcgcccgccaccaagcccggctaattttttgtatttttagtagagacggggtttcaccgtgttagccaggatggtctcgatctcctgacctcgtgatccacctgcctcggcctcccaaattgttgggattacaggcgtgagccactgcacccagcctaccagcctagacctagttttagttcctttttttgcttcactccattgtagcttaggaagctagtttcaattccggattctaccgtctatctgtatgactgggcctttggtcagtctttctaaaatgaagattgctcattttacaaatgagtaaaaactacctgacatgtagtgcaggctttgtaaagcactcatcatgctgcttgtcatactgtaagcactgatatggcataggaaacccaacccccaaacatagcaccttggaagttgagaaaacagcatatactggaaggccactgtcacatctccctcacccgtctctga

SEQ ID NO: 318319 - DNA, 608 bp, Homo sapiens
gaaatacctctgtacactcaccagacactggctgctggttgtcacggtgctaagagctgtgggaaacatgaagagcaatgagaccaggtccctgctctgaggagacgtgtgccagcgaagtttctctcccacgtgagtgtgctacaagaaaatctgaacccgagaatctgattcagtaggtctgcactttctccactttgccagataattctgattgagaccgtcaaggctgtgactagtggggaggcagtagagtattttctgtgctagactgaggcagccctgaagcactgcgcaagcacatggaaaagagaaacgagattgggccgggcacggtggctcatgcctggaatctttgggaggccacggatcacttgaggacaggggtttgagaccagcttggccaacatggtgaaaccttgtccctactaaaaatacaaaaattagcagggagtggtggtgcacacctgtaatcccagctactctggaggctgaggcaaaagaatcgcttgaacccgggaggtggaggttgcagtgagctgagattggaccactgccctccagcctgggtgatagagtgagactccatctctaaataaataaataca

SEQ ID NO: 318320 - DNA, 1350 bp, Homo sapiens
ctggcccgtcctcccacacagaactgagctgctccaagaacgagaaggagctcgaggagctgcttctggaagccagtcaggaatccgggcaggagacactgtgacactttagttcccttttgccggtcggtctgcgatgagctgaggccagagccatgagaatctgctcaccttccccccagccttcctgaggcccaggatgccaggggtgggggccattctggggcccccctccccccacagcaacactacaaggggtgcaggagctacagggagtggccctccgcgcgtgactcaagcacttctatttatgagcccagcactggaagactctgggggtgaatgggaggagggggagcaggaggaggaggaggtctccaaggacatcaggcgcctgttctggaggggccaggcttgccctgcggagggcaggcgtcctgggtggtggtgggatggtcccctgtggccccgggcacagggccgggcaggcagcctggtgccggagaggcggtgcgtgctggtggtggttgagatgcgcagaacagccccagacagcgcaggccgggcagggtggggggatgggagcagaggatcagagctttctttttctcaagtgcaataaatctatcagggagctggggcgggagcagccggcactccgggaccctgctgtccaggccactggaggctgcgccctgagaggcactacagccctttgggggcgagtggcatgggtgtgggtgagggtgggcagagggctggggctactcctgtcggtgcaactctgttcacaccttttctaataaactggggctgggttcaaaaaaaaaaaaaaaaaaaaaaaaaaaaaaaaaaaaaaaaaaaaaaaaaaaaaaaaaaaaaaaaaaaaaaaaaggagggggcgcgcgccgccccaaaaattcccccgccgggggcggcgccccgaacgcgccccccccgttttttggcaaaagggggccccccaagggggggtttattaaaacggaaggcgcggggagcgcgcgatagtataataaaacagcgtcgtcgggggcggggaagaaaacgcggctgtgcggggaggaatacctgtgtgggggagggaggggacccccataatagtctggggggggggggaggagaaaatatggtggggcaacaactctccatccctagaaggagatatttgaaacgcgtcctggggaggaagaattaataaaattttcgaggggggattatatggtgtggtgtacacaagacaggagggataatagggcggtggggggaggatgaaagatatttggtgccatacgggaatgatagttttcgaggacaaatttttttacgggg

SEQ ID NO: 318321 - DNA, 1128 bp, Homo sapiens
ctggcccgtcctcccacacagaactgagctgctccaagaacgagaaggagctcgaggagctgcttctggaagccagtcaggaatccgggcaggagacactgtgacactttagttcccttttgccggtcggtctgcgatgagctgaggccagagccatgagaatctgctcaccttccccccagccttcctgaggcccaggatgccaggggtgggggccattctggggcccccctccccccacagcaacactacaaggggtgcaggagctacagggagtggccctccgcgcgtgactcaagcacttctatttatgagcccagcactggaagactctgggggtgaatgggaggagggggatgggagcagaggatcagagctttctttttctcaagtgcaataaatctatcagggagctggggcgggagcagccggcactccgggaccctgctgtccaggccactggaggctgcgccctgagaggcactacagccctttgggggcgagtggcatgggtgtgggtgagggtgggcagagggctggggctactcctgtcggtgcaactctgttcacaccttttctaataaactggggctgggttcaaaaaaaaaaaaaaaaaaaaaaaaaaaaaaaaaaaaaaaaaaaaaaaaaaaaaaaaaaaaaaaaaaaaaaaaaggagggggcgcgcgccgccccaaaaattcccccgccgggggcggcgccccgaacgcgccccccccgttttttggcaaaagggggccccccaagggggggtttattaaaacggaaggcgcggggagcgcgcgatagtataataaaacagcgtcgtcgggggcggggaagaaaacgcggctgtgcggggaggaatacctgtgtgggggagggaggggacccccataatagtctggggggggggggaggagaaaatatggtggggcaacaactctccatccctagaaggagatatttgaaacgcgtcctggggaggaagaattaataaaattttcgaggggggattatatggtgtggtgtacacaagacaggagggataatagggcggtggggggaggatgaaagatatttggtgccatacgggaatgatagttttcgaggacaaatttttttacgggg

SEQ ID NO: 318322 - DNA, 889 bp, Homo sapiens
ctggcccgtcctcccacacagaactgagctgctccaagaacgagaaggagctcgaggagctgcttctggaagccagtcaggaatccgggcaggagacactgtgacactttagttcccttttgccggtcggtctgcgatgagctgaggccagagccatgagaatctgctcaccttccccccagccttcctgaggcccaggatgccaggggtgggggccattctggggcccccctccccccacagcaacactacaaggggtgcaggagctacagggagtggccctccgcgcgtgactcaagcacttctatttatgagcccagcactggaagactctgggggtgaatgggaggagggggagcaggaggaggaggaggtctccaaggacatcaggcgcctgttctggaggggccaggcttgccctgcggagggcaggcgtcctgggtggtggtgggatggtcccctgtggccccgggcacagggccgggcaggcagcctggtgccggagaggcggtgcgtgctggtggtggttgagatgcgcagaacagccccagacagcgcaggccgggcagggtggggggatgggagcagaggatcagagctttctttttctcaagtgcaataaatctatcagggagctggggcgggagcagccggcactccgggaccctgctgtccaggccactggaggctgcgccctgagaggcactacagccctttgggggcgagtggcatgggtgtgggtgagggtgggttttatttttctttttctgtgttaacttttgatctagatttttttctttagactttttattgtattacttttattatatgatcatattatgtctctaattgttgcatttttcgttatgttgttgatcatatgctttta

SEQ ID NO: 318323 - DNA, 506 bp, Homo sapiens
acccccaccttctaattctgttattgcaactgcagaccgttacctggcatgctggctgctacctcgctcactcttgtcagagtcggagctacagtcagtgccttcagctctgagctcaggcataccggtccctgtttttgcagttaaggactctaaagtgttgtgacgtgttcatcaagtttttctcaaccataagttaacaattccagtaattgtcatctctcagtcctgattaaacctaattgatttcactagtttttgacccatcatgtgtttgggtttcttctccccagtccctggctctacctcttctgccacaaacgtcagcatggtggtatctgccgaccctttgtccagcgagagggcagagatgaacatcctagaaatcaaccaggaattgcgctcccagctggcagagagcaatcagcagttccgagacctcaaagagaaattccttatatctcaagctactgcctactccctggccaaccagctgaagaaataca

SEQ ID NO: 318324 - DNA, 368 bp, Homo sapiens
tgtccacaccttgcagttgtcacattaagctgtgaaggacgactgactctagcactcagtggtcctcagtggcaggtgatgttgacctcagacaagagttgctcaggagataggctttgcagttcacctcgacaagcgtttgtggagagctaggtctgctacctcctgtatcgttgcctgtgggtgatggtaaggctcttgggggtgtggaagatgcggggatgatgatgatgacgatgatgacgatgacgacgatgacagcgtcgtcgtcgtcctggtcctggaaggataaagtcttgtggagaagaggaggcaattctgacagtttggggttgcatcatcttcttcacagaagagatgaagttgtg

SEQ ID NO: 318325 - DNA, 443 bp, Homo sapiens
ggccagggagagggaagaagagacagaagcagagttaaaatgtcacatagaggtggggcacggtggcttattcctataatcccaacagtttgggaggctaaagcaggaggatcgcttgagtccaggagttagagaccagcctgggcagtgtagtgagaccccatttctagaaaaaaattaaaaattagccgggcgtggtggcacacacctgtagtcccagctacacaggaggcggaggcgggaggatcacctgagcctcagaagtcgaggctgcagtgagctgtgattgctgcactccagcctgggcatcagagtgagacattgtttcaaaaaacgaaaacaaagtcacatagacacagaacacaaaaggggagagccccgcaaagatgggcacagaaacagagagagactgaaacacaggcagaagccagacagggaccttc

SEQ ID NO: 318326 - DNA, 785 bp, Homo sapiens
tggaggggggaggtttttgttgaggagagcgcggccggagagcagagctccgggacccagatcccgaggcatctggaggagaaggacctgaagcccatcttcgaacagtttggtcggatctttgagctgactgtcatcaaggacaagtacaccgggctgcacaagggtgaggggtcgggcaggctgaagaggcttcggggtgggctgggaggctgggggaagttaagccaggctggaggggtggagcggctgggaagggctgatgtggaaggagaagagttcaggcctgaggaaagtggatggaggagctgaaaaagaactcagctagagtgatcaggaaaccccggtgaaggactaaggagggcctcttttggctgaagagttgtcaagacggctgcaaagatgtggatcccagacatatgggatgtgccttcctgacatactgtgcccgggattcagccctgaaggcccagagcgccctgcacgaacagaagacgcttccagggatgaacaggccgatccaggtcaagccagccgacagcgagagccgaggagaagaccggaagctctttgtggggatgctagggaagcagcagacagatgaggacgtccggaagatgtttgagcccttcgggaccatcgacgagtgcactgtgctccgggggccagatggcaccagcaaaggctgcgccttcgtgaagttccagacccacgctgaggcccaggcggccatcaacacccttcacagcagccggaccctgccagtgagccccactcccctgccc

SEQ ID NO: 318327 - DNA, 2524 bp, Homo sapiens
tggaggggggaggtttttgttgaggagagcgcggccggagagcagagctccgggacccagatcccgaggcatctggaggagaaggacctgaagcccatcttcgaacagtttggtcggatctttgagctgactgtcatcaaggacaagtacaccgggctgcacaagggatgtgccttcctgacatactgtgcccgggattcagccctgaaggcccagagcgccctgcacgaacagaagacgcttccagggatgaacaggccgatccaggtcaagccagccgacagcgagagccgaggagaagaccggaagctctttgtggggatgctagggaagcagcagacagatgaggacgtccggaagatgtttgagcccttcgggaccatcgacgagtgcactgtgctccgggggccagatggcaccagcaaaggctgcgccttcgtgaagttccagacccacgctgaggcccaggcggccatcaacacccttcacagcagccggaccctgccaggtgcctcgtccagcctggtggtgaagtttgctgacactgagaaggagcgaggtctccgccgcatgcagcaggtggccacccagttgggcatgttcagccccatcgccctccagtttggagcctacagcgcctacacccaggccctgatgcagcagcaggcggccctggtagcggctcacagtgcctacctcagccccatggccaccatggctgccgtgcagatgcagcacatggctgccatcaatgccaatggcctcatcgccacccccatcaccccatcctcaggaaccagcacccctcctgccatcgctgccacgcctgtctctgccattccggctgccctgggcgtcaacggctacagcccggtgcccacccagcccactgggcagcctgcccctgatgctctgtatcccaacggggttcacccctacccagcccagagccccgcggcccccgtggaccccctgcagcaggcctacgcggggatgcagcactacacagcagcctacccagcagcctacagcctggttgcacctgcgttcccgcagcctccagccctggtcgcccagcagcccccaccaccacctcaacagcagcagcagcagcagcagcagcaacagcagcagcagcaaagagaaggccctgatggctgcaacatcttcatctaccacctgccccaggagttcactgactcagagatcctccagatgtttgtcccctttggccacgtcatctcagccaaagtctttgttgaccgagccaccaatcaaagcaaatgttttggctttgtgagtttcgacaatccggccagtgcccaggctgccatccaggccatgaatggcttccagatcggcatgaagcgcctcaaagtccagctaaagcggcctaaggatgccaaccggccctactgagggcccccaggtctggagatcccagaggaaggggcgcctcacaccctcttcccacgactggccccggccctctccgcacacctgccctgggccttgactgggttctggggcaaacgctgcttcgtggcccccgggggcacaagacaccggcccctcccacccccctgcctctctgaagggccatggctatgcttccctggctccaagggcccatttcctcctagatgcccttttggcctttgtgagggagcgaggaacaggctcgaaggctccggggtatctgccttctgctgggctcctgtgacaggccttctgtgcccagcgtttgtacttgcctcccccaacagtgggcctgttctacccgtgcaggccccaggagagccgcaggggcctgccacacactcccagctcaccctcaccccagcctcttccccacattaggggtttcttggaagctggctctcactcccctccaccctcagctagaggtaggatatccctgattcctgggctcccagccctaaaactcactgcctcccccaagggccccctctaaggagggtgtgggggagccctgagggctgcctctctgccagtcagccacagagaccctcctcctttcacgaggaaaagaccttcccctgaacccctaaaaatgtttacagtctctgctggttccctctgtgtaaataccactaccacccgtgcgttatccagcccgcccggcctggcccggacgctgccatctctctttctgggagtttagacaatgttgcccttggatttttttctctctcttaatttctccctttgctttggggggtaattgggtattgggaggaggggtgtggggaggggtcaaggggtttattacctgatcattttctttaggaagaggttttagggaaaagaaaatggggtgggggtgggggtggtaaggggagaccggggagtcagtttcagacagttctctatgcttaacttatttatttattgcattttacttttaaagagttggtcttttctgtctaaataaagaaaaaagtttaaaagcatcaaataagagtcttggaaggttgagggtaggggattgttccctacccac

SEQ ID NO: 318328 - DNA, 2296 bp, Homo sapiens
cagggagggcagaaagagggacacctcgagagaacgccgacaggtcaccagccgacagagagccgaggagaagaccggaagctctttgtggggatgctagggaagcagcagacagatgaggacgtccggaagatgtttgagcccttcgggaccatcgacgagtgcactgtgctccgggggccagatggcaccagcaaaggctgcgccttcgtgaagttccagacccacgctgaggcccaggcggccatcaacacccttcacagcagccggaccctgccaggtgcctcgtccagcctggtggtgaagtttgctgacactgagaaggagcgaggtctccgccgcatgcagcaggtggccacccagttgggcatgttcagccccatcgccctccagtttggagcctacagcgcctacacccaggccctgatgcagcagcaggcggccctggtagcggctcacagtgcctacctcagccccatggccaccatggctgccgtgcagatgcagcacatggctgccatcaatgccaatggcctcatcgccacccccatcaccccatcctcaggaaccagcacccctcctgccatcgctgccacgcctgtctctgccattccggctgccctgggcgtcaacggctacagcccggtgcccacccagcccactgggcagcctgcccctgatgctctgtatcccaacggggttcacccctacccagcccagagccccgcggcccccgtggaccccctgcagcaggcctacgcggggatgcagcactacacagcagcctacccagcagcctacagcctggttgcacctgcgttcccgcagcctccagccctggtcgcccagcagcccccaccaccacctcaacagcagcagcagcagcagcagcagcaacagcagcagcagcaaagagaaggccctgatggctgcaacatcttcatctaccacctgccccaggagttcactgactcagagatcctccagatgtttgtcccctttggccacgtcatctcagccaaagtctttgttgaccgagccaccaatcaaagcaaatgttttggctttgtgagtttcgacaatccggccagtgcccaggctgccatccaggccatgaatggcttccagatcggcatgaagcgcctcaaagtccagctaaagcggcctaaggatgccaaccggccctactgagggcccccaggtctggagatcccagaggaaggggcgcctcacaccctcttcccacgactggccccggccctctccgcacacctgccctgggccttgactgggttctggggcaaacgctgcttcgtggcccccgggggcacaagacaccggcccctcccacccccctgcctctctgaagggccatggctatgcttccctggctccaagggcccatttcctcctagatgcccttttggcctttgtgagggagcgaggaacaggctcgaaggctccggggtatctgccttctgctgggctcctgtgacaggccttctgtgcccagcgtttgtacttgcctcccccaacagtgggcctgttctacccgtgcaggccccaggagagccgcaggggcctgccacacactcccagctcaccctcaccccagcctcttccccacattaggggtttcttggaagctggctctcactcccctccaccctcagctagaggtaggatatccctgattcctgggctcccagccctaaaactcactgcctcccccaagggccccctctaaggagggtgtgggggagccctgagggctgcctctctgccagtcagccacagagaccctcctcctttcacgaggaaaagaccttcccctgaacccctaaaaatgtttacagtctctgctggttccctctgtgtaaataccactaccacccgtgcgttatccagcccgcccggcctggcccggacgctgccatctctctttctgggagtttagacaatgttgcccttggatttttttctctctcttaatttctccctttgctttggggggtaattgggtattgggaggaggggtgtggggaggggtcaaggggtttattacctgatcattttctttaggaagaggttttagggaaaagaaaatggggtgggggtgggggtggtaaggggagaccggggagtcagtttcagacagttctctatgcttaacttatttatttattgcattttacttttaaagagttggtcttttctgtctaaataaagaaaaaagtttaaaagcatcaaataagagtcttggaaggttgagggtaggggattgttccctacccac

SEQ ID NO: 318329 - DNA, 2452 bp, Homo sapiens
tggaggggggaggtttttgttgaggagagcgcggccggagagcagagctccgggacccaggtgaccgggaaagcaggcagccccagcggcgggagcagccggcagcagcccaggcccggggactggggtgggggtgggaggggggctgaggggaggacctgaaggggggcggcagggcaaaagggacccctggagccctgccgccatcagagatcaagcatctggcatcagggatcttcggacccagcagaaggatccgccacaggggaggtgtcctcccagggaagccaacgagagattcacctgccccacatcaggagtgggccccccttactgacgctgctggcaaccatagcaggccccttaacccctcagtctcctccccatcaccctcctcaggccctttccccgcctccagctctcatctcaactcccagttcccagccctctaagccctagcactcccggctaccacctaaccctccaggtcttggccatactcacccccatcctgggacatttgccagatctctgggagggagatcgtttgtttaggcgatgccccctggtggcatgacagcgtctgcctagacccctgacccctagcactcaactccctgggcctcctttgtgtgaagagccgcccctctgcttagcagcgtggttgggggccaaagggaaagccagccccagctgggcccccgggccccaccacttatctccttgctgggcagctccccttggcctttgggcctctccctgctcccctcggcccctcctcctgggccgcctcaatgaaggagccggatgccatcaagctgtttgtggggcagatcccgaggcatctggaggagaaggacctgaagcccatcttcgaacagtttggtcggatctttgagctgactgtcatcaaggacaagtacaccgggctgcacaagggatgtgccttcctgacatactgtgcccgggattcagccctgaaggcccagagcgccctgcacgaacagaagacgcttccagggatgaacaggccgatccaggtcaagccagccgacagcgagagccgaggagaagaccggaagctctttgtggggatgctagggaagcagcagacagatgaggacgtccggaagatgtttgagcccttcgggaccatcgacgagtgcactgtgctccgggggccagatggcaccagcaaaggctgcgccttcgtgaagttccagacccacgctgaggcccaggcggccatcaacacccttcacagcagccggaccctgccaggtgcctcgtccagcctggtggtgaagtttgctgacactgagaaggagcgaggtctccgccgcatgcagcaggtggccacccagttgggcatgttcagccccatcgccctccagtttggagcctacagcgcctacacccaggccctgatgcagcagcaggcggccctggtagcggctcacagtgcctacctcagccccatggccaccatggctgccgtgcagatgcagcacatggctgccatcaatgccaatggcctcatcgccacccccatcaccccatcctcagctctctgaagggccatggctatgcttccctggctccaagggcccatttcctcctagatgcccttttggcctttgtgagggagcgaggaacaggctcgaaggctccggggtatctgccttctgctgggctcctgtgacaggccttctgtgcccagcgtttgtacttgcctcccccaacagtgggcctgttctacccgtgcaggccccaggagagccgcaggggcctgccacacactcccagctcaccctcaccccagcctcttccccacattaggggtttcttggaagctggctctcactcccctccaccctcagctagaggtaggatatccctgattcctgggctcccagccctaaaactcactgcctcccccaagggccccctctaaggagggtgtgggggagccctgagggctgcctctctgccagtcagccacagagaccctcctcctttcacgaggaaaagaccttcccctgaacccctaaaaatgtttacagtctctgctggttccctctgtgtaaataccactaccacccgtgcgttatccagcccgcccggcctggcccggacgctgccatctctctttctgggagtttagacaatgttgcccttggatttttttctctctcttaatttctccctttgctttggggggtaattgggtattgggaggaggggtgtggggaggggtcaaggggtttattacctgatcattttctttaggaagaggttttagggaaaagaaaatggggtgggggtgggggtggtaaggggagaccggggagtcagtttcagacagttctctatgcttaacttatttatttattgcattttacttttaaagagttggtcttttctgtctaaataaagaaaaaagtttaaaagc

SEQ ID NO: 318330 - DNA, 1359 bp, Homo sapiens
tctcatgggctatctatttccttcctaataccgtttggtttcctgtatggtttgccccctccctcctgtctcctctatccctgctctcatggctgggggtgggggcagatgggtccgtttggactgaggcctgatgatctgccttcctcaggcagccccatcctagatgctgtcactcaccccagccccctcccctcccccagagcccgtgatccgcatcgggggtctcttccccatgcttcacccatgtttcttccttcacaggtctggagatcccagaggaaggggcgcctcacaccctcttcccacgactggccccggccctctccgcacacctgccctgggccttgactgggttctggggcaaacgctgcttcgtggcccccgggggcacaagacaccggcccctcccacccccctgcctctctgaagggccatggctatgcttccctggctccaagggcccatttcctcctagatgcccttttggcctttgtgagggagcgaggaacaggctcgaaggctccggggtatctgccttctgctgggctcctgtgacaggccttctgtgcccagcgtttgtacttgcctcccccaacagtgggcctgttctacccgtgcaggccccaggagagccgcaggggcctgccacacactcccagctcaccctcaccccagcctcttccccacattaggggtttcttggaagctggctctcactcccctccaccctcagctagaggtaggatatccctgattcctgggctcccagccctaaaactcactgcctcccccaagggccccctctaaggagggtgtgggggagccctgagggctgcctctctgccagtcagccacagagaccctcctcctttcacgaggaaaagaccttcccctgaacccctaaaaatgtttacagtctctgctggttccctctgtgtaaataccactaccacccgtgcgttatccagcccgcccggcctggcccggacgctgccatctctctttctgggagtttagacaatgttgcccttggatttttttctctctcttaatttctccctttgctttggggggtaattgggtattgggaggaggggtgtggggaggggtcaaggggtttattacctgatcattttctttaggaagaggttttagggaaaagaaaatggggtgggggtgggggtggtaaggggagaccggggagtcagtttcagacagttctctatgcttaacttatttatttattgcattttacttttaaagagttggtcttttctgtctaaataaagaaaaaagtttaaaagcatcaaataagagtcttggaaggttgagggtaggggattgttccctacccac

SEQ ID NO: 318331 - DNA, 1501 bp, Homo sapiens
tggaggggggaggtttttgttgaggagagcgcggccggagagcagagctccgggacccaggtgaccgggaaagcaggcagccccagcggcgggagcagccggcagcagcccaggcccggggactggggtgggggtgggaggggggctgaggggaggacctgaaggggggcggcagggcaaaagggacccctggagccctgccgccatcagagatcaagcatctggcatcagggatcttcggacccagcagaaggatccgccacaggggaggtgtcctcccagggaagccaacgagagattcacctgccccacatcaggagtgggccccccttactgacgctgctggcaaccatagcaggccccttaacccctcagtctcctccccatcaccctcctcaggccctttccccgcctccagctctcatctcaactcccagttcccagccctctaagccctagcactcccggctaccacctaaccctccaggtcttggccatactcacccccatcctgggacatttgccagatctctgggagggagatcgtttgtttaggcgatgccccctggtggcatgacagcgtctgcctagacccctgacccctagcactcaactccctgggcctcctttgtgtgaagagccgcccctctgcttagcagcgtggttgggggccaaagggaaagccagccccagctgggcccccgggccccaccacttatctccttgctgggcagctccccttggcctttgggcctctccctgctcccctcggcccctcctcctgggccgcctcaatgaaggagccggatgccatcaagctgtttgtggggcagatcccgaggcatctggaggagaaggacctgaagcccatcttcgaacagtttggtcggatctttgagctgactgtcatcaaggacaagtacaccgggctgcacaagggtgaggggtcgggcaggctgaagaggcttcggggtgggctgggaggctgggggaagttaagccaggctggaggggtggagcggctgggaagggctgatgtggaaggagaagagttcaggcctgaggaaagtggatggaggagctgaaaaagaactcagctagagtgatcaggaaaccccggtgaaggactaaggagggcctcttttggctgaagagttgtcaagacggctgcaaagatgtggatcccagacatatgggatgtgccttcctgacatactgtgcccgggattcagccctgaaggcccagagcgccctgcacgaacagaagacgcttccagggatgaacaggccgatccaggtcaagccagccgacagcgagagccgaggaggtaggttctgtgcctttggactctgtccctctcctcccacccccaggcccagggcctggagttgtcgaggggtagcctttcttgagggagaaagcctgatgattctgaagagttcccagctgcggtgagataggagtcagtgtggccagagcgggtgagatctggggcgggta

SEQ ID NO: 318332 - DNA, 486 bp, Homo sapiens
gtgtgttgatgtcatgggatgaactcaagaaagaatggagggacaagagagctggtttgggagataagcagctgggtaggggtgtgtgtgtgtgtgcgtgtgcagcaagactgagaatctgagcagcctcagataatattgggatgggggtcaggacacagggtcaggtgttcaatgtggaaagcgtggagctggactgggcagggcagctccaggactaaagagagggactaggaagcagggcatgaaggctggagattggtaaagatctggaaagtgtgggaggcttagaaagttaagagagtgggggagaagggagggtgctcctcaggcctatccaagggctgtgcggctaagtgggggcggtcagggtcagcacttggagagctccacacaccggggatcccaggggccacaccagctccccctccacctggcacagggaagaggcacttccggctaactaactgttcttcccttcccttc

SEQ ID NO: 318333 - DNA, 877 bp, Homo sapiens
ggggtacaggtgcttcctcctgccctgccatcctgggcggggatgatccttcctgttgggctcggccaggaagctgaggtgtagagcggtgaagcgacctgtccagggttgcaagacagtcagacccaagtcttcctaacgctgggctctttcccctcttcccactgctttgtgcatttctgccttctcacttcacaccccatgcccagagaagctctgctccccacctgcctggcctcggcccagaggcccagagaggcactgagggcccccactgtgtgccaggtccacgctcatagtctgtgctgctctccccagcccagagccccgcggcccccgtggaccccctgcagcaggcctacgcggggatgcagcactacacaggtgaggcgccctagccagggcccctgctcaggtgggagaggtggcaggaggaaaagaggcccagtaactgggtctgggcttcttggctccctgccaatcaccctcttcaggctttactgacaagcccaactgtggggaggggtctttaagggcagcacacccaggggtctgaggcagctccttccctgaccacctctcagccctgcaggtgccactggcctgggctaggggaagggagacagggttggctgggagggctcaagaagtcagggaagccccatcagcctctctcttctccccaccccagcagcctacccagcagcctacagcctggttgcacctgcgttcccgcagcctccagccctggtcgcccagcagcccccaccaccacctcaacagcagcagcagcagcagcagcagcaacagcagcagcagcaaagagaaggtgctggctggggccttgggagacaggaatgccctcgttatgggcttg

SEQ ID NO: 318334 - DNA, 831 bp, Homo sapiens
tctcatgggctatctatttccttcctaataccgtttggtttcctgtatggtttgccccctccctcctgtctcctctatccctgctctcatggctgggggtgggggcagatgggtccgtttggactgaggcctgatgatctgccttcctcaggcagccccatcctagatgctgtcactcaccccagccccctcccctcccccagagcccgtgatccgcatcgggggtctcttccccatgcttcacccatgtttcttccttcacaggtctggagatcccagaggaaggggcgcctcacaccctcttcccacgactggccccggccctctccgcacacctgccctgggccttgactgggttctggggcaaacgctgcttcgtggcccccgggggcacaagacaccggcccctcccacccccctgcctctctgaagggccatggctatgcttccctggctccaagggcccatttcctcctagatgcccttttggcctttgtgagggagcgaggaacaggctcgaaggctccggggtatctgccttctgctgggctcctgtgacaggccttctgtgcccagcgtttgtacttgcctcccccaacagtgggcctgttctacccgtgcaggccccaggagagccgcaggggcctgccacacactcccagctcaccctcaccccagcctagtttcagacagttctctatgcttaacttatttatttattgcattttacttttaaagagttggtcttttctgtctaaataaagaaaaaagtttaaaagcatcaaataagagtcttggaaggttgagggtaggggattgttccctacccac

SEQ ID NO: 318335 - DNA, 3297 bp, Homo sapiens
tggaggggggaggtttttgttgaggagagcgcggccggagagcagagctccgggacccaggtgaccgggaaagcaggcagccccagcggcgggagcagccggcagcagcccaggcccggggactggggtgggggtgggaggggggctgaggggaggacctgaaggggggcggcagggcaaaagggacccctggagccctgccgccatcagagatcaagcatctggcatcagggatcttcggacccagcagaaggatccgccacaggggaggtgtcctcccagggaagccaacgagagattcacctgccccacatcaggagtgggccccccttactgacgctgctggcaaccatagcaggccccttaacccctcagtctcctccccatcaccctcctcaggccctttccccgcctccagctctcatctcaactcccagttcccagccctctaagccctagcactcccggctaccacctaaccctccaggtcttggccatactcacccccatcctgggacatttgccagatctctgggagggagatcgtttgtttaggcgatgccccctggtggcatgacagcgtctgcctagacccctgacccctagcactcaactccctgggcctcctttgtgtgaagagccgcccctctgcttagcagcgtggttgggggccaaagggaaagccagccccagctgggcccccgggccccaccacttatctccttgctgggcagctccccttggcctttgggcctctccctgctcccctcggcccctcctcctgggccgcctcaatgaaggagccggatgccatcaagctgtttgtggggcagatcccgaggcatctggaggagaaggacctgaagcccatcttcgaacagtttggtcggatctttgagctgactgtcatcaaggacaagtacaccgggctgcacaagggatgtgccttcctgacatactgtgcccgggattcagccctgaaggcccagagcgccctgcacgaacagaagacgcttccagggatgaacaggccgatccaggtcaagccagccgacagcgagagccgaggagaagaccggaagctctttgtggggatgctagggaagcagcagacagatgaggacgtccggaagatgtttgagcccttcgggaccatcgacgagtgcactgtgctccgggggccagatggcaccagcaaaggctgcgccttcgtgaagttccagacccacgctgaggcccaggcggccatcaacacccttcacagcagccggaccctgccaggtgcctcgtccagcctggtggtgaagtttgctgacactgagaaggagcgaggtctccgccgcatgcagcaggtggccacccagttgggcatgttcagccccatcgccctccagtttggagcctacagcgcctacacccaggccctgatgcagcagcaggcggccctggtagcggctcacagtgcctacctcagccccatggccaccatggctgccgtgcagatgcagcacatggctgccatcaatgccaatggcctcatcgccacccccatcaccccatcctcaggaaccagcacccctcctgccatcgctgccacgcctgtctctgccattccggctgccctgggcgtcaacggctacagcccggtgcccacccagcccactgggcagcctgcccctgatgctctgtatcccaacggggttcacccctacccagcccagagccccgcggcccccgtggaccccctgcagcaggcctacgcggggatgcagcactacacagcagcctacccagcagcctacagcctggttgcacctgcgttcccgcagcctccagccctggtcgcccagcagcccccaccaccacctcaacagcagcagcagcagcagcagcagcaacagcagcagcagcaaagagaaggccctgatggctgcaacatcttcatctaccacctgccccaggagttcactgactcagagatcctccagatgtttgtcccctttggccacgtcatctcagccaaagtctttgttgaccgagccaccaatcaaagcaaatgttttggctttgtgagtttcgacaatccggccagtgcccaggctgccatccaggccatgaatggcttccagatcggcatgaagcgcctcaaagtccagctaaagcggcctaaggatgccaaccggccctactgagggcccccaggtctggagatcccagaggaaggggcgcctcacaccctcttcccacgactggccccggccctctccgcacacctgccctgggccttgactgggttctggggcaaacgctgcttcgtggcccccgggggcacaagacaccggcccctcccacccccctgcctctctgaagggccatggctatgcttccctggctccaagggcccatttcctcctagatgcccttttggcctttgtgagggagcgaggaacaggctcgaaggctccggggtatctgccttctgctgggctcctgtgacaggccttctgtgcccagcgtttgtacttgcctcccccaacagtgggcctgttctacccgtgcaggccccaggagagccgcaggggcctgccacacactcccagctcaccctcaccccagcctcttccccacattaggggtttcttggaagctggctctcactcccctccaccctcagctagaggtaggatatccctgattcctgggctcccagccctaaaactcactgcctcccccaagggccccctctaaggagggtgtgggggagccctgagggctgcctctctgccagtcagccacagagaccctcctcctttcacgaggaaaagaccttcccctgaacccctaaaaatgtttacagtctctgctggttccctctgtgtaaataccactaccacccgtgcgttatccagcccgcccggcctggcccggacgctgccatctctctttctgggagtttagacaatgttgcccttggatttttttctctctcttaatttctccctttgctttggggggtaattgggtattgggaggaggggtgtggggaggggtcaaggggtttattacctgatcattttctttaggaagaggttttagggaaaagaaaatggggtgggggtgggggtggtaaggggagaccggggagtcagtttcagacagttctctatgcttaacttatttatttattgcattttacttttaaagagttggtcttttctgtctaaataaagaaaaaagtttaaaagcatcaaataagagtcttggaaggttgagggtaggggattgttccctacccac

SEQ ID NO: 318336 - DNA, 2415 bp, Homo sapiens
cgagtccctcagagctgggatgagcaccctctgcaactataccccattccccaaccatcagcccctacagccattggaccctaagggtagcagaagtagtgttaggagctccagggaagggcggaagaagggctgggaaggcagccaggaggccctgaacatgccctcctcctgtgccctaccacccagaagaccggaagctctttgtggggatgctagggaagcagcagacagatgaggacgtccggaagatgtttgagcccttcgggaccatcgacgagtgcactgtgctccgggggccagatggcaccagcaaaggctgcgccttcgtgaagttccagacccacgctgaggcccaggcggccatcaacacccttcacagcagccggaccctgccaggtgcctcgtccagcctggtggtgaagtttgctgacactgagaaggagcgaggtctccgccgcatgcagcaggtggccacccagttgggcatgttcagccccatcgccctccagtttggagcctacagcgcctacacccaggccctgatgcagcagcaggcggccctggtagcggctcacagtgcctacctcagccccatggccaccatggctgccgtgcagatgcagcacatggctgccatcaatgccaatggcctcatcgccacccccatcaccccatcctcaggaaccagcacccctcctgccatcgctgccacgcctgtctctgccattccggctgccctgggcgtcaacggctacagcccggtgcccacccagcccactgggcagcctgcccctgatgctctgtatcccaacggggttcacccctacccagcccagagccccgcggcccccgtggaccccctgcagcaggcctacgcggggatgcagcactacacagcagcctacccagcagcctacagcctggttgcacctgcgttcccgcagcctccagccctggtcgcccagcagcccccaccaccacctcaacagcagcagcagcagcagcagcagcaacagcagcagcagcaaagagaaggccctgatggctgcaacatcttcatctaccacctgccccaggagttcactgactcagagatcctccagatgtttgtcccctttggccacgtcatctcagccaaagtctttgttgaccgagccaccaatcaaagcaaatgttttggctttgtgagtttcgacaatccggccagtgcccaggctgccatccaggccatgaatggcttccagatcggcatgaagcgcctcaaagtccagctaaagcggcctaaggatgccaaccggccctactgagggcccccaggtctggagatcccagaggaaggggcgcctcacaccctcttcccacgactggccccggccctctccgcacacctgccctgggccttgactgggttctggggcaaacgctgcttcgtggcccccgggggcacaagacaccggcccctcccacccccctgcctctctgaagggccatggctatgcttccctggctccaagggcccatttcctcctagatgcccttttggcctttgtgagggagcgaggaacaggctcgaaggctccggggtatctgccttctgctgggctcctgtgacaggccttctgtgcccagcgtttgtacttgcctcccccaacagtgggcctgttctacccgtgcaggccccaggagagccgcaggggcctgccacacactcccagctcaccctcaccccagcctcttccccacattaggggtttcttggaagctggctctcactcccctccaccctcagctagaggtaggatatccctgattcctgggctcccagccctaaaactcactgcctcccccaagggccccctctaaggagggtgtgggggagccctgagggctgcctctctgccagtcagccacagagaccctcctcctttcacgaggaaaagaccttcccctgaacccctaaaaatgtttacagtctctgctggttccctctgtgtaaataccactaccacccgtgcgttatccagcccgcccggcctggcccggacgctgccatctctctttctgggagtttagacaatgttgcccttggatttttttctctctcttaatttctccctttgctttggggggtaattgggtattgggaggaggggtgtggggaggggtcaaggggtttattacctgatcattttctttaggaagaggttttagggaaaagaaaatggggtgggggtgggggtggtaaggggagaccggggagtcagtttcagacagttctctatgcttaacttatttatttattgcattttacttttaaagagttggtcttttctgtctaaataaagaaaaaagtttaaaagcatcaaataagagtcttggaaggttgagggtaggggattgttccctacccac

SEQ ID NO: 318337 - DNA, 2937 bp, Homo sapiens
tggaggggggaggtttttgttgaggagagcgcggccggagagcagagctccgggacccaggtgaccgggaaagcaggcagccccagcggcgggagcagccggcagcagcccaggcccggggactggggtgggggtgggaggggggctgaggggaggacctgaaggggggcggcagggcaaaagggacccctggagccctgccgccatcagagatcaagcatctggcatcagggatcttcggacccagcagaaggatccgccacaggggaggtgtcctcccagggaagccaacgagagattcacctgccccacatcaggagtgggccccccttactgacgctgctggcaaccatagcaggccccttaacccctcagtctcctccccatcaccctcctcaggccctttccccgcctccagctctcatctcaactcccagttcccagccctctaagccctagcactcccggctaccacctaaccctccaggtcttggccatactcacccccatcctgggacatttgccagatctctgggagggagatcgtttgtttaggcgatgccccctggtggcatgacagcgtctgcctagacccctgacccctagcactcaactccctgggcctcctttgtgtgaagagccgcccctctgcttagcagcgtggttgggggccaaagggaaagccagccccagctgggcccccgggccccaccacttatctccttgctgggcagctccccttggcctttgggcctctccctgctcccctcggcccctcctcctgggccgcctcaatgaaggagccggatgccatcaagctgtttgtggggcagatcccgaggcatctggaggagaaggacctgaagcccatcttcgaacagtttggtcggatctttgagctgactgtcatcaaggacaagtacaccgggctgcacaagggatgtgccttcctgacatactgtgcccgggattcagccctgaaggcccagagcgccctgcacgaacagaagacgcttccagggatgaacaggccgatccaggtcaagccagccgacagcgagagccgaggagaagaccggaagctctttgtggggatgctagggaagcagcagacagatgaggacgtccggaagatgtttgagcccttcgggaccatcgacgagtgcactgtgctccgggggccagatggcaccagcaaaggctgcgccttcgtgaagttccagacccacgctgaggcccaggcggccatcaacacccttcacagcagccggaccctgccaggtgcctcgtccagcctggtggtgaagtttgctgacactgagaaggagcgaggtctccgccgcatgcagcaggtggccacccagttgggcatgttcagccccatcgccctccagtttggagcctacagcgcctacacccaggccctgatgcagcagcaggcggccctggtagcggctcacagtgcctacctcagccccatggccaccatggctgccgtgcagatgcagcacatggctgccatcaatgccaatggcctcatcgccacccccatcaccccatcctcaggaaccagcacccctcctgccatcgctgccacgcctgtctctgccattccggctgccctgggcgtcaacggctacagcccggtgcccacccagcccactgggcagcctgcccctgatgctctgtatcccaacggggttcacccctacccagcccagagccccgcggcccccgtggaccccctgcagcaggcctacgcggggatgcagcactacacagcagcctacccagcagcctacagcctggttgcacctgcgttcccgcagcctccagccctggtcgcccagcagcccccaccaccacctcaacagcagcagcagcagcagcagcagcaacagcagcagcagcaaagagaaggccctgatggctgcaacatcttcatctaccacctgccccaggagttcactgactcagagatcctccagatgtttgtcccctttggccacgtcatctcagccaaagtctttgttgaccgagccaccaatcaaagcaaatgttttggctttgtgagtttcgacaatccggccagtgcccaggctgccatccaggccatgaatggcttccagatcggcatgaagcgcctcaaagtccagctaaagcggcctaaggatgccaaccggccctactgagggcccccaggtctggagatcccagaggaaggggcgcctcacaccctcttcccacgactggccccggccctctccgcacacctgccctgggccttgactgggttctggggcaaacgctgcttcgtggcccccgggggcacaagacaccggcccctcccacccccctgcctctctgaagggccatggctatgcttccctggctccaagggcccatttcctcctagatgcccttttggcctttgtgagggagcgaggaacaggctcgaaggctccggggtatctgccttctgctgggctcctgtgacaggccttctgtgcccagcgtttgtacttgcctcccccaacagtgggcctgttctacccgtgcaggccccaggagagccgcaggggcctgccacacactcccagctcaccctcaccccagcctcttccccacattaggggtttcttggaagctggctctcactcccctccaccctcagctagaggtaggatatccctgattcctgggctcccagccctaaaactcactgcctcccccaagggccccctctaaggagggtgtgggggagccctgagggctgcctctctgccaagtttcagacagttctctatgcttaacttatttatttattgcattttacttttaaagagttggtcttttctgtctaaataaagaaaaaagtttaaaagcatcaaataagagtcttggaaggttgagggtaggggattgttccctacccac

SEQ ID NO: 318338 - DNA, 2769 bp, Homo sapiens
tggaggggggaggtttttgttgaggagagcgcggccggagagcagagctccgggacccaggtgaccgggaaagcaggcagccccagcggcgggagcagccggcagcagcccaggcccggggactggggtgggggtgggaggggggctgaggggaggacctgaaggggggcggcagggcaaaagggacccctggagccctgccgccatcagagatcaagcatctggcatcagggatcttcggacccagcagaaggatccgccacaggggaggtgtcctcccagggaagccaacgagagattcacctgccccacatcaggagtgggccccccttactgacgctgctggcaaccatagcaggccccttaacccctcagtctcctccccatcaccctcctcaggccctttccccgcctccagctctcatctcaactcccagttcccagccctctaagccctagcactcccggctaccacctaaccctccaggtcttggccatactcacccccatcctgggacatttgccagatctctgggagggagatcgtttgtttaggcgatgccccctggtggcatgacagcgtctgcctagacccctgacccctagcactcaactccctgggcctcctttgtgtgaagagccgcccctctgcttagcagcgtggttgggggccaaagggaaagccagccccagctgggcccccgggccccaccacttatctccttgctgggcagctccccttggcctttgggcctctccctgctcccctcggcccctcctcctgggccgcctcaatgaaggagccggatgccatcaagctgtttgtggggcagatcccgaggcatctggaggagaaggacctgaagcccatcttcgaacagtttggtcggatctttgagctgactgtcatcaaggacaagtacaccgggctgcacaagggatgtgccttcctgacatactgtgcccgggattcagccctgaaggcccagagcgccctgcacgaacagaagacgcttccagggatgaacaggccgatccaggtcaagccagccgacagcgagagccgaggagaagaccggaagctctttgtggggatgctagggaagcagcagacagatgaggacgtccggaagatgtttgagcccttcgggaccatcgacgagtgcactgtgctccgggggccagatggcaccagcaaaggctgcgccttcgtgaagttccagacccacgctgaggcccaggcggccatcaacacccttcacagcagccggaccctgccaggtgcctcgtccagcctggtggtgaagtttgctgacactgagaaggagcgaggtctccgccgcatgcagcaggtggccacccagttgggcatgttcagccccatcgccctccagtttggagcctacagcgcctacacccaggccctgatgcagcagcaggcggccctggtagcggctcacagtgcctacctcagccccatggccaccatggctgccgtgcagatgcagcacatggctgccatcaatgccaatggcctcatcgccacccccatcaccccatcctcaggaaccagcacccctcctgccatcgctgccacgcctgtctctgccattccggctgccctgggcgtcaacggctacagcccggtgcccacccagcccactgggcagcctgcccctgatgctctgtatcccaacggggttcacccctacccagcccagagccccgcggcccccgtggaccccctgcagcaggcctacgcggggatgcagcactacacagcagcctacccagcagcctacagcctggttgcacctgcgttcccgcagcctccagccctggtcgcccagcagcccccaccaccacctcaacagcagcagcagcagcagcagcagcaacagcagcagcagcaaagagaaggccctgatggctgcaacatcttcatctaccacctgccccaggagttcactgactcagagatcctccagatgtttgtcccctttggccacgtcatctcagccaaagtctttgttgaccgagccaccaatcaaagcaaatgttttggctttgtgagtttcgacaatccggccagtgcccaggctgccatccaggccatgaatggcttccagatcggcatgaagcgcctcaaagtccagctaaagcggcctaaggatgccaaccggccctactgagggcccccaggtctggagatcccagaggaaggggcgcctcacaccctcttcccacgactggccccggccctctccgcacacctgccctgggccttgactgggttctggggcaaacgctgcttcgtggcccccgggggcacaagacaccggcccctcccacccccctgcctctctgaagggccatggctatgcttccctggctccaagggcccatttcctcctagatgcccttttggcctttgtgagggagcgaggaacaggctcgaaggctccggggtatctgccttctgctgggctcctgtgacaggccttctgtgcccagcgtttgtacttgcctcccccaacagtgggcctgttctacccgtgcaggccccaggagagccgcaggggcctgccacacactcccagctcaccctcaccccagcctagtttcagacagttctctatgcttaacttatttatttattgcattttacttttaaagagttggtcttttctgtctaaataaagaaaaaagtttaaaagcatcaaataagagtcttggaaggttgagggtaggggattgttccctacccac

SEQ ID NO: 318339 - DNA, 538 bp, Homo sapiens
tgtgcccagggctgccagcctccaaagcccttcgaggtgccccctgcagctgcccgtgcccccaggaggagccgtttcaaaggcaggcccagatgcttggtgccaccagaggggcttggagcctggacccagagccctagccgaagaaaatgagtccaggcagagaaggtggccgcggctggctgcaaggaagcaatggggaggccagcaaggggacattggcttattccctggcgcatggggcactgatggggactgagcagggcagcaggcactgagtcatgtgtggggcctggcttcaggccaccagccctagcagggaggtctgacaggctcttaaagaactcgaggtggaaaatggtaggtgccacaggagagggacagtttccaaggctgggaaagtcagaagaagacacaagacttctctgggaaactggaattcatggagttgttatttaagaaacccttttccaactcgtgctgaatacagagaggggaagaaaacacaaagctagggaagcagcaagagagagatcag

SEQ ID NO: 318340 - DNA, 550 bp, Homo sapiens
gtggcaacctcaaaaagaagcctcctctccccataaattcctcagtgccccatcaatctccatcaatccatacaagaccagcctcactctgaccacccgggtcttccacatactattgttttctgcaacttgaacaaaataatggattgtagttgatattctccaggggatttgactaccctcacataaaatctctagttaaaaagagctgatttaagtcatacatacaaaaacagcatgatagcatgcaatgtttatcaaacctgagtggaaaaggattgcctggaaggctttttgaaaattgtatccattctcatctctactgatggtgcctgagtaggtctgggcagaattcttggagtgtcaggggattcctgaaggaggtcaacaggaatctcactggcgaaagaagaactgactttggatttagacagaccttggttcagaccttacctttgccatatgcaaacattagaattttgaaagaattgctcattttaatttgacttttcatttcattttgaaaataaaaacttcccttttcatttta

SEQ ID NO: 318341 - DNA, 2716 bp, Homo sapiens
  misc_feature (1315)..(1315): n is a, c, g, or t
atcgaggtatacctacataaagtgtactgatattctgtgtatagcccagtggatttgtacatatgtatgcacttgtgtagccaccacccagatgaagatactgagcaggtccagtaccccagagctaccttcatttctatcactttcccaagctgtcatccccgccggctgtcatgggaaccctgtctgtaagatgcgacagtttgggtaaaggagtttggtcattttaaagagtgtgaaaggcagagaacagagaaatcaaaaccttgcagggccaaggtgggtggagagggtgtttttcttttaacatacatgggcggttttaaggagaaattgaagcagcctgttcagacaattgttttggtatctggccccaggtctgtggttcctaacatgacttgtgatattattttaagtgggcagatggctttttgatagcttctttatctttcgatctcagctcttgcaaaggggaggttggtgctcattgcaagatcagcgataagggtttctttgtaggtcggtggctttcttggtgagtacatttcaacatattattgttttagaacctgtgtgctgccagtgacttgcagcactgttgaagactagccaccctttgtgacctagccctcttgggaaatggcggaggatctcagggtatatcccttacctgtgggagccctatcagagggcttcctgttgaggaaatgttggctgtaggccctctgtgcactgagcacagccacatcaggtgagggcatgggagaagtccgtggtagccatcaggatagagttcagaaacccaaatggctgctttccctgggttgctggaccaggcatttggtaactctaaagcttagagatgattcatcgacaagcatttattgactgcctactgtgtgctgggcacagtgctaggttccagcagggaaagagatgcagagtggtcctaagatgtcacagggcttgtgggatggagtacagaggatttgttgtatgagacctggctgagcccctgctcttcgccaggcacttcactgagtactatattttcatgcaaggtctggtttaattccgacaacattccctgtgaagtagagggttttaaatttctctttcctggatgagcaaactgaggctcccagagtccaaagtcctagggctggtgtggggaaaagccctcctgatcttccttggcacttgacactaccctttggaagtgtcctattcttcttaaaagtaaagaccaagagagcctcaccatggtcttcaagcaccctcccatcccattccccaatctggcctccactggctnatagtcttaacaccagtggtctttctgagctcctgtcaccatggtctttctgttactccaaagggcctcgctcctttctgctgcagggcctttgcccctgctgtttccttcaccaggaacatttatcccgtaccccttgcagtctcctccagtgttgatccctcagttctaagaggacttccccaggggagcctgtccaccccagtgtcctcgggcccctggctttttcatagcactcatcagcccagcacgtgctaagctttgttagagaatgtcccatggcagagcagatgaacatcgccaccagtcgaggggtcatcggccaccctgcctagcagttctactatatttttttgatccactcgtttctcctctgaagtgactctttcaaatgttctttaccttcagactttctctcctgcttcaaaaaacaaaacagaagccataagaatggaactccctataacttgcggcccccaagtctgcacgctgatttccctcccctgtgttacagatgacgaggagtcccttcttgctcaggccacttctccctcctgtgctctgggtcccagtttctgctacttgctctagaatctgacatcatcagtcaccttttctctcctggcaggttttctgctgccctccttgcttgatcctctattcacctttgcctgtgccagcatcccttctgtctccgctgaccccacgttctctccctcctgcttctggccagcacctcatcaccctccccttcactgctgacccctgcagagttgcctgtacttgccttctgcacttgctcacccccgtaagtgttagcccccggcatctgccagattctgcaggtggttttttagttttcctcttgaagtggttgaccactcctacttaaaacactttgtcttcccttgccttgagaccacactctgctggttttcctcttaactctctggcccttctctttctcctggctcttcccttagcttcatgtatccaaactcggcatctccacttgactgatggcccaaataattcctcaaactcaccttgtcggggactgcattcatcacctctcccacagtgttcccaagcagcctctcactcccctacctccccacttgctcgttttgcttttcagcatccttaagtaagccctgcctgaccctgtagattgggccagggacccttattctagggcattctttccttttctaaaggcactgatcgcagtttgtagttatatctttattagggggttgctggatgactctctgccccgctagactgtaagctccgtgaggggtagggacatggtctgctttcattcaccactgtattcctgcaggcctgccacagtgcctggcacttagcaggtgctcaataaatgtttgttgaaataat

SEQ ID NO: 318342 - DNA, 280 bp, Homo sapiens
gcacacaccccctacctccctgcctacattccacccagcctgactgctctggaaggaagaatccctgcaaggtgagtgttattatatccatttgtggaccaggactgcggctcagaagcttttcccaggacactgaactctgacaggtgaatagctgccaagtggtggaggttggcctgcagtgagcatcagtctgacttcgaaggacagaatgacacatggtacaagctttctgtcttactgccacacgtcagtgtcctgggagatgaaccagatgcag

SEQ ID NO: 318343 - DNA, 859 bp, Homo sapiens
agaagaggagaaagaaaatggcgctgccaaaacttgtcaactgcgcctgcccagagctcacctgaggtgctcagacgtgaacattcctgtccccgtggccttgggggccgtgacctgtgcactgccacgcagcctcggagccgtgtgcacgcatatgcacgtgtgtatgtgttgtgtgtgtttgcagacgtgtgtccttgtgtgtgtgtgtgtgttgtagcggtgcctggggagtctgacctcagaaggtgctgtggggagggctgcaaggtcctggcgggaggaggcactccccacgcttccccttgggctgggctgttcctggcaggcgagtgctaggcacagtgtgaggttctgtgtggattctgctgtgctccttggcagctctgggggccttcccttgcatttcgaaggaaggggaggcgtgtggctggaggtgagaggccctgaggccctgcctggctcccagcttcccaaatccgcctctctctgggtcgccgccctcagagattgctgaggacacgagctttccacccacgggctgtcctaacggagccgggctaggggcttctggacagaggccgcctgcccctttgggctttggggtttgtttttctcagcagctcacccgggtctctggggtcagggtatcgggcagaaggcagaggacgctgcgcttgggacctgagctctgggcagccctcggggctcaggactcctggctcttctgcccagtttcatgtgttttgtgttttgaaaccacgtgtggtcccacagttgtgccctcagaagccgccgtggctgccgtgaggtagcagtggacgggacgccacggtctttcccatgccatgctgtttcc

SEQ ID NO: 318344 - DNA, 2770 bp, Homo sapiens
ggcggggagggcgccgcggcgggcggctgcgaggagcggccggcgggcggcggcggccggcgggcggcgatggcggcggcggaggccggtggcgacgacgcccgctgcgtgcggctgagcgccgagcgggcacaggcgctgctggccgacgtggacacgctgctgttcgactgcgacggcgtgctgtggcgcggggagaccgccgtgcctggcgcgcccgaggccctgcgggcgctgcgagcccgcggcaagcgcctgggcttcatcaccaacaacagcagcaagacccgcgctgcctacgccgagaagctgcggcgcctgggcttcggcggccccgcggggcccggcgccagcctggaggtcttcggcacggcctactgcaccgcgctctacctgcgccagcgcctggccggcgcccccgcgcccaaggcctacgtgctgggcagcccagccctggccgcggagctggaggccgtgggcgtcgccagcgtgggcgtggggcccgagccactgcagggcgagggtcccggcgactggctgcacgcgccgctggagcccgacgtgcgcgcggtggtggtgggctttgacccgcacttcagctacatgaagctcaccaaggccctgcgctacctgcagcagcccggctgcctgctcgtgggcaccaacatggacaaccggcttccgcttgagaacggccgcttcatcgcgggtaccgggtgtctggtccgagccgtggagatggccgcccagcgccaggccgacatcatcgggaagcccagccgcttcattttcgactgcgtgtcccaggaatacggcatcaaccccgagcgcaccgtcatggtgggagaccgcctggacacagacatcctcctaggcgccacctgtggcctgaagaccatcctgaccctcaccggagtctccactctaggggatgtgaagaataatcaggaaagtgactgcgtgtctaagaagaaaatggtccctgacttctatgttgacagcatagccgaccttttgcctgcccttcaaggttaaagattgagtgtctttaatctgcagaataaaaaaaaagaaattgaaaaccagttacccaaattaataggtggggcttaagcatctgctcggctaagtggcttcaaagagtgtaattggagttaagcaaaggcattcattgttaaccttgtaagtacacgtttgggggacgattttgtttacagatgcttgtaatcgaagatgcacttttaggcctggaaggcgttgtgggctgggttctgggccttgggtggggttggcaggggcaggctctgcacctgtccgggattcaggtaaccagggcctgccgatgggactgaggcgggtctaggggtgtgtgtcctgtattttattgaaaaactcattcagggatccagcccctcagggggcagagggactgattattctgactgttgggagaggcttgcatggaccagagccccatcagtatgactgaaagtccagcggagccttctgtgtccctgtgcctcccagcagggtgggagtggaggaggcggctgctcccaggtggcatctccctgcccttgggtgcaaagtgctgccctcaccactctcccacctcccctacttccttgaaaaccactctgatgtcacaactgagtgtctgttccgtttcagatacccagggctgctgcccagttctgtaaacgcagcccagctaaagctctgctgtctcaagtgtgcatttatacccaggtgatttggacggagcagctaccatggcgtggacgccttcactgaactccgggctgcagtgcagggagctcagagcagtgctgctaccaaacagtttttaactttgaacaactgtgtcaggcaatggatttgaattttaagtgtattaatagctgtgctctgtgtcgtaggcaaaattccactgaaggagcctctgtgccctgcagccggcagcgcggctgaagcatgtgttggccaaggaatgcctgtcatccaggtgccctgcagccagcagcgcggctcaagcatgtgttggccaaggaatgcctgtcagtcatccagggctctgggaggggacgagagttatgtccccaagaacaggaagtcctttacaaagcatccagtctcttcctgtcctccccttccctaggctggggtaggggttagagactggtggcccaggaggtcacctgccttgccctggattccctcttcagtggccagcaggacttggcagggccaccagctcgccaaggttctgggcggggctccagcctctcctgcctgctccttggctctgctgacctttcacaggcctgacagcagactcagcagggccatcccgggatgctgcaccttctggctggctccctaccagcgcctttccctgtacctggcagcttctctcttggccccacagtcacagcactccacttggtcacaaagacttcagagcaataagaggcgtcctgagccttcagcacctcccaggcctgggatatcgggttcagagggtgctgcagagcagcatgagggtggctccacccatgaggctggtgacactgacgctggcttggctaagttggctcaagccgggtctggcctgacagggtgcagtcacaccaggagcgcatggcagatgcagcctcagtgatgcctctcttgccgggtaggggctgggagtccccgtgcatcctgtctctggcccatgaggggctgcagcactgtgggcgccagagcacagattaaactctcaaaccca

SEQ ID NO: 318345 - DNA, 2685 bp, Homo sapiens
ggcggggagggcgccgcggcgggcggctgcgaggagcggccggcgggcggcggcggccggcgggcggcgatggcggcggcggaggccggtggcgacgacgcccgctgcgtgcggctgagcgccgagcgggcacaggcgctgctggccgacgtggacacgctgctgttcgactgcgacggcgtgctgtggcgcggggagaccgccgtgcctggcgcgcccgaggccctgcgggcgctgcgagcccgcggcaagcgcctgggcttcatcaccaacaacagcagcaagacccgcgctgcctacgccgagaagctgcggcgcctgggcttcggcggccccgcggggcccggcgccagcctggaggtcttcggcacggcctactgcaccgcgctctacctgcgccagccgtgggcgtggggcccgagccactgcagggcgagggtcccggcgactggctgcacgcgccgctggagcccgacgtgcgcgcggtggtggtgggctttgacccgcacttcagctacatgaagctcaccaaggccctgcgctacctgcagcagcccggctgcctgctcgtgggcaccaacatggacaaccggcttccgcttgagaacggccgcttcatcgcgggtaccgggtgtctggtccgagccgtggagatggccgcccagcgccaggccgacatcatcgggaagcccagccgcttcattttcgactgcgtgtcccaggaatacggcatcaaccccgagcgcaccgtcatggtgggagaccgcctggacacagacatcctcctaggcgccacctgtggcctgaagaccatcctgaccctcaccggagtctccactctaggggatgtgaagaataatcaggaaagtgactgcgtgtctaagaagaaaatggtccctgacttctatgttgacagcatagccgaccttttgcctgcccttcaaggttaaagattgagtgtctttaatctgcagaataaaaaaaaagaaattgaaaaccagttacccaaattaataggtggggcttaagcatctgctcggctaagtggcttcaaagagtgtaattggagttaagcaaaggcattcattgttaaccttgtaagtacacgtttgggggacgattttgtttacagatgcttgtaatcgaagatgcacttttaggcctggaaggcgttgtgggctgggttctgggccttgggtggggttggcaggggcaggctctgcacctgtccgggattcaggtaaccagggcctgccgatgggactgaggcgggtctaggggtgtgtgtcctgtattttattgaaaaactcattcagggatccagcccctcagggggcagagggactgattattctgactgttgggagaggcttgcatggaccagagccccatcagtatgactgaaagtccagcggagccttctgtgtccctgtgcctcccagcagggtgggagtggaggaggcggctgctcccaggtggcatctccctgcccttgggtgcaaagtgctgccctcaccactctcccacctcccctacttccttgaaaaccactctgatgtcacaactgagtgtctgttccgtttcagatacccagggctgctgcccagttctgtaaacgcagcccagctaaagctctgctgtctcaagtgtgcatttatacccaggtgatttggacggagcagctaccatggcgtggacgccttcactgaactccgggctgcagtgcagggagctcagagcagtgctgctaccaaacagtttttaactttgaacaactgtgtcaggcaatggatttgaattttaagtgtattaatagctgtgctctgtgtcgtaggcaaaattccactgaaggagcctctgtgccctgcagccggcagcgcggctgaagcatgtgttggccaaggaatgcctgtcatccaggtgccctgcagccagcagcgcggctcaagcatgtgttggccaaggaatgcctgtcagtcatccagggctctgggaggggacgagagttatgtccccaagaacaggaagtcctttacaaagcatccagtctcttcctgtcctccccttccctaggctggggtaggggttagagactggtggcccaggaggtcacctgccttgccctggattccctcttcagtggccagcaggacttggcagggccaccagctcgccaaggttctgggcggggctccagcctctcctgcctgctccttggctctgctgacctttcacaggcctgacagcagactcagcagggccatcccgggatgctgcaccttctggctggctccctaccagcgcctttccctgtacctggcagcttctctcttggccccacagtcacagcactccacttggtcacaaagacttcagagcaataagaggcgtcctgagccttcagcacctcccaggcctgggatatcgggttcagagggtgctgcagagcagcatgagggtggctccacccatgaggctggtgacactgacgctggcttggctaagttggctcaagccgggtctggcctgacagggtgcagtcacaccaggagcgcatggcagatgcagcctcagtgatgcctctcttgccgggtaggggctgggagtccccgtgcatcctgtctctggcccatgaggggctgcagcactgtgggcgccagagcacagattaaactctcaaaccca

SEQ ID NO: 318346 - DNA, 2669 bp, Homo sapiens
ggcggggagggcgccgcggcgggcggctgcgaggagcggccggcgggcggcggcggccggcgggcggcgatggcggcggcggaggccggtggcgacgacgcccgctgcgtgcggctgagcgccgagcgggcacaggcgctgctggccgacgtggacacgctgctgttcgactgcgacggcgtgctgtggcgcggggagaccgccgtgcctggcgcgcccgaggccctgcgggcgctgcgagcccgcggcaagcgcctgggcttcatcaccaacaacagcagcaagacccgcgctgcctacgccgagaagctgcggcgcctgggcttcggcggccccgcggggcccggcgccagcctggaggtcttcggcacggcctactgcaccgcgctctacctgcgccagcgcctggccggcgcccccgcgcccaaggcctacgtgctgggcagcccagccctggccgcggagctggaggccgtgggcgtcgccagcgtgggcgtggggcccgagccactgcagggcgagggtcccggcgactggctgcacgcgccgctggagcccgacgtgcgcgcggtggtggtgggctttgacccgcacttcagctacatgaagctcaccaaggccctgcgctacctgcagcagcccggctgcctgctcgtgggcaccaacatggacaaccggcttccgcttgagaacggccgcttcatcgcgggtaccgggtgtctggtccgagccgtggagatggccgcccagcgccaggccgacatcatcgggaagcccagccgcttcattttcgactgcgtgtcccaggaatacggcatcaaccccgagcgcaccgtcatggtgggagaccgcctggacacagacatcctcctaggcgccacctgtggcctgaagaccatcctgaccctcaccggagtctccactctaggggatgtgaagaataatcaggaaagtgactgcgtgtctaagaagaaaatggtccctgacttctatgttgacagcatagccgaccttttgcctgcccttcaaggttaaagattgagtgtctttaatctgcagaataaaaaaaaagaaattgaaaaccagttacccaaattaataggtggggcttaagcatctgctcggctaagtggcttcaaagagtgtaattggagttaagcaaaggcattcattgttaaccttgtaagtacacgtttgggggacgattttgtttacagatgcttgtaatcgaagatgcacttttaggcctggaaggcgttgtgggctgggttctgggccttgggtggggttggcaggggcaggctctgcacctgtccgggattcaggtaaccagggcctgccgatgggactgaggcgggtctaggggtgtgtgtcctgtattttattgaaaaactcattcagggatccagcccctcagggggcagagggactgattattctgactgttgggagaggcttgcatggaccagagccccatcagtatgactgaaagtccagcggagccttctgtgtccctgtgcctcccagcagggtgggagtggaggaggcggctgctcccaggtggcatctccctgcccttgggtgcaaagtgctgccctcaccactctcccacctcccctacttccttgaaaaccactctgatgtcacaactgagtgtctgttccgtttcagatacccagggctgctgcccagttctgtaaacgcagcccagctaaagctctgctgtctcaagtgtgcatttatacccaggtgatttggacggagcagctaccatggcgtggacgccttcactgaactccgggctgcagtgcagggagctcagagcagtgctgctaccaaacagtttttaactttgaacaactgtgtcaggcaatggatttgaattttaagtgtattaatagctgtgctctgtgtcgtaggcaaaattccactgaaggagcctctgtgccctgcagccggcagcgcggctgaagcatgtgttggccaaggaatgcctgtcatccaggtgccctgcagccagcagcgcggctcaagcatgtgttggccaaggaatgcctgtcagtcatccagggctctgggaggggacgagagttatgtccccaagaacaggaagtcctttacaaagcatccagtctcttcctgtcctccccttccctaggctggggtaggggttagagactggtggcccaggaggtcacctgccttgccctggattccctcttcagtggccagcaggacttggcagggccaccagctcgccaaggttctgggcgggtccctaccagcgcctttccctgtacctggcagcttctctcttggccccacagtcacagcactccacttggtcacaaagacttcagagcaataagaggcgtcctgagccttcagcacctcccaggcctgggatatcgggttcagagggtgctgcagagcagcatgagggtggctccacccatgaggctggtgacactgacgctggcttggctaagttggctcaagccgggtctggcctgacagggtgcagtcacaccaggagcgcatggcagatgcagcctcagtgatgcctctcttgccgggtaggggctgggagtccccgtgcatcctgtctctggcccatgaggggctgcagcactgtgggcgccagagcacagattaaactctcaaaccca

SEQ ID NO: 318347 - DNA, 3331 bp, Homo sapiens
ggcggggagggcgccgcggcgggcggctgcgaggagcggccggcgggcggcggcggccggcgggcggcgatggcggcggcggaggccggtggcgacgacgcccgctgcgtgcggctgagcgccgagcgggcacaggcgctgctggccgacgtggacacgctgctgttcgactgcgacggcgtgctgtggcgcggggagaccgccgtgcctggcgcgcccgaggccctgcgggcgctgcgagcccgcggcaagcgcctgggcttcatcaccaacaacagcagcaagacccgcgctgcctacgccgagaagctgcggcgcctgggcttcggcggccccgcggggcccggcgccagcctggaggtcttcggcacggcctactgcaccgcgctctacctgcgccagcgcctggccggcgcccccgcgcccaaggcctacgtgctgggcagcccagccctggccgcggagctggaggccgtgggcgtcgccagcgtgggcgtggggcccgagccactgcagggcgagggtcccggcgactggctgcacgcgccgctggagcccgacgtgcgcgcggtggtggtgggctttgacccgcacttcagctacatgaagctcaccaaggccctgcgctacctgcagcagcccggctgcctgctcgtgggcaccaacatggacaaccggcttccgcttgagaacggccgcttcatcgcgggtaccgggtgtctggtccgagccgtggagatggccgcccagcgccaggccgacatcatcgggaagcccagccgcttcattttcgactgcgtgtcccaggaatacggcatcaaccccgagcgcaccgtcatggtgggagaccgcctggacacagacatcctcctaggcgccacctgtggcctgaagaccatcctgaccctcaccggagtctccactctaggggatgtgaagaataatcaggaaagtgactgcgtgtctaagaagaaaatggtccctgacttctatgttgacagcatagccgaccttttgcctgcccttcaaggttaaagattgagtgtctttaatctgcagaataaaaaaaaagaaattgaaaaccagttacccaaattaataggtggggcttaagcatctgctcggctaagtggcttcaaagagtgtaattggagttaagcaaaggcattcattgttaaccttgtaagtacacgtttgggggacgattttgtttacagatgcttgtaatcgaagatgcacttttaggcctggaaggcgttgtgggctgggttctgggccttgggtggggttggcaggggcaggctctgcacctgtccgggattcaggtaaccagggcctgccgatgggactgaggcgggtctaggggtgtgtgtcctgtattttattgaaaaactcattcagggatccagcccctcagggggcagagggactgattattctgactgttgggagaggcttgcatggaccagagccccatcagtatgactgaaagtccagcggagccttctgtgtccctgtgcctcccagcagggtgggagtggaggaggcggctgctcccaggtggcatctccctgcccttgggtgcaaagtgctgccctcaccactctcccacctcccctacttccttgaaaaccactctgatgtcacaactgagtgtctgttccgtttcagatacccagggctgctgcccagttctgtaaacgcagcccagctaaagctctgctgtctcaagtgtgcatttatacccaggtgatttggacggagcagctaccatggcgtggacgccttcactgaactccgggctgcagtgcagggagctcagagcagtgctgctaccaaacagtttttaactttgaacaactgtgtcaggcaatggatttgaattttaagtgtattaatagctgtgctctgtgtcgtaggcaaaattccactgaaggagcctctgtgccctgcagccggcagcgcggctgaagcatgtgttggccaaggaatgcctgtcatccaggtgccctgcagccagcagcgcggctcaagcatgtgttggccaaggaatgcctgtcagtcatccagggctctgggaggggacgagagttatgtccccaagaacaggaagtcctttacaaagcatccagtctcttcctgtcctccccttccctaggctggggtaggggttagagactggtggcccaggaggtcacctgccttgccctggattccctcttcagtggccagcaggacttggcagggccaccagctcgccaaggttctgggcggggctccagcctctcctgcctgctccttggctctgctgacctttcacaggcctgacagcagactcagcagggccatcccgggatgctgcaccttctggctggctccctaccagcgcctttccctgtacctggcagcttctctcttggccccacagtcacagcactccacttggtcacaaagacttcagagcaataagaggcgtcctgagccttcagcacctcccaggcctgggatatcgggttcagagggtgctgcagagcagcatgagggtggctccacccatgaggctggtgacactgacgctggcttggctaagttggctcaagccgggtctggcctgacagggtgcagtcacaccaggagcgcatggcagatgcagcctcagtgatgcctctcttgccgggtaggggctgggagtccccgtgcatcctgtctctggcccatgaggggctgcagcactgtgggcgccagagcacagattaaactctcaaacccacactggctcaggtgtccttgctctcaccttgcattggcccgggtgatgccgtctcaccacgggtgggaggactcaaagtagatgggtaactggggttccaactccagagctggaatgccaactgcccactcccagcctggttcagaggaagatgttttgaagaatgagggaaagccaggcacaaagggaagccagggaagcaaagggccctggagtgaagctggtgggctgccgtgtcagagcgcccagggcagggagcagagctcagaagtaatgctggcccgggcgcagtggctcacacccgtaatcccaacgctttggaaggctgaggcaggtggattacttgagatcaggagttcaagaccagcctggccaaaatggtgaaaacccatctctactaaaaatacaaaaattagcgggacttggtggcatgtatctgtaatcccagctactagggaggctgaggcatgagaattgtgtgaacccgggaggcagaggttgcagtgagctgagatcacgccactgcactccagcctgggggacacagcgagactccgtctc

SEQ ID NO: 318348 - DNA, 2853 bp, Homo sapiens
ggcggggagggcgccgcggcgggcggctgcgaggagcggccggcgggcggcggcggccggcgggcggcgatggcggcggcggaggccggtggcgacgacgcccgctgcgtgcggctgagcgccgagcgggcacaggcgctgctggccgacgtggacacgctgctgttcgactgcgacggcgtgctgtggcgcggggagaccgccgtgcctggcgcgcccgaggccctgcgggcgctgcgagcccgcggcaagcgcctgggcttcatcaccaacaacagcagcaagacccgcgctgcctacgccgagaagctgcggcgcctgggcttcggcggccccgcggggcccggcgccagcctggaggtcttcggcacggcctactgcaccgcgctctacctgcgccagcgcctggccggcgcccccgcgcccaaggcctacgtgctgggcagcccagccctggccgcggagctggaggccgtgggcgtcgccagcgtgggcgtggggcccgagccactgcagggcgagggtcccggcgactggctgcacgcgccgctggagcccgacgtgcgcgcggtggtggtgggctttgacccgcacttcagctacatgaagctcaccaaggccctgcgctacctgcagcagcccggctgcctgctcgtgggcaccaacatggacaaccggcttccgcttgagaacggccgcttcatcgcgggtccgtgcgccctggggcgggaggctggggggcgggcggcgggccctcccctgccctttgacccggtcccctgtgccccgcaggtaccgggtgtctggtccgagccgtggagatggccgcccagcgccaggccgacatcatcgggaagcccagccgcttcattttcgactgcgtgtcccaggaatacggcatcaaccccgagcgcaccgtcatggtgggagaccgcctggacacagacatcctcctaggcgccacctgtggcctgaagaccatcctgaccctcaccggagtctccactctaggggatgtgaagaataatcaggaaagtgactgcgtgtctaagaagaaaatggtccctgacttctatgttgacagcatagccgaccttttgcctgcccttcaaggttaaagattgagtgtctttaatctgcagaataaaaaaaaagaaattgaaaaccagttacccaaattaataggtggggcttaagcatctgctcggctaagtggcttcaaagagtgtaattggagttaagcaaaggcattcattgttaaccttgtaagtacacgtttgggggacgattttgtttacagatgcttgtaatcgaagatgcacttttaggcctggaaggcgttgtgggctgggttctgggccttgggtggggttggcaggggcaggctctgcacctgtccgggattcaggtaaccagggcctgccgatgggactgaggcgggtctaggggtgtgtgtcctgtattttattgaaaaactcattcagggatccagcccctcagggggcagagggactgattattctgactgttgggagaggcttgcatggaccagagccccatcagtatgactgaaagtccagcggagccttctgtgtccctgtgcctcccagcagggtgggagtggaggaggcggctgctcccaggtggcatctccctgcccttgggtgcaaagtgctgccctcaccactctcccacctcccctacttccttgaaaaccactctgatgtcacaactgagtgtctgttccgtttcagatacccagggctgctgcccagttctgtaaacgcagcccagctaaagctctgctgtctcaagtgtgcatttatacccaggtgatttggacggagcagctaccatggcgtggacgccttcactgaactccgggctgcagtgcagggagctcagagcagtgctgctaccaaacagtttttaactttgaacaactgtgtcaggcaatggatttgaattttaagtgtattaatagctgtgctctgtgtcgtaggcaaaattccactgaaggagcctctgtgccctgcagccggcagcgcggctgaagcatgtgttggccaaggaatgcctgtcatccaggtgccctgcagccagcagcgcggctcaagcatgtgttggccaaggaatgcctgtcagtcatccagggctctgggaggggacgagagttatgtccccaagaacaggaagtcctttacaaagcatccagtctcttcctgtcctccccttccctaggctggggtaggggttagagactggtggcccaggaggtcacctgccttgccctggattccctcttcagtggccagcaggacttggcagggccaccagctcgccaaggttctgggcggggctccagcctctcctgcctgctccttggctctgctgacctttcacaggcctgacagcagactcagcagggccatcccgggatgctgcaccttctggctggctccctaccagcgcctttccctgtacctggcagcttctctcttggccccacagtcacagcactccacttggtcacaaagacttcagagcaataagaggcgtcctgagccttcagcacctcccaggcctgggatatcgggttcagagggtgctgcagagcagcatgagggtggctccacccatgaggctggtgacactgacgctggcttggctaagttggctcaagccgggtctggcctgacagggtgcagtcacaccaggagcgcatggcagatgcagcctcagtgatgcctctcttgccgggtaggggctgggagtccccgtgcatcctgtctctggcccatgaggggctgcagcactgtgggcgccagagcacagattaaactctcaaaccca

SEQ ID NO: 318349 - DNA, 2793 bp, Homo sapiens
  misc_feature (727)..(728): n is a, c, g, or t
ggcggggagggcgccgcggcgggcggctgcgaggagcggccggcgggcggcggcggccggcgggcggcgatggcggcggcggaggccggtggcgacgacgcccgctgcgtgcggctgagcgccgagcgggcacaggcgctgctggccgacgtggacacgctgctgttcgactgcgacggcgtgctgtggcgcggggagaccgccgtgcctggcgcgcccgaggccctgcgggcgctgcgagcccgcggcaagcgcctgggcttcatcaccaacaacagcagcaagacccgcgctgcctacgccgagaagctgcggcgcctgggcttcggcggccccgcggggcccggcgccagcctggaggtcttcggcacggcctactgcaccgcgctctacctgcgccagcgcctggccggcgcccccgcgcccaaggcctacgtgctgggcagcccagccctggccgcggagctggaggccgtgggcgtcgccagcgtgggcgtggggcccgagccactgcagggcgagggtcccggcgactggctgcacgcgccgctggagcccgacgtgcgcgcggtggtggtgggctttgacccgcacttcagctacatgaagctcaccaaggccctgcgctacctgcagcagcccggctgcctgctcgtgggcaccaacatggacaaccggcttccgcttgagaacggccgcttcatcgcggacgggtgtctggccgaannccccccccgggttgggtggaaaaaggaaaaaatatggccgcccagcgccaggccgacatcatcgggaagcccagccgcttcattttcgactgcgtgtcccaggaatacggcatcaaccccgagcgcaccgtcatggtgggagaccgcctggacacagacatcctcctaggcgccacctgtggcctgaagaccatcctgaccctcaccggagtctccactctaggggatgtgaagaataatcaggaaagtgactgcgtgtctaagaagaaaatggtccctgacttctatgttgacagcatagccgaccttttgcctgcccttcaaggttaaagattgagtgtctttaatctgcagaataaaaaaaaagaaattgaaaaccagttacccaaattaataggtggggcttaagcatctgctcggctaagtggcttcaaagagtgtaattggagttaagcaaaggcattcattgttaaccttgtaagtacacgtttgggggacgattttgtttacagatgcttgtaatcgaagatgcacttttaggcctggaaggcgttgtgggctgggttctgggccttgggtggggttggcaggggcaggctctgcacctgtccgggattcaggtaaccagggcctgccgatgggactgaggcgggtctaggggtgtgtgtcctgtattttattgaaaaactcattcagggatccagcccctcagggggcagagggactgattattctgactgttgggagaggcttgcatggaccagagccccatcagtatgactgaaagtccagcggagccttctgtgtccctgtgcctcccagcagggtgggagtggaggaggcggctgctcccaggtggcatctccctgcccttgggtgcaaagtgctgccctcaccactctcccacctcccctacttccttgaaaaccactctgatgtcacaactgagtgtctgttccgtttcagatacccagggctgctgcccagttctgtaaacgcagcccagctaaagctctgctgtctcaagtgtgcatttatacccaggtgatttggacggagcagctaccatggcgtggacgccttcactgaactccgggctgcagtgcagggagctcagagcagtgctgctaccaaacagtttttaactttgaacaactgtgtcaggcaatggatttgaattttaagtgtattaatagctgtgctctgtgtcgtaggcaaaattccactgaaggagcctctgtgccctgcagccggcagcgcggctgaagcatgtgttggccaaggaatgcctgtcatccaggtgccctgcagccagcagcgcggctcaagcatgtgttggccaaggaatgcctgtcagtcatccagggctctgggaggggacgagagttatgtccccaagaacaggaagtcctttacaaagcatccagtctcttcctgtcctccccttccctaggctggggtaggggttagagactggtggcccaggaggtcacctgccttgccctggattccctcttcagtggccagcaggacttggcagggccaccagctcgccaaggttctgggcggggctccagcctctcctgcctgctccttggctctgctgacctttcacaggcctgacagcagactcagcagggccatcccgggatgctgcaccttctggctggctccctaccagcgcctttccctgtacctggcagcttctctcttggccccacagtcacagcactccacttggtcacaaagacttcagagcaataagaggcgtcctgagccttcagcacctcccaggcctgggatatcgggttcagagggtgctgcagagcagcatgagggtggctccacccatgaggctggtgacactgacgctggcttggctaagttggctcaagccgggtctggcctgacagggtgcagtcacaccaggagcgcatggcagatgcagcctcagtgatgcctctcttgccgggtaggggctgggagtccccgtgcatcctgtctctggcccatgaggggctgcagcactgtgggcgccagagcacagattaaactctcaaaccca

SEQ ID NO: 318350 - DNA, 2422 bp, Homo sapiens
caggctctccacccccacttcccaattgaggaaaccgaggcagaggaggctcaggtgtggccaatcaccctgcacatcagagttaccctgggcagggcccactgagacctgggaggggccactcgggacctggagggctgggggctgcccgggcgttaggggtaaagctccctacccaactgcgcagaaggcctcagaggcctgggggctgggcttcccctttcacatcgccctttagaggcccacgtgtgggcattggcccgcgatctgaaaggggctgtcctgttcctcatgggcgctgccagcgccacgcactcctctttctgcctggccggccactcccgtctgctgtgacgcgcggacagagagctaccggtggacccacggtgcctccctccctgggatctacacagaccatggccttgccaacggctcgacccctgttggggtcctgtgggacccccgccctcggcagcctcctgttcctgctcttcagcctcggatgggtgcagccctcgaggaccctggctggagagacagggcaggaggctgcgcccctggacggagtcctggccaacccacctaacatttccagcctctcccctcgccaactccttggcttcccgtgtgcggaggtgtccggcctgagcacggagcgtgtccgggagctggctgtggccttggcacagaagaatgtcaagctctcaacagagcagctgcgctgtctggctcaccggctctctgagccccccgaggacctggacgccctcccattggacctgctgctattcctcaacccagatgcgttctcggggccccaggcctgcacccgtttcttctcccgcatcacgaaggccaatgtggacctgctcccgaggggggctcccgagcgacagcggctgctgcctgcggctctggcctgctggggtgtgcgggggtctctgctgagcgaggctgatgtgcgggctctgggaggcctggcttgcgacctgcctgggcgctttgtggccgagtcggccgaagtgctgctaccccggctggtgagctgcccgggacccctggaccaggaccagcaggaggcagccagggcggctctgcagggcgggggacccccctacggccccccgtcgacatggtctgtctccacgatggacgctctgcggggcctgctgcccgtgctgggccagcccatcatccgcagcatcccgcagggcatcgtggccgcgtggcggcaacgctcctctcgggacccatcctggcggcagcctgaacggaccatcctccggccgcggttccggcgggaagtggagaagacagcctgtccttcaggcaagaaggcccgcgagatagacgagagcctcatcttctacaagaagtgggagctggaagcctgcgtggatgcggccctgctggccacccagatggaccgcgtgaacgccatccccttcacctacgagcagctggacgtcctaaagcataaactggatgagctctacccacaaggttaccccgagtctgtgatccagcacctgggctacctcttcctcaagatgagccctgaggacattcgcaagtggaatgtgacgtccctggagaccctgaaggctttgcttgaagtcaacaaagggcacgaaatgagtcctcaggtggccaccctgatcgaccgctttgtgaagggaaggggccagctagacaaagacaccctagacaccctgaccgccttctaccctgggtacctgtgctccctcagccccgaggagctgagctccgtgccccccagcagcatctgggcggtcaggccccaggacctggacacgtgtgacccaaggcagctggacgtcctctatcccaaggcccgccttgctttccagaacatgaacgggtccgaatacttcgtgaagatccagtccttcctgggtggggcccccacggaggatttgaaggcgctcagtcagcagaatgtgagcatggacttggccacgttcatgaagctgcggacggatgcggtgctgccgttgactgtggctgaggtgcagaaacttctgggaccccacgtggagggcctgaaggcggaggagcggcaccgcccggtgcgggactggatcctacggcagcggcaggacgacctggacacgctggggctggggctacagggcggcatccccaacggctacctggtcctagacctcagcatgcaagaggccctctcggggacgccctgcctcctaggacctggacctgttctcaccgtcctggcactgctcctagcctccaccctggcctgagggccccactcccttgctggccccagccctgctggggatccccgcctggccaggagcaggcacgggtggtccccgttccaccccaagagaactcgcgctcagtaaacgggaacatgccccctgcagacacgtaaaat

SEQ ID NO: 318351 - DNA, 2111 bp, Homo sapiens
caggctctccacccccacttcccaattgaggaaaccgaggcagaggaggctcagagagctaccggtggacccacggtgcctccctccctgggatctacacagaccatggccttgccaacggctcgacccctgttggggtcctgtgggacccccgccctcggcagcctcctgttcctgctcttcagcctcggatgggtgcagccctcgaggaccctggctggagagacagggcaggaggctgcgcccctggacggagtcctggccaacccacctaacatttccagcctctcccctcgccaactccttggcttcccgtgtgcggaggtgtccggcctgagcacggagcgtgtccgggagctggctgtggccttggcacagaagaatgtcaagctctcaacagagcagctgcgctgtctggctcaccggctctctgagccccccgaggacctggacgccctcccattggacctgctgctattcctcaacccagatgcgttctcggggccccaggcctgcacccgtttcttctcccgcatcacgaaggccaatgtggacctgctcccgaggggggctcccgagcgacagcggctgctgcctgcggctctggcctgctggggtgtgcgggggtctctgctgagcgaggctgatgtgcgggctctgggaggcctggcttgcgacctgcctgggcgctttgtggccgagtcggccgaagtgctgctaccccggctggtgagctgcccgggacccctggaccaggaccagcaggaggcagccagggcggctctgcagggcgggggacccccctacggccccccgtcgacatggtctgtctccacgatggacgctctgcggggcctgctgcccgtgctgggccagcccatcatccgcagcatcccgcagggcatcgtggccgcgtggcggcaacgctcctctcgggacccatcctggcggcagcctgaacggaccatcctccggccgcggttccggcgggaagtggagaagacagcctgtccttcaggcaagaaggcccgcgagatagacgagagcctcatcttctacaagaagtgggagctggaagcctgcgtggatgcggccctgctggccacccagatggaccgcgtgaacgccatccccttcacctacgagcagctggacgtcctaaagcataaactggatgagctctacccacaaggttaccccgagtctgtgatccagcacctgggctacctcttcctcaagatgagccctgaggacattcgcaagtggaatgtgacgtccctggagaccctgaaggctttgcttgaagtcaacaaagggcacgaaatgagtcctcaggtggccaccctgatcgaccgctttgtgaagggaaggggccagctagacaaagacaccctagacaccctgaccgccttctaccctgggtacctgtgctccctcagccccgaggagctgagctccgtgccccccagcagcatctgggcggtcaggccccaggacctggacacgtgtgacccaaggcagctggacgtcctctatcccaaggcccgccttgctttccagaacatgaacgggtccgaatacttcgtgaagatccagtccttcctgggtggggcccccacggaggatttgaaggcgctcagtcagcagaatgtgagcatggacttggccacgttcatgaagctgcggacggatgcggtgctgccgttgactgtggctgaggtgcagaaacttctgggaccccacgtggagggcctgaaggcggaggagcggcaccgcccggtgcgggactggatcctacggcagcggcaggacgacctggacacgctggggctggggctacagggcggcatccccaacggctacctggtcctagacctcagcatgcaagaggccctctcggggacgccctgcctcctaggacctggacctgttctcaccgtcctggcactgctcctagcctccaccctggcctgagggccccactcccttgctggccccagccctgctggggatccccgcctggccaggagcaggcacgggtggtccccgttccaccccaagagaactcgcgctcagtaaacgggaacatgccccctgcagacacgtaaaat

SEQ ID NO: 318352 - DNA, 2171 bp, Homo sapiens
caggctctccacccccacttcccaattgaggaaaccgaggcagaggaggctcagcgccacgcactcctctttctgcctggccggccactcccgtctgctgtgacgcgcggacagagagctaccggtggacccacggtgcctccctccctgggatctacacagaccatggccttgccaacggctcgacccctgttggggtcctgtgggacccccgccctcggcagcctcctgttcctgctcttcagcctcggatgggtgcagccctcgaggaccctggctggagagacagggcaggaggctgcgcccctggacggagtcctggccaacccacctaacatttccagcctctcccctcgccaactccttggcttcccgtgtgcggaggtgtccggcctgagcacggagcgtgtccgggagctggctgtggccttggcacagaagaatgtcaagctctcaacagagcagctgcgctgtctggctcaccggctctctgagccccccgaggacctggacgccctcccattggacctgctgctattcctcaacccagatgcgttctcggggccccaggcctgcacccgtttcttctcccgcatcacgaaggccaatgtggacctgctcccgaggggggctcccgagcgacagcggctgctgcctgcggctctggcctgctggggtgtgcgggggtctctgctgagcgaggctgatgtgcgggctctgggaggcctggcttgcgacctgcctgggcgctttgtggccgagtcggccgaagtgctgctaccccggctggtgagctgcccgggacccctggaccaggaccagcaggaggcagccagggcggctctgcagggcgggggacccccctacggccccccgtcgacatggtctgtctccacgatggacgctctgcggggcctgctgcccgtgctgggccagcccatcatccgcagcatcccgcagggcatcgtggccgcgtggcggcaacgctcctctcgggacccatcctggcggcagcctgaacggaccatcctccggccgcggttccggcgggaagtggagaagacagcctgtccttcaggcaagaaggcccgcgagatagacgagagcctcatcttctacaagaagtgggagctggaagcctgcgtggatgcggccctgctggccacccagatggaccgcgtgaacgccatccccttcacctacgagcagctggacgtcctaaagcataaactggatgagctctacccacaaggttaccccgagtctgtgatccagcacctgggctacctcttcctcaagatgagccctgaggacattcgcaagtggaatgtgacgtccctggagaccctgaaggctttgcttgaagtcaacaaagggcacgaaatgagtcctcaggtggccaccctgatcgaccgctttgtgaagggaaggggccagctagacaaagacaccctagacaccctgaccgccttctaccctgggtacctgtgctccctcagccccgaggagctgagctccgtgccccccagcagcatctgggcggtcaggccccaggacctggacacgtgtgacccaaggcagctggacgtcctctatcccaaggcccgccttgctttccagaacatgaacgggtccgaatacttcgtgaagatccagtccttcctgggtggggcccccacggaggatttgaaggcgctcagtcagcagaatgtgagcatggacttggccacgttcatgaagctgcggacggatgcggtgctgccgttgactgtggctgaggtgcagaaacttctgggaccccacgtggagggcctgaaggcggaggagcggcaccgcccggtgcgggactggatcctacggcagcggcaggacgacctggacacgctggggctggggctacagggcggcatccccaacggctacctggtcctagacctcagcatgcaagaggccctctcggggacgccctgcctcctaggacctggacctgttctcaccgtcctggcactgctcctagcctccaccctggcctgagggccccactcccttgctggccccagccctgctggggatccccgcctggccaggagcaggcacgggtggtccccgttccaccccaagagaactcgcgctcagtaaacgggaacatgccccctgcagacacgtaaaat

SEQ ID NO: 318353 - DNA, 2446 bp, Homo sapiens
caggctctccacccccacttcccaattgaggaaaccgaggcagaggaggctcaggtgtggccaatcaccctgcacatcagagttaccctgggcagggcccactgagacctgggaggggccactcgggacctggagggctgggggctgcccgggcgttaggggtaaagctccctacccaactgcgcagaaggcctcagaggcctgggggctgggcttcccctttcacatcgccctttagaggcccacgtgtgggcattggcccgcgatctgaaaggggctgtcctgttcctcatgggcgctgccagcgccacgcactcctctttctgcctggccggccactcccgtctgctgtgacgcgcggacagagagctaccggtggacccacggtgcctccctccctgggatctacacagaccatggccttgccaacggctcgacccctgttggggtcctgtgggacccccgccctcggcagcctcctgttcctgctcttcagcctcggatgggtgcagccctcgaggaccctggctggagagacagggcaggaggctgcgcccctggacggagtcctggccaacccacctaacatttccagcctctcccctcgccaactccttggcttcccgtgtgcggaggtgtccggcctgagcacggagcgtgtccgggagctggctgtggccttggcacagaagaatgtcaagctctcaacagagcagctgcgctgtctggctcaccggctctctgagccccccgaggacctggacgccctcccattggacctgctgctattcctcaacccagatgcgttctcggggccccaggcctgcacccgtttcttctcccgcatcacgaaggccaatgtggacctgctcccgaggggggctcccgagcgacagcggctgctgcctgcggctctggcctgctggggtgtgcgggggtctctgctgagcgaggctgatgtgcgggctctgggaggcctggcttgcgacctgcctgggcgctttgtggccgagtcggccgaagtgctgctaccccggctggtgagctgcccgggacccctggaccaggaccagcaggaggcagccagggcggctctgcagggcgggggacccccctacggccccccgtcgacatggtctgtctccacgatggacgctctgcggggcctgctgcccgtgctgggccagcccatcatccgcagcatcccgcagggcatcgtggccgcgtggcggcaacgctcctctcgggacccatcctggcggcagcctgaacggaccatcctccggccgcggttccggcgggaagtggagaagacagcctgtccttcaggcaagaaggcccgcgagatagacgagagcctcatcttctacaagaagtgggagctggaagcctgcgtggatgcggccctgctggccacccagatggaccgcgtgaacgccatccccttcacctacgagcagctggacgtcctaaagcataaactggatgagctctacccacaaggttaccccgagtctgtgatccagcacctgggctacctcttcctcaagatgagccctgaggacattcgcaagtggaatgtgacgtccctggagaccctgaaggctttgcttgaagtcaacaaagggcacgaaatgagtcctcaggctcctcggcggcccctcccacaggtggccaccctgatcgaccgctttgtgaagggaaggggccagctagacaaagacaccctagacaccctgaccgccttctaccctgggtacctgtgctccctcagccccgaggagctgagctccgtgccccccagcagcatctgggcggtcaggccccaggacctggacacgtgtgacccaaggcagctggacgtcctctatcccaaggcccgccttgctttccagaacatgaacgggtccgaatacttcgtgaagatccagtccttcctgggtggggcccccacggaggatttgaaggcgctcagtcagcagaatgtgagcatggacttggccacgttcatgaagctgcggacggatgcggtgctgccgttgactgtggctgaggtgcagaaacttctgggaccccacgtggagggcctgaaggcggaggagcggcaccgcccggtgcgggactggatcctacggcagcggcaggacgacctggacacgctggggctggggctacagggcggcatccccaacggctacctggtcctagacctcagcatgcaagaggccctctcggggacgccctgcctcctaggacctggacctgttctcaccgtcctggcactgctcctagcctccaccctggcctgagggccccactcccttgctggccccagccctgctggggatccccgcctggccaggagcaggcacgggtggtccccgttccaccccaagagaactcgcgctcagtaaacgggaacatgccccctgcagacacgtaaaat

SEQ ID NO: 318354 - DNA, 1093 bp, Homo sapiens
ccatacaaatccgctcggttccccttttggggtctttgctcaagaagtgggagctggaagcctgcgtggatgcggccctgctggccacccagatggaccgcgtgaacgccatccccttcacctacgagcagctggacgtcctaaagcataaactggatgagctctacccacaaggttaccccgagtctgtgatccagcacctgggctacctcttcctcaagatgagccctgaggacattcgcaagtggaatgtgacgtccctggagaccctgaaggctttgcttgaagtcaacaaagggcacgaaatgagtcctcaggtggccaccctgatcgaccgctttgtgaagggaaggggccagctagacaaagacaccctagacaccctgaccgccttctaccctgggtacctgtgctccctcagccccgaggagctgagctccgtgccccccagcagcatctgggcggtcaggccccaggacctggacacgtgtgacccaaggcagctggacgtcctctatcccaaggcccgccttgctttccagaacatgaacgggtccgaatacttcgtgaagatccagtccttcctgggtggggcccccacggaggatttgaaggcgctcagtcagcagaatgtgagcatggacttggccacgttcatgaagctgcggacggatgcggtgctgccgttgactgtggctgaggtgcagaaacttctgggaccccacgtggagggcctgaaggcggaggagcggcaccgcccggtgcgggactggatcctacggcagcggcaggacgacctggacacgctggggctggggctacagggcggcatccccaacggctacctggtcctagacctcagcatgcaagaggccctctcggggacgccctgcctcctaggacctggacctgttctcaccgtcctggcactgctcctagcctccaccctggcctgagggccccactcccttgctggccccagccctgctggggatccccgcctggccaggagcaggcacgggtggtccccgttccaccccaagagaactcgcgctcagtaaacgggaacatgccccctgcagacacgtaaaat

SEQ ID NO: 318355 - DNA, 1162 bp, Homo sapiens
aatttagagaatccctaattggccgggcgggtctgcgccagctagcggataagacagcctgtccttcaggcaagaaggcccgcgagatagacgagagcctcatcttctacaagaagtgggagctggaagcctgcgtggatgcggccctgctggccacccagatggaccgcgtgaacgccatccccttcacctacgagcagctggacgtcctaaagcataaactggatgagctctacccacaaggttaccccgagtctgtgatccagcacctgggctacctcttcctcaagatgagccctgaggacattcgcaagtggaatgtgacgtccctggagaccctgaaggctttgcttgaagtcaacaaagggcacgaaatgagtcctcaggtggccaccctgatcgaccgctttgtgaagggaaggggccagctagacaaagacaccctagacaccctgaccgccttctaccctgggtacctgtgctccctcagccccgaggagctgagctccgtgccccccagcagcatctgggcggtcaggccccaggacctggacacgtgtgacccaaggcagctggacgtcctctatcccaaggcccgccttgctttccagaacatgaacgggtccgaatacttcgtgaagatccagtccttcctgggtggggcccccacggaggatttgaaggcgctcagtcagcagaatgtgagcatggacttggccacgttcatgaagctgcggacggatgcggtgctgccgttgactgtggctgaggtgcagaaacttctgggaccccacgtggagggcctgaaggcggaggagcggcaccgcccggtgcgggactggatcctacggcagcggcaggacgacctggacacgctggggctggggctacagggcggcatccccaacggctacctggtcctagacctcagcatgcaagaggccctctcggggacgccctgcctcctaggacctggacctgttctcaccgtcctggcactgctcctagcctccaccctggcctgagggccccactcccttgctggccccagccctgctggggatccccgcctggccaggagcaggcacgggtggtccccgttccaccccaagagaactcgcgctcagtaaacgggaacatgccccctgcagacacgtaaaat

SEQ ID NO: 318356 - DNA, 2504 bp, Homo sapiens
caggctctccacccccacttcccaattgaggaaaccgaggcagaggaggctcaggtgtggccaatcaccctgcacatcagagttaccctgggcagggcccactgagacctgggaggggccactcgggacctggagggctgggggctgcccgggcgttaggggtaaagctccctacccaactgcgcagaaggcctcagaggcctgggggctgggcttcccctttcacatcgccctttagaggcccacgtgtgggcattggcccgcgatctgaaaggggctgtcctgttcctcatgggcgctgccagcgccacgcactcctctttctgcctggccggccactcccgtctgctgtgacgcgcggacagagagctaccggtggacccacggtgcctccctccctgggatctacacagaccatggccttgccaacggctcgacccctgttggggtcctgtgggacccccgccctcggcagcctcctgttcctgctcttcagcctcggatgggtgcagccctcgaggaccctggctggagagacagggcaggaggctgcgcccctggacggagtcctggccaacccacctaacatttccagcctctcccctcgccaactccttggcttcccgtgtgcggaggtgtccggcctgagcacggagcgtgtccgggagctggctgtggccttggcacagaagaatgtcaagctctcaacagagcagctgcgctgtctggctcaccggctctctgagccccccgaggacctggacgccctcccattggacctgctgctattcctcaacccagatgcgttctcggggccccaggcctgcacccgtttcttctcccgcatcacgaaggccaatgtggacctgctcccgaggggggctcccgagcgacagcggctgctgcctgcggctctggcctgctggggtgtgcgggggtctctgctgagcgaggctgatgtgcgggctctgggaggcctggcttgcgacctgcctgggcgctttgtggccgagtcggccgaagtgctgctaccccggctggtgagctgcccgggacccctggaccaggaccagcaggaggcagccagggcggctctgcagggcgggggacccccctacggccccccgtcgacatggtctgtctccacgatggacgctctgcggggcctgctgcccgtgctgggccagcccatcatccgcagcatcccgcagggcatcgtggccgcgtggcggcaacgctcctctcgggacccatcctggcggcagcctgaacggaccatcctccggccgcggttccggcgggaagtggagaagacagcctgtccttcaggcaagaaggcccgcgagatagacgagagcctcatcttctacaagaagtgggagctggaagcctgcgtggatgcggccctgctggccacccagatggaccgcgtgaacgccatccccttcacctacgagcagctggacgtcctaaagcataaactggatgagctctacccacaaggttaccccgagtctgtgatccagcacctgggctacctcttcctcaagatgagccctgaggacattcgcaagtggaatgtgacgtccctggagaccctgaaggctttgcttgaagtcaacaaagggcacgaaatgagtcctcaggtggccaccctgatcgaccgctttgtgaagggaaggggccagctagacaaagacaccctagacaccctgaccgccttctaccctgggtacctgtgctccctcagccccgaggagctgagctccgtgccccccagcagcatctgggcggtcaggccccaggacctggacacgtgtgacccaaggcagctggacgtcctctatcccaaggcccgccttgctttccagaacatgaacgggtccgaatacttcgtgaagatccagtccttcctgggtggggcccccacggaggatttgaaggcgctcagtcagcagaatgtgagcatggacttggccacgttcatgaagctgcggacggatgcggtgctgccgttgactgtggctgaggtgcagaaacttctgggaccccacgtggagggcctgaaggcggaggagcggcaccgcccggtgcgggactggatcctacggcagcggcaggacgacctggacacgctggggctggggctacagggcggcatccccaacggctacctggtcctagacctcagcatgcaaggtgggcggggcggccaggccagggctgggggcagagctgggggcgtggaggtgggcgctctgagtcacccctctctctgtagaggccctctcggggacgccctgcctcctaggacctggacctgttctcaccgtcctggcactgctcctagcctccaccctggcctgagggccccactcccttgctggccccagccctgctggggatccccgcctggccaggagcaggcacgggtggtccccgttccaccccaagagaactcgcgctcagtaaacgggaacatgccccctgcagacacgtaaaat

SEQ ID NO: 318357 - DNA, 2392 bp, Homo sapiens
caggctctccacccccacttcccaattgaggaaaccgaggcagaggaggctcaggtgtggccaatcaccctgcacatcagagttaccctgggcagggcccactgagacctgggaggggccactcgggacctggagggctgggggctgcccgggcgttaggggtaaagctccctacccaactgcgcagaaggcctcagaggcctgggggctgggcttcccctttcacatcgccctttagaggcccacgtgtgggcattggcccgcgatctgaaaggggctgtcctgttcctcatgggcgctgccagcgccacgcactcctctttctgcctggccggccactcccgtctgctgtgacgcgcggacagagagctaccggtggacccacggtgcctccctccctgggatctacacagaccatggccttgccaacggctcgacccctgttggggtcctgtgggacccccgccctcggcagcctcctgttcctgctcttcagcctcggatgggtgcagccctcgaggaccctggctggagagacagggcaggaggctgcgcccctggacggagtcctggccaacccacctaacatttccagcctctcccctcgccaactccttggcttcccgtgtgcggaggtgtccggcctgagcacggagcgtgtccgggagctggctgtggccttggcacagaagaatgtcaagctctcaacagagcagctgcgctgtctggctcaccggctctctgagccccccgaggacctggacgccctcccattggacctgctgctattcctcaacccagatgcgttctcggggccccaggcctgcacccgtttcttctcccgcatcacgaaggccaatgtggacctgctcccgaggggggctcccgagcgacagcggctgctgcctgcggctctggcctgctggggtgtgcgggggtctctgctgagcgaggctgatgtgcgggctctgggaggcctggcttgcgacctgcctgggcgctttgtggccgagtcggccgaagtgctgctaccccggctggtgagctgcccgggacccctggaccaggaccagcaggaggcagccagggcggctctgcagggcgggggacccccctacggccccccgtcgacatggtctgtctccacgatggacgctctgcggggcctgctgcccgtgctgggccagcccatcatccgcagcatcccgcagggcatcgtggccgcgtggcggcaacgctcctctcgggacccatcctggcggcagcctgaacggaccatcctccggccgcggttccggcgggaagtggagaagacagcctgtccttcaggcaagaaggcccgcgagatagacgagagcctcatcttctacaagaagtgggagctggaagcctgcgtggatgcggccctgctggccacccagatggaccgcgtgaacgccatccccttcacctacgagcagctggacgtcctaaagcataaactggatgagctctacccacaaggttaccccgagtctgtgatccagcacctgggctacctcttcctcaagatgagccctgaggacattcgcaagtggaatgtgacgtccctggagaccctgaaggctttgcttgaagtcaacaaagggcacgaaatgagtcctcaggtggccaccctgatcgaccgctttgtgaagggaaggggccagctagacaaagacaccctagacaccctgaccgccttctaccctgggtacctgtgctccctcagccccgaggagctgagctccgtgccccccagcagcatctgggcggtcaggccccaggacctggacacgtgtgacccaaggcagctggacgtcctctatcccaaggcccgccttgctttccagaacatgaacgggtccgaatacttcgtgaagatccagtccttcctgggtggggcccccacggaggatttgaaggcgctcagtcagcagaatgtgagcatggacttggccacgttcatgaagctgcggacggatgcggtgctgccgttgactgtggctgaggtgcagaaacttctgggaccccacgtggagggcctgaaggcggaggagcggcaccgcccggtgcgggactggatcctacggcagcggcaggacgacctggacacgctggggctggggctacagggcggcatccccaacggctacctggtcctagacctcagcatgcaaggacctggacctgttctcaccgtcctggcactgctcctagcctccaccctggcctgagggccccactcccttgctggccccagccctgctggggatccccgcctggccaggagcaggcacgggtggtccccgttccaccccaagagaactcgcgctcagtaaacgggaacatgccccctgcagacacgtaaaat

SEQ ID NO: 318358 - DNA, 2276 bp, Homo sapiens
caggctctccacccccacttcccaattgaggaaaccgaggcagaggaggctcaggtgtggccaatcaccctgcacatcagagttaccctgggcagggcccactgagacctgggaggggccactcgggacctggagggctgggggctgcccgggcgttaggggtaaagctccctacccaactgcgcagaaggcctcagaggcctgggggctgggcttcccctttcacatcgccctttagaggcccacgtgtgggcattggcccgcgatctgaaaggggctgtcctgttcctcatgggcgctgccagcgccacgcactcctctttctgcctggccggccactcccgtctgctgtgacgcgcggacagagagctaccggtggacccacggtgcctccctccctgggatctacacagaccatggccttgccaacggctcgacccctgttggggtcctgtgggacccccgccctcggcagcctcctgttcctgctcttcagcctcggatgggtgcagccctcgaggaccctggctggagagacagggcaggaggctgcgcccctggacggagtcctggccaacccacctaacatttccagcctctcccctcgccaactccttggcttcccgtgtgcggaggtgtccggcctgagcacggagcgtgtccgggagctggctgtggccttggcacagaagaatgtcaagctctcaacagagcagctgcgctgtctggctcaccggctctctgagccccccgaggacctggacgccctcccattggacctgctgctattcctcaacccagatgcgttctcggggccccaggcctgcacccgtttcttctcccgcatcacgaaggccaatgtggacctgctcccgaggggggctcccgagcgacagcggctgctgcctgcggctctggcctgctggggtgtgcgggggtctctgctgagcgaggctgatgtgcgggctctgggaggcctggcttgcgacctgcctgggcgctttgtggccgagtcggccgaagtgctgctaccccggctggtgagctgcccgggacccctggaccaggaccagcaggaggcagccagggcggctctgcagggcgggggacccccctacggccccccgtcgacatggtctgtctccacgatggacgctctgcggggcctgctgcccgtgctgggccagcccatcatccgcagcatcccgcagggcatcgtggccgcgtggcggcaacgctcctctcgggacccatcctggcggcagcctgaacggaccatcctccggccgcggttccggcgggaagtggagaagacagcctgtccttcaggcaagaaggcccgcgagatagacgagagcctcatcttctacaagaagtgggagctggaagcctgcgtggatgcggccctgctggccacccagatggaccgcgtgaacgccatccccttcacctacgagcagctggacgtcctaaagcataaactggatgagctctacccacaaggttaccccgagtctgtgatccagcacctgggctacctcttcctcaagatgagccctgaggacattcgcaagtggaatgtgacgtccctggagaccctgaaggctttgcttgaagtcaacaaagggcacgaaatgagtcctcaggtggccaccctgatcgaccgctttgtgaagggaaggggccagctagacaaagacaccctagacaccctgaccgccttctaccctgggtacctgtgctccctcagccccgaggagctgagctccgtgccccccagcagcatctgggcggtcaggccccaggacctggacacgtgtgacccaaggcagctggacgtcctctatcccaaggcccgccttgctttccagaacatgaacgggtccgaatacttcgtgaagatccagtccttcctggctgaaggcggaggagcggcaccgcccggtgcgggactggatcctacggcagcggcaggacgacctggacacgctggggctggggctacagggcggcatccccaacggctacctggtcctagacctcagcatgcaagaggccctctcggggacgccctgcctcctaggacctggacctgttctcaccgtcctggcactgctcctagcctccaccctggcctgagggccccactcccttgctggccccagccctgctggggatccccgcctggccaggagcaggcacgggtggtccccgttccaccccaagagaactcgcgctcagtaaacgggaacatgccccctgcagacacgtaaaat

SEQ ID NO: 318359 - DNA, 221 bp, Homo sapiens
gctgagcgaggctgatgtgcgggctctgggaggcctggcttgcgacctgcctgggcgctttgtggccgagtcggccgaagtgctgctaccccggctggtgagctgcccgggacccctggaccaggaccagcaggaggcagccagggcggctctgcagggcgggggacccccctacgggtaagtgaaggtgtctggaacctcgaaggctcacctggcggcgt

SEQ ID NO: 318360 - DNA, 230 bp, Homo sapiens
aaaatatcactcagaacccaagatgcagagacaatgaaataaaactagttttttaaaatgttgtgtgtctcccaacattttttttcttaaacttactgcctattatttcttatgcactagggagcattaacagatgattaagcaaatggaaaattagtaaagaaatattaatggcaagaaaaatggggaaaagctgtgctctactcacatatgttcagttttaaaacact

SEQ ID NO: 318361 - DNA, 271 bp, Homo sapiens
catttggccttgtgtattatttacacgtgtgattcacttttttctaacatgttctaaatacttttttcaagatgttcaatctactttttattaccctctttttgtaaattttaatgatgtgaaaagcacctaaggaccaatggagaagctcagaatagcaatttttgtaggaagtcctgatgaagagtttatcaagggagatttttaagtcagttatgaagcctgagggaaagctagaagtttagggagacctttgatcatacagtattgg

SEQ ID NO: 318362 - DNA, 2098 bp, Homo sapiens
aattcctctggcaacaaaccacacactgggatctgacactgtagagtgctttctcttctctttttttgggggggggagggggtgtggttgcatatttaaactctcacgcatttatgtactgaggactgcagtgtaggactttcctgcagaataccatttgatcctattaagaattgtccaaatgttggagcatttgattgaaaaatccttcttagccattttaaagatagctttccaatgattagacgaattgattctttctgtgactcatcagttcctttcctgtaaaattcatgtcttgctgttgatttgtgaataagaaccagagcttgtagaaaccactttaatcatatccaggagtttgcaagaaacaggtgcttaacactaattcacctcctgaacaagaaaaatgggctgtgaccggaactgtgggctcatcgctggggctgtcattggtgctgtcctggctgtgtttggaggtattctaatgccagttggagacctgcttatccagaagacaattaaaaagcaagttgtcctcgaagaaggtacaattgcttttaaaaattgggttaaaacaggcacagaagtttacagacagttttggatctttgatgtgcaaaatccacaggaagtgatgatgaacagcagcaacattcaagttaagcaaagaggtccttatacgtacagagttcgttttctagccaaggaaaatgtaacccaggacgctgaggacaacacagtctctttcctgcagcccaatggtgccatcttcgaaccttcactatcagttggaacagaggctgacaacttcacagttctcaatctggctgtggcagctgcatcccatatctatcaaaatcaatttgttcaaatgatcctcaattcacttattaacaagtcaaaatcttctatgttccaagtcagaactttgagagaactgttatggggctatagggatccatttttgagtttggttccgtaccctgttactaccacagttggtctgttttatccttacaacaatactgcagatggagtttataaagttttcaatggaaaagataacataagtaaagttgccataatcgacacatataaaggtaaaaggaatctgtcctattgggaaagtcactgcgacatgattaatggtacagatgcagcctcatttccaccttttgttgagaaaagccaggtattgcagttcttttcttctgatatttgcaggtcaatctatgctgtatttgaatccgacgttaatctgaaaggaatccctgtgtatagatttgttcttccatccaaggcctttgcctctccagttgaaaacccagacaactattgtttctgcacagaaaaaattatctcaaaaaattgtacatcatatggtgtgctagacatcagcaaatgcaaagaagggagacctgtgtacatttcacttcctcattttctgtatgcaagtcctgatgtttcagaacctattgatggattaaacccaaatgaagaagaacataggacatacttggatattgaacctataactggattcactttacaatttgcaaaacggctgcaggtcaacctattggtcaagccatcagaaaaaattcaagtattaaagaatctgaagaggaactatattgtgcctattctttggcttaatgagactgggaccattggtgatgagaaggcaaacatgttcagaagtcaagtaactggaaaaataaacctccttggcctgatagaaatgatcttactcagtgttggtgtggtgatgtttgttgcttttatgatttcatattgtgcatgcagatcgaaaacaataaaataagtaagtatgtaccaaaaaatattgcttcaataatattagcttatatattacttgttttcactttatcaaagagaagttacatattaggccatatatatttctagacatgtctagccactgatcatttttaaatataggtaaataaacctataaatattatcacgcagatcactaaagtatatctttaattctgggagaaatgagataaaagatgtacttgtgaccattgtaacaatagcacaaataaagcacttgtgccaaagttgtcca

SEQ ID NO: 318363 - DNA, 2372 bp, Homo sapiens
aattcctctggcaacaaaccacacactgggatctgacactgtagagtgctttctcttctctttttttgggggggggagggggtgtggttgcatatttaaactctcacgcatttatgtactgaggactgcagtgtaggactttcctgcagaataccatttgatcctattaagaattgtccaaatgttggagcatttgattgaaaaatccttcttagccattttaaagatagctttccaatgattagacgaattgattctttctgtgactcatcagttcctttcctgtaaaattcatgtcttgctgttgatttgtgaataagaaccagagcttgtagaaaccactttaatcatatccaggagtttgcaagaaacaggtgcttaacactaattcacctcctgaacaagaaaaatgggctgtgaccggaactgtgggctcatcgctggggctgtcattggtgctgtcctggctgtgtttggaggtattctaatgccagttggagacctgcttatccagaagacaattaaaaagcaagttgtcctcgaagaaggtacaattgcttttaaaaattgggttaaaacaggcacagaagtttacagacagttttggatctttgatgtgcaaaatccacaggaagtgatgatgaacagcagcaacattcaagttaagcaaagaggtccttatacgtacagagttcgttttctagccaaggaaaatgtaacccaggacgctgaggacaacacagtctctttcctgcagcccaatggtgccatcttcgaaccttcactatcagttggaacagaggctgacaacttcacagttctcaatctggctgtggcagctgcatcccatatctatcaaaatcaatttgttcaaatgatcctcaattcacttattaacaagtcaaaatcttctatgttccaagtcagaactttgagagaactgttatggggctatagggatccatttttgagtttggttccgtaccctgttactaccacagttggtctgttttatccttacaacaatactgcagatggagtttataaagttttcaatggaaaagataacataagtaaagttgccataatcgacacatataaaggtaaaaggaatctgtcctattgggaaagtcactgcgacatgattaatggtacagatgcagcctcatttccaccttttgttgagaaaagccaggtattgcagttcttttcttctgatatttgcaggtcaatctatgctgtatttgaatccgacgttaatctgaaaggaatccctgtgtatagatttgttcttccatccaaggcctttgcctctccagttgaaaacccagacaactattgtttctgcacagaaaaaattatctcaaaaaattgtacatcatatggtgtgctagacatcagcaaatgcaaagaagggagacctgtgtacatttcacttcctcattttctgtatgcaagtcctgatgtttcagaacctattgatggattaaacccaaatgaagaagaacataggacatacttggatattgaacctataactggattcactttacaatttgcaaaacggctgcaggtcaacctattggtcaagccatcagaaaaaattcaagtattaaagaatctgaagaggaactatattgtgcctattctttggcttaatgagactgggaccattggtgatgagaaggcaaacatgttcagaagtcaagtaactggaaaaataaacctccttggcctgatagaaatgatcttactcagtgttggtgtggtgatgtttgttgcttttatgatttcatattgtgcatgcagatcgaaaacaataaaataaacctggctcaagcacaaaccaatttgtgttgttctgattcaataattggtttctgggtggccaattcagaagaagagtgtacatgctcaacagtctccaggaccatcagtatactgcatttcatgtgcaccaaatattttgaaagacatttataaataattggcttatgactcatatttctctatgaataccttcatacagcaggtataactcttttctttatgggcttaaatattttgtcactgatcctgcaaatggacatcattttagcacactagcggtttatattttaaggaccttcattctctgttctgcacctcttctggaaattgagtaaattttgcttttttttttttactcagttgcaacttacgcttggcatcttcagaatgcttttctagcattaagagatgtaaatgataaaggaattattgtatgaaatattacaaagcgtagactatgcattgttattcattataatattttttgctgtcataatcgcctcataaagacaggtttcaaccattaaaatatgttcttcctt

SEQ ID NO: 318364 - DNA, 2324 bp, Homo sapiens
ggggatgcaactaagttgctgagacaagggaagagagatgaggaaccagagcttgtagaaaccactttaatcatatccaggagtttgcaagaaacaggtgcttaacactaattcacctcctgaacaagaaaaatgggctgtgaccggaactgtgggctcatcgctggggctgtcattggtgctgtcctggctgtgtttggaggtattctaatgccagttggagacctgcttatccagaagacaattaaaaagcaagttgtcctcgaagaaggtacaattgcttttaaaaattgggttaaaacaggcacagaagtttacagacagttttggatctttgatgtgcaaaatccacaggaagtgatgatgaacagcagcaacattcaagttaagcaaagaggtccttatacgtacagagttcgttttctagccaaggaaaatgtaacccaggacgctgaggacaacacagtctctttcctgcagcccaatggtgccatcttcgaaccttcactatcagttggaacagaggctgacaacttcacagttctcaatctggctgtggcagctgcatcccatatctatcaaaatcaatttgttcaaatgatcctcaattcacttattaacaagtcaaaatcttctatgttccaagtcagaactttgagagaactgttatggggctatagggatccatttttgagtttggttccgtaccctgttactaccacagttggtctgttttatccttacaacaatactgcagatggagtttataaagttttcaatggaaaagataacataagtaaagttgccataatcgacacatataaaggtaaaaggaatctgtcctattgggaaagtcactgcgacatgattaatggtacagatgcagcctcatttccaccttttgttgagaaaagccaggtattgcagttcttttcttctgatatttgcaggtcaatctatgctgtatttgaatccgacgttaatctgaaaggaatccctgtgtatagatttgttcttccatccaaggcctttgcctctccagttgaaaacccagacaactattgtttctgcacagaaaaaattatctcaaaaaattgtacatcatatggtgtgctagacatcagcaaatgcaaagaagggagacctgtgtacatttcacttcctcattttctgtatgcaagtcctgatgtttcagaacctattgatggattaaacccaaatgaagaagaacataggacatacttggatattgaacctataactggattcactttacaatttgcaaaacggctgcaggtcaacctattggtcaagccatcagaaaaaattcaagtattaaagaatctgaagaggaactatattgtgcctattctttggcttaatgagactgggaccattggtgatgagaaggcaaacatgttcagaagtcaagtaactggaaaaataaacctccttggcctgatagaaatgatcttactcagtgttggtgtggtgatgtttgttgcttttatgatttcatattgtgcatgcagatcgaaaacaataaaataagtaagtatgtaccaaaaaatattgcttcaataatattagcttatatattacttgttttcactttatcaaagagaagttacatattaggccatatatatttctagacatgtctagccactgatcatttttaaatataggtaaataaacctataaatattatcacgcagatcactaaagtatatctttaattctgggagaaatgagataaaagatgtacttgtgaccattgtaacaatagcacaaataaagcacttgtgccaaagttgtccaaaaaagactggttcatttctcaattatatagctagttatatattatctgatacttaaaaataattgactaggaaatggtttcataagaccaggattgctgcatgtagacatgctggccgtgcattttccaaatccagaaaagtcctgaacaaaaatttgaatataatagtatcaggaaataggggaaaatagtgttcaacatagtagaaccaagtactcagagtggtgtacaagagtttaggcctctatgctttagatattagtgtccatgcactcttaaagatgaatgaatgcctgacctttcctaaaggaaaacctttttttagttatcacaggtaacattggtgttgcctgtgggggagaattttttactttctccctatttttcttcagcccacctcaaggcaatgtaaataaaagcagtatgtgtgttataataacttatttagttgtttactgtgtgccagtaccatgctaaagaaagattctttatctcacatgat

SEQ ID NO: 318365 - DNA, 1494 bp, Homo sapiens
atatactaaaattggaacgatacagagaagattagcatggcccctgcgcaaggatgacacgcaaattcgtgaagcgttccatattttattacaggaagatgcttaagaaacaagtacaacatttgtttcagtatgtctttaaatgaaagacttttaagtatgtaagcaactatataataaaaggtttccaaacgcagcctgtaagaaatcaggcaaattttactataagcaataaaccattccgagctttccagacagtgtaccagtagctgtaccagtgggcaataacctttaaccaaacaaaaacaaacaaacaaacaaacaaaagcactttgcaatttgttgctgcaaaatggggagaaaaaaagagtatataaacttgatggaatcacaactgtcaatataatttaagggaaaataaagtcgataaggttgatggtgtctattgtttggaaagtcgaattcggctatttgcttggggctctagagaccacaccactgaataaacaaaactctgcagagtctagctatccgccaacagggggtgccgtccaaattcatggcaaataaagggcatttggtgctcaccattcacaacaggcgggcatttatgtggatgaagtacaatttcttcagcaagctcagcaaaaactcttaaggggcaaatatgaactctgcattttaagaaaaatagaaaacggaaacacaaaatcctaaaaagtatatgaaggctctgcattagcacactggcatcaaaccacacatccacagcacatcctaattctatgggaaacaatccttgcttatcggaggtgcatatctaaattcaatagcttaccaatatattcttgggagtaggccaaaaggaaacagaaaacccacattaaaaaaagaagtttcttttcctaaacattttcctgaagctgaaattgaagtggagaggaagtcagttgtcctcgtcgaaatcgtagtcctcctcatcctccccaacctgggacaccggggtcttcaccctggagatgctgtactgagacctgttggagcttgtggccagcatttcatccgcaccattggtcaggtcactggcagagagcctcgtgccgttagacgtggaacctgccgttgtgatgaacacgcctgcaacaattgtctgcgccatttctgtcacgtgtggctccagcgcctttgggaccagacttatggctttttttttttttaagttctgggatacatgtgctgaatgtgcaggattgttacataggtatacatgtgccatggtgctttgctgcacctatcaaaccatcatctaggttttaagccccgtatgccttaatgcattagatatttgagaagaccactttaagtgtatcgttaaataaatagagcttaacttggaatgtcgtcttcttgtggctggcactgaggcaaagaaatgtaatcatctaggaattagacgaattgcattttgagttttggcaggatctggcagtaatt

SEQ ID NO: 318366 - DNA, 369 bp, Homo sapiens
gtattaagctcaatattagcattaatccatttatttgttaaaatctaatattgtattcttgtcttaaacagtgactttgtttttgtaggctgcatcccatatctatcaaaatcaatttgttcaaatgatcctcaattcacttattaacaagtcaaaatcttctatgttccaagtcagaactttgagagaactgttatggggctatagggatccatttttgagtttggttccgtaccctgttactaccacagttggtctgttttatcctgtaagtaccaaatatgaatggcaatattattacattttaatttaattaattcaatggcattggcaaggcataattttataatttagctcattagctatgct

SEQ ID NO: 318367 - DNA, 821 bp, Homo sapiens
agatgtcaggataaccttaaggatagatgaagggttgagagcctgtgcctcatttctgagttctcagctgctatgccgtggaaatcctgtttactttctgcatctgctcctgcaagactctggagccagtcttgaggtcctacatctccgaaagcaagctcttctagaagttggtgagcagaatgctttttgtttagaagtgtggctataaatgtctttgtagttgatgcactctcatctagtaagtaactattatttttgggctctctagaaaggtaattattatctgatataatagtttagtctgtgatgcttcttttaacatatttgtaagttttaaccaaatggttaaagaaatttgctttttaacccttaaacctcacatatccacaagtctctaaattccataggatgctatggatttctagttgcctagttcatgtcttttacttagaaaacgtcagaaaacccaaacttctcgtgacttcaaaaagtgtaattgtacctgaaacttcttttccttcagatttcttatttatgttttctgataggtttttaagattaatcttttcagaaggatgctctaaaaatctggccaatttgattatcctcttccaacttggaaaaaatatgtatttaaaatgagactagaatttgaatgaccttctttcatggaactctgaaaatgttttttggcttgctgtcacaactgacaaatatatttaagaaataacctaaaagaccaatcttaacaatttgactcctagacagaagaaaacaaaaatctttttatacataaaacttactaatcattagtgatc

SEQ ID NO: 318368 - DNA, 215 bp, Homo sapiens
  misc_feature (26)..(26): n is a, c, g, or t
cccatggtcccagtctcattaagccnaagaataggcacaatatagttcctcttcagattctttggcttaatgagactgggaccattggtgatgagaaggcaaacatgttcagaagtcaagtaactggaaaaataaacctccttggcctgatagaaatgatcttactcagtgttggtgtggtgatagtgtgcttccggggacctctagagcgccac

SEQ ID NO: 318369 - DNA, 4663 bp, Homo sapiens
aattcctctggcaacaaaccacacactgggatctgacactgtagagtgctttctcttctctttttttgggggggggagggggtgtggttgcatatttaaactctcacgcatttatgtactgaggactgcagtgtaggactttcctgcagaataccatttgatcctattaagaattgtccaaatgttggagcatttgattgaaaaatccttcttagccattttaaagatagctttccaatgattagacgaattgattctttctgtgactcatcagttcctttcctgtaaaattcatgtcttgctgttgatttgtgaataagaaccagagcttgtagaaaccactttaatcatatccaggagtttgcaagaaacaggtgcttaacactaattcacctcctgaacaagaaaaatgggctgtgaccggaactgtgggctcatcgctggggctgtcattggtgctgtcctggctgtgtttggaggtattctaatgccagttggagacctgcttatccagaagacaattaaaaagcaagttgtcctcgaagaaggtacaattgcttttaaaaattgggttaaaacaggcacagaagtttacagacagttttggatctttgatgtgcaaaatccacaggaagtgatgatgaacagcagcaacattcaagttaagcaaagaggtccttatacgtacagagttcgttttctagccaaggaaaatgtaacccaggacgctgaggacaacacagtctctttcctgcagcccaatggtgccatcttcgaaccttcactatcagttggaacagaggctgacaacttcacagttctcaatctggctgtggcagctgcatcccatatctatcaaaatcaatttgttcaaatgatcctcaattcacttattaacaagtcaaaatcttctatgttccaagtcagaactttgagagaactgttatggggctatagggatccatttttgagtttggttccgtaccctgttactaccacagttggtctgttttatccttacaacaatactgcagatggagtttataaagttttcaatggaaaagataacataagtaaagttgccataatcgacacatataaaggtaaaaggaatctgtcctattgggaaagtcactgcgacatgattaatggtacagatgcagcctcatttccaccttttgttgagaaaagccaggtattgcagttcttttcttctgatatttgcaggtcaatctatgctgtatttgaatccgacgttaatctgaaaggaatccctgtgtatagatttgttcttccatccaaggcctttgcctctccagttgaaaacccagacaactattgtttctgcacagaaaaaattatctcaaaaaattgtacatcatatggtgtgctagacatcagcaaatgcaaagaagggagacctgtgtacatttcacttcctcattttctgtatgcaagtcctgatgtttcagaacctattgatggattaaacccaaatgaagaagaacataggacatacttggatattgaacctataactggattcactttacaatttgcaaaacggctgcaggtcaacctattggtcaagccatcagaaaaaattcaagtattaaagaatctgaagaggaactatattgtgcctattctttggcttaatgagactgggaccattggtgatgagaaggcaaacatgttcagaagtcaagtaactggaaaaataaacctccttggcctgatagaaatgatcttactcagtgttggtgtggtgatgtttgttgcttttatgatttcatattgtgcatgcagatcgaaaacaataaaataaacctggctcaagcacaaaccaatttgtgttgttctgattcaataattggtttctgggtggccaattcagaagaagagtgtacatgctcaacaaatcctaggccctgcattcctgtcatcctcatccgggggaaacaccatcatcccagtagctgccctattcaactgcaacagtctccaggaccatcagtatactgcatttcatgtgcaccaaatattttgaaagacatttataaataattggcttatgactcatatttctctatgaataccttcatacagcaggtataactcttttctttatgggcttaaatattttgtcactgatcctgcaaatggacatcattttagcacactagcggtttatattttaaggaccttcattctctgttctgcacctcttctggaaattgagtaaattttgcttttttttttttactcagttgcaacttacgcttggcatcttcagaatgcttttctagcattaagagatgtaaatgataaaggaattattgtatgaaatattacaaagcgtagactatgcattgttattcattataatattttttgctgtcataatcgcctcataaagacaggtttcaaccattaaaatatgttcttccttaaattcctgtgctttttctagttcctcttgtgtcataaaatgtttatcctaattttctctctgaagtatattttatctgaatccacatttctttataaatccatagtccttgctgaaatatgctttctaaatttctaccactttgttctaggctaattttttaagctaattggatgaagaacaaaaagacatttggtttcatcctttacagcagtaggacaattgcaaaggtttttcctttttcataaggagacacattaataggtaactctgtttcttgagcaggggttcacttattctgagagcattagttctcctaaaaagctccagcatagaaagggaagataaaccaaattctagcttgtgttttacccacagaaggatacaggacaaaggaatagtaactggcctgtttggatactaaaatcgaaaataacttttagcctcctccttatgatagccgccagagtaaatgttgagcattactacagaaaagccacaaaccaagaatctacctgtttggaaagatcttttgcatctctgaaggtgcttaaagcatacttagtgcctttccttttaactgggaagataaaagaagtatctgtccaagatattaatatgtaagataacattgtagacatgttcttctgataatacaaggtttattctatttgcattaggatatttgtggacatgtccatctaatataaaggaaagttttttaatcattgaggcatgtagggctgagttatataatgtagaaacttctaaagataattggatgagaatatacatattgacctgtatattatgactaatcatgactcagatcttaatacagggatgatctcatagcatttagatatcagatcattcctcagtgtttcatttctcaaattctgtaaaaggaatataagaggaaagacaattcatatacaaagacaacgagattaaaaatatgcagtaggaaaaataattacttaaggggagattttttttacatgaaatctgggcttggatgtgtgtgtgtgtgtgtgtgtgtgtgtgtgcacatatgcactgtggtgggagtggggcaacttggggaatatgttacatgtgtgactttgttttgccctggcgaagttaatgttgttcagaaagggtaaatgtttggacacttgcaattgctcatggatgaatttatatgttttagtcatagaaaaattgtaccctttgatagaagcacattttctttccaaagctggttattaaccacagaattatagcaggtattcataacttaagtttgaaaatcaatagcgtctgcaaatggattaacagattagagaatcaacagcatcggaaaataggttaatgcatattgcttctaacaagtgcatgaagaaatagaagaagctatgtagctttcagttctgacagaaaagggtgaaggagggtatcatttcaagaaaaaaaatagctatcacgcaatggttatctctgaaaatatttgtattaagatgtgtatacatggccaggcatggtggctcatgcctgtaatcccagcactttgggaggcaggtggatcacgaggtcaggagatcaagaccatcctggccaacatggtgaaacctcatctctactaaaaatacaaaaatgagcggggtgtggtggcccatgcctgtagtcccagctgctcgggagactgaatctcttgagcctgggaagcagaggttgcagtgaactgagatcgcgtcactgcactccagcctggtgacagagcgagattccatctcaaaaaaaaaaaacagtatgcacgtacaaatttcttaacctgttatcaatgtctgagctacataattatctttctagttggagtttgttttaggtgtgtaccaactgacatttcagtttttctgtttgaagtccaatgtattagtgactctgtggctgctctcttcacctgccccttgtggcctgtctacaattctaaatggattttgaactcaatgtcgtcgcttctggtttcctgcatataccaatagcattacctatgactttttttttcctgagctattttcactgagctgagctaatgaactaaaactgagttatgtttaatatttgtatcaaatacataaaaggaatactgctttttccttttgtggctcaaaggtagctgcattttaaaatatttgtgaaaataaaaacttttgttattagaaaaat

SEQ ID NO: 318370 - DNA, 4678 bp, Homo sapiens
ggggatgcaactaagttgctgagacaagggaagagagatgagggtgagagttctccttagataagatttcaatatgttaatcatgtgtagaaagaaaattaaaaaggaggaatatgaagaaattcagatatgacattattagttctgccactggtaggcattagaagcaagaaaagggagacggaccgaggaagccactttggtgaaacaaaaagaaaagcatttgtttatttagaacgggcaaaatgatacgtttcagtgggtgttttctttgtactttgatctttttgtactgatatttaagcttctgttttatgatctctttctaatgatagaaccagagcttgtagaaaccactttaatcatatccaggagtttgcaagaaacaggtgcttaacactaattcacctcctgaacaagaaaaatgggctgtgaccggaactgtgggctcatcgctggggctgtcattggtgctgtcctggctgtgtttggaggtattctaatgccagttggagacctgcttatccagaagacaattaaaaagcaagttgtcctcgaagaaggtacaattgcttttaaaaattgggttaaaacaggcacagaagtttacagacagttttggatctttgatgtgcaaaatccacaggaagtgatgatgaacagcagcaacattcaagttaagcaaagaggtccttatacgtacagagttcgttttctagccaaggaaaatgtaacccaggacgctgaggacaacacagtctctttcctgcagcccaatggtgccatcttcgaaccttcactatcagttggaacagaggctgacaacttcacagttctcaatctggctgtggcagctgcatcccatatctatcaaaatcaatttgttcaaatgatcctcaattcacttattaacaagtcaaaatcttctatgttccaagtcagaactttgagagaactgttatggggctatagggatccatttttgagtttggttccgtaccctgttactaccacagttggtctgttttatccttacaacaatactgcagatggagtttataaagttttcaatggaaaagataacataagtaaagttgccataatcgacacatataaaggtaaaaggaatctgtcctattgggaaagtcactgcgacatgattaatggtacagatgcagcctcatttccaccttttgttgagaaaagccaggtattgcagttcttttcttctgatatttgcaggtcaatctatgctgtatttgaatccgacgttaatctgaaaggaatccctgtgtatagatttgttcttccatccaaggcctttgcctctccagttgaaaacccagacaactattgtttctgcacagaaaaaattatctcaaaaaattgtacatcatatggtgtgctagacatcagcaaatgcaaagaagggagacctgtgtacatttcacttcctcattttctgtatgcaagtcctgatgtttcagaacctattgatggattaaacccaaatgaagaagaacataggacatacttggatattgaacctataactggattcactttacaatttgcaaaacggctgcaggtcaacctattggtcaagccatcagaaaaaattcaagtattaaagaatctgaagaggaactatattgtgcctattctttggcttaatgagactgggaccattggtgatgagaaggcaaacatgttcagaagtcaagtaactggaaaaataaacctccttggcctgatagaaatgatcttactcagtgttggtgtggtgatgtttgttgcttttatgatttcatattgtgcatgcagatcgaaaacaataaaataaacctggctcaagcacaaaccaatttgtgttgttctgattcaataattggtttctgggtggccaattcagaagaagagtgtacatgctcaacaaatcctaggccctgcattcctgtcatcctcatccgggggaaacaccatcatcccagtagctgccctattcaactgcaacagtctccaggaccatcagtatactgcatttcatgtgcaccaaatattttgaaagacatttataaataattggcttatgactcatatttctctatgaataccttcatacagcaggtataactcttttctttatgggcttaaatattttgtcactgatcctgcaaatggacatcattttagcacactagcggtttatattttaaggaccttcattctctgttctgcacctcttctggaaattgagtaaattttgcttttttttttttactcagttgcaacttacgcttggcatcttcagaatgcttttctagcattaagagatgtaaatgataaaggaattattgtatgaaatattacaaagcgtagactatgcattgttattcattataatattttttgctgtcataatcgcctcataaagacaggtttcaaccattaaaatatgttcttccttaaattcctgtgctttttctagttcctcttgtgtcataaaatgtttatcctaattttctctctgaagtatattttatctgaatccacatttctttataaatccatagtccttgctgaaatatgctttctaaatttctaccactttgttctaggctaattttttaagctaattggatgaagaacaaaaagacatttggtttcatcctttacagcagtaggacaattgcaaaggtttttcctttttcataaggagacacattaataggtaactctgtttcttgagcaggggttcacttattctgagagcattagttctcctaaaaagctccagcatagaaagggaagataaaccaaattctagcttgtgttttacccacagaaggatacaggacaaaggaatagtaactggcctgtttggatactaaaatcgaaaataacttttagcctcctccttatgatagccgccagagtaaatgttgagcattactacagaaaagccacaaaccaagaatctacctgtttggaaagatcttttgcatctctgaaggtgcttaaagcatacttagtgcctttccttttaactgggaagataaaagaagtatctgtccaagatattaatatgtaagataacattgtagacatgttcttctgataatacaaggtttattctatttgcattaggatatttgtggacatgtccatctaatataaaggaaagttttttaatcattgaggcatgtagggctgagttatataatgtagaaacttctaaagataattggatgagaatatacatattgacctgtatattatgactaatcatgactcagatcttaatacagggatgatctcatagcatttagatatcagatcattcctcagtgtttcatttctcaaattctgtaaaaggaatataagaggaaagacaattcatatacaaagacaacgagattaaaaatatgcagtaggaaaaataattacttaaggggagattttttttacatgaaatctgggcttggatgtgtgtgtgtgtgtgtgtgtgtgtgtgtgcacatatgcactgtggtgggagtggggcaacttggggaatatgttacatgtgtgactttgttttgccctggcgaagttaatgttgttcagaaagggtaaatgtttggacacttgcaattgctcatggatgaatttatatgttttagtcatagaaaaattgtaccctttgatagaagcacattttctttccaaagctggttattaaccacagaattatagcaggtattcataacttaagtttgaaaatcaatagcgtctgcaaatggattaacagattagagaatcaacagcatcggaaaataggttaatgcatattgcttctaacaagtgcatgaagaaatagaagaagctatgtagctttcagttctgacagaaaagggtgaaggagggtatcatttcaagaaaaaaaatagctatcacgcaatggttatctctgaaaatatttgtattaagatgtgtatacatggccaggcatggtggctcatgcctgtaatcccagcactttgggaggcaggtggatcacgaggtcaggagatcaagaccatcctggccaacatggtgaaacctcatctctactaaaaatacaaaaatgagcggggtgtggtggcccatgcctgtagtcccagctgctcgggagactgaatctcttgagcctgggaagcagaggttgcagtgaactgagatcgcgtcactgcactccagcctggtgacagagcgagattccatctcaaaaaaaaaaaacagtatgcacgtacaaatttcttaacctgttatcaatgtctgagctacataattatctttctagttggagtttgttttaggtgtgtaccaactgacatttcagtttttctgtttgaagtccaatgtattagtgactctgtggctgctctcttcacctgccccttgtggcctgtctacaattctaaatggattttgaactcaatgtcgtcgcttctggtttcctgcatataccaatagcattacctatgactttttttttcctgagctattttcactgagctgagctaatgaactaaaactgagttatgtttaatatttgtatcaaatacataaaaggaatactgctttttccttttgtggctcaaaggtagctgcattttaaaatatttgtgaaaataaaaacttttgttattagaaaaat

SEQ ID NO: 318371 - DNA, 4939 bp, Homo sapiens
aattcctctggcaacaaaccacacactgggatctgacactgtagagtgctttctcttctctttttttgggggggggagggggtgtggttgcatatttaaactctcacgcatttatgtactgaggactgcagtgtaggactttcctgcagaataccatttgatcctattaagaattgtccaaatgttggagcatttgattgaaaaatccttcttagccattttaaagatagctttccaatgattagacgaattgattctttctgtgactcatcagttcctttcctgtaaaattcatgtcttgctgttgatttgtgaataagaaccagagcttgtagaaaccactttaatcatatccaggagtttgcaagaaacaggtgcttaacactaattcacctcctgaacaagaaaaatgggctgtgaccggaactgtgggctcatcgctggggctgtcattggtgctgtcctggctgtgtttggaggtattctaatgccagttggagacctgcttatccagaagacaattaaaaagcaagttgtcctcgaagaaggtacaattgcttttaaaaattgggttaaaacaggcacagaagtttacagacagttttggatctttgatgtgcaaaatccacaggaagtgatgatgaacagcagcaacattcaagttaagcaaagaggtccttatacgtacagagttcgttttctagccaaggaaaatgtaacccaggacgctgaggacaacacagtctctttcctgcagcccaatggtgccatcttcgaaccttcactatcagttggaacagaggctgacaacttcacagttctcaatctggctgtggcagctgcatcccatatctatcaaaatcaatttgttcaaatgatcctcaattcacttattaacaagtcaaaatcttctatgttccaagtcagaactttgagagaactgttatggggctatagggatccatttttgagtttggttccgtaccctgttactaccacagttggtctgttttatccttacaacaatactgcagatggagtttataaagttttcaatggaaaagataacataagtaaagttgccataatcgacacatataaaggtaaaaggaatctgtcctattgggaaagtcactgcgacatgattaatggtacagatgcagcctcatttccaccttttgttgagaaaagccaggtattgcagttcttttcttctgatatttgcaggtcaatctatgctgtatttgaatccgacgttaatctgaaaggaatccctgtgtatagatttgttcttccatccaaggcctttgcctctccagttgaaaacccagacaactattgtttctgcacagaaaaaattatctcaaaaaattgtacatcatatggtgtgctagacatcagcaaatgcaaagaagggagacctgtgtacatttcacttcctcattttctgtatgcaagtcctgatgtttcagaacctattgatggattaaacccaaatgaagaagaacataggacatacttggatattgaacctataactggattcactttacaatttgcaaaacggctgcaggtcaacctattggtcaagccatcagaaaaaattcaagtattaaagaatctgaagaggaactatattgtgcctattctttggcttaatgagactgggaccattggtgatgagaaggcaaacatgttcagaagtcaagtaactggaaaaataaacctccttggcctgatagaaatgatcttactcagtgttggtgtggtgatgtttgttgcttttatgatttcatattgtgcatgcagatcgaaaacaataaaataagtagtaaatgattcttcacatttgtgcgccagctacatcatgacccttggtaataccgaccaacaggatgaaaattggatatgctttacttttacaaagcacaccttatcttttagttgaagaaatggtggcactatttctttttttgcactaagcaactgcacatttcaaaaggattattgagatgttatgaaaatctctaccttgcacaaaaaaaaacccagcagcttttaaaattcatcatttccacaactgaattgatttccgtttctacagacctggctcaagcacaaaccaatttgtgttgttctgattcaataattggtttctgggtggccaattcagaagaagagtgtacatgctcaacaaatcctaggccctgcattcctgtcatcctcatccgggggaaacaccatcatcccagtagctgccctattcaactgcaacagtctccaggaccatcagtatactgcatttcatgtgcaccaaatattttgaaagacatttataaataattggcttatgactcatatttctctatgaataccttcatacagcaggtataactcttttctttatgggcttaaatattttgtcactgatcctgcaaatggacatcattttagcacactagcggtttatattttaaggaccttcattctctgttctgcacctcttctggaaattgagtaaattttgcttttttttttttactcagttgcaacttacgcttggcatcttcagaatgcttttctagcattaagagatgtaaatgataaaggaattattgtatgaaatattacaaagcgtagactatgcattgttattcattataatattttttgctgtcataatcgcctcataaagacaggtttcaaccattaaaatatgttcttccttaaattcctgtgctttttctagttcctcttgtgtcataaaatgtttatcctaattttctctctgaagtatattttatctgaatccacatttctttataaatccatagtccttgctgaaatatgctttctaaatttctaccactttgttctaggctaattttttaagctaattggatgaagaacaaaaagacatttggtttcatcctttacagcagtaggacaattgcaaaggtttttcctttttcataaggagacacattaataggtaactctgtttcttgagcaggggttcacttattctgagagcattagttctcctaaaaagctccagcatagaaagggaagataaaccaaattctagcttgtgttttacccacagaaggatacaggacaaaggaatagtaactggcctgtttggatactaaaatcgaaaataacttttagcctcctccttatgatagccgccagagtaaatgttgagcattactacagaaaagccacaaaccaagaatctacctgtttggaaagatcttttgcatctctgaaggtgcttaaagcatacttagtgcctttccttttaactgggaagataaaagaagtatctgtccaagatattaatatgtaagataacattgtagacatgttcttctgataatacaaggtttattctatttgcattaggatatttgtggacatgtccatctaatataaaggaaagttttttaatcattgaggcatgtagggctgagttatataatgtagaaacttctaaagataattggatgagaatatacatattgacctgtatattatgactaatcatgactcagatcttaatacagggatgatctcatagcatttagatatcagatcattcctcagtgtttcatttctcaaattctgtaaaaggaatataagaggaaagacaattcatatacaaagacaacgagattaaaaatatgcagtaggaaaaataattacttaaggggagattttttttacatgaaatctgggcttggatgtgtgtgtgtgtgtgtgtgtgtgtgtgtgcacatatgcactgtggtgggagtggggcaacttggggaatatgttacatgtgtgactttgttttgccctggcgaagttaatgttgttcagaaagggtaaatgtttggacacttgcaattgctcatggatgaatttatatgttttagtcatagaaaaattgtaccctttgatagaagcacattttctttccaaagctggttattaaccacagaattatagcaggtattcataacttaagtttgaaaatcaatagcgtctgcaaatggattaacagattagagaatcaacagcatcggaaaataggttaatgcatattgcttctaacaagtgcatgaagaaatagaagaagctatgtagctttcagttctgacagaaaagggtgaaggagggtatcatttcaagaaaaaaaatagctatcacgcaatggttatctctgaaaatatttgtattaagatgtgtatacatggccaggcatggtggctcatgcctgtaatcccagcactttgggaggcaggtggatcacgaggtcaggagatcaagaccatcctggccaacatggtgaaacctcatctctactaaaaatacaaaaatgagcggggtgtggtggcccatgcctgtagtcccagctgctcgggagactgaatctcttgagcctgggaagcagaggttgcagtgaactgagatcgcgtcactgcactccagcctggtgacagagcgagattccatctcaaaaaaaaaaaacagtatgcacgtacaaatttcttaacctgttatcaatgtctgagctacataattatctttctagttggagtttgttttaggtgtgtaccaactgacatttcagtttttctgtttgaagtccaatgtattagtgactctgtggctgctctcttcacctgccccttgtggcctgtctacaattctaaatggattttgaactcaatgtcgtcgcttctggtttcctgcatataccaatagcattacctatgactttttttttcctgagctattttcactgagctgagctaatgaactaaaactgagttatgtttaatatttgtatcaaatacataaaaggaatactgctttttccttttgtggctcaaaggtagctgcattttaaaatatttgtgaaaataaaaacttttgttattagaaaaat

SEQ ID NO: 318372 - DNA, 4610 bp, Homo sapiens
agatgtcaggataaccttaaggatagatgaagggttgagagcctgtgcctcatttctgagttctcagctgctatgccgtggaaatcctgtttactttctgcatctgctcctgcaagactctggagccagtcttgaggtcctacatctccgaaagcaagctcttctagaagttgatagctttccaatgattagacgaattgattctttctgtgactcatcagttcctttcctgtaaaattcatgtcttgctgttgatttgtgaataagaaccagagcttgtagaaaccactttaatcatatccaggagtttgcaagaaacaggtgcttaacactaattcacctcctgaacaagaaaaatgggctgtgaccggaactgtgggctcatcgctggggctgtcattggtgctgtcctggctgtgtttggaggtattctaatgccagttggagacctgcttatccagaagacaattaaaaagcaagttgtcctcgaagaaggtacaattgcttttaaaaattgggttaaaacaggcacagaagtttacagacagttttggatctttgatgtgcaaaatccacaggaagtgatgatgaacagcagcaacattcaagttaagcaaagaggtccttatacgtacagagttcgttttctagccaaggaaaatgtaacccaggacgctgaggacaacacagtctctttcctgcagcccaatggtgccatcttcgaaccttcactatcagttggaacagaggctgacaacttcacagttctcaatctggctgtggcagctgcatcccatatctatcaaaatcaatttgttcaaatgatcctcaattcacttattaacaagtcaaaatcttctatgttccaagtcagaactttgagagaactgttatggggctatagggatccatttttgagtttggttccgtaccctgttactaccacagttggtctgttttatccttacaacaatactgcagatggagtttataaagttttcaatggaaaagataacataagtaaagttgccataatcgacacatataaaggtaaaaggaatctgtcctattgggaaagtcactgcgacatgattaatggtacagatgcagcctcatttccaccttttgttgagaaaagccaggtattgcagttcttttcttctgatatttgcaggtcaatctatgctgtatttgaatccgacgttaatctgaaaggaatccctgtgtatagatttgttcttccatccaaggcctttgcctctccagttgaaaacccagacaactattgtttctgcacagaaaaaattatctcaaaaaattgtacatcatatggtgtgctagacatcagcaaatgcaaagaagggagacctgtgtacatttcacttcctcattttctgtatgcaagtcctgatgtttcagaacctattgatggattaaacccaaatgaagaagaacataggacatacttggatattgaacctataactggattcactttacaatttgcaaaacggctgcaggtcaacctattggtcaagccatcagaaaaaattcaagtattaaagaatctgaagaggaactatattgtgcctattctttggcttaatgagactgggaccattggtgatgagaaggcaaacatgttcagaagtcaagtaactggaaaaataaacctccttggcctgatagaaatgatcttactcagtgttggtgtggtgatgtttgttgcttttatgatttcatattgtgcatgcagatcgaaaacaataaaataaacctggctcaagcacaaaccaatttgtgttgttctgattcaataattggtttctgggtggccaattcagaagaagagtgtacatgctcaacaaatcctaggccctgcattcctgtcatcctcatccgggggaaacaccatcatcccagtagctgccctattcaactgcaacagtctccaggaccatcagtatactgcatttcatgtgcaccaaatattttgaaagacatttataaataattggcttatgactcatatttctctatgaataccttcatacagcaggtataactcttttctttatgggcttaaatattttgtcactgatcctgcaaatggacatcattttagcacactagcggtttatattttaaggaccttcattctctgttctgcacctcttctggaaattgagtaaattttgcttttttttttttactcagttgcaacttacgcttggcatcttcagaatgcttttctagcattaagagatgtaaatgataaaggaattattgtatgaaatattacaaagcgtagactatgcattgttattcattataatattttttgctgtcataatcgcctcataaagacaggtttcaaccattaaaatatgttcttccttaaattcctgtgctttttctagttcctcttgtgtcataaaatgtttatcctaattttctctctgaagtatattttatctgaatccacatttctttataaatccatagtccttgctgaaatatgctttctaaatttctaccactttgttctaggctaattttttaagctaattggatgaagaacaaaaagacatttggtttcatcctttacagcagtaggacaattgcaaaggtttttcctttttcataaggagacacattaataggtaactctgtttcttgagcaggggttcacttattctgagagcattagttctcctaaaaagctccagcatagaaagggaagataaaccaaattctagcttgtgttttacccacagaaggatacaggacaaaggaatagtaactggcctgtttggatactaaaatcgaaaataacttttagcctcctccttatgatagccgccagagtaaatgttgagcattactacagaaaagccacaaaccaagaatctacctgtttggaaagatcttttgcatctctgaaggtgcttaaagcatacttagtgcctttccttttaactgggaagataaaagaagtatctgtccaagatattaatatgtaagataacattgtagacatgttcttctgataatacaaggtttattctatttgcattaggatatttgtggacatgtccatctaatataaaggaaagttttttaatcattgaggcatgtagggctgagttatataatgtagaaacttctaaagataattggatgagaatatacatattgacctgtatattatgactaatcatgactcagatcttaatacagggatgatctcatagcatttagatatcagatcattcctcagtgtttcatttctcaaattctgtaaaaggaatataagaggaaagacaattcatatacaaagacaacgagattaaaaatatgcagtaggaaaaataattacttaaggggagattttttttacatgaaatctgggcttggatgtgtgtgtgtgtgtgtgtgtgtgtgtgtgcacatatgcactgtggtgggagtggggcaacttggggaatatgttacatgtgtgactttgttttgccctggcgaagttaatgttgttcagaaagggtaaatgtttggacacttgcaattgctcatggatgaatttatatgttttagtcatagaaaaattgtaccctttgatagaagcacattttctttccaaagctggttattaaccacagaattatagcaggtattcataacttaagtttgaaaatcaatagcgtctgcaaatggattaacagattagagaatcaacagcatcggaaaataggttaatgcatattgcttctaacaagtgcatgaagaaatagaagaagctatgtagctttcagttctgacagaaaagggtgaaggagggtatcatttcaagaaaaaaaatagctatcacgcaatggttatctctgaaaatatttgtattaagatgtgtatacatggccaggcatggtggctcatgcctgtaatcccagcactttgggaggcaggtggatcacgaggtcaggagatcaagaccatcctggccaacatggtgaaacctcatctctactaaaaatacaaaaatgagcggggtgtggtggcccatgcctgtagtcccagctgctcgggagactgaatctcttgagcctgggaagcagaggttgcagtgaactgagatcgcgtcactgcactccagcctggtgacagagcgagattccatctcaaaaaaaaaaaacagtatgcacgtacaaatttcttaacctgttatcaatgtctgagctacataattatctttctagttggagtttgttttaggtgtgtaccaactgacatttcagtttttctgtttgaagtccaatgtattagtgactctgtggctgctctcttcacctgccccttgtggcctgtctacaattctaaatggattttgaactcaatgtcgtcgcttctggtttcctgcatataccaatagcattacctatgactttttttttcctgagctattttcactgagctgagctaatgaactaaaactgagttatgtttaatatttgtatcaaatacataaaaggaatactgctttttccttttgtggctcaaaggtagctgcattttaaaatatttgtgaaaataaaaacttttgttattagaaaaat

SEQ ID NO: 318373 - DNA, 2601 bp, Homo sapiens
aattcctctggcaacaaaccacacactgggatctgacactgtagagtgctttctcttctctttttttgggggggggagggggtgtggttgcatatttaaactctcacgcatttatgtactgaggactgcagtgtaggactttcctgcagaataccatttgatcctattaagaattgtccaaatgttggagcatttgattgaaaaatccttcttagccattttaaagatagctttccaatgattagacgaattgattctttctgtgactcatcagttcctttcctgtaaaattcatgtcttgctgttgatttgtgaataagaaccagagcttgtagaaaccactttaatcatatccaggagtttgcaagaaacaggtgcttaacactaattcacctcctgaacaagaaaaatgggctgtgaccggaactgtgggctcatcgctggggctgtcattggtgctgtcctggctgtgtttggaggtattctaatgccagttggagacctgcttatccagaagacaattaaaaagcaagttgtcctcgaagaaggtacaattgcttttaaaaattgggttaaaacaggcacagaagtttacagacagttttggatctttgatgtgcaaaatccacaggaagtgatgatgaacagcagcaacattcaagttaagcaaagaggtccttatacgtacagagttcgttttctagccaaggaaaatgtaacccaggacgctgaggacaacacagtctctttcctgcagcccaatggtgccatcttcgaaccttcactatcagttggaacagaggctgacaacttcacagttctcaatctggctgtggcagctgcatcccatatctatcaaaatcaatttgttcaaatgatcctcaattcacttattaacaagtcaaaatcttctatgttccaagtcagaactttgagagaactgttatggggctatagggatccatttttgagtttggttccgtaccctgttactaccacagttggtctgttttatccttacaacaatactgcagatggagtttataaagttttcaatggaaaagataacataagtaaagttgccataatcgacacatataaaggtaaaaggaatctgtcctattgggaaagtcactgcgacatgattaatggtacagatgcagcctcatttccaccttttgttgagaaaagccaggtattgcagttcttttcttctgatatttgcaggtcaatctatgctgtatttgaatccgacgttaatctgaaaggaatccctgtgtatagatttgttcttccatccaaggcctttgcctctccagttgaaaacccagacaactattgtttctgcacagaaaaaattatctcaaaaaattgtacatcatatggtgtgctagacatcagcaaatgcaaagaagggagacctgtgtacatttcacttcctcattttctgtatgcaagtcctgatgtttcagaacctattgatggattaaacccaaatgaagaagaacataggacatacttggatattgaacctataactggattcactttacaatttgcaaaacggctgcaggtcaacctattggtcaagccatcagaaaaaattcaagtattaaagaatctgaagaggaactatattgtgcctattctttggcttaatgagactgggaccattggtgatgagaaggcaaacatgttcagaagtcaagtaactggaaaaataaacctccttggcctgatagaaatgatcttactcagtgttggtgtggtgatgtttgttgcttttatgatttcatattgtgcatgcagatcgaaaacaataaaataagtaagtatgtaccaaaaaatattgcttcaataatattagcttatatattacttgttttcactttatcaaagagaagttacatattaggccatatatatttctagacatgtctagccactgatcatttttaaatataggtaaataaacctataaatattatcacgcagatcactaaagtatatctttaattctgggagaaatgagataaaagatgtacttgtgaccattgtaacaatagcacaaataaagcacttgtgccaaagttgtccaaaaaagactggttcatttctcaattatatagctagttatatattatctgatacttaaaaataattgactaggaaatggtttcataagaccaggattgctgcatgtagacatgctggccgtgcattttccaaatccagaaaagtcctgaacaaaaatttgaatataatagtatcaggaaataggggaaaatagtgttcaacatagtagaaccaagtactcagagtggtgtacaagagtttaggcctctatgctttagatattagtgtccatgcactcttaaagatgaatgaatgcctgacctttcctaaaggaaaacctttttttagttatcacaggtaacattggtgttgcctgtgggggagaattttttactttctccctatttttcttcagcccacctcaaggcaatgtaaataaaagcagtatgtgtgttataataacttatttagttgtttactgtgtgccagtaccatgctaaagaaagattctttatctcacatgat

SEQ ID NO: 318374 - DNA, 4467 bp, Homo sapiens
ggttacaagcatgacttctattaaacctatatagctttccaatgattagacgaattgattctttctgtgactcatcagttcctttcctgtaaaattcatgtcttgctgttgatttgtgaataagaaccagagcttgtagaaaccactttaatcatatccaggagtttgcaagaaacaggtgcttaacactaattcacctcctgaacaagaaaaatgggctgtgaccggaactgtgggctcatcgctggggctgtcattggtgctgtcctggctgtgtttggaggtattctaatgccagttggagacctgcttatccagaagacaattaaaaagcaagttgtcctcgaagaaggtacaattgcttttaaaaattgggttaaaacaggcacagaagtttacagacagttttggatctttgatgtgcaaaatccacaggaagtgatgatgaacagcagcaacattcaagttaagcaaagaggtccttatacgtacagagttcgttttctagccaaggaaaatgtaacccaggacgctgaggacaacacagtctctttcctgcagcccaatggtgccatcttcgaaccttcactatcagttggaacagaggctgacaacttcacagttctcaatctggctgtggcagctgcatcccatatctatcaaaatcaatttgttcaaatgatcctcaattcacttattaacaagtcaaaatcttctatgttccaagtcagaactttgagagaactgttatggggctatagggatccatttttgagtttggttccgtaccctgttactaccacagttggtctgttttatccttacaacaatactgcagatggagtttataaagttttcaatggaaaagataacataagtaaagttgccataatcgacacatataaaggtaaaaggaatctgtcctattgggaaagtcactgcgacatgattaatggtacagatgcagcctcatttccaccttttgttgagaaaagccaggtattgcagttcttttcttctgatatttgcaggtcaatctatgctgtatttgaatccgacgttaatctgaaaggaatccctgtgtatagatttgttcttccatccaaggcctttgcctctccagttgaaaacccagacaactattgtttctgcacagaaaaaattatctcaaaaaattgtacatcatatggtgtgctagacatcagcaaatgcaaagaagggagacctgtgtacatttcacttcctcattttctgtatgcaagtcctgatgtttcagaacctattgatggattaaacccaaatgaagaagaacataggacatacttggatattgaacctataactggattcactttacaatttgcaaaacggctgcaggtcaacctattggtcaagccatcagaaaaaattcaagtattaaagaatctgaagaggaactatattgtgcctattctttggcttaatgagactgggaccattggtgatgagaaggcaaacatgttcagaagtcaagtaactggaaaaataaacctccttggcctgatagaaatgatcttactcagtgttggtgtggtgatgtttgttgcttttatgatttcatattgtgcatgcagatcgaaaacaataaaataaacctggctcaagcacaaaccaatttgtgttgttctgattcaataattggtttctgggtggccaattcagaagaagagtgtacatgctcaacaaatcctaggccctgcattcctgtcatcctcatccgggggaaacaccatcatcccagtagctgccctattcaactgcaacagtctccaggaccatcagtatactgcatttcatgtgcaccaaatattttgaaagacatttataaataattggcttatgactcatatttctctatgaataccttcatacagcaggtataactcttttctttatgggcttaaatattttgtcactgatcctgcaaatggacatcattttagcacactagcggtttatattttaaggaccttcattctctgttctgcacctcttctggaaattgagtaaattttgcttttttttttttactcagttgcaacttacgcttggcatcttcagaatgcttttctagcattaagagatgtaaatgataaaggaattattgtatgaaatattacaaagcgtagactatgcattgttattcattataatattttttgctgtcataatcgcctcataaagacaggtttcaaccattaaaatatgttcttccttaaattcctgtgctttttctagttcctcttgtgtcataaaatgtttatcctaattttctctctgaagtatattttatctgaatccacatttctttataaatccatagtccttgctgaaatatgctttctaaatttctaccactttgttctaggctaattttttaagctaattggatgaagaacaaaaagacatttggtttcatcctttacagcagtaggacaattgcaaaggtttttcctttttcataaggagacacattaataggtaactctgtttcttgagcaggggttcacttattctgagagcattagttctcctaaaaagctccagcatagaaagggaagataaaccaaattctagcttgtgttttacccacagaaggatacaggacaaaggaatagtaactggcctgtttggatactaaaatcgaaaataacttttagcctcctccttatgatagccgccagagtaaatgttgagcattactacagaaaagccacaaaccaagaatctacctgtttggaaagatcttttgcatctctgaaggtgcttaaagcatacttagtgcctttccttttaactgggaagataaaagaagtatctgtccaagatattaatatgtaagataacattgtagacatgttcttctgataatacaaggtttattctatttgcattaggatatttgtggacatgtccatctaatataaaggaaagttttttaatcattgaggcatgtagggctgagttatataatgtagaaacttctaaagataattggatgagaatatacatattgacctgtatattatgactaatcatgactcagatcttaatacagggatgatctcatagcatttagatatcagatcattcctcagtgtttcatttctcaaattctgtaaaaggaatataagaggaaagacaattcatatacaaagacaacgagattaaaaatatgcagtaggaaaaataattacttaaggggagattttttttacatgaaatctgggcttggatgtgtgtgtgtgtgtgtgtgtgtgtgtgtgcacatatgcactgtggtgggagtggggcaacttggggaatatgttacatgtgtgactttgttttgccctggcgaagttaatgttgttcagaaagggtaaatgtttggacacttgcaattgctcatggatgaatttatatgttttagtcatagaaaaattgtaccctttgatagaagcacattttctttccaaagctggttattaaccacagaattatagcaggtattcataacttaagtttgaaaatcaatagcgtctgcaaatggattaacagattagagaatcaacagcatcggaaaataggttaatgcatattgcttctaacaagtgcatgaagaaatagaagaagctatgtagctttcagttctgacagaaaagggtgaaggagggtatcatttcaagaaaaaaaatagctatcacgcaatggttatctctgaaaatatttgtattaagatgtgtatacatggccaggcatggtggctcatgcctgtaatcccagcactttgggaggcaggtggatcacgaggtcaggagatcaagaccatcctggccaacatggtgaaacctcatctctactaaaaatacaaaaatgagcggggtgtggtggcccatgcctgtagtcccagctgctcgggagactgaatctcttgagcctgggaagcagaggttgcagtgaactgagatcgcgtcactgcactccagcctggtgacagagcgagattccatctcaaaaaaaaaaaacagtatgcacgtacaaatttcttaacctgttatcaatgtctgagctacataattatctttctagttggagtttgttttaggtgtgtaccaactgacatttcagtttttctgtttgaagtccaatgtattagtgactctgtggctgctctcttcacctgccccttgtggcctgtctacaattctaaatggattttgaactcaatgtcgtcgcttctggtttcctgcatataccaatagcattacctatgactttttttttcctgagctattttcactgagctgagctaatgaactaaaactgagttatgtttaatatttgtatcaaatacataaaaggaatactgctttttccttttgtggctcaaaggtagctgcattttaaaatatttgtgaaaataaaaacttttgttattagaaaaat

SEQ ID NO: 318375 - DNA, 4520 bp, Homo sapiens
gttaattccctggtcttcccaactagcattctgaaagtgcattaacatttgtggccttgtgctctttcatcggacttctaatgatagctttccaatgattagacgaattgattctttctgtgactcatcagttcctttcctgtaaaattcatgtcttgctgttgatttgtgaataagaaccagagcttgtagaaaccactttaatcatatccaggagtttgcaagaaacaggtgcttaacactaattcacctcctgaacaagaaaaatgggctgtgaccggaactgtgggctcatcgctggggctgtcattggtgctgtcctggctgtgtttggaggtattctaatgccagttggagacctgcttatccagaagacaattaaaaagcaagttgtcctcgaagaaggtacaattgcttttaaaaattgggttaaaacaggcacagaagtttacagacagttttggatctttgatgtgcaaaatccacaggaagtgatgatgaacagcagcaacattcaagttaagcaaagaggtccttatacgtacagagttcgttttctagccaaggaaaatgtaacccaggacgctgaggacaacacagtctctttcctgcagcccaatggtgccatcttcgaaccttcactatcagttggaacagaggctgacaacttcacagttctcaatctggctgtggcagctgcatcccatatctatcaaaatcaatttgttcaaatgatcctcaattcacttattaacaagtcaaaatcttctatgttccaagtcagaactttgagagaactgttatggggctatagggatccatttttgagtttggttccgtaccctgttactaccacagttggtctgttttatccttacaacaatactgcagatggagtttataaagttttcaatggaaaagataacataagtaaagttgccataatcgacacatataaaggtaaaaggaatctgtcctattgggaaagtcactgcgacatgattaatggtacagatgcagcctcatttccaccttttgttgagaaaagccaggtattgcagttcttttcttctgatatttgcaggtcaatctatgctgtatttgaatccgacgttaatctgaaaggaatccctgtgtatagatttgttcttccatccaaggcctttgcctctccagttgaaaacccagacaactattgtttctgcacagaaaaaattatctcaaaaaattgtacatcatatggtgtgctagacatcagcaaatgcaaagaagggagacctgtgtacatttcacttcctcattttctgtatgcaagtcctgatgtttcagaacctattgatggattaaacccaaatgaagaagaacataggacatacttggatattgaacctataactggattcactttacaatttgcaaaacggctgcaggtcaacctattggtcaagccatcagaaaaaattcaagtattaaagaatctgaagaggaactatattgtgcctattctttggcttaatgagactgggaccattggtgatgagaaggcaaacatgttcagaagtcaagtaactggaaaaataaacctccttggcctgatagaaatgatcttactcagtgttggtgtggtgatgtttgttgcttttatgatttcatattgtgcatgcagatcgaaaacaataaaataaacctggctcaagcacaaaccaatttgtgttgttctgattcaataattggtttctgggtggccaattcagaagaagagtgtacatgctcaacaaatcctaggccctgcattcctgtcatcctcatccgggggaaacaccatcatcccagtagctgccctattcaactgcaacagtctccaggaccatcagtatactgcatttcatgtgcaccaaatattttgaaagacatttataaataattggcttatgactcatatttctctatgaataccttcatacagcaggtataactcttttctttatgggcttaaatattttgtcactgatcctgcaaatggacatcattttagcacactagcggtttatattttaaggaccttcattctctgttctgcacctcttctggaaattgagtaaattttgcttttttttttttactcagttgcaacttacgcttggcatcttcagaatgcttttctagcattaagagatgtaaatgataaaggaattattgtatgaaatattacaaagcgtagactatgcattgttattcattataatattttttgctgtcataatcgcctcataaagacaggtttcaaccattaaaatatgttcttccttaaattcctgtgctttttctagttcctcttgtgtcataaaatgtttatcctaattttctctctgaagtatattttatctgaatccacatttctttataaatccatagtccttgctgaaatatgctttctaaatttctaccactttgttctaggctaattttttaagctaattggatgaagaacaaaaagacatttggtttcatcctttacagcagtaggacaattgcaaaggtttttcctttttcataaggagacacattaataggtaactctgtttcttgagcaggggttcacttattctgagagcattagttctcctaaaaagctccagcatagaaagggaagataaaccaaattctagcttgtgttttacccacagaaggatacaggacaaaggaatagtaactggcctgtttggatactaaaatcgaaaataacttttagcctcctccttatgatagccgccagagtaaatgttgagcattactacagaaaagccacaaaccaagaatctacctgtttggaaagatcttttgcatctctgaaggtgcttaaagcatacttagtgcctttccttttaactgggaagataaaagaagtatctgtccaagatattaatatgtaagataacattgtagacatgttcttctgataatacaaggtttattctatttgcattaggatatttgtggacatgtccatctaatataaaggaaagttttttaatcattgaggcatgtagggctgagttatataatgtagaaacttctaaagataattggatgagaatatacatattgacctgtatattatgactaatcatgactcagatcttaatacagggatgatctcatagcatttagatatcagatcattcctcagtgtttcatttctcaaattctgtaaaaggaatataagaggaaagacaattcatatacaaagacaacgagattaaaaatatgcagtaggaaaaataattacttaaggggagattttttttacatgaaatctgggcttggatgtgtgtgtgtgtgtgtgtgtgtgtgtgtgcacatatgcactgtggtgggagtggggcaacttggggaatatgttacatgtgtgactttgttttgccctggcgaagttaatgttgttcagaaagggtaaatgtttggacacttgcaattgctcatggatgaatttatatgttttagtcatagaaaaattgtaccctttgatagaagcacattttctttccaaagctggttattaaccacagaattatagcaggtattcataacttaagtttgaaaatcaatagcgtctgcaaatggattaacagattagagaatcaacagcatcggaaaataggttaatgcatattgcttctaacaagtgcatgaagaaatagaagaagctatgtagctttcagttctgacagaaaagggtgaaggagggtatcatttcaagaaaaaaaatagctatcacgcaatggttatctctgaaaatatttgtattaagatgtgtatacatggccaggcatggtggctcatgcctgtaatcccagcactttgggaggcaggtggatcacgaggtcaggagatcaagaccatcctggccaacatggtgaaacctcatctctactaaaaatacaaaaatgagcggggtgtggtggcccatgcctgtagtcccagctgctcgggagactgaatctcttgagcctgggaagcagaggttgcagtgaactgagatcgcgtcactgcactccagcctggtgacagagcgagattccatctcaaaaaaaaaaaacagtatgcacgtacaaatttcttaacctgttatcaatgtctgagctacataattatctttctagttggagtttgttttaggtgtgtaccaactgacatttcagtttttctgtttgaagtccaatgtattagtgactctgtggctgctctcttcacctgccccttgtggcctgtctacaattctaaatggattttgaactcaatgtcgtcgcttctggtttcctgcatataccaatagcattacctatgactttttttttcctgagctattttcactgagctgagctaatgaactaaaactgagttatgtttaatatttgtatcaaatacataaaaggaatactgctttttccttttgtggctcaaaggtagctgcattttaaaatatttgtgaaaataaaaacttttgttattagaaaaat

SEQ ID NO: 318376 - DNA, 4678 bp, Homo sapiens
agatgtcaggataaccttaaggatagatgaagggttgagagcctgtgcctcatttctgagttctcagctgctatgccgtggaaatcctgtttactttctgcatctgctcctgcaagactctggagccagtcttgaggtcctacatctccgaaagcaagctcttctagaagttggtgagcagaatgctttttgtttagaagtgtggctataaatgtctttgtagttgatgcactctcatctaatagctttccaatgattagacgaattgattctttctgtgactcatcagttcctttcctgtaaaattcatgtcttgctgttgatttgtgaataagaaccagagcttgtagaaaccactttaatcatatccaggagtttgcaagaaacaggtgcttaacactaattcacctcctgaacaagaaaaatgggctgtgaccggaactgtgggctcatcgctggggctgtcattggtgctgtcctggctgtgtttggaggtattctaatgccagttggagacctgcttatccagaagacaattaaaaagcaagttgtcctcgaagaaggtacaattgcttttaaaaattgggttaaaacaggcacagaagtttacagacagttttggatctttgatgtgcaaaatccacaggaagtgatgatgaacagcagcaacattcaagttaagcaaagaggtccttatacgtacagagttcgttttctagccaaggaaaatgtaacccaggacgctgaggacaacacagtctctttcctgcagcccaatggtgccatcttcgaaccttcactatcagttggaacagaggctgacaacttcacagttctcaatctggctgtggcagctgcatcccatatctatcaaaatcaatttgttcaaatgatcctcaattcacttattaacaagtcaaaatcttctatgttccaagtcagaactttgagagaactgttatggggctatagggatccatttttgagtttggttccgtaccctgttactaccacagttggtctgttttatccttacaacaatactgcagatggagtttataaagttttcaatggaaaagataacataagtaaagttgccataatcgacacatataaaggtaaaaggaatctgtcctattgggaaagtcactgcgacatgattaatggtacagatgcagcctcatttccaccttttgttgagaaaagccaggtattgcagttcttttcttctgatatttgcaggtcaatctatgctgtatttgaatccgacgttaatctgaaaggaatccctgtgtatagatttgttcttccatccaaggcctttgcctctccagttgaaaacccagacaactattgtttctgcacagaaaaaattatctcaaaaaattgtacatcatatggtgtgctagacatcagcaaatgcaaagaagggagacctgtgtacatttcacttcctcattttctgtatgcaagtcctgatgtttcagaacctattgatggattaaacccaaatgaagaagaacataggacatacttggatattgaacctataactggattcactttacaatttgcaaaacggctgcaggtcaacctattggtcaagccatcagaaaaaattcaagtattaaagaatctgaagaggaactatattgtgcctattctttggcttaatgagactgggaccattggtgatgagaaggcaaacatgttcagaagtcaagtaactggaaaaataaacctccttggcctgatagaaatgatcttactcagtgttggtgtggtgatgtttgttgcttttatgatttcatattgtgcatgcagatcgaaaacaataaaataaacctggctcaagcacaaaccaatttgtgttgttctgattcaataattggtttctgggtggccaattcagaagaagagtgtacatgctcaacaaatcctaggccctgcattcctgtcatcctcatccgggggaaacaccatcatcccagtagctgccctattcaactgcaacagtctccaggaccatcagtatactgcatttcatgtgcaccaaatattttgaaagacatttataaataattggcttatgactcatatttctctatgaataccttcatacagcaggtataactcttttctttatgggcttaaatattttgtcactgatcctgcaaatggacatcattttagcacactagcggtttatattttaaggaccttcattctctgttctgcacctcttctggaaattgagtaaattttgcttttttttttttactcagttgcaacttacgcttggcatcttcagaatgcttttctagcattaagagatgtaaatgataaaggaattattgtatgaaatattacaaagcgtagactatgcattgttattcattataatattttttgctgtcataatcgcctcataaagacaggtttcaaccattaaaatatgttcttccttaaattcctgtgctttttctagttcctcttgtgtcataaaatgtttatcctaattttctctctgaagtatattttatctgaatccacatttctttataaatccatagtccttgctgaaatatgctttctaaatttctaccactttgttctaggctaattttttaagctaattggatgaagaacaaaaagacatttggtttcatcctttacagcagtaggacaattgcaaaggtttttcctttttcataaggagacacattaataggtaactctgtttcttgagcaggggttcacttattctgagagcattagttctcctaaaaagctccagcatagaaagggaagataaaccaaattctagcttgtgttttacccacagaaggatacaggacaaaggaatagtaactggcctgtttggatactaaaatcgaaaataacttttagcctcctccttatgatagccgccagagtaaatgttgagcattactacagaaaagccacaaaccaagaatctacctgtttggaaagatcttttgcatctctgaaggtgcttaaagcatacttagtgcctttccttttaactgggaagataaaagaagtatctgtccaagatattaatatgtaagataacattgtagacatgttcttctgataatacaaggtttattctatttgcattaggatatttgtggacatgtccatctaatataaaggaaagttttttaatcattgaggcatgtagggctgagttatataatgtagaaacttctaaagataattggatgagaatatacatattgacctgtatattatgactaatcatgactcagatcttaatacagggatgatctcatagcatttagatatcagatcattcctcagtgtttcatttctcaaattctgtaaaaggaatataagaggaaagacaattcatatacaaagacaacgagattaaaaatatgcagtaggaaaaataattacttaaggggagattttttttacatgaaatctgggcttggatgtgtgtgtgtgtgtgtgtgtgtgtgtgtgcacatatgcactgtggtgggagtggggcaacttggggaatatgttacatgtgtgactttgttttgccctggcgaagttaatgttgttcagaaagggtaaatgtttggacacttgcaattgctcatggatgaatttatatgttttagtcatagaaaaattgtaccctttgatagaagcacattttctttccaaagctggttattaaccacagaattatagcaggtattcataacttaagtttgaaaatcaatagcgtctgcaaatggattaacagattagagaatcaacagcatcggaaaataggttaatgcatattgcttctaacaagtgcatgaagaaatagaagaagctatgtagctttcagttctgacagaaaagggtgaaggagggtatcatttcaagaaaaaaaatagctatcacgcaatggttatctctgaaaatatttgtattaagatgtgtatacatggccaggcatggtggctcatgcctgtaatcccagcactttgggaggcaggtggatcacgaggtcaggagatcaagaccatcctggccaacatggtgaaacctcatctctactaaaaatacaaaaatgagcggggtgtggtggcccatgcctgtagtcccagctgctcgggagactgaatctcttgagcctgggaagcagaggttgcagtgaactgagatcgcgtcactgcactccagcctggtgacagagcgagattccatctcaaaaaaaaaaaacagtatgcacgtacaaatttcttaacctgttatcaatgtctgagctacataattatctttctagttggagtttgttttaggtgtgtaccaactgacatttcagtttttctgtttgaagtccaatgtattagtgactctgtggctgctctcttcacctgccccttgtggcctgtctacaattctaaatggattttgaactcaatgtcgtcgcttctggtttcctgcatataccaatagcattacctatgactttttttttcctgagctattttcactgagctgagctaatgaactaaaactgagttatgtttaatatttgtatcaaatacataaaaggaatactgctttttccttttgtggctcaaaggtagctgcattttaaaatatttgtgaaaataaaaacttttgttattagaaaaat

SEQ ID NO: 318377 - DNA, 4545 bp, Homo sapiens
ggggatgcaactaagttgctgagacaagggaagagagatgagggtgagagttctccttagataagatttcaatatgttaatcatgtgtagaaagaaaattaaaaaggaggaatatgaagaaattcagatatgacattattagttctgccactggtaggcattagaagcaagaaaagggagacggaccgaggaagccactttgaaccagagcttgtagaaaccactttaatcatatccaggagtttgcaagaaacaggtgcttaacactaattcacctcctgaacaagaaaaatgggctgtgaccggaactgtgggctcatcgctggggctgtcattggtgctgtcctggctgtgtttggaggtattctaatgccagttggagacctgcttatccagaagacaattaaaaagcaagttgtcctcgaagaaggtacaattgcttttaaaaattgggttaaaacaggcacagaagtttacagacagttttggatctttgatgtgcaaaatccacaggaagtgatgatgaacagcagcaacattcaagttaagcaaagaggtccttatacgtacagagttcgttttctagccaaggaaaatgtaacccaggacgctgaggacaacacagtctctttcctgcagcccaatggtgccatcttcgaaccttcactatcagttggaacagaggctgacaacttcacagttctcaatctggctgtggcagctgcatcccatatctatcaaaatcaatttgttcaaatgatcctcaattcacttattaacaagtcaaaatcttctatgttccaagtcagaactttgagagaactgttatggggctatagggatccatttttgagtttggttccgtaccctgttactaccacagttggtctgttttatccttacaacaatactgcagatggagtttataaagttttcaatggaaaagataacataagtaaagttgccataatcgacacatataaaggtaaaaggaatctgtcctattgggaaagtcactgcgacatgattaatggtacagatgcagcctcatttccaccttttgttgagaaaagccaggtattgcagttcttttcttctgatatttgcaggtcaatctatgctgtatttgaatccgacgttaatctgaaaggaatccctgtgtatagatttgttcttccatccaaggcctttgcctctccagttgaaaacccagacaactattgtttctgcacagaaaaaattatctcaaaaaattgtacatcatatggtgtgctagacatcagcaaatgcaaagaagggagacctgtgtacatttcacttcctcattttctgtatgcaagtcctgatgtttcagaacctattgatggattaaacccaaatgaagaagaacataggacatacttggatattgaacctataactggattcactttacaatttgcaaaacggctgcaggtcaacctattggtcaagccatcagaaaaaattcaagtattaaagaatctgaagaggaactatattgtgcctattctttggcttaatgagactgggaccattggtgatgagaaggcaaacatgttcagaagtcaagtaactggaaaaataaacctccttggcctgatagaaatgatcttactcagtgttggtgtggtgatgtttgttgcttttatgatttcatattgtgcatgcagatcgaaaacaataaaataaacctggctcaagcacaaaccaatttgtgttgttctgattcaataattggtttctgggtggccaattcagaagaagagtgtacatgctcaacaaatcctaggccctgcattcctgtcatcctcatccgggggaaacaccatcatcccagtagctgccctattcaactgcaacagtctccaggaccatcagtatactgcatttcatgtgcaccaaatattttgaaagacatttataaataattggcttatgactcatatttctctatgaataccttcatacagcaggtataactcttttctttatgggcttaaatattttgtcactgatcctgcaaatggacatcattttagcacactagcggtttatattttaaggaccttcattctctgttctgcacctcttctggaaattgagtaaattttgcttttttttttttactcagttgcaacttacgcttggcatcttcagaatgcttttctagcattaagagatgtaaatgataaaggaattattgtatgaaatattacaaagcgtagactatgcattgttattcattataatattttttgctgtcataatcgcctcataaagacaggtttcaaccattaaaatatgttcttccttaaattcctgtgctttttctagttcctcttgtgtcataaaatgtttatcctaattttctctctgaagtatattttatctgaatccacatttctttataaatccatagtccttgctgaaatatgctttctaaatttctaccactttgttctaggctaattttttaagctaattggatgaagaacaaaaagacatttggtttcatcctttacagcagtaggacaattgcaaaggtttttcctttttcataaggagacacattaataggtaactctgtttcttgagcaggggttcacttattctgagagcattagttctcctaaaaagctccagcatagaaagggaagataaaccaaattctagcttgtgttttacccacagaaggatacaggacaaaggaatagtaactggcctgtttggatactaaaatcgaaaataacttttagcctcctccttatgatagccgccagagtaaatgttgagcattactacagaaaagccacaaaccaagaatctacctgtttggaaagatcttttgcatctctgaaggtgcttaaagcatacttagtgcctttccttttaactgggaagataaaagaagtatctgtccaagatattaatatgtaagataacattgtagacatgttcttctgataatacaaggtttattctatttgcattaggatatttgtggacatgtccatctaatataaaggaaagttttttaatcattgaggcatgtagggctgagttatataatgtagaaacttctaaagataattggatgagaatatacatattgacctgtatattatgactaatcatgactcagatcttaatacagggatgatctcatagcatttagatatcagatcattcctcagtgtttcatttctcaaattctgtaaaaggaatataagaggaaagacaattcatatacaaagacaacgagattaaaaatatgcagtaggaaaaataattacttaaggggagattttttttacatgaaatctgggcttggatgtgtgtgtgtgtgtgtgtgtgtgtgtgtgcacatatgcactgtggtgggagtggggcaacttggggaatatgttacatgtgtgactttgttttgccctggcgaagttaatgttgttcagaaagggtaaatgtttggacacttgcaattgctcatggatgaatttatatgttttagtcatagaaaaattgtaccctttgatagaagcacattttctttccaaagctggttattaaccacagaattatagcaggtattcataacttaagtttgaaaatcaatagcgtctgcaaatggattaacagattagagaatcaacagcatcggaaaataggttaatgcatattgcttctaacaagtgcatgaagaaatagaagaagctatgtagctttcagttctgacagaaaagggtgaaggagggtatcatttcaagaaaaaaaatagctatcacgcaatggttatctctgaaaatatttgtattaagatgtgtatacatggccaggcatggtggctcatgcctgtaatcccagcactttgggaggcaggtggatcacgaggtcaggagatcaagaccatcctggccaacatggtgaaacctcatctctactaaaaatacaaaaatgagcggggtgtggtggcccatgcctgtagtcccagctgctcgggagactgaatctcttgagcctgggaagcagaggttgcagtgaactgagatcgcgtcactgcactccagcctggtgacagagcgagattccatctcaaaaaaaaaaaacagtatgcacgtacaaatttcttaacctgttatcaatgtctgagctacataattatctttctagttggagtttgttttaggtgtgtaccaactgacatttcagtttttctgtttgaagtccaatgtattagtgactctgtggctgctctcttcacctgccccttgtggcctgtctacaattctaaatggattttgaactcaatgtcgtcgcttctggtttcctgcatataccaatagcattacctatgactttttttttcctgagctattttcactgagctgagctaatgaactaaaactgagttatgtttaatatttgtatcaaatacataaaaggaatactgctttttccttttgtggctcaaaggtagctgcattttaaaatatttgtgaaaataaaaacttttgttattagaaaaat

SEQ ID NO: 318378 - DNA, 4587 bp, Homo sapiens
cttccttcttgttcactggcttggcaagcggcaagcggcaagcggtggaacctgccttcagctacaagaagaggctcataggcggaagggacttgccttgtctcatatgaaactttggactgtggacttttgagttaacgctgaaatgagatagctttccaatgattagacgaattgattctttctgtgactcatcagttcctttcctgtaaaattcatgtcttgctgttgatttgtgaataagaaccagagcttgtagaaaccactttaatcatatccaggagtttgcaagaaacaggtgcttaacactaattcacctcctgaacaagaaaaatgggctgtgaccggaactgtgggctcatcgctggggctgtcattggtgctgtcctggctgtgtttggaggtattctaatgccagttggagacctgcttatccagaagacaattaaaaagcaagttgtcctcgaagaaggtacaattgcttttaaaaattgggttaaaacaggcacagaagtttacagacagttttggatctttgatgtgcaaaatccacaggaagtgatgatgaacagcagcaacattcaagttaagcaaagaggtccttatacgtacagagttcgttttctagccaaggaaaatgtaacccaggacgctgaggacaacacagtctctttcctgcagcccaatggtgccatcttcgaaccttcactatcagttggaacagaggctgacaacttcacagttctcaatctggctgtggcagctgcatcccatatctatcaaaatcaatttgttcaaatgatcctcaattcacttattaacaagtcaaaatcttctatgttccaagtcagaactttgagagaactgttatggggctatagggatccatttttgagtttggttccgtaccctgttactaccacagttggtctgttttatccttacaacaatactgcagatggagtttataaagttttcaatggaaaagataacataagtaaagttgccataatcgacacatataaaggtaaaaggaatctgtcctattgggaaagtcactgcgacatgattaatggtacagatgcagcctcatttccaccttttgttgagaaaagccaggtattgcagttcttttcttctgatatttgcaggtcaatctatgctgtatttgaatccgacgttaatctgaaaggaatccctgtgtatagatttgttcttccatccaaggcctttgcctctccagttgaaaacccagacaactattgtttctgcacagaaaaaattatctcaaaaaattgtacatcatatggtgtgctagacatcagcaaatgcaaagaagggagacctgtgtacatttcacttcctcattttctgtatgcaagtcctgatgtttcagaacctattgatggattaaacccaaatgaagaagaacataggacatacttggatattgaacctataactggattcactttacaatttgcaaaacggctgcaggtcaacctattggtcaagccatcagaaaaaattcaagtattaaagaatctgaagaggaactatattgtgcctattctttggcttaatgagactgggaccattggtgatgagaaggcaaacatgttcagaagtcaagtaactggaaaaataaacctccttggcctgatagaaatgatcttactcagtgttggtgtggtgatgtttgttgcttttatgatttcatattgtgcatgcagatcgaaaacaataaaataaacctggctcaagcacaaaccaatttgtgttgttctgattcaataattggtttctgggtggccaattcagaagaagagtgtacatgctcaacaaatcctaggccctgcattcctgtcatcctcatccgggggaaacaccatcatcccagtagctgccctattcaactgcaacagtctccaggaccatcagtatactgcatttcatgtgcaccaaatattttgaaagacatttataaataattggcttatgactcatatttctctatgaataccttcatacagcaggtataactcttttctttatgggcttaaatattttgtcactgatcctgcaaatggacatcattttagcacactagcggtttatattttaaggaccttcattctctgttctgcacctcttctggaaattgagtaaattttgcttttttttttttactcagttgcaacttacgcttggcatcttcagaatgcttttctagcattaagagatgtaaatgataaaggaattattgtatgaaatattacaaagcgtagactatgcattgttattcattataatattttttgctgtcataatcgcctcataaagacaggtttcaaccattaaaatatgttcttccttaaattcctgtgctttttctagttcctcttgtgtcataaaatgtttatcctaattttctctctgaagtatattttatctgaatccacatttctttataaatccatagtccttgctgaaatatgctttctaaatttctaccactttgttctaggctaattttttaagctaattggatgaagaacaaaaagacatttggtttcatcctttacagcagtaggacaattgcaaaggtttttcctttttcataaggagacacattaataggtaactctgtttcttgagcaggggttcacttattctgagagcattagttctcctaaaaagctccagcatagaaagggaagataaaccaaattctagcttgtgttttacccacagaaggatacaggacaaaggaatagtaactggcctgtttggatactaaaatcgaaaataacttttagcctcctccttatgatagccgccagagtaaatgttgagcattactacagaaaagccacaaaccaagaatctacctgtttggaaagatcttttgcatctctgaaggtgcttaaagcatacttagtgcctttccttttaactgggaagataaaagaagtatctgtccaagatattaatatgtaagataacattgtagacatgttcttctgataatacaaggtttattctatttgcattaggatatttgtggacatgtccatctaatataaaggaaagttttttaatcattgaggcatgtagggctgagttatataatgtagaaacttctaaagataattggatgagaatatacatattgacctgtatattatgactaatcatgactcagatcttaatacagggatgatctcatagcatttagatatcagatcattcctcagtgtttcatttctcaaattctgtaaaaggaatataagaggaaagacaattcatatacaaagacaacgagattaaaaatatgcagtaggaaaaataattacttaaggggagattttttttacatgaaatctgggcttggatgtgtgtgtgtgtgtgtgtgtgtgtgtgtgcacatatgcactgtggtgggagtggggcaacttggggaatatgttacatgtgtgactttgttttgccctggcgaagttaatgttgttcagaaagggtaaatgtttggacacttgcaattgctcatggatgaatttatatgttttagtcatagaaaaattgtaccctttgatagaagcacattttctttccaaagctggttattaaccacagaattatagcaggtattcataacttaagtttgaaaatcaatagcgtctgcaaatggattaacagattagagaatcaacagcatcggaaaataggttaatgcatattgcttctaacaagtgcatgaagaaatagaagaagctatgtagctttcagttctgacagaaaagggtgaaggagggtatcatttcaagaaaaaaaatagctatcacgcaatggttatctctgaaaatatttgtattaagatgtgtatacatggccaggcatggtggctcatgcctgtaatcccagcactttgggaggcaggtggatcacgaggtcaggagatcaagaccatcctggccaacatggtgaaacctcatctctactaaaaatacaaaaatgagcggggtgtggtggcccatgcctgtagtcccagctgctcgggagactgaatctcttgagcctgggaagcagaggttgcagtgaactgagatcgcgtcactgcactccagcctggtgacagagcgagattccatctcaaaaaaaaaaaacagtatgcacgtacaaatttcttaacctgttatcaatgtctgagctacataattatctttctagttggagtttgttttaggtgtgtaccaactgacatttcagtttttctgtttgaagtccaatgtattagtgactctgtggctgctctcttcacctgccccttgtggcctgtctacaattctaaatggattttgaactcaatgtcgtcgcttctggtttcctgcatataccaatagcattacctatgactttttttttcctgagctattttcactgagctgagctaatgaactaaaactgagttatgtttaatatttgtatcaaatacataaaaggaatactgctttttccttttgtggctcaaaggtagctgcattttaaaatatttgtgaaaataaaaacttttgttattagaaaaat

SEQ ID NO: 318379 - DNA, 2452 bp, Homo sapiens
aattcctctggcaacaaaccacacactgggatctgacactgtagagtgctttctcttctctttttttgggggggggagggggtgtggttgcatatttaaactctcacgcatttatgtactgaggactgcagtgtaggactttcctgcagaataccatttgatcctattaagaattgtccaaatgttggagcatttgattgaaaaatccttcttagccattttaaagatagctttccaatgattagacgaattgattctttctgtgactcatcagttcctttcctgtaaaattcatgtcttgctgttgatttgtgaataagaaccagagcttgtagaaaccactttaatcatatccaggagtttgcaagaaacaggtgcttaacactaattcacctcctgaacaagaaaaatgggctgtgaccggaactgtgggctcatcgctggggctgtcattggtgctgtcctggctgtgtttggaggtattctaatgccagttggagacctgcttatccagaagacaattaaaaagcaagttgtcctcgaagaaggtacaattgcttttaaaaattgggttaaaacaggcacagaagtttacagacagttttggatctttgatgtgcaaaatccacaggaagtgatgatgaacagcagcaacattcaagttaagcaaagaggtccttatacgtacagagttcgttttctagccaaggaaaatgtaacccaggacgctgaggacaacacagtctctttcctgcagcccaatggtgccatcttcgaaccttcactatcagttggaacagaggctgacaacttcacagttctcaatctggctgtggcagctgcatcccatatctatcaaaatcaatttgttcaaatgatcctcaattcacttattaacaagtcaaaatcttctatgttccaagtcagaactttgagagaactgttatggggctatagggatccatttttgagtttggttccgtaccctgttactaccacagttggtctgttttatccttacaacaatactgcagatggagtttataaagttttcaatggaaaagataacataagtaaagttgccataatcgacacatataaaggtaaaaggaatctgtcctattgggaaagtcactgcgacatgattaatggtacagatgcagcctcatttccaccttttgttgagaaaagccaggtattgcagttcttttcttctgatatttgcaggtcaatctatgctgtatttgaatccgacgttaatctgaaaggaatccctgtgtatagatttgttcttccatccaaggcctttgcctctccagttgaaaacccagacaactattgtttctgcacagaaaaaattatctcaaaaaattgtacatcatatggtgtgctagacatcagcaaatgcaaagaagggagacctgtgtacatttcacttcctcattttctgtatgcaagtcctgatgtttcagaacctattgatggattaaacccaaatgaagaagaacataggacatacttggatattgaacctataactggattcactttacaatttgcaaaacggctgcaggtcaacctattggtcaagccatcagaaaaaattcaagtattaaagaatctgaagaggaactatattgtgcctattctttggcttaatgagactgggaccattggtgatgagaaggcaaacatgttcagaagtcaagtaactggaaaaataaacctccttggcctgatagaaatgatcttactcagtgttggtgtggtgatgtttgttgcttttatgatttcatattgtgcatgcagatcgaaaacaataaaataaacctggctcaagcacaaaccaatttgtgttgttctgattcaataattggtttctgggtggccaattcagaagaagagtgtacatgctcaacaaatcctaggccctgcattcctgtcatcctcatccgggggaaacaccatcatcccagtagctgccctattcaactgcaacagtctccaggaccatcagtatactgcatttcatgtgcaccaaatattttgaaagacatttataaataattggcttatgactcatatttctctatgaataccttcatacagcaggtataactcttttctttatgggcttaaatattttgtcactgatcctgcaaatggacatcattttagcacactagcggtttatattttaaggaccttcattctctgttctgcacctcttctggaaattgagtaaattttgcttttttttttttactcagttgcaacttacgcttggcatcttcagaatgcttttctagcattaagagatgtaaatgataaaggaattattgtatgaaatattacaaagcgtagactatgcattgttattcattataatattttttgctgtcataatcgcctcataaagacaggtttcaaccattaaaatatgttcttcctt

SEQ ID NO: 318380 - DNA, 1986 bp, Homo sapiens
aattcctctggcaacaaaccacacactgggatctgacactgtagagtgctttctcttctctttttttgggggggggagggggtgtggttgcatatttaaactctcacgcatttatgtactgaggactgcagtgtaggactttcctgcagaataccatttgatcctattaagaattgtccaaatgttggagcatttgattgaaaaatccttcttagccattttaaagatagctttccaatgattagacgaattgattctttctgtgactcatcagttcctttcctgtaaaattcatgtcttgctgttgatttgtgaataagaaccagagcttgtagaaaccactttaatcatatccaggagtttgcaagaaacaggtgcttaacactaattcacctcctgaacaagaaaaatgggctgtgaccggaactgtgggctcatcgctggggctgtcattggtgctgtcctggctgtgtttggaggtattctaatgccagttggagacctgcttatccagaagacaattaaaaagcaagttgtcctcgaagaaggtacaattgcttttaaaaattgggttaaaacaggcacagaagtttacagacagttttggatctttgatgtgcaaaatccacaggaagtgatgatgaacagcagcaacattcaagttaagcaaagaggtccttatacgtacagagttcgttttctagccaaggaaaatgtaacccaggacgctgaggacaacacagtctctttcctgcagcccaatggtgccatcttcgaaccttcactatcagttggaacagaggctgacaacttcacagttctcaatctggctgtggcagctgcatcccatatctatcaaaatcaatttgttcaaatgatcctcaattcacttattaacaagtcaaaatcttctatgttccaagtcagaactttgagagaactgttatggggctatagggatccatttttgagtttggttccgtaccctgttactaccacagttggtctgttttatccttacaacaatactgcagatggagtttataaagttttcaatggaaaagataacataagtaaagttgccataatcgacacatataaaggtaaaaggaatctgtcctattgggaaagtcactgcgacatgattaatggtacagatgcagcctcatttccaccttttgttgagaaaagccaggtattgcagttcttttcttctgatatttgcaggtcaatctatgctgtatttgaatccgacgttaatctgaaaggaatccctgtgtatagatttgttcttccatccaaggcctttgcctctccagttgaaaacccagacaactattgtttctgcacagaaaaaattatctcaaaaaattgtacatcatatggtgtgctagacatcagcaaatgcaaagaagggagacctgtgtacatttcacttcctcattttctgtatgcaagtcctgatgtttcagaacctattgatggattaaacccaaatgaagaagaacataggacatacttggatattgaacctataactggattcactttacaatttgcaaaacggctgcaggtcaacctattggtcaagccatcagaaaaaattcaagtattaaagaatctgaagaggaactatattgtgcctattctttggcttaatgagactgggaccattggtgatgagaaggcaaacatgttcagaagtcaagtaactggaaaaataaacctccttggcctgatagaaatgatcttactcagtgttggtgtggtgatgtttgttgcttttatgatttcatattgtgcatgcagatcgaaaacaataaaataagtaagtatgtaccaaaaaatattgcttcaataatattagcttatatattacttgttttcactttatcaaagagaagttacatattaggccatatatatttctagacatgtctagccactgatcatttttaaatataggtaaataaacctataaatatt

SEQ ID NO: 318381 - DNA, 4508 bp, Homo sapiens
aattcctctggcaacaaaccacacactgggatctgacactgtagagtgctttctcttctctttttttgggggggggagggggtgtggttgcatatttaaactctcacgcatttatgtactgaggactgcagtgtaggactttcctgcagaataccatttgatcctattaagaattgtccaaatgttggagcatttgattgaaaaatccttcttagccattttaaagatagctttccaatgattagacgaattgattctttctgtgactcatcagttcctttcctgtaaaattcatgtcttgctgttgatttgtgaataagaaccagagcttgtagaaaccactttaatcatatccaggagtttgcaagaaacagcaagttgtcctcgaagaaggtacaattgcttttaaaaattgggttaaaacaggcacagaagtttacagacagttttggatctttgatgtgcaaaatccacaggaagtgatgatgaacagcagcaacattcaagttaagcaaagaggtccttatacgtacagagttcgttttctagccaaggaaaatgtaacccaggacgctgaggacaacacagtctctttcctgcagcccaatggtgccatcttcgaaccttcactatcagttggaacagaggctgacaacttcacagttctcaatctggctgtggcagctgcatcccatatctatcaaaatcaatttgttcaaatgatcctcaattcacttattaacaagtcaaaatcttctatgttccaagtcagaactttgagagaactgttatggggctatagggatccatttttgagtttggttccgtaccctgttactaccacagttggtctgttttatccttacaacaatactgcagatggagtttataaagttttcaatggaaaagataacataagtaaagttgccataatcgacacatataaaggtaaaaggaatctgtcctattgggaaagtcactgcgacatgattaatggtacagatgcagcctcatttccaccttttgttgagaaaagccaggtattgcagttcttttcttctgatatttgcaggtcaatctatgctgtatttgaatccgacgttaatctgaaaggaatccctgtgtatagatttgttcttccatccaaggcctttgcctctccagttgaaaacccagacaactattgtttctgcacagaaaaaattatctcaaaaaattgtacatcatatggtgtgctagacatcagcaaatgcaaagaagggagacctgtgtacatttcacttcctcattttctgtatgcaagtcctgatgtttcagaacctattgatggattaaacccaaatgaagaagaacataggacatacttggatattgaacctataactggattcactttacaatttgcaaaacggctgcaggtcaacctattggtcaagccatcagaaaaaattcaagtattaaagaatctgaagaggaactatattgtgcctattctttggcttaatgagactgggaccattggtgatgagaaggcaaacatgttcagaagtcaagtaactggaaaaataaacctccttggcctgatagaaatgatcttactcagtgttggtgtggtgatgtttgttgcttttatgatttcatattgtgcatgcagatcgaaaacaataaaataaacctggctcaagcacaaaccaatttgtgttgttctgattcaataattggtttctgggtggccaattcagaagaagagtgtacatgctcaacaaatcctaggccctgcattcctgtcatcctcatccgggggaaacaccatcatcccagtagctgccctattcaactgcaacagtctccaggaccatcagtatactgcatttcatgtgcaccaaatattttgaaagacatttataaataattggcttatgactcatatttctctatgaataccttcatacagcaggtataactcttttctttatgggcttaaatattttgtcactgatcctgcaaatggacatcattttagcacactagcggtttatattttaaggaccttcattctctgttctgcacctcttctggaaattgagtaaattttgcttttttttttttactcagttgcaacttacgcttggcatcttcagaatgcttttctagcattaagagatgtaaatgataaaggaattattgtatgaaatattacaaagcgtagactatgcattgttattcattataatattttttgctgtcataatcgcctcataaagacaggtttcaaccattaaaatatgttcttccttaaattcctgtgctttttctagttcctcttgtgtcataaaatgtttatcctaattttctctctgaagtatattttatctgaatccacatttctttataaatccatagtccttgctgaaatatgctttctaaatttctaccactttgttctaggctaattttttaagctaattggatgaagaacaaaaagacatttggtttcatcctttacagcagtaggacaattgcaaaggtttttcctttttcataaggagacacattaataggtaactctgtttcttgagcaggggttcacttattctgagagcattagttctcctaaaaagctccagcatagaaagggaagataaaccaaattctagcttgtgttttacccacagaaggatacaggacaaaggaatagtaactggcctgtttggatactaaaatcgaaaataacttttagcctcctccttatgatagccgccagagtaaatgttgagcattactacagaaaagccacaaaccaagaatctacctgtttggaaagatcttttgcatctctgaaggtgcttaaagcatacttagtgcctttccttttaactgggaagataaaagaagtatctgtccaagatattaatatgtaagataacattgtagacatgttcttctgataatacaaggtttattctatttgcattaggatatttgtggacatgtccatctaatataaaggaaagttttttaatcattgaggcatgtagggctgagttatataatgtagaaacttctaaagataattggatgagaatatacatattgacctgtatattatgactaatcatgactcagatcttaatacagggatgatctcatagcatttagatatcagatcattcctcagtgtttcatttctcaaattctgtaaaaggaatataagaggaaagacaattcatatacaaagacaacgagattaaaaatatgcagtaggaaaaataattacttaaggggagattttttttacatgaaatctgggcttggatgtgtgtgtgtgtgtgtgtgtgtgtgtgtgcacatatgcactgtggtgggagtggggcaacttggggaatatgttacatgtgtgactttgttttgccctggcgaagttaatgttgttcagaaagggtaaatgtttggacacttgcaattgctcatggatgaatttatatgttttagtcatagaaaaattgtaccctttgatagaagcacattttctttccaaagctggttattaaccacagaattatagcaggtattcataacttaagtttgaaaatcaatagcgtctgcaaatggattaacagattagagaatcaacagcatcggaaaataggttaatgcatattgcttctaacaagtgcatgaagaaatagaagaagctatgtagctttcagttctgacagaaaagggtgaaggagggtatcatttcaagaaaaaaaatagctatcacgcaatggttatctctgaaaatatttgtattaagatgtgtatacatggccaggcatggtggctcatgcctgtaatcccagcactttgggaggcaggtggatcacgaggtcaggagatcaagaccatcctggccaacatggtgaaacctcatctctactaaaaatacaaaaatgagcggggtgtggtggcccatgcctgtagtcccagctgctcgggagactgaatctcttgagcctgggaagcagaggttgcagtgaactgagatcgcgtcactgcactccagcctggtgacagagcgagattccatctcaaaaaaaaaaaacagtatgcacgtacaaatttcttaacctgttatcaatgtctgagctacataattatctttctagttggagtttgttttaggtgtgtaccaactgacatttcagtttttctgtttgaagtccaatgtattagtgactctgtggctgctctcttcacctgccccttgtggcctgtctacaattctaaatggattttgaactcaatgtcgtcgcttctggtttcctgcatataccaatagcattacctatgactttttttttcctgagctattttcactgagctgagctaatgaactaaaactgagttatgtttaatatttgtatcaaatacataaaaggaatactgctttttccttttgtggctcaaaggtagctgcattttaaaatatttgtgaaaataaaaacttttgttattagaaaaat

SEQ ID NO: 318382 - DNA, 4634 bp, Homo sapiens
tgagtgttaagtaccatcctctgaagtgtccaactcttgaaggaaaagaaaaagcttccaataccattagatttttcactcagtttttgtgttttgtttcatcagtccaacttaggggcagagaagaagttcaactcagtaagaacttttttgaacttcggtaaaatttgcttaataaattatgttgactgttgcaatattttcaaagcgtcactctaaagcttgccgaagggtcactttaaagtttgccttaaaatcaacagtcgtgtcttcagtattacacactgattctctttgtaaaaggctaaaaagactgctgtaataataatttgttgaaaacatttctgctgcaagtgtatggtaaggttgcaaaggttctcatgaatgaggtacttgggcttggtccttttattctggctgactcaaggctgcaaacaatcttccagaagtgcctgtacttactacaaagacataacccaaacttattttctttttcatagcaagttgtcctcgaagaaggtacaattgcttttaaaaattgggttaaaacaggcacagaagtttacagacagttttggatctttgatgtgcaaaatccacaggaagtgatgatgaacagcagcaacattcaagttaagcaaagaggtccttatacgtacagagttcgttttctagccaaggaaaatgtaacccaggacgctgaggacaacacagtctctttcctgcagcccaatggtgccatcttcgaaccttcactatcagttggaacagaggctgacaacttcacagttctcaatctggctgtggcagctgcatcccatatctatcaaaatcaatttgttcaaatgatcctcaattcacttattaacaagtcaaaatcttctatgttccaagtcagaactttgagagaactgttatggggctatagggatccatttttgagtttggttccgtaccctgttactaccacagttggtctgttttatccttacaacaatactgcagatggagtttataaagttttcaatggaaaagataacataagtaaagttgccataatcgacacatataaaggtaaaaggaatctgtcctattgggaaagtcactgcgacatgattaatggtacagatgcagcctcatttccaccttttgttgagaaaagccaggtattgcagttcttttcttctgatatttgcaggtcaatctatgctgtatttgaatccgacgttaatctgaaaggaatccctgtgtatagatttgttcttccatccaaggcctttgcctctccagttgaaaacccagacaactattgtttctgcacagaaaaaattatctcaaaaaattgtacatcatatggtgtgctagacatcagcaaatgcaaagaagggagacctgtgtacatttcacttcctcattttctgtatgcaagtcctgatgtttcagaacctattgatggattaaacccaaatgaagaagaacataggacatacttggatattgaacctataactggattcactttacaatttgcaaaacggctgcaggtcaacctattggtcaagccatcagaaaaaattcaagtattaaagaatctgaagaggaactatattgtgcctattctttggcttaatgagactgggaccattggtgatgagaaggcaaacatgttcagaagtcaagtaactggaaaaataaacctccttggcctgatagaaatgatcttactcagtgttggtgtggtgatgtttgttgcttttatgatttcatattgtgcatgcagatcgaaaacaataaaataaacctggctcaagcacaaaccaatttgtgttgttctgattcaataattggtttctgggtggccaattcagaagaagagtgtacatgctcaacaaatcctaggccctgcattcctgtcatcctcatccgggggaaacaccatcatcccagtagctgccctattcaactgcaacagtctccaggaccatcagtatactgcatttcatgtgcaccaaatattttgaaagacatttataaataattggcttatgactcatatttctctatgaataccttcatacagcaggtataactcttttctttatgggcttaaatattttgtcactgatcctgcaaatggacatcattttagcacactagcggtttatattttaaggaccttcattctctgttctgcacctcttctggaaattgagtaaattttgcttttttttttttactcagttgcaacttacgcttggcatcttcagaatgcttttctagcattaagagatgtaaatgataaaggaattattgtatgaaatattacaaagcgtagactatgcattgttattcattataatattttttgctgtcataatcgcctcataaagacaggtttcaaccattaaaatatgttcttccttaaattcctgtgctttttctagttcctcttgtgtcataaaatgtttatcctaattttctctctgaagtatattttatctgaatccacatttctttataaatccatagtccttgctgaaatatgctttctaaatttctaccactttgttctaggctaattttttaagctaattggatgaagaacaaaaagacatttggtttcatcctttacagcagtaggacaattgcaaaggtttttcctttttcataaggagacacattaataggtaactctgtttcttgagcaggggttcacttattctgagagcattagttctcctaaaaagctccagcatagaaagggaagataaaccaaattctagcttgtgttttacccacagaaggatacaggacaaaggaatagtaactggcctgtttggatactaaaatcgaaaataacttttagcctcctccttatgatagccgccagagtaaatgttgagcattactacagaaaagccacaaaccaagaatctacctgtttggaaagatcttttgcatctctgaaggtgcttaaagcatacttagtgcctttccttttaactgggaagataaaagaagtatctgtccaagatattaatatgtaagataacattgtagacatgttcttctgataatacaaggtttattctatttgcattaggatatttgtggacatgtccatctaatataaaggaaagttttttaatcattgaggcatgtagggctgagttatataatgtagaaacttctaaagataattggatgagaatatacatattgacctgtatattatgactaatcatgactcagatcttaatacagggatgatctcatagcatttagatatcagatcattcctcagtgtttcatttctcaaattctgtaaaaggaatataagaggaaagacaattcatatacaaagacaacgagattaaaaatatgcagtaggaaaaataattacttaaggggagattttttttacatgaaatctgggcttggatgtgtgtgtgtgtgtgtgtgtgtgtgtgtgcacatatgcactgtggtgggagtggggcaacttggggaatatgttacatgtgtgactttgttttgccctggcgaagttaatgttgttcagaaagggtaaatgtttggacacttgcaattgctcatggatgaatttatatgttttagtcatagaaaaattgtaccctttgatagaagcacattttctttccaaagctggttattaaccacagaattatagcaggtattcataacttaagtttgaaaatcaatagcgtctgcaaatggattaacagattagagaatcaacagcatcggaaaataggttaatgcatattgcttctaacaagtgcatgaagaaatagaagaagctatgtagctttcagttctgacagaaaagggtgaaggagggtatcatttcaagaaaaaaaatagctatcacgcaatggttatctctgaaaatatttgtattaagatgtgtatacatggccaggcatggtggctcatgcctgtaatcccagcactttgggaggcaggtggatcacgaggtcaggagatcaagaccatcctggccaacatggtgaaacctcatctctactaaaaatacaaaaatgagcggggtgtggtggcccatgcctgtagtcccagctgctcgggagactgaatctcttgagcctgggaagcagaggttgcagtgaactgagatcgcgtcactgcactccagcctggtgacagagcgagattccatctcaaaaaaaaaaaacagtatgcacgtacaaatttcttaacctgttatcaatgtctgagctacataattatctttctagttggagtttgttttaggtgtgtaccaactgacatttcagtttttctgtttgaagtccaatgtattagtgactctgtggctgctctcttcacctgccccttgtggcctgtctacaattctaaatggattttgaactcaatgtcgtcgcttctggtttcctgcatataccaatagcattacctatgactttttttttcctgagctattttcactgagctgagctaatgaactaaaactgagttatgtttaatatttgtatcaaatacataaaaggaatactgctttttccttttgtggctcaaaggtagctgcattttaaaatatttgtgaaaataaaaacttttgttattagaaaaat

SEQ ID NO: 318383 - DNA, 4301 bp, Homo sapiens
tacccatgcttttcttattttcacaatagctttccaatgattagacgaattgattctttctgtgactcatcagttcctttcctgtaaaattcatgtcttgctgttgatttgtgaataagaaccagagcttgtagaaaccactttaatcatatccaggagtttgcaagaaacaggtgcttaacactaattcacctcctgaacaagaaaaatgggctgtgaccggaactgtgggctcatcgctggggctgtcattggtgctgtcctggctgtgtttggaggtattctaatgccagttggagacctgcttatccagaagacaattaaaaagagttcgttttctagccaaggaaaatgtaacccaggacgctgaggacaacacagtctctttcctgcagcccaatggtgccatcttcgaaccttcactatcagttggaacagaggctgacaacttcacagttctcaatctggctgtggcagctgcatcccatatctatcaaaatcaatttgttcaaatgatcctcaattcacttattaacaagtcaaaatcttctatgttccaagtcagaactttgagagaactgttatggggctatagggatccatttttgagtttggttccgtaccctgttactaccacagttggtctgttttatccttacaacaatactgcagatggagtttataaagttttcaatggaaaagataacataagtaaagttgccataatcgacacatataaaggtaaaaggaatctgtcctattgggaaagtcactgcgacatgattaatggtacagatgcagcctcatttccaccttttgttgagaaaagccaggtattgcagttcttttcttctgatatttgcaggtcaatctatgctgtatttgaatccgacgttaatctgaaaggaatccctgtgtatagatttgttcttccatccaaggcctttgcctctccagttgaaaacccagacaactattgtttctgcacagaaaaaattatctcaaaaaattgtacatcatatggtgtgctagacatcagcaaatgcaaagaagggagacctgtgtacatttcacttcctcattttctgtatgcaagtcctgatgtttcagaacctattgatggattaaacccaaatgaagaagaacataggacatacttggatattgaacctataactggattcactttacaatttgcaaaacggctgcaggtcaacctattggtcaagccatcagaaaaaattcaagtattaaagaatctgaagaggaactatattgtgcctattctttggcttaatgagactgggaccattggtgatgagaaggcaaacatgttcagaagtcaagtaactggaaaaataaacctccttggcctgatagaaatgatcttactcagtgttggtgtggtgatgtttgttgcttttatgatttcatattgtgcatgcagatcgaaaacaataaaataaacctggctcaagcacaaaccaatttgtgttgttctgattcaataattggtttctgggtggccaattcagaagaagagtgtacatgctcaacaaatcctaggccctgcattcctgtcatcctcatccgggggaaacaccatcatcccagtagctgccctattcaactgcaacagtctccaggaccatcagtatactgcatttcatgtgcaccaaatattttgaaagacatttataaataattggcttatgactcatatttctctatgaataccttcatacagcaggtataactcttttctttatgggcttaaatattttgtcactgatcctgcaaatggacatcattttagcacactagcggtttatattttaaggaccttcattctctgttctgcacctcttctggaaattgagtaaattttgcttttttttttttactcagttgcaacttacgcttggcatcttcagaatgcttttctagcattaagagatgtaaatgataaaggaattattgtatgaaatattacaaagcgtagactatgcattgttattcattataatattttttgctgtcataatcgcctcataaagacaggtttcaaccattaaaatatgttcttccttaaattcctgtgctttttctagttcctcttgtgtcataaaatgtttatcctaattttctctctgaagtatattttatctgaatccacatttctttataaatccatagtccttgctgaaatatgctttctaaatttctaccactttgttctaggctaattttttaagctaattggatgaagaacaaaaagacatttggtttcatcctttacagcagtaggacaattgcaaaggtttttcctttttcataaggagacacattaataggtaactctgtttcttgagcaggggttcacttattctgagagcattagttctcctaaaaagctccagcatagaaagggaagataaaccaaattctagcttgtgttttacccacagaaggatacaggacaaaggaatagtaactggcctgtttggatactaaaatcgaaaataacttttagcctcctccttatgatagccgccagagtaaatgttgagcattactacagaaaagccacaaaccaagaatctacctgtttggaaagatcttttgcatctctgaaggtgcttaaagcatacttagtgcctttccttttaactgggaagataaaagaagtatctgtccaagatattaatatgtaagataacattgtagacatgttcttctgataatacaaggtttattctatttgcattaggatatttgtggacatgtccatctaatataaaggaaagttttttaatcattgaggcatgtagggctgagttatataatgtagaaacttctaaagataattggatgagaatatacatattgacctgtatattatgactaatcatgactcagatcttaatacagggatgatctcatagcatttagatatcagatcattcctcagtgtttcatttctcaaattctgtaaaaggaatataagaggaaagacaattcatatacaaagacaacgagattaaaaatatgcagtaggaaaaataattacttaaggggagattttttttacatgaaatctgggcttggatgtgtgtgtgtgtgtgtgtgtgtgtgtgtgcacatatgcactgtggtgggagtggggcaacttggggaatatgttacatgtgtgactttgttttgccctggcgaagttaatgttgttcagaaagggtaaatgtttggacacttgcaattgctcatggatgaatttatatgttttagtcatagaaaaattgtaccctttgatagaagcacattttctttccaaagctggttattaaccacagaattatagcaggtattcataacttaagtttgaaaatcaatagcgtctgcaaatggattaacagattagagaatcaacagcatcggaaaataggttaatgcatattgcttctaacaagtgcatgaagaaatagaagaagctatgtagctttcagttctgacagaaaagggtgaaggagggtatcatttcaagaaaaaaaatagctatcacgcaatggttatctctgaaaatatttgtattaagatgtgtatacatggccaggcatggtggctcatgcctgtaatcccagcactttgggaggcaggtggatcacgaggtcaggagatcaagaccatcctggccaacatggtgaaacctcatctctactaaaaatacaaaaatgagcggggtgtggtggcccatgcctgtagtcccagctgctcgggagactgaatctcttgagcctgggaagcagaggttgcagtgaactgagatcgcgtcactgcactccagcctggtgacagagcgagattccatctcaaaaaaaaaaaacagtatgcacgtacaaatttcttaacctgttatcaatgtctgagctacataattatctttctagttggagtttgttttaggtgtgtaccaactgacatttcagtttttctgtttgaagtccaatgtattagtgactctgtggctgctctcttcacctgccccttgtggcctgtctacaattctaaatggattttgaactcaatgtcgtcgcttctggtttcctgcatataccaatagcattacctatgactttttttttcctgagctattttcactgagctgagctaatgaactaaaactgagttatgtttaatatttgtatcaaatacataaaaggaatactgctttttccttttgtggctcaaaggtagctgcattttaaaatatttgtgaaaataaaaacttttgttattagaaaaat

SEQ ID NO: 318384 - DNA, 3903 bp, Homo sapiens
tactgagtaattcatgtatcccattggaaaaaaaaaaatttcccctaagtagagatctaagtttctgataaatgtttttaatttttttcttattccaagatgtttctaattaacacctggcagtttttattttatgatctggctacctaatggcatcaggtacattgcaataagataaaaggttcaaacaaaacataaacagaattgaacatttcttaaacttagtacttgtcacatttaaatgcatcatattaacagaagtattgaattataataggaaaaagtaatgtaaggaaagggtattctttaaataaggaatgttttattccattgtctttttctattcctaggaatctgtcctattgggaaagtcactgcgacatgattaatggtacagatgcagcctcatttccaccttttgttgagaaaagccaggtattgcagttcttttcttctgatatttgcaggtcaatctatgctgtatttgaatccgacgttaatctgaaaggaatccctgtgtatagatttgttcttccatccaaggcctttgcctctccagttgaaaacccagacaactattgtttctgcacagaaaaaattatctcaaaaaattgtacatcatatggtgtgctagacatcagcaaatgcaaagaagggagacctgtgtacatttcacttcctcattttctgtatgcaagtcctgatgtttcagaacctattgatggattaaacccaaatgaagaagaacataggacatacttggatattgaacctataactggattcactttacaatttgcaaaacggctgcaggtcaacctattggtcaagccatcagaaaaaattcaagtattaaagaatctgaagaggaactatattgtgcctattctttggcttaatgagactgggaccattggtgatgagaaggcaaacatgttcagaagtcaagtaactggaaaaataaacctccttggcctgatagaaatgatcttactcagtgttggtgtggtgatgtttgttgcttttatgatttcatattgtgcatgcagatcgaaaacaataaaataaacctggctcaagcacaaaccaatttgtgttgttctgattcaataattggtttctgggtggccaattcagaagaagagtgtacatgctcaacaaatcctaggccctgcattcctgtcatcctcatccgggggaaacaccatcatcccagtagctgccctattcaactgcaacagtctccaggaccatcagtatactgcatttcatgtgcaccaaatattttgaaagacatttataaataattggcttatgactcatatttctctatgaataccttcatacagcaggtataactcttttctttatgggcttaaatattttgtcactgatcctgcaaatggacatcattttagcacactagcggtttatattttaaggaccttcattctctgttctgcacctcttctggaaattgagtaaattttgcttttttttttttactcagttgcaacttacgcttggcatcttcagaatgcttttctagcattaagagatgtaaatgataaaggaattattgtatgaaatattacaaagcgtagactatgcattgttattcattataatattttttgctgtcataatcgcctcataaagacaggtttcaaccattaaaatatgttcttccttaaattcctgtgctttttctagttcctcttgtgtcataaaatgtttatcctaattttctctctgaagtatattttatctgaatccacatttctttataaatccatagtccttgctgaaatatgctttctaaatttctaccactttgttctaggctaattttttaagctaattggatgaagaacaaaaagacatttggtttcatcctttacagcagtaggacaattgcaaaggtttttcctttttcataaggagacacattaataggtaactctgtttcttgagcaggggttcacttattctgagagcattagttctcctaaaaagctccagcatagaaagggaagataaaccaaattctagcttgtgttttacccacagaaggatacaggacaaaggaatagtaactggcctgtttggatactaaaatcgaaaataacttttagcctcctccttatgatagccgccagagtaaatgttgagcattactacagaaaagccacaaaccaagaatctacctgtttggaaagatcttttgcatctctgaaggtgcttaaagcatacttagtgcctttccttttaactgggaagataaaagaagtatctgtccaagatattaatatgtaagataacattgtagacatgttcttctgataatacaaggtttattctatttgcattaggatatttgtggacatgtccatctaatataaaggaaagttttttaatcattgaggcatgtagggctgagttatataatgtagaaacttctaaagataattggatgagaatatacatattgacctgtatattatgactaatcatgactcagatcttaatacagggatgatctcatagcatttagatatcagatcattcctcagtgtttcatttctcaaattctgtaaaaggaatataagaggaaagacaattcatatacaaagacaacgagattaaaaatatgcagtaggaaaaataattacttaaggggagattttttttacatgaaatctgggcttggatgtgtgtgtgtgtgtgtgtgtgtgtgtgtgcacatatgcactgtggtgggagtggggcaacttggggaatatgttacatgtgtgactttgttttgccctggcgaagttaatgttgttcagaaagggtaaatgtttggacacttgcaattgctcatggatgaatttatatgttttagtcatagaaaaattgtaccctttgatagaagcacattttctttccaaagctggttattaaccacagaattatagcaggtattcataacttaagtttgaaaatcaatagcgtctgcaaatggattaacagattagagaatcaacagcatcggaaaataggttaatgcatattgcttctaacaagtgcatgaagaaatagaagaagctatgtagctttcagttctgacagaaaagggtgaaggagggtatcatttcaagaaaaaaaatagctatcacgcaatggttatctctgaaaatatttgtattaagatgtgtatacatggccaggcatggtggctcatgcctgtaatcccagcactttgggaggcaggtggatcacgaggtcaggagatcaagaccatcctggccaacatggtgaaacctcatctctactaaaaatacaaaaatgagcggggtgtggtggcccatgcctgtagtcccagctgctcgggagactgaatctcttgagcctgggaagcagaggttgcagtgaactgagatcgcgtcactgcactccagcctggtgacagagcgagattccatctcaaaaaaaaaaaacagtatgcacgtacaaatttcttaacctgttatcaatgtctgagctacataattatctttctagttggagtttgttttaggtgtgtaccaactgacatttcagtttttctgtttgaagtccaatgtattagtgactctgtggctgctctcttcacctgccccttgtggcctgtctacaattctaaatggattttgaactcaatgtcgtcgcttctggtttcctgcatataccaatagcattacctatgactttttttttcctgagctattttcactgagctgagctaatgaactaaaactgagttatgtttaatatttgtatcaaatacataaaaggaatactgctttttccttttgtggctcaaaggtagctgcattttaaaatatttgtgaaaataaaaacttttgttattagaaaaat

SEQ ID NO: 318385 - DNA, 1704 bp, Homo sapiens
aattcctctggcaacaaaccacacactgggatctgacactgtagagtgctttctcttctctttttttgggggggggagggggtgtggttgcatatttaaactctcacgcatttatgtactgaggactgcagtgtaggactttcctgcagaataccatttgatcctattaagaattgtccaaatgttggagcatttgattgaaaaatccttcttagccattttaaagatagctttccaatgattagacgaattgattctttctgtgactcatcagttcctttcctgtaaaattcatgtcttgctgttgatttgtgaataagaaccagagcttgtagaaaccactttaatcatatccaggagtttgcaagaaacaggtgcttaacactaattcacctcctgaacaagaaaaatgggctgtgaccggaactgtgggctcatcgctggggctgtcattggtgctgtcctggctgtgtttggaggtattctaatgccagttggagacctgcttatccagaagacaattaaaaagcaagttgtcctcgaagaaggtacaattgcttttaaaaattgggttaaaacaggcacagaagtttacagacagttttggatctttgatgtgcaaaatccacaggaagtgatgatgaacagcagcaacattcaagttaagcaaagaggtccttatacgtacagagttcgttttctagccaaggaaaatgtaacccaggacgctgaggacaacacagtctctttcctgcagcccaatggtgccatcttcgaaccttcactatcagttggaacagaggctgacaacttcacagttctcaatctggctgtggcagctgcatcccatatctatcaaaatcaatttgttcaaatgatcctcaattcacttattaacaagtcaaaatcttctatgttccaagtcagaactttgagagaactgttatggggctatagggatccatttttgagtttggttccgtaccctgttactaccacagttggtctgttttatccttacaacaatactgcagatggagtttataaagttttcaatggaaaagataacataagtaaagttgccataatcgacacatataaaggtaaaaggaatctgtcctattgggaaagtcactgcgacatgattaatggtacagatgcagcctcatttccaccttttgttgagaaaagccaggtattgcagttcttttcttctgatatttgcaggtcaatctatgctgtatttgaatccgacgttaatctgaaaggaatccctgtgtatagatttgttcttccatccaaggcctttgcctctccagttgaaaacccagacaactattgtttctgcacagaaaaaattatctcaaaaaattgtacatcatatggtgtgctagacatcagcaaatgcaaagaagggagacctgtgtacatttcacttcctcattttctgtatgcaagtcctgatgtttcagaacctattgatggattaaacccaaatgaagaagaacataggacatacttggatattgaacctataactggattcactttacaatttgcaaaacggctgcaggtcaacctattggtcaagccatcagaaaaaattcaagtattaaagaatctgaagaggaactatattgtgcctattctttggcttaatgagactgcgaccattggtgatgagattactccaggtcagaagtc

SEQ ID NO: 318386 - DNA, 3399 bp, Homo sapiens
ggggtcacaagaaaataacccaatggtccttttgaaagtagtacatacacctttaaatggaacttggtctgaagggtgtggaaatgctggtccagggcagatgcacttcagctaccgttccttgcctggtgtgtgcttgtcttgaagcacccttcttatgtgcctttctggaatgggaatgtgttttgccctattggtgaagtccgttagagaacttctctctgcagctagagaaactgaactgattaataaaaagtatgatatctaagatatactgccactctacaggtagtaaatgattcttcacatttgtgcgccagctacatcatgacccttggtaataccgaccaacaggatgaaaattggatatgctttacttttacaaagcacaccttatcttttagttgaagaaatggtggcactatttctttttttgcactaagcaactgcacatttcaaaaggattattgagatgttatgaaaatctctaccttgcacaaaaaaaaacccagcagcttttaaaattcatcatttccacaactgaattgatttccgtttctacagacctggctcaagcacaaaccaatttgtgttgttctgattcaataattggtttctgggtggccaattcagaagaagagtgtacatgctcaacaaatcctaggccctgcattcctgtcatcctcatccgggggaaacaccatcatcccagtagctgccctattcaactgcaacagtctccaggaccatcagtatactgcatttcatgtgcaccaaatattttgaaagacatttataaataattggcttatgactcatatttctctatgaataccttcatacagcaggtataactcttttctttatgggcttaaatattttgtcactgatcctgcaaatggacatcattttagcacactagcggtttatattttaaggaccttcattctctgttctgcacctcttctggaaattgagtaaattttgcttttttttttttactcagttgcaacttacgcttggcatcttcagaatgcttttctagcattaagagatgtaaatgataaaggaattattgtatgaaatattacaaagcgtagactatgcattgttattcattataatattttttgctgtcataatcgcctcataaagacaggtttcaaccattaaaatatgttcttccttaaattcctgtgctttttctagttcctcttgtgtcataaaatgtttatcctaattttctctctgaagtatattttatctgaatccacatttctttataaatccatagtccttgctgaaatatgctttctaaatttctaccactttgttctaggctaattttttaagctaattggatgaagaacaaaaagacatttggtttcatcctttacagcagtaggacaattgcaaaggtttttcctttttcataaggagacacattaataggtaactctgtttcttgagcaggggttcacttattctgagagcattagttctcctaaaaagctccagcatagaaagggaagataaaccaaattctagcttgtgttttacccacagaaggatacaggacaaaggaatagtaactggcctgtttggatactaaaatcgaaaataacttttagcctcctccttatgatagccgccagagtaaatgttgagcattactacagaaaagccacaaaccaagaatctacctgtttggaaagatcttttgcatctctgaaggtgcttaaagcatacttagtgcctttccttttaactgggaagataaaagaagtatctgtccaagatattaatatgtaagataacattgtagacatgttcttctgataatacaaggtttattctatttgcattaggatatttgtggacatgtccatctaatataaaggaaagttttttaatcattgaggcatgtagggctgagttatataatgtagaaacttctaaagataattggatgagaatatacatattgacctgtatattatgactaatcatgactcagatcttaatacagggatgatctcatagcatttagatatcagatcattcctcagtgtttcatttctcaaattctgtaaaaggaatataagaggaaagacaattcatatacaaagacaacgagattaaaaatatgcagtaggaaaaataattacttaaggggagattttttttacatgaaatctgggcttggatgtgtgtgtgtgtgtgtgtgtgtgtgtgtgcacatatgcactgtggtgggagtggggcaacttggggaatatgttacatgtgtgactttgttttgccctggcgaagttaatgttgttcagaaagggtaaatgtttggacacttgcaattgctcatggatgaatttatatgttttagtcatagaaaaattgtaccctttgatagaagcacattttctttccaaagctggttattaaccacagaattatagcaggtattcataacttaagtttgaaaatcaatagcgtctgcaaatggattaacagattagagaatcaacagcatcggaaaataggttaatgcatattgcttctaacaagtgcatgaagaaatagaagaagctatgtagctttcagttctgacagaaaagggtgaaggagggtatcatttcaagaaaaaaaatagctatcacgcaatggttatctctgaaaatatttgtattaagatgtgtatacatggccaggcatggtggctcatgcctgtaatcccagcactttgggaggcaggtggatcacgaggtcaggagatcaagaccatcctggccaacatggtgaaacctcatctctactaaaaatacaaaaatgagcggggtgtggtggcccatgcctgtagtcccagctgctcgggagactgaatctcttgagcctgggaagcagaggttgcagtgaactgagatcgcgtcactgcactccagcctggtgacagagcgagattccatctcaaaaaaaaaaaacagtatgcacgtacaaatttcttaacctgttatcaatgtctgagctacataattatctttctagttggagtttgttttaggtgtgtaccaactgacatttcagtttttctgtttgaagtccaatgtattagtgactctgtggctgctctcttcacctgccccttgtggcctgtctacaattctaaatggattttgaactcaatgtcgtcgcttctggtttcctgcatataccaatagcattacctatgactttttttttcctgagctattttcactgagctgagctaatgaactaaaactgagttatgtttaatatttgtatcaaatacataaaaggaatactgctttttccttttgtggctcaaaggtagctgcattttaaaatatttgtgaaaataaaaacttttgttattagaaaaat

SEQ ID NO: 318387 - DNA, 1136 bp, Homo sapiens
aattcctctggcaacaaaccacacactgggatctgacactgtagagtgctttctcttctctttttttgggggggggagggggtgtggttgcatatttaaactctcacgcatttatgtactgaggactgcagtgtaggactttcctgcagaataccatttgatcctattaagaattgtccaaatgttggagcatttgattgaaaaatccttcttagccattttaaagatagctttccaatgattagacgaattgattctttctgtgactcatcagttcctttcctgtaaaattcatgtcttgctgttgatttgtgaataagaaccagagcttgtagaaaccactttaatcatatccaggagtttgcaagaaacaggtgcttaacactaattcacctcctgaacaagaaaaatgggctgtgaccggaactgtgggctcatcgctggggctgtcattggtgctgtcctggctgtgtttggaggtattctaatgccagttggagacctgcttatccagaagacaattaaaaagcaagttgtcctcgaagaaggtacaattgcttttaaaaattgggttaaaacaggcacagaagtttacagacagttttggatctttgatgtgcaaaatccacaggaagtgatgatgaacagcagcaacattcaagttaagcaaagaggtccttatacgtacagagttcgttttctagccaaggaaaatgtaacccaggacgctgaggacaacacagtctctttcctgcagcccaatggtgccatcttcgaaccttcactatcagttggaacagaggctgacaacttcacagttctcaatctggctgtggcagctgcatcccatatctatcaaaatcaatttgttcaaatgatcctcaattcacttattaacaagtcaaaatcttctatgttccaagtcagaactttgagagaactgttatggggctatagggatccatttttgagtttggttccgtaccctgttactaccacagttggtctgttttatccttacaacaatactgcagatggagtttataaagttttcaatggaaaagataacataagtaaagttgccataatcgacacatataaaggtaaaaggtaagtattctggtaaaatgtgcatg

SEQ ID NO: 318388 - DNA, 2503 bp, Homo sapiens
aattcctctggcaacaaaccacacactgggatctgacactgtagagtgctttctcttctctttttttgggggggggagggggtgtggttgcatatttaaactctcacgcatttatgtactgaggactgcagtgtaggactttcctgcagaataccatttgatcctattaagaattgtccaaatgttggagcatttgattgaaaaatccttcttagccattttaaagatagctttccaatgattagacgaattgattctttctgtgactcatcagttcctttcctgtaaaattcatgtcttgctgttgatttgtgaataagaaccagagcttgtagaaaccactttaatcatatccaggagtttgcaagaaacaggtgcttaacactaattcacctcctgaacaagaaaaatgggctgtgaccggaactgtgggctcatcgctggggctgtcattggtgctgtcctggctgtgtttggaggtattctaatgccagttggagacctgcttatccagaagacaattaaaaagcaagttgtcctcgaagaaggtacaattgcttttaaaaattgggttaaaacaggcacagaagtttacagacagttttggatctttgatgtgcaaaatccacaggaagtgatgatgaacagcagcaacattcaagttaagcaaagaggtccttatacgtacagagttcgttttctagccaaggaaaatgtaacccaggacgctgaggacaacacagtctctttcctgcagcccaatggtgccatcttcgaaccttcactatcagttggaacagaggctgacaacttcacagttctcaatctggctgtggcagtgagtagacaaacaacaaagttatctattttaaaatactctagaactcatgtaattaatcctatcattagaattattaggttttacttgtttttccatttttatcaaaacgtattcctatatcattattttgaatggaggcatggtcatttggaaagtgacaaaatcataagaatcgactgcattagaagaccactttatttttttcattattttttgtcgaaacattctctatatttaatttcaattttataacagattacaggaagatgcttaagaaacaagtacaacatttgtttcagtatgtctttaaatgaaagacttttaagtatgtaagcaactatataataaaaggtttccaaacgcagcctgtaagaaatcaggcaaattttactataagcaataaaccattccgagctttccagacagtgtaccagtagctgtaccagtgggcaataacctttaaccaaacaaaaacaaacaaacaaacaaacaaaagcactttgcaatttgttgctgcaaaatggggagaaaaaaagagtatataaacttgatggaatcacaactgtcaatataatttaagggaaaataaagtcgataaggttgatggtgtctattgtttggaaagtcgaattcggctatttgcttggggctctagagaccacaccactgaataaacaaaactctgcagagtctagctatccgccaacagggggtgccgtccaaattcatggcaaataaagggcatttggtgctcaccattcacaacaggcgggcatttatgtggatgaagtacaatttcttcagcaagctcagcaaaaactcttaaggggcaaatatgaactctgcattttaagaaaaatagaaaacggaaacacaaaatcctaaaaagtatatgaaggctctgcattagcacactggcatcaaaccacacatccacagcacatcctaattctatgggaaacaatccttgcttatcggaggtgcatatctaaattcaatagcttaccaatatattcttgggagtaggccaaaaggaaacagaaaacccacattaaaaaaagaagtttcttttcctaaacattttcctgaagctgaaattgaagtggagaggaagtcagttgtcctcgtcgaaatcgtagtcctcctcatcctccccaacctgggacaccggggtcttcaccctggagatgctgtactgagacctgttggagcttgtggccagcatttcatccgcaccattggtcaggtcactggcagagagcctcgtgccgttagacgtggaacctgccgttgtgatgaacacgcctgcaacaattgtctgcgccatttctgtcacgtgtggctccagcgcctttgggaccagacttatggctttttttttttttaagttctgggatacatgtgctgaatgtgcaggattgttacataggtatacatgtgccatggtgctttgctgcacctatcaaaccatcatctaggttttaagccccgtatgccttaatgcattagatatttgagaagaccactttaagtgtatcgttaaataaatagagcttaacttggaatgtcgtcttcttgtggctggcactgaggcaaagaaatgtaatcatctaggaattagacgaattgcattttgagttttggcaggatctggcagtaatt

SEQ ID NO: 318389 - DNA, 932 bp, Homo sapiens
ggggatgcaactaagttgctgagacaagggaagagagatgagggtgagagttctccttagataagatttcaatatgttaatcatgtgtagaaagaaaattaaaaaggaggaatatgaagaaattcagatatgacattattagttctgccactggtaggcattagaagcaagaaaagggagacggaccgaggaagccactttggtgaaacaaaaagaaaagcatttgtttatttagaacgggcaaaatgatacgtttcagtgggtgttttctttgtactttgatctttttgtactgatatttaagcttctgttttatgatctctttctaatgatagaaccagagcttgtagaaaccactttaatcatatccaggagtttgcaagaaacaggtgcttaacactaattcacctcctgaacaagaaaaatgggctgtgaccggaactgtgggctcatcgctggggctgtcattggtgctgtcctggctgtgtttggaggtattctaatgccagttggagacctgcttatccagaagacaattaaaaaggtacaagtagtccaaagaatatgccttctcattttgattgattctaacttctctttttttgctttgtatttacctgctttatatttcatggtaactgctaattttgtatctttgacataaaggtaattatgaaccactgcaactctatatgatgcgactttatgtgaaatgttataagtataatgtatatttaacatgactccattgctgtcttaaatataaataccaaattctattaaaagctgtctacaggtatgcatgttagtagaaataattgttttaagttatgtccaaagagcatgttggcatgcttttgagtaggaaataagtgagtatattttgtaaaagcacatttataaaagaagttgcactttagttaatactgaga

SEQ ID NO: 318390 - DNA, 910 bp, Homo sapiens
ggaagaatctggaggtgatgaagaatccggtggtgatctgagttccttctaactgtgtctaacagtcctaatctgttaataggtttgttgcttttatgatttcatattgtgcatgcagatcgaaaacaataaaataagtaagtatgtaccaaaaaatattgcttcaataatattagcttatatattacttgttttcactttatcaaagagaagttacatattaggccatatatatttctagacatgtctagccactgatcatttttaaatataggtaaataaacctataaatattatcacgcagatcactaaagtatatctttaattctgggagaaatgagataaaagatgtacttgtgaccattgtaacaatagcacaaataaagcacttgtgccaaagttgtccaaaaaagactggttcatttctcaattatatagctagttatatattatctgatacttaaaaataattgactaggaaatggtttcataagaccaggattgctgcatgtagacatgctggccgtgcattttccaaatccagaaaagtcctgaacaaaaatttgaatataatagtatcaggaaataggggaaaatagtgttcaacatagtagaaccaagtactcagagtggtgtacaagagtttaggcctctatgctttagatattagtgtccatgcactcttaaagatgaatgaatgcctgacctttcctaaaggaaaacctttttttagttatcacaggtaacattggtgttgcctgtgggggagaattttttactttctccctatttttcttcagcccacctcaaggcaatgtaaataaaagcagtatgtgtgttataataacttatttagttgtttactgtgtgccagtaccatgctaaagaaagattctttatctcacatgat

SEQ ID NO: 318391 - DNA, 607 bp, Homo sapiens
atgcaaaagtcaaagagtatatgtgagtttgactatacttattgtcaaaatctataaaattgttgtagcgcaacagttttaatcatctttatttttgtattttccttttcaaaaagtaaatgaaattctaggattttagtagttatgttttagtttaaacaatgacacatggattctaactgaatatatatttgaccaggaattatctgagatcttatattttgttgctgatttttgattttttaaaaaccatttcaagtaactcacaaatctaactaactaaaaccttgacattcgattgggcaaataaattgtgtgtatctatatggatgcatgtgtatataactataactatatatgcagttttaaaagtttcaattagtcctgtttaaccttaagttactaccttctcttctgctgtaagaaaaataagttttgaatagtataaaataatgtttttaaaagttggtaattatttagttgttctctttttagataactggattcactttacaatttgcaaaacggctgcaggtcaacctattggtcaagccatcagaaaaaattcagtgagtctcttgaaaatggttattttgatatgatctgt

SEQ ID NO: 318392 - DNA, 1256 bp, Homo sapiens
  misc_feature (1201)..(1201): n is a, c, g, or t
  misc_feature (1218)..(1218): n is a, c, g, or t
  misc_feature (1235)..(1235): n is a, c, g, or t
aattcctctggcaacaaaccacacactgggatctgacactgtagagtgctttctcttctctttttttgggggggggagggggtgtggttgcatatttaaactctcacgcatttatgtactgaggactgcagtgtaggactttcctgcagaataccatttgatcctattaagaattgtccaaatgttggagcatttgattgaaaaatccttcttagccattttaaagatagctttccaatgattagacgaattgattctttctgtgactcatcagttcctttcctgtaaaattcatgtcttgctgttgatttgtgaataagaaccagagcttgtagaaaccactttaatcatatccaggagtttgcaagaaacaggtgcttaacactaattcacctcctgaacaagaaaaatgggctgtgaccggaactgtgggctcatcgctggggctgtcattggtgctgtcctggctgtgtttggaggtattctaatgccagttggagacctgcttatccagaagacaattaaaaagcaagttgtcctcgaagaaggtacaattgcttttaaaaattgggttaaaacaggcacagaagtttacagacagttttggatctttgatgtgcaaaatccacaggaagtgatgatgaacagcagcaacattcaagttaagcaaagaggtccttatacgtacagagttcgttttctagccaaggaaaatgtaacccaggacgctgaggacaacacagtctctttcctgcagcccaatggtgccatcttcgaaccttcactatcagttggaacagaggctgacaacttcacagttctcaatctggctgtggcagctgcatcccatatctatcaaaatcaatttgttcaaatgatcctcaattcacttattaacaagtcaaaatcttctatgttccaagtcagaactttgagagaactgttatggggctatagggatccatttttgagtttggttccgtaccctgttactaccacagttggtctgttttatccttacaacaatactgcagatggagtttataaagttttcaatggaaaagataacataagtaaagttgccataatcgacacatataaaggtaaaaggggggtaaaaaagggaatcctgtccctaatttggggaaaaggtccactggcggaacattggatttaaaatggggtaacaagaattggccangccctcaattttccaanccttttttggttggaangaaaaaaaggcccaagggtta

SEQ ID NO: 318393 - DNA, 978 bp, Homo sapiens
  misc_feature (914)..(914): n is a, c, g, or t
  misc_feature (963)..(963): n is a, c, g, or t
  misc_feature (970)..(970): n is a, c, g, or t
ggggatgcaactaagttgctgagacaagggaagagagatgagggtgagagttctccttagataagatttcaatatgttaatcatgtgtagaaagaaaattaaaaaggaggaatatgaagaaattcagatatgacattattagttctgccactggtaggcattagaagcaagaaaagggagacggaccgaggaagccactttgaaccagagcttgtagaaaccactttaatcatatccaggagtttgcaagaaacaggtgcttaacactaattcacctcctgaacaagaaaaatgggctgtgaccggaactgtgggctcatcgctggggctgtcattggtgctgtcctggctgtgtttggaggtattctaatgccagttggagacctgcttatccagaagacaattaaaaagcaagttgtcctcgaagaaggtacaattgcttttaaaaattgggttaaaacaggcacagaagtttacagacagttttggatctttgatgtgcaaaatccacaggaagtgatgatgaacagcagcaacattcaagttaagcaaagaggtccttatacgtacagagttcgttttctagccaaggaaaatgtaacccaggacgctgaggacaacacagtctctttcctgcagcccaatggtgccatcttcgaaccttcactatcagttggaacagaggctgacaacttcacagttctcaatctggctgtggcagctgcatcccatatctatcaaaatcaatttgttcaaatgatcctcaattcacttattaacaagtcaaaatcttctatgttccaagtcagaactttgagagaactgttatggggctatagggatccatttttgagtttggttccgtaccctgttactaccacagttggtctgttttatccttacacatactgcanatggagttataagtttcatggaaagatacttagtaagtgcatatcgccntttaagnaaaggatt

SEQ ID NO: 318394 - DNA, 652 bp, Homo sapiens
agccattagagcagaaattctctcctgccctgtacttccttccccacttcctacctttgatagttggaatactggcaggcatctcaccaccaagagaagacaaactaaaggatcaaaagcaacgtactgaagataggagagcaaaagatgaaaataacttggatcgttagtgatcctgaagggccaccaaataaacctttggatgcttacctctatacttcctattgacaaaacacttctctacttcaagttttatcacggaccaggactgatcaactaaatgcgaatagatgtgttctatatcagcttccctagaacacaaagcctgaatcaaggatgaaaggaagatgctttttggcaaggcataaattcagaggatccaggatgaggacaaaggcaagtgagctatgcaagatgtaaaatgatgtttcaacaacacaaagctgattgtttggcagttgcatctatttcatgcatagaacttctccagatggactaccaagaaacactgtgcttcaaagaatttgataaggactatgaaaggataacagagctgtgatggaactcgagatctaagtgattctaagtgaccccccaacacacaatgaagcctctgcaaagaaaagcttaaattaaaatagaacacaaactc

SEQ ID NO: 318395 - DNA, 339 bp, Homo sapiens
cctcagagaaatgccaagttcatttaaaataataaacaaatctgtgtgtgtgaagacacccagaggacccacacaggaactgcaatcaagacttctgtgtgtgtgggtggtggaggtggggttcatcttcagatagacgacactaccaggaacctgtcaggagctgacagcaaagcttgattcctgtaaaaaagctccaaggtcatgaacagcccacatgcttccctcctgtccattacacctcggggtcttctgccagcttcctcagtgtgttcaacaacactgggcctgactccaacttctgcagacagtggcacagcactgcccctgaaaggcact

SEQ ID NO: 318396 - DNA, 598 bp, Homo sapiens
taaatggactggctacgtagtatcagaaaaaggcaaacagtttccccagatgagatgacggactgacttgcctgcggtctcgaaaagccaagagactcagcagcaactcccaggagggaaatttccaccactgtccatgtgagatcagtaacgggggacaaagggaggtgggaaaaggctggagccggtagggtggtcagcccatcagagcaggtctatcaacatcgggggaaaaggttacaatgcctgggggcaggaggaggggggtggccgcttccaactcctgtcactgacatttttgtctccaggcattgaggaagggcttgtcttaaactggctgagagtcctatttgtaaggcagccttaattggagacattcagaaaaggaggaaagcgtaccatttctataaacgttaagtcccgtccacgattttcctctggaggattagaaaagcattcttcatgctgcactggagggaggttttcagtctgtgttctggagtcctcgtttaaaaagcgtatgtttggagcccgcattttaaaaccatatctacgaactatctcagaggaggaccccggatttgctccgtcagcatct

SEQ ID NO: 318397 - DNA, 1057 bp, Homo sapiens
gtactgaagcctggccaccccagacttcatcccgtccttccacctactagttggaagcgccgtaggttagcaatgcattttagtctttctctccattcacatttactgagagcacaccacgtgcatgttgctgcaacaggcatttccgatagagccgatccatgagctaacaatgtctgaaaacaaatgttatggaactgttggcatttctgagatttggcctttgccatttgatagactttgcttcccaggatgctgtcattttgtgattttttataattacaaggaatttggtaccatgttgttttcaaaaaacctcctagaaagtctccatgtatgctctagaagttgctctacataacagttcagcaagcaagtgttccttctcttgagctgcgtccctcaggaagctgtacctttagggtgtgctttccactttttatttcctctcatttcactcctttcgttgtttgctatatcctaaaatatgtgaagtgagagaaaaaatatcatttcttctcattaaatctcctgcattaaatctaagaatcctttaaaataatcacacctgataagtgttttatgcatttccctccctggagtgttatcatccatcaagccagtatcatcatccacctgcttattccttgggactaatgagagccaagttaaatagcaaatgacttctcaccccttcctagtcctcatgcctgaggaataagggcgacattaatgggagcgggagagtggtggctttggttgagatgcacgttcacagactagaaaagtgcctcacctccatggtgtatatgtgccaccttttcttaatccagtctatcattgttggacatttgggttggttccaagtctttgctattgtgaatagtgccgcaataaacataagtgtgcatgtgtctttatagcagcatgatttataatcctttgggtatatacccagtaatgggatggctgggtcaaatggtatttctagttctagatccctgaggaatctccacactgacttccacaatggttgaactagttcacagtcccacca

SEQ ID NO: 318398 - DNA, 570 bp, Homo sapiens
ggggcatatgttctctttggtgccacacaaaacctgtagtacatgatacagtgttgcttcccccctccttttccttccatatatatttgttttgttttgggcattgcattacttttttgaatttttaagaatctctaacattagtctgaaggatgttctgagggccagacattagaatttgtgagtttttttgttgctggttgtactttcctatttagaagacagaccgttctgacagttgttgtgtagcttcatgccttccccagtaactaacccatgaacagtacaccccttttatctgacttgttgataatgttagagatacacattagggaggccaagctgctttacgcattttgccagactaacgtttgaccaaagatctgagcacgtatggcccagtcaagttgacacataatgttaatcatcacaaaagtcttgcctcatagttgggaaaaattaatcctagaataaatgctattctggtcttgcttagcaaaggttaagagcagaccaaaagatcaacctttccaacaaagctgaagataatgttagagatacggtaccgag

SEQ ID NO: 318399 - DNA, 2641 bp, Homo sapiens
ggggcatatgttctctttggtgccacacaaaacctgtagtacatgatacagtgttgcttcccccctccttttccttccatatatatttgttttgttttgggcattgcattacttttttgaatttttaagaatctctaacattagtctgaaggatgttctgagggccagacattagaatttgtgagtttttttgttgctggttgtactttcctatttagaagacagaccgttctgacagttgttgtgtagcttcatgccttccccagtaactaacccatgaacagtacaccccttttatctgacttgttgataatgaccttaaaaatgttaggaaatgggccgggcgcggtggctcgtgcctgtaatccagcactttgggaggccgaggcgagcggatcatgaggtcaagagatcgagaccatcctggtcaacatggtgaaaccccgactctactaaaaaaaatacaaaaattggccgggcgtgttggcgggcgcctgtggtcccagctgcttgggaggctgaggcaggagaatcacctgaacccaggaggcggaggttgcagtgagcagagattgcgccactgcactccagcctgggcgacagagcgagactccgtctcaaaaaaaaaaaaaaaaaaaaaaggttgggaaatattggtgtataatccccatgtctaacaaggaagaagtcaaaagcaaaagatagtggtattgccgaaaactcattatttctagttagttcatctgtggaaaaggatatcgttcttgaggagaggggttctattatgctatagttttctatggaaatgtacaaatgctttcctcattgctctggatgactatttagtttaaataatatacctttgtcatggggaagaccatgattgtggcttcttctaccccaactttgaatgagagagcactgtaagcagaaactgccatcagtctcctgggcaggacctggaggtaactttctgagctgtaaaatagtaattcctaagagagcttacaaactgcttccacacagaaaatagcgcagggaggacagttattagtacccctattctagaagagaaagctgaggctcaagccattaagtgacttgccaaaagctgtgacatagctgggaagtggcagatttggggatataaccaggtcttgcaagtccagtgctgtctccaagtagccacgctcacagctgagaacaccttagaggacaatatcgacttcttacagactaccaagcccccagtcatccagggaaattcagagaccaattgactgccaggtggcaaatccacatgtgtactgcggtctttagagatcatttagagcttgcacacatctgtgtcttcttgtgggaaacctctaggtattctgtctgatcagcactgtgaggaagttggtgggaaaaggccactgataagaacaaacaatgggcagaaggaagcacattgcaataaatttccccagagagagttcctttacattccattcaccaaaaacctctctggaactgtcaggttcagaatatcaaccaagaccatatcatttagaattcattggcatgtagaggtgactcgattcctaaaagaagcctctctcccatgaaccacgatgtacgttccacagaggcagaaaccgccgtaggttagcaatgcattttagtctttctctccattcacatttactgagagcacaccacgtgcatgttgctgcaacaggcatttccgatagagccgatccatgagctaacaatgtctgaaaacaaatgttatggaactgttggcatttctgagatttggcctttgccatttgatagactttgcttcccaggatgctgtcattttgtgattttttataattacaaggaatttggtaccatgttgttttcaaaaaacctcctagaaagtctccatgtatgctctagaagttgctctacataacagttcagcaagcaagtgttccttctcttgagctgcgtccctcaggaagctgtacctttagggtgtgctttccactttttatttcctctcatttcactcctttcgttgtttgctatatcctaaaatatgtgaagtgagagaaaaaatatcatttcttctcattaaatctcctgcattaaatctaagaatcctttaaaataatcacacctgataagtgttttatgcatttccctccctggagtgttatcatccatcaagccagtatcatcatccacctgcttattccttgggactaatgagagccaagttaaatagcaaatgacttctcaccccttcctagtcctcatgcctgaggaataagggcgacattaatgggagcgggagagtggtggctttggttgagatgcacgttcacagactagaaaagtgcctcacctccatggtgtatatgtgccaccttttcttaatccagtctatcattgttggacatttgggttggttccaagtctttgctattgtgaatagtgccgcaataaacataagtgtgcatgtgtctttatagcagcatgatttataatcctttgggtatatacccagtaatgggatggctgggtcaaatggtatttctagttctagatccctgaggaatctccacactgacttccacaatggttgaactagttcacagtcccacca

SEQ ID NO: 318400 - DNA, 2238 bp, Homo sapiens
ggggcatatgttctctttggtgccacacaaaacctgtagtacatgatacagtgttgcttcccccctccttttccttccatatatatttgttttgttttgggcattgcattacttttttgaatttttaagaatctctaacattagtctgaaggatgttctgagggccagacattagaatttgtgagtttttttgttgctggttgtactttcctatttagaagacagaccgttctgacagttgttgtgtagcttcatgccttccccagtaactaacccatgaacagtacaccccttttatctgacttgttgataatgaccttaaaaatgttaggaaatgggccgggcgcggtggctcgtgcctgtaatccagcactttgggaggccgaggcgagcggatcatgaggtcaagagatcgagaccatcctggtcaacatggtgaaaccccgactctactaaaaaaaatacaaaaattggccgggcgtgttggcgggcgcctgtggtcccagctgcttgggaggctgaggcaggagaatcacctgaacccaggaggcggaggttgcagtgagcagagattgcgccactgcactccagcctgggcgacagagcgagactccgtctcaaaaaaaaaaaaaaaaaaaaaaggttgggaaatattggtgtataatccccatgtctaacaaggaagaagtcaaaagcaaaagatagtggtattgccgaaaactcattatttctagttagttcatctgtggaaaaggatatcgttcttgaggagaggggttctattatgctatagttttctatggaaatgtacaaatgctttcctcattgctctggatgactatttagtttaaataatatacctttgtcatggggaagaccatgattgtggcttcttctaccccaactttgaatgagagagcactgtaagcagaaactgccatcagtctcctgggcaggacctggaggtaactttctgagctgtaaaatagtaattcctaagagagcttacaaactgcttccacacagaaaatagcgcagggaggacagttattagtacccctattctagaagagaaagctgaggctcaagccattaagtgacttgccaaaagctgtgacatagctgggaagtggcagatttggggatataaccaggtcttgcaagtccagtgctgtctccaagtagccacgctcacagctgagaacaccttagaggacaatatcgacttcttacagactaccaagcccccagtcatccagggaaattcagagaccaattgactgccaggtggcaaatccacatgtgtactgcggtctttagagatcatttagagcttgcacacatctgtgtcttcttgtgggaaacctctaggtattctgtctgatcagcactgtgaggaagttggtgggaaaaggccactgataagaacaaacaatgggcagaaggaagcacattgcaataaatttccccagagagagttcctttacattccattcaccaaaaacctctctggaactgtcaggttcagaatatcaaccaagaccatatcatttagaattcattggcatgtagaggtgactcgattcctaaaagaagcctctctcccatgaaccacgatgtacgttccacagaggcagaaaccgccgtaggttagcaatgcattttagtctttctctccattcacatttactgagagcacaccacgtgcatgttgctgcaacaggcatttccgatagagccgatccatgagctaacaatgtctgaaaacaaatgttatggaactgttggcatttctgagatttggcctttgccatttgatagactttgcttcccaggatgctgtcattttgtgattttttataattacaaggaatttggtaccatgttgttttcaaaaaacctcctagaaagtctccatgtatgctctagaagttgctctacataacagttcagcaagcaagtgttccttctcttgagctgcgtccctcaggaagctgtacctttagggtgtgctttccactttttatttcctctcatttcactcctttcgttgtttgctatatcctaaaatatgtgaagtgagagaaaaaatatcatttcttctcattaaatctcctgcattaaatctaagaatcctttaaaataatcacacctgataagtgttttatgcatttccctcccattcctaacctgaattcaggattaaagttaatgattatgaaataaaaactaaataac

SEQ ID NO: 318401 - DNA, 4875 bp, Homo sapiens
  misc_feature (273)..(273): n is a, c, g, or t
ttccaggactgcagaactggcccagacctctgtattggaaaggtctttatggaccagggagtccggtgtcttttttacggggacccctgggctgcgagttgcacagtccaattcgctgttgttagggcctcagtttcccaaaaggcacagggacggggggagggtggcggctcgatgggggagccgcctccagggggcccccccgccctgtgcccacggcgcggcccctttaaggaggcccgcctggctccgctccatcgcgcatcgcggccncctccccccggccctccccttcctgcggcgcagagtgcgggccgggcgggagtgcggcgagagccggctggctgagcttagcgtccgaggaggcggcggcggcggcggcggcagcggcggcggcggggctgtggggcggtgcggaagcgagaggcgaggagcgcgcgggccgtggccagagtctggcggcggcctggcggagcggagagcagcgcccgcgcctcgccgtgcggaggagccccgcacacaatagcggcgcgcgcagcccgcgcccttccccccggcgcgccccgccccgcgcgccgagcgccccgctccgcctcacctgccaccagggagtgggcgggcattgttcgccgccgccgccgccgcgcggggccatgggggccgcccggcgcccggggccgggcctggcgaggccgccgcgccgccgctgagacgggccccgcgcgcagcccggcggcgcaggtaaggccggccgcgccatggtggacccggtgggcttcgcggaggcgtggaaggcgcagttcccggactcagagcccccgcgcatggagctgcgctcagtgggcgacatcgagcaggagctggagcgctgcaaggcctccattcggcgcctggagcaggaggtgaaccaggagcgcttccgcatgatctacctgcagacgttgctggccaaggaaaagaagagctatgaccggcagcgatggggcttccggcgcgcggcgcaggcccccgacggcgcctccgagccccgagcgtccgcgtcgcgcccgcagccagcgcccgccgacggagccgacccgccgcccgccgaggagcccgaggcccggcccgacggcgagggttctccgggtaaggccaggcccgggaccgcccgcaggcccggggcagccgcgtcgggggaacgggacgaccggggaccccccgccagcgtggcggcgctcaggtccaacttcgagcggatccgcaagggccatggccagcccggggcggacgccgagaagcccttctacgtgaacgtcgagtttcaccacgagcgcggcctggtgaaggtcaacgacaaagaggtgtcggaccgcatcagctccctgggcagccaggccatgcagatggagcgcaaaaagtcccagcacggcgcgggctcgagcgtgggggatgcatccaggcccccttaccggggacgctcctcggagagcagctgcggcgtcgacggcgactacgaggacgccgagttgaacccccgcttcctgaaggacaacctgatcgacgccaatggcggtagcaggcccccttggccgcccctggagtaccagccctaccagagcatctacgtcgggggcatgatggaaggggagggcaagggcccgctcctgcgcagccagagcacctctgagcaggagaagcgccttacctggccccgcaggtcctactccccccggagttttgaggattgcggaggcggctataccccggactgcagctccaatgagaacctcacctccagcgaggaggacttctcctctggccagtccagccgcgtgtccccaagccccaccacctaccgcatgttccgggacaaaagccgctctccctcgcagaactcgcaacagtccttcgacagcagcagtccccccacgccgcagtgccataagcggcaccggcactgcccggttgtcgtgtccgaggccaccatcgtgggcgtccgcaagaccgggcagatctggcccaacgatggcgagggcgccttccatggagacgcagatggctcgttcggaacaccacctggatacggctgcgctgcagaccgggcagaggagcagcgccggcaccaagatgggctgccctacattgatgactcgccctcctcatcgccccacctcagcagcaagggcaggggcagccgggatgcgctggtctcgggagccctggagtccactaaagcgagtgagctggacttggaaaagggcttggagatgagaaaatgggtcctgtcgggaatcctggctagcgaggagacttacctgagccacctggaggcactgctgctgcccatgaagcctttgaaagccgctgccaccacctctcagccggtgctgacgagtcagcagatcgagaccatcttcttcaaagtgcctgagctctacgagatccacaaggagttctatgatgggctcttcccccgcgtgcagcagtggagccaccagcagcgggtgggcgacctcttccagaagctggccagccagctgggtgtgtaccgggccttcgtggacaactacggagttgccatggaaatggctgagaagtgctgtcaggccaatgctcagtttgcagaaatctccgagaacctgagagccagaagcaacaaagatgccaaggatccaacgaccaagaactctctggaaactctgctctacaagcctgtggaccgtgtgacgaggagcacgctggtcctccatgacttgctgaagcacactcctgccagccaccctgaccaccccttgctgcaggacgccctccgcatctcacagaacttcctgtccagcatcaatgaggagatcacaccccgacggcagtccatgacggtgaagaagggagagcaccggcagctgctgaaggacagcttcatggtggagctggtggagggggcccgcaagctgcgccacgtcttcctgttcaccgacctgcttctctgcaccaagctcaagaagcagagcggaggcaaaacgcagcagtatgactgcaaatggtacattccgctcacggatctcagcttccagatggtggatgaactggaggcagtgcccaacatccccctggtgcccgatgaggagctggacgctttgaagatcaagatctcccagatcaagagtgacatccagagagagaagagggcgaacaagggcagcaaggctacggagaggctgaagaagaagctgtcggagcaggagtcactgctgctgcttatgtctcccagcatggccttcagggtgcacagccgcaacggcaagagttacacgttcctgatctcctctgactatgagcgtgcagagtggagggagaacatccgggagcagcagaagaagtgtttcagaagcttctccctgacatccgtggagctgcagatgctgaccaactcgtgtgtgaaactccagactgtccacagcattccgctgaccatcaataaggaagatgatgagtctccggggctctatgggtttctgaatgtcatcgtccactcagccactggatttaagcagagttcaaatctgtactgcaccctggaggtggattcctttgggtattttgtgaataaagcaaagacgcgcgtctacagggacacagctgagccaaactggaacgagctggacccgcaggccctgcaggacagagactggcagcgcaccgtcatcgccatgaatgggatcgaagtaaagctctcggtcaagttcaacagcagggagttcagcttgaagaggatgccgtcccgaaaacagacaggggtcttcggagtcaagattgctgtggtcaccaagagagagaggtccaaggtgccctacatcgtgcgccagtgcgtggaggagatcgagcgccgaggcatggaggaggtgggcatctaccgcgtgtccggtgtggccacggacatccaggcactgaaggcagccttcgacgtcaataacaaggacgtgtcggtgatgatgagcgagatggacgtgaacgccatcgcaggcacgctgaagctgtacttccgtgagctgcccgagcccctcttcactgacgagttctaccccaacttcgcagagggcatcgctctttcagacccggttgcaaaggagagctgcatgctcaacctgctgctgtccctgccggaggccaacctgctcaccttccttttccttctggaccacctgaaaagggtggcagagaaggaggcagtcaataagatgtccctgcacaacctcgccacggtctttggccccacgctgctccggccctccgagaaggagagcaagctccctgccaaccccagccagcctatcaccatgactgacagctggtccttggaggtcatgtcccaggtccaggtgctgctgtacttcctgcagctggaggccatccctgccccggacagcaagagacagagcatcctgttctccaccgaagtctaaaggtcccagtccatctcctggaggcagacagatggcctggaaacctctggctaatcgggccatccgtagagcgggaaccttcctgaggtgtccttgggccacccccaagtgttgggccatctgccaagagacagcgacccaaagccgaaggacaggtggcctggaaagatcccgcccaggtctgggagccccaggctggcctcagactgtggttttttatgtggccacctgagggcgccccaagccagttcatctcagagtccaggcctgaccctgggagacagggtgaagggagtggtttttatgaacttaacttagagtctaaaagatttctactggatcacttgtcaagatgcgccctctctggggagaagggaacgtgactggattccctcactgttgtatcttgaataaacgctgctgcttcatcctg

SEQ ID NO: 318402 - DNA, 588 bp, Homo sapiens
cgatgttgactatgatgggaagagggatcggtggaatggctacaatccagaagaacacatgaaaatgttgaagagtatgccaaagttgatttggcaaaacgaacattgaaagcccagaaactccaagaggaattagccttaggaaaattagtggaacaggctaattctccaaaacaccagagagagaagagggcgaacaagggcagcaaggctacggagaggctgaagaagaagctgtcggagcaggagtcactgctgctgcttatgtctcccagcatggccttcagggtgcacagccgcaacggcaagagttacacgttcctgatctcctctgactatgagcgtgcagagtggagggagaacatccgggagcagcagaagaagtgtttcagaagcttctccctgacatccgtggagctgcagatgctgaccaactcgtgtgtgaaactccagactgtccacagcattccgctgaccatcaataaggaaggtgggccccccccgtctccgtgtacagggcacctgcagggagggcagacagctagcctgaaggctgatccccctatctgttagcacttttgatgctgg

SEQ ID NO: 318403 - DNA, 761 bp, Homo sapiens
tcataggttcgcaggaccccaacttcgcagagggcatcgctctttcagacccggttgcaaaggagagctgcatgctcaacctgctgctgtccctgccggaggccaacctgctcaccttccttttccttctggaccacctgaaaagggtggcagagaaggaggcagtcaataagatgtccctgcacaacctcgccacggtctttggccccacgctgctccggccctccgagaaggagagcaagctccctgccaaccccagccagcctatcaccatgactgacagctggtccttggaggtcatgtcccaggtccaggtgctgctgtacttcctgcagctggaggccatccctgccccggacagcaagagacagagcatcctgttctccaccgaagtctaaagggtcccagggctggtggttgctttgggtctacagctacgtcttacccgcctcctgcctcaacagcctgtgtggtggcaaagccggtgtggggctggggaacgcagcgttctccaggagggggacccggctctccttctgcagtgcaggcgaaggcctagatgccagtgtgacctcccacaaggcgtggcttccagactccccggccggaagtgatgcttttttgccttgggccctgggtttgaagcagcctggctttctcttggtaagtggctggtgtcttagcagctgcaatctgagctcagccacctacacaccaccgtggccgacactttcattaaaaagtttcctgagacgacttgc

SEQ ID NO: 318404 - DNA, 6775 bp, Homo sapiens
  misc_feature (273)..(273): n is a, c, g, or t
ttccaggactgcagaactggcccagacctctgtattggaaaggtctttatggaccagggagtccggtgtcttttttacggggacccctgggctgcgagttgcacagtccaattcgctgttgttagggcctcagtttcccaaaaggcacagggacggggggagggtggcggctcgatgggggagccgcctccagggggcccccccgccctgtgcccacggcgcggcccctttaaggaggcccgcctggctccgctccatcgcgcatcgcggccncctccccccggccctccccttcctgcggcgcagagtgcgggccgggcgggagtgcggcgagagccggctggctgagcttagcgtccgaggaggcggcggcggcggcggcggcagcggcggcggcggggctgtggggcggtgcggaagcgagaggcgaggagcgcgcgggccgtggccagagtctggcggcggcctggcggagcggagagcagcgcccgcgcctcgccgtgcggaggagccccgcacacaatagcggcgcgcgcagcccgcgcccttccccccggcgcgccccgccccgcgcgccgagcgccccgctccgcctcacctgccaccagggagtgggcgggcattgttcgccgccgccgccgccgcgcggggccatgggggccgcccggcgcccggggccgggcctggcgaggccgccgcgccgccgctgagacgggccccgcgcgcagcccggcggcgcaggtaaggccggccgcgccatggtggacccggtgggcttcgcggaggcgtggaaggcgcagttcccggactcagagcccccgcgcatggagctgcgctcagtgggcgacatcgagcaggagctggagcgctgcaaggcctccattcggcgcctggagcaggaggtgaaccaggagcgcttccgcatgatctacctgcagacgttgctggccaaggaaaagaagagctatgaccggcagcgatggggcttccggcgcgcggcgcaggcccccgacggcgcctccgagccccgagcgtccgcgtcgcgcccgcagccagcgcccgccgacggagccgacccgccgcccgccgaggagcccgaggcccggcccgacggcgagggttctccgggtaaggccaggcccgggaccgcccgcaggcccggggcagccgcgtcgggggaacgggacgaccggggaccccccgccagcgtggcggcgctcaggtccaacttcgagcggatccgcaagggccatggccagcccggggcggacgccgagaagcccttctacgtgaacgtcgagtttcaccacgagcgcggcctggtgaaggtcaacgacaaagaggtgtcggaccgcatcagctccctgggcagccaggccatgcagatggagcgcaaaaagtcccagcacggcgcgggctcgagcgtgggggatgcatccaggcccccttaccggggacgctcctcggagagcagctgcggcgtcgacggcgactacgaggacgccgagttgaacccccgcttcctgaaggacaacctgatcgacgccaatggcggtagcaggcccccttggccgcccctggagtaccagccctaccagagcatctacgtcgggggcatgatggaaggggagggcaagggcccgctcctgcgcagccagagcacctctgagcaggagaagcgccttacctggccccgcaggtcctactccccccggagttttgaggattgcggaggcggctataccccggactgcagctccaatgagaacctcacctccagcgaggaggacttctcctctggccagtccagccgcgtgtccccaagccccaccacctaccgcatgttccgggacaaaagccgctctccctcgcagaactcgcaacagtccttcgacagcagcagtccccccacgccgcagtgccataagcggcaccggcactgcccggttgtcgtgtccgaggccaccatcgtgggcgtccgcaagaccgggcagatctggcccaacgatggcgagggcgccttccatggagacgcagatggctcgttcggaacaccacctggatacggctgcgctgcagaccgggcagaggagcagcgccggcaccaagatgggctgccctacattgatgactcgccctcctcatcgccccacctcagcagcaagggcaggggcagccgggatgcgctggtctcgggagccctggagtccactaaagcgagtgagctggacttggaaaagggcttggagatgagaaaatgggtcctgtcgggaatcctggctagcgaggagacttacctgagccacctggaggcactgctgctgcccatgaagcctttgaaagccgctgccaccacctctcagccggtgctgacgagtcagcagatcgagaccatcttcttcaaagtgcctgagctctacgagatccacaaggagttctatgatgggctcttcccccgcgtgcagcagtggagccaccagcagcgggtgggcgacctcttccagaagctggccagccagctgggtgtgtaccgggccttcgtggacaactacggagttgccatggaaatggctgagaagtgctgtcaggccaatgctcagtttgcagaaatctccgagaacctgagagccagaagcaacaaagatgccaaggatccaacgaccaagaactctctggaaactctgctctacaagcctgtggaccgtgtgacgaggagcacgctggtcctccatgacttgctgaagcacactcctgccagccaccctgaccaccccttgctgcaggacgccctccgcatctcacagaacttcctgtccagcatcaatgaggagatcacaccccgacggcagtccatgacggtgaagaagggagagcaccggcagctgctgaaggacagcttcatggtggagctggtggagggggcccgcaagctgcgccacgtcttcctgttcaccgacctgcttctctgcaccaagctcaagaagcagagcggaggcaaaacgcagcagtatgactgcaaatggtacattccgctcacggatctcagcttccagatggtggatgaactggaggcagtgcccaacatccccctggtgcccgatgaggagctggacgctttgaagatcaagatctcccagatcaagagtgacatccagagagagaagagggcgaacaagggcagcaaggctacggagaggctgaagaagaagctgtcggagcaggagtcactgctgctgcttatgtctcccagcatggccttcagggtgcacagccgcaacggcaagagttacacgttcctgatctcctctgactatgagcgtgcagagtggagggagaacatccgggagcagcagaagaagtgtttcagaagcttctccctgacatccgtggagctgcagatgctgaccaactcgtgtgtgaaactccagactgtccacagcattccgctgaccatcaataaggaagatgatgagtctccggggctctatgggtttctgaatgtcatcgtccactcagccactggatttaagcagagttcaaatctgtactgcaccctggaggtggattcctttgggtattttgtgaataaagcaaagacgcgcgtctacagggacacagctgagccaaactggaacgaggaatttgagatagagctggagggctcccagaccctgaggatactgtgctatgaaaagtgttacaacaagacgaagatccccaaggaggacggcgagagcacggacagactcatggggaagggccaggtccagctggacccgcaggccctgcaggacagagactggcagcgcaccgtcatcgccatgaatgggatcgaagtaaagctctcggtcaagttcaacagcagggagttcagcttgaagaggatgccgtcccgaaaacagacaggggtcttcggagtcaagattgctgtggtcaccaagagagagaggtccaaggtgccctacatcgtgcgccagtgcgtggaggagatcgagcgccgaggcatggaggaggtgggcatctaccgcgtgtccggtgtggccacggacatccaggcactgaaggcagccttcgacgtcaataacaaggacgtgtcggtgatgatgagcgagatggacgtgaacgccatcgcaggcacgctgaagctgtacttccgtgagctgcccgagcccctcttcactgacgagttctaccccaacttcgcagagggcatcgctctttcagacccggttgcaaaggagagctgcatgctcaacctgctgctgtccctgccggaggccaacctgctcaccttccttttccttctggaccacctgaaaagggtggcagagaaggaggcagtcaataagatgtccctgcacaacctcgccacggtctttggccccacgctgctccggccctccgagaaggagagcaagctccctgccaaccccagccagcctatcaccatgactgacagctggtccttggaggtcatgtcccaggtccaggtgctgctgtacttcctgcagctggaggccatccctgccccggacagcaagagacagagcatcctgttctccaccgaagtctaaaggtcccagtccatctcctggaggcagacagatggcctggaaacctctggctaatcgggccatccgtagagcgggaaccttcctgaggtgtccttgggccacccccaagtgttgggccatctgccaagagacagcgacccaaagccgaaggacaggtggcctggaaagatcccgcccaggtctgggagccccaggctggcctcagactgtggttttttatgtggccacctgagggcgccccaagccagttcatctcagagtccaggcctgaccctgggagacagggtgaagggagtggtttttatgaacttaacttagagtctaaaagatttctactggatcacttgtcaagatgcgccctctctggggagaagggaacgtgactggattccctcactgttgtatcttgaataaacgctgctgcttcatcctgtgggggccgtggccctgtccctgtgtgggtggggcctcttccatttccctgacttagaaaccacaacactccctgcccccagtgtccctgcccctgccccagcacaggtgacttcatttctgtcctctcagctcagtggactcgctcaacttttgtataagtctccacttggtggcagcagcttgctgatgacttgttttaaaactttcatcctaaataaccttttgatacttgaatatttgtaagttttatacatagtttctaatttttttccgaacagatccagatacctaataagatgctggaatgtaatccctggacaatccgtgtcctggcagcatttggtcttcctctaagcgcctggctccgctgttctcaggagtgggttctgaagtctctggagaacaggatacgtggagggttaggaaggggccaggcctagagacgggagactccctcccggagcaggtggaggcacaggaccattcgctaccccatctgccggcacctgcgggggagcccaggcattctttgtaagccctcctgaccacctggctcaaagaaaacagaagcatggagaccgccaagtattttcaagaaataaccccatgaatattccatcacttttttagaaagaggggcttggggcaggcagaggagagaagggagagcaaactgagagccaagtttccagacggtcctgcaggaggagaggatgcagctgcccagagggaagcaggatcacatttaaggaagtgtgtggggtccctggatgacaccagcacccagtgcggctctgtctggcacccgctcccaaggtgggaggagtgggtgtcccctgtgtgtcagtgggcagctcctgctgaacccgcagctcactagggagcctgacagtggggccatgcgcctgacactcctctctgcttgtggacctggcaaggcagggagcagaaaacagagccacttgaaggctttctgtctgcgtctgtgtgcagtgtggatttagttgtgcttttttcttgctgggagagcacagccaccatttacaagcagtgtcaccgtcgtgggtggcgaggacagaacaggagcctctgctctctgtacctatctgggcccggtgggctcccttgtcctggcttccatctctgtctcagcgaccattcagccctgcgcaggaacacgtgttgcttagaaaagccaaatccagccttgtctctgcctcctctggtctcatgatgtgcatctgttaccttgaaactggaaaccagtctatcaatgtctgtgccaattttttattccctccccaacctccttccccataggactttttatttatgtaggatgtgtgctgtctaatgatgggatgaccacacttttccatgttctaaaagtgctcctctcccgcagggtcccagggctggtggttgctttgggtctacagctacgtcttacccgcctcctgcctcaacagcctgtgtggtggcaaagccggtgtggggctggggaacgcagcgttctccaggagggggacccggctctccttctgcagtgcaggcgaaggcctagatgccagtgtgacctcccacaaggcgtggcttccagactccccggccggaagtgatgcttttttgccttgggccctgggtttgaagcagcctggctttctcttggtaagtggctggtgtcttagcagctgcaatctgagctcagccacctacacaccaccgtggccgacactttcattaaaaagtttcctgagacgacttgc

SEQ ID NO: 318405 - DNA, 4268 bp, Homo sapiens
ggggagataggtaggagtagcgtggtaagggcgatgagtgcgggccgggcgggagtgcggcgagagccggctggctgagcttagcgtccgaggaggcggcggcggcggcggcggcagcggcggcggcggggctgtggggcggtgcggaagcgagaggcgaggagcgcgcgggccgtggccagagtctggcggcggcctggcggagcggagagcagcgcccgcgcctcgccgtgcggaggagccccgcacacaatagcggcgcgcgcagcccgcgcccttccccccggcgcgccccgccccgcgcgccgagcgccccgctccgcctcacctgccaccagggagtgggcgggcattgttcgccgccgccgccgccgcgcggggccatgggggccgcccggcgcccgggaccgcccgcaggcccggggcagccgcgtcgggggaacgggacgaccggggaccccccgccagcgtggcggcgctcaggtccaacttcgagcggatccgcaagggccatggccagcccggggcggacgccgagaagcccttctacgtgaacgtcgagtttcaccacgagcgcggcctggtgaaggtcaacgacaaagaggtgtcggaccgcatcagctccctgggcagccaggccatgcagatggagcgcaaaaagtcccagcacggcgcgggctcgagcgtgggggatgcatccaggcccccttaccggggacgctcctcggagagcagctgcggcgtcgacggcgactacgaggacgccgagttgaacccccgcttcctgaaggacaacctgatcgacgccaatggcggtagcaggcccccttggccgcccctggagtaccagccctaccagagcatctacgtcgggggcatgatggaaggggagggcaagggcccgctcctgcgcagccagagcacctctgagcaggagaagcgccttacctggccccgcaggtcctactccccccggagttttgaggattgcggaggcggctataccccggactgcagctccaatgagaacctcacctccagcgaggaggacttctcctctggccagtccagccgcgtgtccccaagccccaccacctaccgcatgttccgggacaaaagccgctctccctcgcagaactcgcaacagtccttcgacagcagcagtccccccacgccgcagtgccataagcggcaccggcactgcccggttgtcgtgtccgaggccaccatcgtgggcgtccgcaagaccgggcagatctggcccaacgatggcgagggcgccttccatggagacgcagatggctcgttcggaacaccacctggatacggctgcgctgcagaccgggcagaggagcagcgccggcaccaagatgggctgccctacattgatgactcgccctcctcatcgccccacctcagcagcaagggcaggggcagccgggatgcgctggtctcgggagccctggagtccactaaagcgagtgagctggacttggaaaagggcttggagatgagaaaatgggtcctgtcgggaatcctggctagcgaggagacttacctgagccacctggaggcactgctgctgcccatgaagcctttgaaagccgctgccaccacctctcagccggtgctgacgagtcagcagatcgagaccatcttcttcaaagtgcctgagctctacgagatccacaaggagttctatgatgggctcttcccccgcgtgcagcagtggagccaccagcagcgggtgggcgacctcttccagaagctggccagccagctgggtgtgtaccgggccttcgtggacaactacggagttgccatggaaatggctgagaagtgctgtcaggccaatgctcagtttgcagaaatctccgagaacctgagagccagaagcaacaaagatgccaaggatccaacgaccaagaactctctggaaactctgctctacaagcctgtggaccgtgtgacgaggagcacgctggtcctccatgacttgctgaagcacactcctgccagccaccctgaccaccccttgctgcaggacgccctccgcatctcacagaacttcctgtccagcatcaatgaggagatcacaccccgacggcagtccatgacggtgaagaagggagagcaccggcagctgctgaaggacagcttcatggtggagctggtggagggggcccgcaagctgcgccacgtcttcctgttcaccgacctgcttctctgcaccaagctcaagaagcagagcggaggcaaaacgcagcagtatgactgcaaatggtacattccgctcacggatctcagcttccagatggtggatgaactggaggcagtgcccaacatccccctggtgcccgatgaggagctggacgctttgaagatcaagatctcccagatcaagagtgacatccagagagagaagagggcgaacaagggcagcaaggctacggagaggctgaagaagaagctgtcggagcaggagtcactgctgctgcttatgtctcccagcatggccttcagggtgcacagccgcaacggcaagagttacacgttcctgatctcctctgactatgagcgtgcagagtggagggagaacatccgggagcagcagaagaagtgtttcagaagcttctccctgacatccgtggagctgcagatgctgaccaactcgtgtgtgaaactccagactgtccacagcattccgctgaccatcaataaggaagatgatgagtctccggggctctatgggtttctgaatgtcatcgtccactcagccactggatttaagcagagttcaaatctgtactgcaccctggaggtggattcctttgggtattttgtgaataaagcaaagacgcgcgtctacagggacacagctgagccaaactggaacgaggaatttgagatagagctggagggctcccagaccctgaggatactgtgctatgaaaagtgttacaacaagacgaagatccccaaggaggacggcgagagcacggacagactcatggggaagggccaggtccagctggacccgcaggccctgcaggacagagactggcagcgcaccgtcatcgccatgaatgggatcgaagtaaagctctcggtcaagttcaacagcagggagttcagcttgaagaggatgccgtcccgaaaacagacaggggtcttcggagtcaagattgctgtggtcaccaagagagagaggtccaaggtgccctacatcgtgcgccagtgcgtggaggagatcgagcgccgaggcatggaggaggtgggcatctaccgcgtgtccggtgtggccacggacatccaggcactgaaggcagccttcgacgtcaataacaaggacgtgtcggtgatgatgagcgagatggacgtgaacgccatcgcaggcacgctgaagctgtacttccgtgagctgcccgagcccctcttcactgacgagttctaccccaacttcgcagagggcatcgctctttcagacccggttgcaaaggagagctgcatgctcaacctgctgctgtccctgccggaggccaacctgctcaccttccttttccttctggaccacctgaaaagggtggcagagaaggaggcagtcaataagatgtccctgcacaacctcgccacggtctttggccccacgctgctccggccctccgagaaggagagcaagctccctgccaaccccagccagcctatcaccatgactgacagctggtccttggaggtcatgtcccaggtccaggtgctgctgtacttcctgcagctggaggccatccctgccccggacagcaagagacagagcatcctgttctccaccgaagtctaaaggtcccagtccatctcctggaggcagacagatggcctggaaacctctggctaatcgggccatccgtagagcgggaaccttcctgaggtgtccttgggccacccccaagtgttgggccatctgccaagagacagcgacccaaagccgaaggacaggtggcctggaaagatcccgcccaggtctgggagccccaggctggcctcagactgtggttttttatgtggccacctgagggcgccccaagccagttcatctcagagtccaggcctgaccctgggagacagggtgaagggagtggtttttatgaacttaacttagagtctaaaagatttctactggatcacttgtcaagatgcgccctctctggggagaagggaacgtgactggattccctcactgttgtatcttgaataaacgctgctgcttcatcctg

SEQ ID NO: 318406 - DNA, 4845 bp, Homo sapiens
  misc_feature (273)..(273): n is a, c, g, or t
ttccaggactgcagaactggcccagacctctgtattggaaaggtctttatggaccagggagtccggtgtcttttttacggggacccctgggctgcgagttgcacagtccaattcgctgttgttagggcctcagtttcccaaaaggcacagggacggggggagggtggcggctcgatgggggagccgcctccagggggcccccccgccctgtgcccacggcgcggcccctttaaggaggcccgcctggctccgctccatcgcgcatcgcggccncctccccccggccctccccttcctgcggcgcagagtgcgggccgggcgggagtgcggcgagagccggctggctgagcttagcgtccgaggaggcggcggcggcggcggcggcagcggcggcggcggggctgtggggcggtgcggaagcgagaggcgaggagcgcgcgggccgtggccagagtctggcggcggcctggcggagcggagagcagcgcccgcgcctcgccgtgcggaggagccccgcacacaatagcggcgcgcgcagcccgcgcccttccccccggcgcgccccgccccgcgcgccgagcgccccgctccgcctcacctgccaccagggagtgggcgggcattgttcgccgccgccgccgccgcgcggggccatgggggccgcccggcgcccggggccgggcctggcgaggccgccgcgccgccgctgagacgggccccgcgcgcagcccggcggcgcaggtaaggccggccgcgccatggtggacccggtgggcttcgcggaggcgtggaaggcgcagttcccggactcagagcccccgcgcatggagctgcgctcagtgggcgacatcgagcaggagctggagcgctgcaaggcctccattcggcgcctggagcaggaggtgaaccaggagcgcttccgcatgatctacctgcagacgttgctggccaaggaaaagaagagctatgaccggcagcgatggggcttccggcgcgcggcgcaggcccccgacggcgcctccgagccccgagcgtccgcgtcgcgcccgcagccagcgcccgccgacggagccgacccgccgcccgccgaggagcccgaggcccggcccgacggcgagggttctccgggtaaggccaggcccgggaccgcccgcaggcccggggcagccgcgtcgggggaacgggacgaccggggaccccccgccagcgtggcggcgctcaggtccaacttcgagcggatccgcaagggccatggccagcccggggcggacgccgagaagcccttctacgtgaacgtcgagtttcaccacgagcgcggcctggtgaaggtcaacgacaaagaggtgtcggaccgcatcagctccctgggcagccaggccatgcagatggagcgcaaaaagtcccagcacggcgcgggctcgagcgtgggggatgcatccaggcccccttaccggggacgctcctcggagagcagctgcggcgtcgacggcgactacgaggacgccgagttgaacccccgcttcctgaaggacaacctgatcgacgccaatggcggtagcaggcccccttggccgcccctggagtaccagccctaccagagcatctacgtcgggggcatgatggaaggggagggcaagggcccgctcctgcgcagccagagcacctctgagcaggagaagcgccttacctggccccgcaggtcctactccccccggagttttgaggattgcggaggcggctataccccggactgcagctccaatgagaacctcacctccagcgaggaggacttctcctctggccagtccagccgcgtgtccccaagccccaccacctaccgcatgttccgggacaaaagccgctctccctcgcagaactcgcaacagtccttcgacagcagcagtccccccacgccgcagtgccataagcggcaccggcactgcccggttgtcgtgtccgaggccaccatcgtgggcgtccgcaagaccgggcagatctggcccaacgatggcgagggcgccttccatggagacgcagatggctcgttcggaacaccacctggatacggctgcgctgcagaccgggcagaggagcagcgccggcaccaagatgggctgccctacattgatgactcgccctcctcatcgccccacctcagcagcaagggcaggggcagccgggatgcgctggtctcgggagccctggagtccactaaagcgagtgagctggacttggaaaagggcttggagatgagaaaatgggtcctgtcgggaatcctggctagcgaggagacttacctgagccacctggaggcactgctgctgcccatgaagcctttgaaagccgctgccaccacctctcagccggtgctgacgagtcagcagatcgagaccatcttcttcaaagtgcctgagctctacgagatccacaaggagttctatgatgggctcttcccccgcgtgcagcagtggagccaccagcagcgggtgggcgacctcttccagaagctggccagccagctgggtgtgtaccgggccttcgtggacaactacggagttgccatggaaatggctgagaagtgctgtcaggccaatgctcagtttgcagaaatctccgagaacctgagagccagaagcaacaaagatgccaaggatccaacgaccaagaactctctggaaactctgctctacaagcctgtggaccgtgtgacgaggagcacgctggtcctccatgacttgctgaagcacactcctgccagccaccctgaccaccccttgctgcaggacgccctccgcatctcacagaacttcctgtccagcatcaatgaggagatcacaccccgacggcagtccatgacggtgaagaagggagagcaccggcagctgctgaaggacagcttcatggtggagctggtggagggggcccgcaagctgcgccacgtcttcctgttcaccgacctgcttctctgcaccaagctcaagaagcagagcggaggcaaaacgcagcagtatgactgcaaatggtacattccgctcacggatctcagcttccagatggtggatgaactggaggcagtgcccaacatccccctggtgcccgatgaggagctggacgctttgaagatcaagatctcccagatcaagagtgacatccagagagagaagagggcgaacaagggcagcaaggctacggagaggctgaagaagaagctgtcggagcaggagtcactgctgctgcttatgtctcccagcatggccttcagggtgcacagccgcaacggcaagagttacacgttcctgatctcctctgactatgagcgtgcagagtggagggagaacatccgggagcagcagaagaagtgtttcagaagcttctccctgacatccgtggagctgcagatgctgaccaactcgtgtgtgaaactccagactgtccacagcattccgctgaccatcaataaggaagatgatgagtctccggggctctatgggtttctgaatgtcatcgtccactcagccactggatttaagcagagttcaaatctgtactgcaccctggaggtggattcctttgggtattttgtgaataaagcaaagacgcgcgtctacagggacacagctgagccaaactggaacgaggaatttgagatagagctggagggctcccagaccctgaggatactgtgctatgaaaagtgttacaacaagacgaagatccccaaggaggacggcgagagcacggacagactcatggggaagggccaggtccagctggacccgcaggccctgcaggacagagactggcagcgcaccgtcatcgccatgaatgggatcgaagtaaagctctcggtcaagttcaacagcagggagttcagcttgaagaggatgccgtcccgaaaacagacaggggtcttcggagtcaagattgctgtggtcaccaagagagagaggtccaaggtgccctacatcgtgcgccagtgcgtggaggagatcgagcgccgaggcatggaggaggtgggcatctaccgcgtgtccggtgtggccacggacatccaggcactgaaggcagccttcgacgtcaataacaaggacgtgtcggtgatgatgagcgagatggacgtgaacgccatcgcaggcacgctgaagctgtacttccgtgagctgcccgagcccctcttcactgacgagttctaccccaacttcgcagagggcatcgctctttcagacccggttgcaaaggagagctgcatgctcaacctgctgctgtccctgccggaggccaacctgctcaccttccttttccttctggaccacctgaaaagggtggcagagaaggaggcagtcaataagatgtccctgcacaacctcgccacggtctttggccccacgctgctccggccctccgagaaggagagcaagctccctgccaaccccagccagcctatcaccatgactgacagctggtccttggaggtcatgtcccagggtcccagggctggtggttgctttgggtctacagctacgtcttacccgcctcctgcctcaacagcctgtgtggtggcaaagccggtgtggggctggggaacgcagcgttctccaggagggggacccggctctccttctgcagtgcaggcgaaggcctagatgccagtgtgacctcccacaaggcgtggcttccagactccccggccggaagtgatgcttttttgccttgggccctgggtttgaagcagcctggctttctcttggtaagtggctggtgtcttagcagctgcaatctgagctcagccacctacacaccaccgtggccgacactttcattaaaaagtttcctgagacgacttgc

SEQ ID NO: 318407 - DNA, 4337 bp, Homo sapiens
  misc_feature (273)..(273): n is a, c, g, or t
ttccaggactgcagaactggcccagacctctgtattggaaaggtctttatggaccagggagtccggtgtcttttttacggggacccctgggctgcgagttgcacagtccaattcgctgttgttagggcctcagtttcccaaaaggcacagggacggggggagggtggcggctcgatgggggagccgcctccagggggcccccccgccctgtgcccacggcgcggcccctttaaggaggcccgcctggctccgctccatcgcgcatcgcggccncctccccccggccctccccttcctgcggcgcagagtgcgggccgggcgggagtgcggcgagagccggctggctgagcttagcgtccgaggaggcggcggcggcggcggcggcagcggcggcggcggggctgtggggcggtgcggaagcgagaggcgaggagcgcgcgggccgtggccagagtctggcggcggcctggcggagcggagagcagcgcccgcgcctcgccgtgcggaggagccccgcacacaatagcggcgcgcgcagcccgcgcccttccccccggcgcgccccgccccgcgcgccgagcgccccgctccgcctcacctgccaccagggagtgggcgggcattgttcgccgccgccgccgccgcgcggggccatgggggccgcccggcgcccggggccgggcctggcgaggccgccgcgccgccgctgagacgggccccgcgcgcagcccggcggcgcaggtaaggccggccgcgccatggtggacccggtgggcttcgcggaggcgtggaaggcgcagttcccggactcagagcccccgcgcatggagctgcgctcagtgggcgacatcgagcaggagctggagcgctgcaaggcctccattcggcgcctggagcaggaggtgaaccaggagcgcttccgcatgatctacctgcagacgttgctggccaaggaaaagaagagctatgaccggcagcgatggggcttccggcgcgcggcgcaggcccccgacggcgcctccgagccccgagcgtccgcgtcgcgcccgcagccagcgcccgccgacggagccgacccgccgcccgccgaggagcccgaggcccggcccgacggcgagggttctccgggtaaggccaggcccgggaccgcccgcaggcccggggcagccgcgtcgggggaacgggacgaccggggaccccccgccagcgtggcggcgctcaggtccaacttcgagcggatccgcaagggccatggccagcccggggcggacgccgagaagcccttctacgtgaacgtcgagtttcaccacgagcgcggcctggtgaaggtcaacgacaaagaggtgtcggaccgcatcagctccctgggcagccaggccatgcagatggagcgcaaaaagtcccagcacggcgcgggctcgagcgtgggggatgcatccaggcccccttaccggggacgctcctcggagagcagctgcggcgtcgacggcgactacgaggacgccgagttgaacccccgcttcctgaaggacaacctgatcgacgccaatggcggtagcaggcccccttggccgcccctggagtaccagccctaccagagcatctacgtcgggggcatgatggaaggggagggcaagggcccgctcctgcgcagccagagcacctctgagcaggagaagcgccttacctggccccgcaggtcctactccccccggagttttgaggattgcggaggcggctataccccggactgcagctccaatgagaacctcacctccagcgaggaggacttctcctctggccagtccagccgcgtgtccccaagccccaccacctaccgcatgttccgggacaaaagccgctctccctcgcagaactcgcaacagtccttcgacagcagcagtccccccacgccgcagtgccataagcggcaccggcactgcccggttgtcgtgtccgaggccaccatcgtgggcgtccgcaagaccgggcagatctggcccaacgatggcgagggcgccttccatggagacgcagatggctcgttcggaacaccacctggatacggctgcgctgcagaccgggcagaggagcagcgccggcaccaagatgggctgccctacattgatgactcgccctcctcatcgccccacctcagcagcaagggcaggggcagccgggatgcgctggtctcgggagccctggagtccactaaagcgagtgagctggacttggaaaagggcttggagatgagaaaatgggtcctgtcgggaatcctggctagcgaggagacttacctgagccacctggaggcactgctgctgcccatgaagcctttgaaagccgctgccaccacctctcagccggtgctgacgagtcagcagatcgagaccatcttcttcaaagtgcctgagctctacgagatccacaaggagttctatgatgggctcttcccccgcgtgcagcagtggagccaccagcagcgggtgggcgacctcttccagaagctggccagccagctgggtgtgtaccgggccttcgtggacaactacggagttgccatggaaatggctgagaagtgctgtcaggccaatgctcagtttgcagaaatctccgagaacctgagagccagaagcaacaaagatgccaaggatccaacgaccaagaactctctggaaactctgctctacaagcctgtggaccgtgtgacgaggagcacgctggtcctccatgacttgctgaagcacactcctgccagccaccctgaccaccccttgctgcaggacgccctccgcatctcacagaacttcctgtccagcatcaatgaggagatcacaccccgacggcagtccatgacggtgaagaagggagagcaccggcagctgctgaaggacagcttcatggtggagctggtggagggggcccgcaagctgcgccacgtcttcctgttcaccgacctgcttctctgcaccaagctcaagaagcagagcggaggcaaaacgcagcagtatgactgcaaatggtacattccgctcacggatctcagcttccagatggtggatgaactggaggcagtgcccaacatccccctggtgcccgatgaggagctggacgctttgaagatcaagatctcccagatcaagagtgacatccagagagagaagagggcgaacaagggcagcaaggctacggagaggctgaagaagaagctgtcggagcaggagtcactgctgctgcttatgtctcccagcatggccttcagggtgcacagccgcaacggcaagagttacacgttcctgatctcctctgactatgagcgtgcagagtggagggagaacatccgggagcagcagaagaagtgtttcagaagcttctccctgacatccgtggagctgcagatgctgaccaactcgtgtgtgaaactccagactgtccacagcattccgctgaccatcaataaggaagatgatgagtctccggggctctatgggtttctgaatgtcatcgtccactcagccactggatttaagcagagttcaaatctgtactgcaccctggaggtggattcctttgggtattttgtgaataaagcaaagacgcgcgtctacagggacacagctgagccaaactggaacgaggaatttgagatagagctggagggctcccagaccctgaggatactgtgctatgaaaagtgttacaacaagacgaagatccccaaggaggacggcgagagcacggacagactcatggggaagggccaggtccagctggacccgcaggccctgcaggacagagactggcagcgcaccgtcatcgccatgaatgggatcgaagtaaagctctcggtcaagttcaacagcagggagttcagcttgaagaggatgccgtcccgaaaacagacaggggtcttcggagtcaagattgctgtggtcaccaagagagagaggtccaaggtgccctacatcgtgcgccagtgcgtggaggagatcgagcgccgaggcatggaggaggtgggcatctaccgcgtgtccggtgtggccacggacatccaggcactgaaggcagccttcgacgtcaataacaaggacgtgtcggtgatgatgagcgagatggacgtgaacgccatcgcaggcacgctgaagctgtacttccgtgagctgcccgagcccctcttcactgacgagttctaccccaacttcgcagagggcatcgctctttcagacccggttgcaaaggagagctgcatgctcaacctgctgctgtccctgccggaggccaacctgctcaccttccttttccttctggaccacctgaaaaggtagcccagctctccc

SEQ ID NO: 318408 - DNA, 1780 bp, Homo sapiens
ccaagatgattagaggcgcacccggtgttatgcactcagggacgggcctcaagttaaagttacacgttcctgatctcctctgactatgagcgtgcagagtggagggagaacatccgggagcagcagaagaagtgtttcagaagcttctccctgacatccgtggagctgcagatgctgaccaactcgtgtgtgaaactccagactgtccacagcattccgctgaccatcaataaggaagatgatgagtctccggggctctatgggtttctgaatgtcatcgtccactcagccactggatttaagcagagttcaaatctgtactgcaccctggaggtggattcctttgggtattttgtgaataaagcaaagacgcgcgtctacagggacacagctgagccaaactggaacgaggaatttgagatagagctggagggctcccagaccctgaggatactgtgctatgaaaagtgttacaacaagacgaagatccccaaggaggacggcgagagcacggacagactcatggggaagggccaggtccagctggacccgcaggccctgcaggacagagactggcagcgcaccgtcatcgccatgaatgggatcgaagtaaagctctcggtcaagttcaacagcagggagttcagcttgaagaggatgccgtcccgaaaacagacaggggtcttcggagtcaagattgctgtggtcaccaagagagagaggtccaaggtgccctacatcgtgcgccagtgcgtggaggagatcgagcgccgaggcatggaggaggtgggcatctaccgcgtgtccggtgtggccacggacatccaggcactgaaggcagccttcgacgtcaataacaaggacgtgtcggtgatgatgagcgagatggacgtgaacgccatcgcaggcacgctgaagctgtacttccgtgagctgcccgagcccctcttcactgacgagttctaccccaacttcgcagagggcatcgctctttcagacccggttgcaaaggagagctgcatgctcaacctgctgctgtccctgccggaggccaacctgctcaccttccttttccttctggaccacctgaaaagggtggcagagaaggaggcagtcaataagatgtccctgcacaacctcgccacggtctttggccccacgctgctccggccctccgagaaggagagcaagctccctgccaaccccagccagcctatcaccatgactgacagctggtccttggaggtcatgtcccaggtccaggtgctgctgtacttcctgcagctggaggccatccctgccccggacagcaagagacagagcatcctgttctccaccgaagtctaaaggtcccagtccatctcctggaggcagacagatggcctggaaacctctggctaatcgggccatccgtagagcgggaaccttcctgaggtgtccttgggccacccccaagtgttgggccatctgccaagagacagcgacccaaagccgaaggacaggtggcctggaaagatcccgcccaggtctgggagccccaggctggcctcagactgtggttttttatgtggccacctgagggcgccccaagccagttcatctcagagtccaggcctgaccctgggagacagggtgaagggagtggtttttatgaacttaacttagagtctaaaagatttctactggatcacttgtcaagatgcgccctctctggggagaagggaacgtgactggattccctcactgttgtatcttgaataaacgctgctgcttcatcctg

SEQ ID NO: 318409 - DNA, 3904 bp, Homo sapiens
  misc_feature (273)..(273): n is a, c, g, or t
ttccaggactgcagaactggcccagacctctgtattggaaaggtctttatggaccagggagtccggtgtcttttttacggggacccctgggctgcgagttgcacagtccaattcgctgttgttagggcctcagtttcccaaaaggcacagggacggggggagggtggcggctcgatgggggagccgcctccagggggcccccccgccctgtgcccacggcgcggcccctttaaggaggcccgcctggctccgctccatcgcgcatcgcggccncctccccccggccctccccttcctgcggcgcagagtgcgggccgggcgggagtgcggcgagagccggctggctgagcttagcgtccgaggaggcggcggcggcggcggcggcagcggcggcggcggggctgtggggcggtgcggaagcgagaggcgaggagcgcgcgggccgtggccagagtctggcggcggcctggcggagcggagagcagcgcccgcgcctcgccgtgcggaggagccccgcacacaatagcggcgcgcgcagcccgcgcccttccccccggcgcgccccgccccgcgcgccgagcgccccgctccgcctcacctgccaccagggagtgggcgggcattgttcgccgccgccgccgccgcgcggggccatgggggccgcccggcgcccggggccgggcctggcgaggccgccgcgccgccgctgagacgggccccgcgcgcagcccggcggcgcaggtaaggccggccgcgccatggtggacccggtgggcttcgcggaggcgtggaaggcgcagttcccggactcagagcccccgcgcatggagctgcgctcagtgggcgacatcgagcaggagctggagcgctgcaaggcctccattcggcgcctggagcaggaggtgaaccaggagcgcttccgcatgatctacctgcagacgttgctggccaaggaaaagaagagctatgaccggcagcgatggggcttccggcgcgcggcgcaggcccccgacggcgcctccgagccccgagcgtccgcgtcgcgcccgcagccagcgcccgccgacggagccgacccgccgcccgccgaggagcccgaggcccggcccgacggcgagggttctccgggtaaggccaggcccgggaccgcccgcaggcccggggcagccgcgtcgggggaacgggacgaccggggaccccccgccagcgtggcggcgctcaggtccaacttcgagcggatccgcaagggccatggccagcccggggcggacgccgagaagcccttctacgtgaacgtcgagtttcaccacgagcgcggcctggtgaaggtcaacgacaaagaggtgtcggaccgcatcagctccctgggcagccaggccatgcagatggagcgcaaaaagtcccagcacggcgcgggctcgagcgtgggggatgcatccaggcccccttaccggggacgctcctcggagagcagctgcggcgtcgacggcgactacgaggacgccgagttgaacccccgcttcctgaaggacaacctgatcgacgccaatggcggtagcaggcccccttggccgcccctggagtaccagccctaccagagcatctacgtcgggggcatgatggaaggggagggcaagggcccgctcctgcgcagccagagcacctctgagcaggagaagcgccttacctggccccgcaggtcctactccccccggagttttgaggattgcggaggcggctataccccggactgcagctccaatgagaacctcacctccagcgaggaggacttctcctctggccagtccagccgcgtgtccccaagccccaccacctaccgcatgttccgggacaaaagccgctctccctcgcagaactcgcaacagtccttcgacagcagcagtccccccacgccgcagtgccataagcggcaccggcactgcccggttgtcgtgtccgaggccaccatcgtgggcgtccgcaagaccgggcagatctggcccaacgatggcgagggcgccttccatggagacgcagatggctcgttcggaacaccacctggatacggctgcgctgcagaccgggcagaggagcagcgccggcaccaagatgggctgccctacattgatgactcgccctcctcatcgccccacctcagcagcaagggcaggggcagccgggatgcgctggtctcgggagccctggagtccactaaagcgagtgagctggacttggaaaagggcttggagatgagaaaatgggtcctgtcgggaatcctggctagcgaggagacttacctgagccacctggaggcactgctgctgcccatgaagcctttgaaagccgctgccaccacctctcagccggtgctgacgagtcagcagatcgagaccatcttcttcaaagtgcctgagctctacgagatccacaaggagttctatgatgggctcttcccccgcgtgcagcagtggagccaccagcagcgggtgggcgacctcttccagaagctggccagccagctgggtgtgtaccgggccttcgtggacaactacggagttgccatggaaatggctgagaagtgctgtcaggccaatgctcagtttgcagaaatctccgagaacctgagagccagaagcaacaaagatgccaaggatccaacgaccaagaactctctggaaactctgctctacaagcctgtggaccgtgtgacgaggagcacgctggtcctccatgacttgctgaagcacactcctgccagccaccctgaccaccccttgctgcaggacgccctccgcatctcacagaacttcctgtccagcatcaatgaggagatcacaccccgacggcagtccatgacggtgaagaagggagagcaccggcagctgctgaaggacagcttcatggtggagctggtggagggggcccgcaagctgcgccacgtcttcctgttcaccgacctgcttctctgcaccaagctcaagaagcagagcggaggcaaaacgcagcagtatgactgcaaatggtacattccgctcacggatctcagcttccagatggtggatgaactggaggcagtgcccaacatccccctggtgcccgatgaggagctggacgctttgaagatcaagatctcccagatcaagagtgacatccagagagagaagagggcgaacaagggcagcaaggctacggagaggctgaagaagaagctgtcggagcaggagtcactgctgctgcttatgtctcccagcatggccttcagggtgcacagccgcaacggcaagagttacacgttcctgatctcctctgactatgagcgtgcagagtggagggagaacatccgggagcagcagaagaagtgtttcagaagcttctccctgacatccgtggagctgcagatgctgaccaactcgtgtgtgaaactccagactgtccacagcattccgctgaccatcaataaggaagatgatgagtctccggggctctatgggtttctgaatgtcatcgtccactcagccactggatttaagcagagttcaaaagaagccatacggtgaaccaggtgatgctgaggttatctggatccaggccatgcagatgaagccatatttacctttgtgatattggggctgatcttggagctgtctggatctgaccagtctccaggttgaaaactcttgcaactttcgtttttggatagtgctcacctcgtatctgtactcgtaactgctatttctaggcgaattgtcccctttctcctccctcttccctcatctccctctctcctctgcctggctgacaccaggaaggaggagttttcttttatttagataaaaaaaagttgagaggaggcagctccagaaatgtgggatactcagcactggagacatttgggctggaattc

SEQ ID NO: 318410 - DNA, 1570 bp, Homo sapiens
caaggaagccggcgctgctctgaagggagagtctgtgcagtggcacctgcgcgaagctggccaaagcctgcccagacggctcacctgtgcgggatggaacaaaatctgtactgcaccctggaggtggattcctttgggtattttgtgaataaagcaaagacgcgcgtctacagggacacagctgagccaaactggaacgaggaatttgagatagagctggagggctcccagaccctgaggatactgtgctatgaaaagtgttacaacaagacgaagatccccaaggaggacggcgagagcacggacagactcatggggaagggccaggtccagctggacccgcaggccctgcaggacagagactggcagcgcaccgtcatcgccatgaatgggatcgaagtaaagctctcggtcaagttcaacagcagggagttcagcttgaagaggatgccgtcccgaaaacagacaggggtcttcggagtcaagattgctgtggtcaccaagagagagaggtccaaggtgccctacatcgtgcgccagtgcgtggaggagatcgagcgccgaggcatggaggaggtgggcatctaccgcgtgtccggtgtggccacggacatccaggcactgaaggcagccttcgacgtcaataacaaggacgtgtcggtgatgatgagcgagatggacgtgaacgccatcgcaggcacgctgaagctgtacttccgtgagctgcccgagcccctcttcactgacgagttctaccccaacttcgcagagggcatcgctctttcagacccggttgcaaaggagagctgcatgctcaacctgctgctgtccctgccggaggccaacctgctcaccttccttttccttctggaccacctgaaaagggtggcagagaaggaggcagtcaataagatgtccctgcacaacctcgccacggtctttggccccacgctgctccggccctccgagaaggagagcaagctccctgccaaccccagccagcctatcaccatgactgacagctggtccttggaggtcatgtcccaggtccaggtgctgctgtacttcctgcagctggaggccatccctgccccggacagcaagagacagagcatcctgttctccaccgaagtctaaaggtcccagtccatctcctggaggcagacagatggcctggaaacctctggctaatcgggccatccgtagagcgggaaccttcctgaggtgtccttgggccacccccaagtgttgggccatctgccaagagacagcgacccaaagccgaaggacaggtggcctggaaagatcccgcccaggtctgggagccccaggctggcctcagactgtggttttttatgtggccacctgagggcgccccaagccagttcatctcagagtccaggcctgaccctgggagacagggtgaagggagtggtttttatgaacttaacttagagtctaaaagatttctactggatcacttgtcaagatgcgccctctctggggagaagggaacgtgactggattccctcactgttgtatcttgaataaacgctgctgcttcatcctg

SEQ ID NO: 318411 - DNA, 3988 bp, Homo sapiens
  misc_feature (273)..(273): n is a, c, g, or t
  misc_feature (3975)..(3975): n is a, c, g, or t
ttccaggactgcagaactggcccagacctctgtattggaaaggtctttatggaccagggagtccggtgtcttttttacggggacccctgggctgcgagttgcacagtccaattcgctgttgttagggcctcagtttcccaaaaggcacagggacggggggagggtggcggctcgatgggggagccgcctccagggggcccccccgccctgtgcccacggcgcggcccctttaaggaggcccgcctggctccgctccatcgcgcatcgcggccncctccccccggccctccccttcctgcggcgcagagtgcgggccgggcgggagtgcggcgagagccggctggctgagcttagcgtccgaggaggcggcggcggcggcggcggcagcggcggcggcggggctgtggggcggtgcggaagcgagaggcgaggagcgcgcgggccgtggccagagtctggcggcggcctggcggagcggagagcagcgcccgcgcctcgccgtgcggaggagccccgcacacaatagcggcgcgcgcagcccgcgcccttccccccggcgcgccccgccccgcgcgccgagcgccccgctccgcctcacctgccaccagggagtgggcgggcattgttcgccgccgccgccgccgcgcggggccatgggggccgcccggcgcccggggccgggcctggcgaggccgccgcgccgccgctgagacgggccccgcgcgcagcccggcggcgcaggtaaggccggccgcgccatggtggacccggtgggcttcgcggaggcgtggaaggcgcagttcccggactcagagcccccgcgcatggagctgcgctcagtgggcgacatcgagcaggagctggagcgctgcaaggcctccattcggcgcctggagcaggaggtgaaccaggagcgcttccgcatgatctacctgcagacgttgctggccaaggaaaagaagagctatgaccggcagcgatggggcttccggcgcgcggcgcaggcccccgacggcgcctccgagccccgagcgtccgcgtcgcgcccgcagccagcgcccgccgacggagccgacccgccgcccgccgaggagcccgaggcccggcccgacggcgagggttctccgggtaaggccaggcccgggaccgcccgcaggcccggggcagccgcgtcgggggaacgggacgaccggggaccccccgccagcgtggcggcgctcaggtccaacttcgagcggatccgcaagggccatggccagcccggggcggacgccgagaagcccttctacgtgaacgtcgagtttcaccacgagcgcggcctggtgaaggtcaacgacaaagaggtgtcggaccgcatcagctccctgggcagccaggccatgcagatggagcgcaaaaagtcccagcacggcgcgggctcgagcgtgggggatgcatccaggcccccttaccggggacgctcctcggagagcagctgcggcgtcgacggcgactacgaggacgccgagttgaacccccgcttcctgaaggacaacctgatcgacgccaatggcggtagcaggcccccttggccgcccctggagtaccagccctaccagagcatctacgtcgggggcatgatggaaggggagggcaagggcccgctcctgcgcagccagagcacctctgagcaggagaagcgccttacctggccccgcaggtcctactccccccggagttttgaggattgcggaggcggctataccccggactgcagctccaatgagaacctcacctccagcgaggaggacttctcctctggccagtccagccgcgtgtccccaagccccaccacctaccgcatgttccgggacaaaagccgctctccctcgcagaactcgcaacagtccttcgacagcagcagtccccccacgccgcagtgccataagcggcaccggcactgcccggttgtcgtgtccgaggccaccatcgtgggcgtccgcaagaccgggcagatctggcccaacgatggcgagggcgccttccatggagacgcagatggctcgttcggaacaccacctggatacggctgcgctgcagaccgggcagaggagcagcgccggcaccaagatgggctgccctacattgatgactcgccctcctcatcgccccacctcagcagcaagggcaggggcagccgggatgcgctggtctcgggagccctggagtccactaaagcgagtgagctggacttggaaaagggcttggagatgagaaaatgggtcctgtcgggaatcctggctagcgaggagacttacctgagccacctggaggcactgctgctgcccatgaagcctttgaaagccgctgccaccacctctcagccggtgctgacgagtcagcagatcgagaccatcttcttcaaagtgcctgagctctacgagatccacaaggagttctatgatgggctcttcccccgcgtgcagcagtggagccaccagcagcgggtgggcgacctcttccagaagctggccagccagctgggtgtgtaccgggccttcgtggacaactacggagttgccatggaaatggctgagaagtgctgtcaggccaatgctcagtttgcagaaatctccgagaacctgagagccagaagcaacaaagatgccaaggatccaacgaccaagaactctctggaaactctgctctacaagcctgtggaccgtgtgacgaggagcacgctggtcctccatgacttgctgaagcacactcctgccagccaccctgaccaccccttgctgcaggacgccctccgcatctcacagaacttcctgtccagcatcaatgaggagatcacaccccgacggcagtccatgacggtgaagaagggagagcaccggcagctgctgaaggacagcttcatggtggagctggtggagggggcccgcaagctgcgccacgtcttcctgttcaccgacctgcttctctgcaccaagctcaagaagcagagcggaggcaaaacgcagcagtatgactgcaaatggtacattccgctcacggatctcagcttccagatggtggatgaactggaggcagtgcccaacatccccctggtgcccgatgaggagctggacgctttgaagatcaagatctcccagatcaagagtgacatccagagagagaagagggcgaacaagggcagcaaggctacggagaggctgaagaagaagctgtcggagcaggagtcactgctgctgcttatgtctcccagcatggccttcagggtgcacagccgcaacggcaagagttacacgttcctgatctcctctgactatgagcgtgcagagtggagggagaacatccgggagcagcagaagaagtgtttcagaagcttctccctgacatccgtggagctgcagatgctgaccaactcgtgtgtgaaactccagactgtccacagcattccgctgaccatcaataaggaagatgatgagtctccggggctctatgggtttctgaatgtcatcgtccactcagccactggatttaagcagagttcaagaaaagctccgggtcttaggctataatcacaatggggaatggtgtgaagcccaaaccaaaaatggccaaggctgggtcccaagcaactacatcacgccagtcaacagtctggagaaacactcctggtaccatgggcctgtgtcccgcaatgccgctgagtatctgctgagcagcgggatcaatggcagcttcttggtgcgtgagagtgagagcagtcctggccagaggtccatctcgctgagatacgaagggagggtgtaccattacaggatcaacactgcttctgatggcaagctctacgtctcctccgagagccgcttcaacaccctggccgagttggttcatcatcattcaacggtggccgacgggctcatcaccacgctccattatccagccccaaagcgcaacaagcccactgtctatggtgtgtccccnaactacgacaagt

SEQ ID NO: 318412 - DNA, 1346 bp, Homo sapiens
ggccgtggaggctggaagctctcgtttagccccaccagcttcccagagcagcaaggccaagcatgcaagagtcaccatccaccctggccatgatgcagggcctcctttgctggacccgcaggccctgcaggacagagactggcagcgcaccgtcatcgccatgaatgggatcgaagtaaagctctcggtcaagttcaacagcagggagttcagcttgaagaggatgccgtcccgaaaacagacaggggtcttcggagtcaagattgctgtggtcaccaagagagagaggtccaaggtgccctacatcgtgcgccagtgcgtggaggagatcgagcgccgaggcatggaggaggtgggcatctaccgcgtgtccggtgtggccacggacatccaggcactgaaggcagccttcgacgtcaataacaaggacgtgtcggtgatgatgagcgagatggacgtgaacgccatcgcaggcacgctgaagctgtacttccgtgagctgcccgagcccctcttcactgacgagttctaccccaacttcgcagagggcatcgctctttcagacccggttgcaaaggagagctgcatgctcaacctgctgctgtccctgccggaggccaacctgctcaccttccttttccttctggaccacctgaaaagggtggcagagaaggaggcagtcaataagatgtccctgcacaacctcgccacggtctttggccccacgctgctccggccctccgagaaggagagcaagctccctgccaaccccagccagcctatcaccatgactgacagctggtccttggaggtcatgtcccaggtccaggtgctgctgtacttcctgcagctggaggccatccctgccccggacagcaagagacagagcatcctgttctccaccgaagtctaaaggtcccagtccatctcctggaggcagacagatggcctggaaacctctggctaatcgggccatccgtagagcgggaaccttcctgaggtgtccttgggccacccccaagtgttgggccatctgccaagagacagcgacccaaagccgaaggacaggtggcctggaaagatcccgcccaggtctgggagccccaggctggcctcagactgtggttttttatgtggccacctgagggcgccccaagccagttcatctcagagtccaggcctgaccctgggagacagggtgaagggagtggtttttatgaacttaacttagagtctaaaagatttctactggatcacttgtcaagatgcgccctctctggggagaagggaacgtgactggattccctcactgttgtatcttgaataaacgctgctgcttcatcctg

SEQ ID NO: 318413 - DNA, 831 bp, Homo sapiens
tcataggttcgcaggaccccaacttcgcagagggcatcgctctttcagacccggttgcaaaggagagctgcatgctcaacctgctgctgtccctgccggaggccaacctgctcaccttccttttccttctggaccacctgaaaagggtggcagagaaggaggcagtcaataagatgtccctgcacaacctcgccacggtctttggccccacgctgctccggccctccgagaaggagagcaagctccctgccaaccccagccagcctatcaccatgactgacagctggtccttggaggtcatgtcccaggtccaggtgctgctgtacttcctgcagctggaggccatccctgccccggacagcaagagacagagcatcctgttctccaccgaagtctaaaggtcccagtccatctcctggaggcagacagatggcctggaaacctctggctaatcgggccatccgtagagcgggaaccttcctgaggtgtccttgggccacccccaagtgttgggccatctgccaagagacagcgacccaaagccgaaggacaggtggcctggaaagatcccgcccaggtctgggagccccaggctggcctcagactgtggttttttatgtggccacctgagggcgccccaagccagttcatctcagagtccaggcctgaccctgggagacagggtgaagggagtggtttttatgaacttaacttagagtctaaaagatttctactggatcacttgtcaagatgcgccctctctggggagaagggaacgtgactggattccctcactgttgtatcttgaataaacgctgctgcttcatcctg

SEQ ID NO: 318414 - DNA, 3454 bp, Homo sapiens
  misc_feature (273)..(273): n is a, c, g, or t
ttccaggactgcagaactggcccagacctctgtattggaaaggtctttatggaccagggagtccggtgtcttttttacggggacccctgggctgcgagttgcacagtccaattcgctgttgttagggcctcagtttcccaaaaggcacagggacggggggagggtggcggctcgatgggggagccgcctccagggggcccccccgccctgtgcccacggcgcggcccctttaaggaggcccgcctggctccgctccatcgcgcatcgcggccncctccccccggccctccccttcctgcggcgcagagtgcgggccgggcgggagtgcggcgagagccggctggctgagcttagcgtccgaggaggcggcggcggcggcggcggcagcggcggcggcggggctgtggggcggtgcggaagcgagaggcgaggagcgcgcgggccgtggccagagtctggcggcggcctggcggagcggagagcagcgcccgcgcctcgccgtgcggaggagccccgcacacaatagcggcgcgcgcagcccgcgcccttccccccggcgcgccccgccccgcgcgccgagcgccccgctccgcctcacctgccaccagggagtgggcgggcattgttcgccgccgccgccgccgcgcggggccatgggggccgcccggcgcccggggccgggcctggcgaggccgccgcgccgccgctgagacgggccccgcgcgcagcccggcggcgcaggtaaggccggccgcgccatggtggacccggtgggcttcgcggaggcgtggaaggcgcagttcccggactcagagcccccgcgcatggagctgcgctcagtgggcgacatcgagcaggagctggagcgctgcaaggcctccattcggcgcctggagcaggaggtgaaccaggagcgcttccgcatgatctacctgcagacgttgctggccaaggaaaagaagagctatgaccggcagcgatggggcttccggcgcgcggcgcaggcccccgacggcgcctccgagccccgagcgtccgcgtcgcgcccgcagccagcgcccgccgacggagccgacccgccgcccgccgaggagcccgaggcccggcccgacggcgagggttctccgggtaaggccaggcccgggaccgcccgcaggcccggggcagccgcgtcgggggaacgggacgaccggggaccccccgccagcgtggcggcgctcaggtccaacttcgagcggatccgcaagggccatggccagcccggggcggacgccgagaagcccttctacgtgaacgtcgagtttcaccacgagcgcggcctggtgaaggtcaacgacaaagaggtgtcggaccgcatcagctccctgggcagccaggccatgcagatggagcgcaaaaagtcccagcacggcgcgggctcgagcgtgggggatgcatccaggcccccttaccggggacgctcctcggagagcagctgcggcgtcgacggcgactacgaggacgccgagttgaacccccgcttcctgaaggacaacctgatcgacgccaatggcggtagcaggcccccttggccgcccctggagtaccagccctaccagagcatctacgtcgggggcatgatggaaggggagggcaagggcccgctcctgcgcagccagagcacctctgagcaggagaagcgccttacctggccccgcaggtcctactccccccggagttttgaggattgcggaggcggctataccccggactgcagctccaatgagaacctcacctccagcgaggaggacttctcctctggccagtccagccgcgtgtccccaagccccaccacctaccgcatgttccgggacaaaagccgctctccctcgcagaactcgcaacagtccttcgacagcagcagtccccccacgccgcagtgccataagcggcaccggcactgcccggttgtcgtgtccgaggccaccatcgtgggcgtccgcaagaccgggcagatctggcccaacgatggcgagggcgccttccatggagacgcagatggctcgttcggaacaccacctggatacggctgcgctgcagaccgggcagaggagcagcgccggcaccaagatgggctgccctacattgatgactcgccctcctcatcgccccacctcagcagcaagggcaggggcagccgggatgcgctggtctcgggagccctggagtccactaaagcgagtgagctggacttggaaaagggcttggagatgagaaaatgggtcctgtcgggaatcctggctagcgaggagacttacctgagccacctggaggcactgctgctgcccatgaagcctttgaaagccgctgccaccacctctcagccggtgctgacgagtcagcagatcgagaccatcttcttcaaagtgcctgagctctacgagatccacaaggagttctatgatgggctcttcccccgcgtgcagcagtggagccaccagcagcgggtgggcgacctcttccagaagctggccagccagctgggtgtgtaccgggccttcgtggacaactacggagttgccatggaaatggctgagaagtgctgtcaggccaatgctcagtttgcagaaatctccgagaacctgagagccagaagcaacaaagatgccaaggatccaacgaccaagaactctctggaaactctgctctacaagcctgtggaccgtgtgacgaggagcacgctggtcctccatgacttgctgaagcacactcctgccagccaccctgaccaccccttgctgcaggacgccctccgcatctcacagaacttcctgtccagcatcaatgaggagatcacaccccgacggcagtccatgacggtgaagaagggagaggtgagtgtggcaggggatggcttgggtccacccatcctgctgagctgggggcatgcagggcccctcgatctgaggtctggagcccttcctggtcctcagcagaccttgccttctgggattggtgagattggccgcacactcagtcctgtgtggaaggtgtctgggtgcagtctcaggggtgaccctgcaagcaccatgccctccaggtggcagccatcaccatgcctcactcagccacctctttccttttctgtcattgtgggttgtgtccagggacccctttttttttatcccccacagtcttgccagctcaggctccccagccaaggagacttgtgcaaaggaggtgagtaggaggatggcattttgtctgcctggaatcctcctacttccccctgagtgctttcattaaaaaacagttaacatcgggtttaaggattagaaagtggggttcgtggtttgtgtctgtgacgtgagactggttgaagcacttcacgtcttcctccgggaagactctccttccccttcccccccgtcactgatgtactctgtgtgcggctgcagattgggtaccgagctcg

SEQ ID NO: 318415 - DNA, 2898 bp, Homo sapiens
  misc_feature (273)..(273): n is a, c, g, or t
ttccaggactgcagaactggcccagacctctgtattggaaaggtctttatggaccagggagtccggtgtcttttttacggggacccctgggctgcgagttgcacagtccaattcgctgttgttagggcctcagtttcccaaaaggcacagggacggggggagggtggcggctcgatgggggagccgcctccagggggcccccccgccctgtgcccacggcgcggcccctttaaggaggcccgcctggctccgctccatcgcgcatcgcggccncctccccccggccctccccttcctgcggcgcagagtgcgggccgggcgggagtgcggcgagagccggctggctgagcttagcgtccgaggaggcggcggcggcggcggcggcagcggcggcggcggggctgtggggcggtgcggaagcgagaggcgaggagcgcgcgggccgtggccagagtctggcggcggcctggcggagcggagagcagcgcccgcgcctcgccgtgcggaggagccccgcacacaatagcggcgcgcgcagcccgcgcccttccccccggcgcgccccgccccgcgcgccgagcgccccgctccgcctcacctgccaccagggagtgggcgggcattgttcgccgccgccgccgccgcgcggggccatgggggccgcccggcgcccggggccgggcctggcgaggccgccgcgccgccgctgagacgggccccgcgcgcagcccggcggcgcaggtaaggccggccgcgccatggtggacccggtgggcttcgcggaggcgtggaaggcgcagttcccggactcagagcccccgcgcatggagctgcgctcagtgggcgacatcgagcaggagctggagcgctgcaaggcctccattcggcgcctggagcaggaggtgaaccaggagcgcttccgcatgatctacctgcagacgttgctggccaaggaaaagaagagctatgaccggcagcgatggggcttccggcgcgcggcgcaggcccccgacggcgcctccgagccccgagcgtccgcgtcgcgcccgcagccagcgcccgccgacggagccgacccgccgcccgccgaggagcccgaggcccggcccgacggcgagggttctccgggtaaggccaggcccgggaccgcccgcaggcccggggcagccgcgtcgggggaacgggacgaccggggaccccccgccagcgtggcggcgctcaggtccaacttcgagcggatccgcaagggccatggccagcccggggcggacgccgagaagcccttctacgtgaacgtcgagtttcaccacgagcgcggcctggtgaaggtcaacgacaaagaggtgtcggaccgcatcagctccctgggcagccaggccatgcagatggagcgcaaaaagtcccagcacggcgcgggctcgagcgtgggggatgcatccaggcccccttaccggggacgctcctcggagagcagctgcggcgtcgacggcgactacgaggacgccgagttgaacccccgcttcctgaaggacaacctgatcgacgccaatggcggtagcaggcccccttggccgcccctggagtaccagccctaccagagcatctacgtcgggggcatgatggaaggggagggcaagggcccgctcctgcgcagccagagcacctctgagcaggagaagcgccttacctggccccgcaggtcctactccccccggagttttgaggattgcggaggcggctataccccggactgcagctccaatgagaacctcacctccagcgaggaggacttctcctctggccagtccagccgcgtgtccccaagccccaccacctaccgcatgttccgggacaaaagccgctctccctcgcagaactcgcaacagtccttcgacagcagcagtccccccacgccgcagtgccataagcggcaccggcactgcccggttgtcgtgtccgaggccaccatcgtgggcgtccgcaagaccgggcagatctggcccaacgatggcgagggcgccttccatggagacgcagatggctcgttcggaacaccacctggatacggctgcgctgcagaccgggcagaggagcagcgccggcaccaagatgggctgccctacattgatgactcgccctcctcatcgccccacctcagcagcaagggcaggggcagccgggatgcgctggtctcgggagccctggagtccactaaagcgagtgagctggacttggaaaagggcttggagatgagaaaatgggtcctgtcgggaatcctggctagcgaggagacttacctgagccacctggaggcactgctgctgcccatgaagcctttgaaagccgctgccaccacctctcagccggtgctgacgagtcagcagatcgagaccatcttcttcaaagtgcctgagctctacgagatccacaaggagttctatgatgggctcttcccccgcgtgcagcagtggagccaccagcagcgggtgggcgacctcttccagaagctggccagccagctgggtgtgtaccgggccttcgtggacaactacggagttgccatggaaatggctgagaagtgctgtcaggccaatgctcagtttgcagaaatctccgagaacctgagagccagaagcaacaaagatgccaaggatccaacgaccaagaactctctggaaagtgagttctgcatgctgaggtcagtgtgacctcccacaaggcgtggcttccagactccccggccggaagtgatgcttttttgccttgggccctgggtttgaagcagcctggctttctcttggtaagtggctggtgtcttagcagctgcaatctgagctcagccacctacacaccaccgtggccgacactttcattaaaaagtttcctgagacgacttgc

SEQ ID NO: 318416 - DNA, 473 bp, Homo sapiens
gtacgtgtccgtgggactctcctggtgcccacttcccccagaaggatagggtggcctctgttcatttcaaatcagtcagaggtggctgagcctgaggcagcatctgagagggagcctggttggagaagggagggcccccaagagcagaatcaccatgcacgggaatcgtcattcattggctggaatgcagttgccagccaggccctgagcatccctcctcaaacaaaggtctcatggcaccaccaggacaggtggggcctccactcagggacctgggggctgcccatagaaatggagacccctgatttgtctttaggtaccccagaaaggtttagaccttaaaagcaatgacacacccaaaaaggcccgggtataaatggtaaaatgttaatatttgagattcttggctttttcttacattattctgtctttcctacttaatttttaattgttactaagaaagagaaagccag

SEQ ID NO: 318417 - DNA, 4737 bp, Homo sapiens
ggggagataggtaggagtagcgtggtaagggcgatgagtgcgggccgggcgggagtgcggcgagagccggctggctgagcttagcgtccgaggaggcggcggcggcggcggcggcagcggcggcggcggggctgtggggcggtgcggaagcgagaggcgaggagcgcgcgggccgtggccagagtctggcggcggcctggcggagcggagagcagcgcccgcgcctcgccgtgcggaggagccccgcacacaatagcggcgcgcgcagcccgcgcccttccccccggcgcgccccgccccgcgcgccgagcgccccgctccgcctcacctgccaccagggagtgggcgggcattgttcgccgccgccgccgccgcgcggggccatgggggccgcccggcgcccggggccgggcctggcgaggccgccgcgccgccgctgagacgggccccgcgcgcagcccggcggcgcaggtaaggccggccgcgccatggtggacccggtgggcttcgcggaggcgtggaaggcgcagttcccggactcagagcccccgcgcatggagctgcgctcagtgggcgacatcgagcaggagctggagcgctgcaaggcctccattcggcgcctggagcaggaggtgaaccaggagcgcttccgcatgatctacctgcagacgttgctggccaaggaaaagaagagctatgaccggcagcgatggggcttccggcgcgcggcgcaggcccccgacggcgcctccgagccccgagcgtccgcgtcgcgcccgcagccagcgcccgccgacggagccgacccgccgcccgccgaggagcccgaggcccggcccgacggcgagggttctccgggtaaggccaggcccgggaccgcccgcaggcccggggcagccgcgtcgggggaacgggacgaccggggaccccccgccagcgtggcggcgctcaggtccaacttcgagcggatccgcaagggccatggccagcccggggcggacgccgagaagcccttctacgtgaacgtcgagtttcaccacgagcgcggcctggtgaaggtcaacgacaaagaggtgtcggaccgcatcagctccctgggcagccaggccatgcagatggagcgcaaaaagtcccagcacggcgcgggctcgagcgtgggggatgcatccaggcccccttaccggggacgctcctcggagagcagctgcggcgtcgacggcgactacgaggacgccgagttgaacccccgcttcctgaaggacaacctgatcgacgccaatggcggtagcaggcccccttggccgcccctggagtaccagccctaccagagcatctacgtcgggggcatgatggaaggggagggcaagggcccgctcctgcgcagccagagcacctctgagcaggagaagcgccttacctggccccgcaggtcctactccccccggagttttgaggattgcggaggcggctataccccggactgcagctccaatgagaacctcacctccagcgaggaggacttctcctctggccagtccagccgcgtgtccccaagccccaccacctaccgcatgttccgggacaaaagccgctctccctcgcagaactcgcaacagtccttcgacagcagcagtccccccacgccgcagtgccataagcggcaccggcactgcccggttgtcgtgtccgaggccaccatcgtgggcgtccgcaagaccgggcagatctggcccaacgatggcgagggcgccttccatggagacgcagatggctcgttcggaacaccacctggatacggctgcgctgcagaccgggcagaggagcagcgccggcaccaagatgggctgccctacattgatgactcgccctcctcatcgccccacctcagcagcaagggcaggggcagccgggatgcgctggtctcgggagccctggagtccactaaagcgagtgagctggacttggaaaagggcttggagatgagaaaatgggtcctgtcgggaatcctggctagcgaggagacttacctgagccacctggaggcactgctgctgcccatgaagcctttgaaagccgctgccaccacctctcagccggtgctgacgagtcagcagatcgagaccatcttcttcaaagtgcctgagctctacgagatccacaaggagttctatgatgggctcttcccccgcgtgcagcagtggagccaccagcagcgggtgggcgacctcttccagaagctggccagccagctgggtgtgtaccgggccttcgtggacaactacggagttgccatggaaatggctgagaagtgctgtcaggccaatgctcagtttgcagaaatctccgagaacctgagagccagaagcaacaaagatgccaaggatccaacgaccaagaactctctggaaactctgctctacaagcctgtggaccgtgtgacgaggagcacgctggtcctccatgacttgctgaagcacactcctgccagccaccctgaccaccccttgctgcaggacgccctccgcatctcacagaacttcctgtccagcatcaatgaggagatcacaccccgacggcagtccatgacggtgaagaagggagagcaccggcagctgctgaaggacagcttcatggtggagctggtggagggggcccgcaagctgcgccacgtcttcctgttcaccgacctgcttctctgcaccaagctcaagaagcagagcggaggcaaaacgcagcagtatgactgcaaatggtacattccgctcacggatctcagcttccagatggtggatgaactggaggcagtgcccaacatccccctggtgcccgatgaggagctggacgctttgaagatcaagatctcccagatcaagagtgacatccagagagagaagagggcgaacaagggcagcaaggctacggagaggctgaagaagaagctgtcggagcaggagtcactgctgctgcttatgtctcccagcatggccttcagggtgcacagccgcaacggcaagagttacacgttcctgatctcctctgactatgagcgtgcagagtggagggagaacatccgggagcagcagaagaagtgtttcagaagcttctccctgacatccgtggagctgcagatgctgaccaactcgtgtgtgaaactccagactgtccacagcattccgctgaccatcaataaggaagatgatgagtctccggggctctatgggtttctgaatgtcatcgtccactcagccactggatttaagcagagttcaaatctgtactgcaccctggaggtggattcctttgggtattttgtgaataaagcaaagacgcgcgtctacagggacacagctgagccaaactggaacgaggaatttgagatagagctggagggctcccagaccctgaggatactgtgctatgaaaagtgttacaacaagacgaagatccccaaggaggacggcgagagcacggacagactcatggggaagggccaggtccagctggacccgcaggccctgcaggacagagactggcagcgcaccgtcatcgccatgaatgggatcgaagtaaagctctcggtcaagttcaacagcagggagttcagcttgaagaggatgccgtcccgaaaacagacaggggtcttcggagtcaagattgctgtggtcaccaagagagagaggtccaaggtgccctacatcgtgcgccagtgcgtggaggagatcgagcgccgaggcatggaggaggtgggcatctaccgcgtgtccggtgtggccacggacatccaggcactgaaggcagccttcgacgtcaataacaaggacgtgtcggtgatgatgagcgagatggacgtgaacgccatcgcaggcacgctgaagctgtacttccgtgagctgcccgagcccctcttcactgacgagttctaccccaacttcgcagagggcatcgctctttcagacccggttgcaaaggagagctgcatgctcaacctgctgctgtccctgccggaggccaacctgctcaccttccttttccttctggaccacctgaaaagggtggcagagaaggaggcagtcaataagatgtccctgcacaacctcgccacggtctttggccccacgctgctccggccctccgagaaggagagcaagctccctgccaaccccagccagcctatcaccatgactgacagctggtccttggaggtcatgtcccaggtccaggtgctgctgtacttcctgcagctggaggccatccctgccccggacagcaagagacagagcatcctgttctccaccgaagtctaaaggtcccagtccatctcctggaggcagacagatggcctggaaacctctggctaatcgggccatccgtagagcgggaaccttcctgaggtgtccttgggccacccccaagtgttgggccatctgccaagagacagcgacccaaagccgaaggacaggtggcctggaaagatcccgcccaggtctgggagccccaggctggcctcagactgtggttttttatgtggccacctgagggcgccccaagccagttcatctcagagtccaggcctgaccctgggagacagggtgaagggagtggtttttatgaacttaacttagagtctaaaagatttctactggatcacttgtcaagatgcgccctctctggggagaagggaacgtgactggattccctcactgttgtatcttgaataaacgctgctgcttcatcctg

SEQ ID NO: 318418 - DNA, 4544 bp, Homo sapiens
cggtgctgcctgggccccgtcaatcgaagggtcatgtggcggcagcagtcagagaatccaggtgaggcgggccccaggtgagcagtggggagtggagtttggctgcagcagaagccaggtggccatgctgtgggctctgacgccccctcaggtcagagcctccttctccttccctgactgtgtcaggcagctgcccttgggttgcatgcagaagcgtggagggaggcctggcccagcctgctccgcaccaaactctgtttcgtggtctggcaagagtaagggtggccctggtgttgccagatgacccccctccccgggattctcagtgactgtgagtgtgtggcttagtatgtgcggagggtcccctgcctccctttaattccatgtggagcctttgtgggggcaggggtttgtccagaggtcaacaagctggccctcctctctcagagggccctgatggaagaatccccctaccacccttccaggctgacttctgtctatttctcctgcagagtgagctggacttggaaaagggcttggagatgagaaaatgggtcctgtcgggaatcctggctagcgaggagacttacctgagccacctggaggcactgctgctggtgaggaggatttagggagctgagcagggcgggatggggcagggtgacagggttggggagcctctttgcccttaagtcccaggtcagctgtcagagcctgggtgcagctcgccatccctggagtggataccagtggaagactgagttgccaaaccaagctggttttaaaattgtatttgttatgtgatttaaaaataaaagtgcatatgtcaggtaaccatgactgtctactgccatacaatgcacctgacggatggcagcccctctcacctgtgctacctcacttgtgccctcttccagcccatgaagcctttgaaagccgctgccaccacctctcagccggtgctgacgagtcagcagatcgagaccatcttcttcaaagtgcctgagctctacgagatccacaaggagttctatgatgggctcttcccccgcgtgcagcagtggagccaccagcagcgggtgggcgacctcttccagaagctggtgagtaacccagggccggtgctgggactacaggcgtgtaccaccacgtccagctaattttttgcatttttagtagagacagggttttgctatgttggccaggctggtctcaaactcctaacctcaagtgatccacctgcctcagcctcccaaagtactgagattacaggcgtgagccgccatgcccagcctttttttttttttttctaatttatatttatttagatagttatttttaaaaagagatggggacttactacgttgtccaggctggagtgcagtggctattcacaggcgcaattccactgctcatcagcacgggagttttgacctccttcctttccaaccttggctgtttcactccttcttaggcaaactgatggttcccgactcctgggaggtcaccatattgatgccaaacttagtgtgtagtgcactacagcccagaactcctgactgaagccatcctccggcctcagccttccgcgtagctggggctataggtgcacgccaccacaccctgtgtgtggctgggactacaggtgcacgccatcacaccctgtgtgcgccatcacaccctgtgtgcaccatcacaccctgtgtgcacacactttccctaaagcaggcttcctccgctgggaaacaagtcctctaggggcaggtgtggccagaggccaggcccccctctaagtgtgaagagcatgtgattccttaaaagcccttcccccagcacttctggactaccgagacacacagctctggcctcgggcctccccttggctggtgctgggggctgagttttctgctctgaggtgtggctttcctgtagggggacccctccctctgccaccctgtgctgcagacccccagactccaggccagagctaaggcttgaggaacacagaaggcacttaatttgttccagttcttgctccctggggctctttcccccatggccagagagcaggaggctgtattttgatacatgctgccccctccatctttgaagcccccccacccccgtttctccgtgtgtgtgtcagcagttttaaacctagtggagggtggtggctcgggctgggctccgcgtcgggctgccccgcagctgctcttgggcagccagggccgctgggtgtggggccgccgggaatggcgggcccgggtgagggcgggggcggagaggcgaagaagctgcaggaagggagggtgacgagggggaagcgaaggaaggggaagaggaagggaaaagcgagcgagaggggcaaggcggaagaggaagcagggcggaagggaagcccgggccgcagacggcgaaggaggcagcgggccgggggctgaggcgggagcgaggacacgcccaagagaggaagcagagggaggcggaagcgtggaggaaggggcgagaggcatcatcaaaggagatgaggggagcgtaggggccgggaaagaggcacaaggaagaaagtatgggaaggaggaatggagggtcagggctaggcggcgggagggcgccaggccgggaagagtacaaggacaaggaggtcaggtttgggcctacatcccggggacaggggcggccatggcggcggcagccagggaggaggaggaggaggcggctcgggagtcagccgcctgcccggctgcggggccagcgctctggcgcctgccggaagtgctgctgctgcacatgtgctcctacctcgacatgcgggccctcggccgcctggcccaggtgtaccgctggctgtggcacttcaccaactgcgacctgctccggcgccagatagcctgggcctcgctcaactccggcttcacgcggctcggcaccaacctgatgaccagtgtcccagtgaaggtgtctcagaactggatagtggggtgctgccgagaggggattctgctgaagtggagatgcagtcagatgccctggatgcagctagaggatgatgctttgtacatatcccaggctaatttcatcctggcctaccagttccgtccagatggtgccagcttgaaccgtcagcctctgggagtctgctgggcatgatgaggacgtttgccactttgtgctggccacctcgcatattgtcagtgcaggaggagatgggaagattggccttggtaagattcacagcaccttcgctgccaagtactgggctcatgaacaggaggtgaactgtgtggattgcaaagggggcatcatatcattgtgagtggctccagggacaggacggccaaggtgtggcctttggcctcaggccagctggggtagtgtttatacaccatccagactgaagaccaaatctggtctgttgctatcaggccattactcagctcttttgtgacagggacggcttgttgtgggcacttctcacccctgaaaatctgggacctcaacagtgggcagctgatgacacacttggacagagactttcccccaagggctggggtgctggatgtcatatatgagtcccctttcgcactgctctcctgtggctatgacacctatgttcgctactgggactgccgcaccagtgtccggaaatgtgtcatggagtgggaggagccccacaacagcaccctgtactgcctgcagacagatggcaaccacttgcttgccacaggttcctccttctatagcgttgtacggctgtgggaccggcaccaaagggcctgcccgcacaccttcccgctgacgtcgacccgcctcggcagccctgtgtactgcctgcatctcaccaccaagcatctctatgctgcgctgtcttacaacctccacgtcctggatattcaaaacccgtgaccgtcagggccacccctgcctgtgggccaaggagaccagtgagtcagggacctctcttgcatgaagggtgcagtgatagttcctccccactgccccactgtgctcctgggcctgtgaccccagtgctcaggcaccttgcagtagaggcttctgactcctggagctttgtggcttaccagagatgcagtccctcccaggaacctgttggagaggcaggacctgctgctttagaggagtgcagctgaacctcggccctgcgactctgtttggccagagcaaggatctggcctggagaggcccatcctacaccccttattagagccgtgatagcctacagagtgaggtgaggttctcccgccttcccaggtggtttctttctgccacttcctggaaagaaaggtgaggctgccagtagcccactagcaccagccagacctcacgcttgaccaacctctcggggccagaggttcattcctggggcactgtggcctggttttgttttgaaaccaagagagggcaaagggaacccagcagttctgagtgagttctagccagccctacctcaggctggctgttgagagattttacaattttcatttttgtaaaaataaagcttgattgttcccagaaaaaaaaag

SEQ ID NO: 318419 - DNA, 7096 bp, Homo sapiens
  misc_feature (273)..(273): n is a, c, g, or t
ttccaggactgcagaactggcccagacctctgtattggaaaggtctttatggaccagggagtccggtgtcttttttacggggacccctgggctgcgagttgcacagtccaattcgctgttgttagggcctcagtttcccaaaaggcacagggacggggggagggtggcggctcgatgggggagccgcctccagggggcccccccgccctgtgcccacggcgcggcccctttaaggaggcccgcctggctccgctccatcgcgcatcgcggccncctccccccggccctccccttcctgcggcgcagagtgcgggccgggcgggagtgcggcgagagccggctggctgagcttagcgtccgaggaggcggcggcggcggcggcggcagcggcggcggcggggctgtggggcggtgcggaagcgagaggcgaggagcgcgcgggccgtggccagagtctggcggcggcctggcggagcggagagcagcgcccgcgcctcgccgtgcggaggagccccgcacacaatagcggcgcgcgcagcccgcgcccttccccccggcgcgccccgccccgcgcgccgagcgccccgctccgcctcacctgccaccagggagtgggcgggcattgttcgccgccgccgccgccgcgcggggccatgggggccgcccggcgcccggggccgggcctggcgaggccgccgcgccgccgctgagacgggccccgcgcgcagcccggcggcgcaggtaaggccggccgcgccatggtggacccggtgggcttcgcggaggcgtggaaggcgcagttcccggactcagagcccccgcgcatggagctgcgctcagtgggcgacatcgagcaggagctggagcgctgcaaggcctccattcggcgcctggagcaggaggtgaaccaggagcgcttccgcatgatctacctgcagacgttgctggccaaggaaaagaagagctatgaccggcagcgatggggcttccggcgcgcggcgcaggcccccgacggcgcctccgagccccgagcgtccgcgtcgcgcccgcagccagcgcccgccgacggagccgacccgccgcccgccgaggagcccgaggcccggcccgacggcgagggttctccgggtaaggccaggcccgggaccgcccgcaggcccggggcagccgcgtcgggggaacgggacgaccggggaccccccgccagcgtggcggcgctcaggtccaacttcgagcggatccgcaagggccatggccagcccggggcggacgccgagaagcccttctacgtgaacgtcgagtttcaccacgagcgcggcctggtgaaggtcaacgacaaagaggtgtcggaccgcatcagctccctgggcagccaggccatgcagatggagcgcaaaaagtcccagcacggcgcgggctcgagcgtgggggatgcatccaggcccccttaccggggacgctcctcggagagcagctgcggcgtcgacggcgactacgaggacgccgagttgaacccccgcttcctgaaggacaacctgatcgacgccaatggcggtagcaggcccccttggccgcccctggagtaccagccctaccagagcatctacgtcgggggcatgatggaaggggagggcaagggcccgctcctgcgcagccagagcacctctgagcaggagaagcgccttacctggccccgcaggtcctactccccccggagttttgaggattgcggaggcggctataccccggactgcagctccaatgagaacctcacctccagcgaggaggacttctcctctggccagtccagccgcgtgtccccaagccccaccacctaccgcatgttccgggacaaaagccgctctccctcgcagaactcgcaacagtccttcgacagcagcagtccccccacgccgcagtgccataagcggcaccggcactgcccggttgtcgtgtccgaggccaccatcgtgggcgtccgcaagaccgggcagatctggcccaacgatggcgagggcgccttccatggagacgcagatggctcgttcggaacaccacctggatacggctgcgctgcagaccgggcagaggagcagcgccggcaccaagatgggctgccctacattgatgactcgccctcctcatcgccccacctcagcagcaagggcaggggcagccgggatgcgctggtctcgggagccctggagtccactaaagcgagtgagctggacttggaaaagggcttggagatgagaaaatgggtcctgtcgggaatcctggctagcgaggagacttacctgagccacctggaggcactgctgctgcccatgaagcctttgaaagccgctgccaccacctctcagccggtgctgacgagtcagcagatcgagaccatcttcttcaaagtgcctgagctctacgagatccacaaggagttctatgatgggctcttcccccgcgtgcagcagtggagccaccagcagcgggtgggcgacctcttccagaagctggccagccagctgggtgtgtaccgggccttcgtggacaactacggagttgccatggaaatggctgagaagtgctgtcaggccaatgctcagtttgcagaaatctccgagaacctgagagccagaagcaacaaagatgccaaggatccaacgaccaagaactctctggaaactctgctctacaagcctgtggaccgtgtgacgaggagcacgctggtcctccatgacttgctgaagcacactcctgccagccaccctgaccaccccttgctgcaggacgccctccgcatctcacagaacttcctgtccagcatcaatgaggagatcacaccccgacggcagtccatgacggtgaagaagggagagcaccggcagctgctgaaggacagcttcatggtggagctggtggagggggcccgcaagctgcgccacgtcttcctgttcaccgacctgcttctctgcaccaagctcaagaagcagagcggaggcaaaacgcagcagtatgactgcaaatggtacattccgctcacggatctcagcttccagatggtggatgaactggaggcagtgcccaacatccccctggtgcccgatgaggagctggacgctttgaagatcaagatctcccagatcaagagtgacatccagagagagaagagggcgaacaagggcagcaaggctacggagaggctgaagaagaagctgtcggagcaggagtcactgctgctgcttatgtctcccagcatggccttcagggtgcacagccgcaacggcaagagttacacgttcctgatctcctctgactatgagcgtgcagagtggagggagaacatccgggagcagcagaagaagtgtttcagaagcttctccctgacatccgtggagctgcagatgctgaccaactcgtgtgtgaaactccagactgtccacagcattccgctgaccatcaataaggaagatgatgagtctccggggctctatgggtttctgaatgtcatcgtccactcagccactggatttaagcagagttcaaatctgtactgcaccctggaggtggattcctttgggtattttgtgaataaagcaaagacgcgcgtctacagggacacagctgagccaaactggaacgaggaatttgagatagagctggagggctcccagaccctgaggatactgtgctatgaaaagtgttacaacaagacgaagatccccaaggaggacggcgagagcacggacagactcatggggaagggccaggtccagctggacccgcaggccctgcaggacagagactggcagcgcaccgtcatcgccatgaatgggatcgaagtaaagctctcggtcaagttcaacagcagggagttcagcttgaagaggatgccgtcccgaaaacagacaggggtcttcggagtcaagattgctgtggtcaccaagagagagaggtccaaggtgccctacatcgtgcgccagtgcgtggaggagatcgagcgccgaggcatggaggaggtgggcatctaccgcgtgtccggtgtggccacggacatccaggcactgaaggcagccttcgacgtcaataacaaggacgtgtcggtgatgatgagcgagatggacgtgaacgccatcgcaggcacgctgaagctgtacttccgtgagctgcccgagcccctcttcactgacgagttctaccccaacttcgcagagggcatcgctctttcagacccggttgcaaaggagagctgcatgctcaacctgctgctgtccctgccggaggccaacctgctcaccttccttttccttctggaccacctgaaaagggtggcagagaaggaggcagtcaataagatgtccctgcacaacctcgccacggtctttggccccacgctgctccggccctccgagaaggagagcaagctccctgccaaccccagccagcctatcaccatgactgacagctggtccttggaggtcatgtcccaggtccaggtgctgctgtacttcctgcagctggaggccatccctgccccggacagcaagagacagagcatcctgttctccaccgaagtctaaaggtcccagtccatctcctggaggcagacagatggcctggaaacctctggctaatcgggccatccgtagagcgggaaccttcctgaggtgtccttgggccacccccaagtgttgggccatctgccaagagacagcgacccaaagccgaaggacaggtggcctggaaagatcccgcccaggtctgggagccccaggctggcctcagactgtggttttttatgtggccacctgagggcgccccaagccagttcatctcagagtccaggcctgaccctgggagacagggtgaagggagtggtttttatgaacttaacttagagtctaaaagatttctactggatcacttgtcaagatgcgccctctctggggagaagggaacgtgactggattccctcactgttgtatcttgaataaacgctgctgcttcatcctgtgggggccgtggccctgtccctgtgtgggtggggcctcttccatttccctgacttagaaaccacactccacttctaacagggtttgagaggcttagtcagcactgggtagcgtttgactccattcttggctttcttctttttctttccagaaggattttgtgcagaaatgggtctttgttgccatgttagtcctccttggaaggcagctcagaaggcccgtgaaatgtcgggggacaggacccccagggagggaaccccaggctacgcactttagggttcgttctccagggagagcgacctcgtcccccgatcctgaccgcccttccggcccacgctctcctgtttggcttccacaggcctggacttctctggcttctctgcccacacactccctgcccccagtgtccctgcccctgccccagcacaggtgacttcatttctgtcctctcagctcagtggactcgctcaacttttgtataagtctccacttggtggcagcagcttgctgatgacttgttttaaaactttcatcctaaataaccttttgatacttgaatatttgtaagttttatacatagtttctaatttttttccgaacagatccagatacctaataagatgctggaatgtaatccctggacaatccgtgtcctggcagcatttggtcttcctctaagcgcctggctccgctgttctcaggagtgggttctgaagtctctggagaacaggatacgtggagggttaggaaggggccaggcctagagacgggagactccctcccggagcaggtggaggcacaggaccattcgctaccccatctgccggcacctgcgggggagcccaggcattctttgtaagccctcctgaccacctggctcaaagaaaacagaagcatggagaccgccaagtattttcaagaaataaccccatgaatattccatcacttttttagaaagaggggcttggggcaggcagaggagagaagggagagcaaactgagagccaagtttccagacggtcctgcaggaggagaggatgcagctgcccagagggaagcaggatcacatttaaggaagtgtgtggggtccctggatgacaccagcacccagtgcggctctgtctggcacccgctcccaaggtgggaggagtgggtgtcccctgtgtgtcagtgggcagctcctgctgaacccgcagctcactagggagcctgacagtggggccatgcgcctgacactcctctctgcttgtggacctggcaaggcagggagcagaaaacagagccacttgaaggctttctgtctgcgtctgtgtgcagtgtggatttagttgtgcttttttcttgctgggagagcacagccaccatttacaagcagtgtcaccgtcgtgggtggcgaggacagaacaggagcctctgctctctgtacctatctgggcccggtgggctcccttgtcctggcttccatctctgtctcagcgaccattcagccctgcgcaggaacacgtgttgcttagaaaagccaaatccagccttgtctctgcctcctctggtctcatgatgtgcatctgttaccttgaaactggaaaccagtctatcaatgtctgtgccaattttttattccctccccaacctccttccccataggactttttatttatgtaggatgtgtgctgtctaatgatgggatgaccacacttttccatgttctaaaagtgctcctctcccgcagggtcccagggctggtggttgctttgggtctacagctacgtcttacccgcctcctgcctcaacagcctgtgtggtggcaaagccggtgtggggctggggaacgcagcgttctccaggagggggacccggctctccttctgcagtgcaggcgaaggcctagatgccagtgtgacctcccacaaggcgtggcttccagactccccggccggaagtgatgcttttttgccttgggccctgggtttgaagcagcctggctttctcttggtaagtggctggtgtcttagcagctgcaatctgagctcagccacctacacaccaccgtggccgacactttcattaaaaagtttcctgagacgacttgc

SEQ ID NO: 318420 - DNA, 5089 bp, Homo sapiens
  misc_feature (273)..(273): n is a, c, g, or t
ttccaggactgcagaactggcccagacctctgtattggaaaggtctttatggaccagggagtccggtgtcttttttacggggacccctgggctgcgagttgcacagtccaattcgctgttgttagggcctcagtttcccaaaaggcacagggacggggggagggtggcggctcgatgggggagccgcctccagggggcccccccgccctgtgcccacggcgcggcccctttaaggaggcccgcctggctccgctccatcgcgcatcgcggccncctccccccggccctccccttcctgcggcgcagagtgcgggccgggcgggagtgcggcgagagccggctggctgagcttagcgtccgaggaggcggcggcggcggcggcggcagcggcggcggcggggctgtggggcggtgcggaagcgagaggcgaggagcgcgcgggccgtggccagagtctggcggcggcctggcggagcggagagcagcgcccgcgcctcgccgtgcggaggagccccgcacacaatagcggcgcgcgcagcccgcgcccttccccccggcgcgccccgccccgcgcgccgagcgccccgctccgcctcacctgccaccagggagtgggcgggcattgttcgccgccgccgccgccgcgcggggccatgggggccgcccggcgcccggggccgggcctggcgaggccgccgcgccgccgctgagacgggccccgcgcgcagcccggcggcgcaggtaaggccggccgcgccatggtggacccggtgggcttcgcggaggcgtggaaggcgcagttcccggactcagagcccccgcgcatggagctgcgctcagtgggcgacatcgagcaggagctggagcgctgcaaggcctccattcggcgcctggagcaggaggtgaaccaggagcgcttccgcatgatctacctgcagacgttgctggccaaggaaaagaagagctatgaccggcagcgatggggcttccggcgcgcggcgcaggcccccgacggcgcctccgagccccgagcgtccgcgtcgcgcccgcagccagcgcccgccgacggagccgacccgccgcccgccgaggagcccgaggcccggcccgacggcgagggttctccgggtaaggccaggcccgggaccgcccgcaggcccggggcagccgcgtcgggggaacgggacgaccggggaccccccgccagcgtggcggcgctcaggtccaacttcgagcggatccgcaagggccatggccagcccggggcggacgccgagaagcccttctacgtgaacgtcgagtttcaccacgagcgcggcctggtgaaggtcaacgacaaagaggtgtcggaccgcatcagctccctgggcagccaggccatgcagatggagcgcaaaaagtcccagcacggcgcgggctcgagcgtgggggatgcatccaggcccccttaccggggacgctcctcggagagcagctgcggcgtcgacggcgactacgaggacgccgagttgaacccccgcttcctgaaggacaacctgatcgacgccaatggcggtagcaggcccccttggccgcccctggagtaccagccctaccagagcatctacgtcgggggcatgatggaaggggagggcaagggcccgctcctgcgcagccagagcacctctgagcaggagaagcgccttacctggccccgcaggtcctactccccccggagttttgaggattgcggaggcggctataccccggactgcagctccaatgagaacctcacctccagcgaggaggacttctcctctggccagtccagccgcgtgtccccaagccccaccacctaccgcatgttccgggacaaaagccgctctccctcgcagaactcgcaacagtccttcgacagcagcagtccccccacgccgcagtgccataagcggcaccggcactgcccggttgtcgtgtccgaggccaccatcgtgggcgtccgcaagaccgggcagatctggcccaacgatggcgagggcgccttccatggagacgcagatggctcgttcggaacaccacctggatacggctgcgctgcagaccgggcagaggagcagcgccggcaccaagatgggctgccctacattgatgactcgccctcctcatcgccccacctcagcagcaagggcaggggcagccgggatgcgctggtctcgggagccctggagtccactaaagcgagtgagctggacttggaaaagggcttggagatgagaaaatgggtcctgtcgggaatcctggctagcgaggagacttacctgagccacctggaggcactgctgctgcccatgaagcctttgaaagccgctgccaccacctctcagccggtgctgacgagtcagcagatcgagaccatcttcttcaaagtgcctgagctctacgagatccacaaggagttctatgatgggctcttcccccgcgtgcagcagtggagccaccagcagcgggtgggcgacctcttccagaagctggccagccagctgggtgtgtaccgggccttcgtggacaactacggagttgccatggaaatggctgagaagtgctgtcaggccaatgctcagtttgcagaaatctccgagaacctgagagccagaagcaacaaagatgccaaggatccaacgaccaagaactctctggaaactctgctctacaagcctgtggaccgtgtgacgaggagcacgctggtcctccatgacttgctgaagcacactcctgccagccaccctgaccaccccttgctgcaggacgccctccgcatctcacagaacttcctgtccagcatcaatgaggagatcacaccccgacggcagtccatgacggtgaagaagggagagcaccggcagctgctgaaggacagcttcatggtggagctggtggagggggcccgcaagctgcgccacgtcttcctgttcaccgacctgcttctctgcaccaagctcaagaagcagagcggaggcaaaacgcagcagtatgactgcaaatggtacattccgctcacggatctcagcttccagatggtggatgaactggaggcagtgcccaacatccccctggtgcccgatgaggagctggacgctttgaagatcaagatctcccagatcaagagtgacatccagagagagaagagggcgaacaagggcagcaaggctacggagaggctgaagaagaagctgtcggagcaggagtcactgctgctgcttatgtctcccagcatggccttcagggtgcacagccgcaacggcaagagttacacgttcctgatctcctctgactatgagcgtgcagagtggagggagaacatccgggagcagcagaagaagtgtttcagaagcttctccctgacatccgtggagctgcagatgctgaccaactcgtgtgtgaaactccagactgtccacagcattccgctgaccatcaataaggaagatgatgagtctccggggctctatgggtttctgaatgtcatcgtccactcagccactggatttaagcagagttcaaatctgtactgcaccctggaggtggattcctttgggtattttgtgaataaagcaaagacgcgcgtctacagggacacagctgagccaaactggaacgaggaatttgagatagagctggagggctcccagaccctgaggatactgtgctatgaaaagtgttacaacaagacgaagatccccaaggaggacggcgagagcacggacagactcatggggaagggccaggtccagctggacccgcaggccctgcaggacagagactggcagcgcaccgtcatcgccatgaatgggatcgaagtaaagctctcggtcaagttcaacagcagggagttcagcttgaagaggatgccgtcccgaaaacagacaggggtcttcggagtcaagattgctgtggtcaccaagagagagaggtccaaggtgccctacatcgtgcgccagtgcgtggaggagatcgagcgccgaggcatggaggaggtgggcatctaccgcgtgtccggtgtggccacggacatccaggcactgaaggcagccttcgacgtcagtgagtgttggcctgcgcaggacgggatggaggtgtgggcaatggtgtccgcgatgagatctcagagtgctccatggcccagataacaaggacgtgtcggtgatgatgagcgagatggacgtgaacgccatcgcaggcacgctgaagctgtacttccgtgagctgcccgagcccctcttcactgacgagttctaccccaacttcgcagagggcatcgctctttcagacccggttgcaaaggagagctgcatgctcaacctgctgctgtccctgccggaggccaacctgctcaccttccttttccttctggaccacctgaaaagggtggcagagaaggaggcagtcaataagatgtccctgcacaacctcgccacggtctttggccccacgctgctccggccctccgagaaggagagcaagctccctgccaaccccagccagcctatcaccatgactgacagctggtccttggaggtcatgtcccaggtccaggtgctgctgtacttcctgcagctggaggccatccctgccccggacagcaagagacagagcatcctgttctccaccgaagtctaaaggtcccagtccatctcctggaggcagacagatggcctggaaacctctggctaatcgggccatccgtagagcgggaaccttcctgaggtgtccttgggccacccccaagtgttgggccatctgccaagagacagcgacccaaagccgaaggacaggtggcctggaaagatcccgcccaggtctgggagccccaggctggcctcagactgtggttttttatgtggccacctgagggcgccccaagccagttcatctcagagtccaggcctgaccctgggagacagggtgaagggagtggtttttatgaacttaacttagagtctaaaagatttctactggatcacttgtcaagatgcgccctctctggggagaagggaacgtgactggattccctcactgttgtatcttgaataaacgctgctgcttcatcctg

SEQ ID NO: 318421 - DNA, 5307 bp, Homo sapiens
  misc_feature (273)..(273): n is a, c, g, or t
ttccaggactgcagaactggcccagacctctgtattggaaaggtctttatggaccagggagtccggtgtcttttttacggggacccctgggctgcgagttgcacagtccaattcgctgttgttagggcctcagtttcccaaaaggcacagggacggggggagggtggcggctcgatgggggagccgcctccagggggcccccccgccctgtgcccacggcgcggcccctttaaggaggcccgcctggctccgctccatcgcgcatcgcggccncctccccccggccctccccttcctgcggcgcagagtgcgggccgggcgggagtgcggcgagagccggctggctgagcttagcgtccgaggaggcggcggcggcggcggcggcagcggcggcggcggggctgtggggcggtgcggaagcgagaggcgaggagcgcgcgggccgtggccagagtctggcggcggcctggcggagcggagagcagcgcccgcgcctcgccgtgcggaggagccccgcacacaatagcggcgcgcgcagcccgcgcccttccccccggcgcgccccgccccgcgcgccgagcgccccgctccgcctcacctgccaccagggagtgggcgggcattgttcgccgccgccgccgccgcgcggggccatgggggccgcccggcgcccggggccgggcctggcgaggccgccgcgccgccgctgagacgggccccgcgcgcagcccggcggcgcaggtaaggccggccgcgccatggtggacccggtgggcttcgcggaggcgtggaaggcgcagttcccggactcagagcccccgcgcatggagctgcgctcagtgggcgacatcgagcaggagctggagcgctgcaaggcctccattcggcgcctggagcaggaggtgaaccaggagcgcttccgcatgatctacctgcagacgttgctggccaaggaaaagaagagctatgaccggcagcgatggggcttccggcgcgcggcgcaggcccccgacggcgcctccgagccccgagcgtccgcgtcgcgcccgcagccagcgcccgccgacggagccgacccgccgcccgccgaggagcccgaggcccggcccgacggcgagggttctccgggtaaggccaggcccgggaccgcccgcaggcccggggcagccgcgtcgggggaacgggacgaccggggaccccccgccagcgtggcggcgctcaggtccaacttcgagcggatccgcaagggccatggccagcccggggcggacgccgagaagcccttctacgtgaacgtcgagtttcaccacgagcgcggcctggtgaaggtcaacgacaaagaggtgtcggaccgcatcagctccctgggcagccaggccatgcagatggagcgcaaaaagtcccagcacggcgcgggctcgagcgtgggggatgcatccaggcccccttaccggggacgctcctcggagagcagctgcggcgtcgacggcgactacgaggacgccgagttgaacccccgcttcctgaaggacaacctgatcgacgccaatggcggtagcaggcccccttggccgcccctggagtaccagccctaccagagcatctacgtcgggggcatgatggaaggggagggcaagggcccgctcctgcgcagccagagcacctctgagcaggagaagcgccttacctggccccgcaggtcctactccccccggagttttgaggattgcggaggcggctataccccggactgcagctccaatgagaacctcacctccagcgaggaggacttctcctctggccagtccagccgcgtgtccccaagccccaccacctaccgcatgttccgggacaaaagccgctctccctcgcagaactcgcaacagtccttcgacagcagcagtccccccacgccgcagtgccataagcggcaccggcactgcccggttgtcgtgtccgaggccaccatcgtgggcgtccgcaagaccgggcagatctggcccaacgatggcgagggcgccttccatggagacgcagatggctcgttcggaacaccacctggatacggctgcgctgcagaccgggcagaggagcagcgccggcaccaagatgggctgccctacattgatgactcgccctcctcatcgccccacctcagcagcaagggcaggggcagccgggatgcgctggtctcgggagccctggagtccactaaagcgagtgagctggacttggaaaagggcttggagatgagaaaatgggtcctgtcgggaatcctggctagcgaggagacttacctgagccacctggaggcactgctgctggtgaggaggatttagggagctgagcagggcgggatggggcagggtgacagggttggggagcctctttgcccttaagtcccaggtcagctgtcagagcctgggtgcagctcgccatccctggagtggataccagtggaagactgagttgccaaaccaagctggttttaaaattgtatttgttatgtgatttaaaaataaaagtgcatatgtcaggtaaccatgactgtctactgccatacaatgcacctgacggatggcagcccctctcacctgtgctacctcacttgtgccctcttccagcccatgaagcctttgaaagccgctgccaccacctctcagccggtgctgacgagtcagcagatcgagaccatcttcttcaaagtgcctgagctctacgagatccacaaggagttctatgatgggctcttcccccgcgtgcagcagtggagccaccagcagcgggtgggcgacctcttccagaagctggccagccagctgggtgtgtaccgggccttcgtggacaactacggagttgccatggaaatggctgagaagtgctgtcaggccaatgctcagtttgcagaaatctccgagaacctgagagccagaagcaacaaagatgccaaggatccaacgaccaagaactctctggaaactctgctctacaagcctgtggaccgtgtgacgaggagcacgctggtcctccatgacttgctgaagcacactcctgccagccaccctgaccaccccttgctgcaggacgccctccgcatctcacagaacttcctgtccagcatcaatgaggagatcacaccccgacggcagtccatgacggtgaagaagggagagcaccggcagctgctgaaggacagcttcatggtggagctggtggagggggcccgcaagctgcgccacgtcttcctgttcaccgacctgcttctctgcaccaagctcaagaagcagagcggaggcaaaacgcagcagtatgactgcaaatggtacattccgctcacggatctcagcttccagatggtggatgaactggaggcagtgcccaacatccccctggtgcccgatgaggagctggacgctttgaagatcaagatctcccagatcaagagtgacatccagagagagaagagggcgaacaagggcagcaaggctacggagaggctgaagaagaagctgtcggagcaggagtcactgctgctgcttatgtctcccagcatggccttcagggtgcacagccgcaacggcaagagttacacgttcctgatctcctctgactatgagcgtgcagagtggagggagaacatccgggagcagcagaagaagtgtttcagaagcttctccctgacatccgtggagctgcagatgctgaccaactcgtgtgtgaaactccagactgtccacagcattccgctgaccatcaataaggaagatgatgagtctccggggctctatgggtttctgaatgtcatcgtccactcagccactggatttaagcagagttcaaatctgtactgcaccctggaggtggattcctttgggtattttgtgaataaagcaaagacgcgcgtctacagggacacagctgagccaaactggaacgaggaatttgagatagagctggagggctcccagaccctgaggatactgtgctatgaaaagtgttacaacaagacgaagatccccaaggaggacggcgagagcacggacagactcatggggaagggccaggtccagctggacccgcaggccctgcaggacagagactggcagcgcaccgtcatcgccatgaatgggatcgaagtaaagctctcggtcaagttcaacagcagggagttcagcttgaagaggatgccgtcccgaaaacagacaggggtcttcggagtcaagattgctgtggtcaccaagagagagaggtccaaggtgccctacatcgtgcgccagtgcgtggaggagatcgagcgccgaggcatggaggaggtgggcatctaccgcgtgtccggtgtggccacggacatccaggcactgaaggcagccttcgacgtcaataacaaggacgtgtcggtgatgatgagcgagatggacgtgaacgccatcgcaggcacgctgaagctgtacttccgtgagctgcccgagcccctcttcactgacgagttctaccccaacttcgcagagggcatcgctctttcagacccggttgcaaaggagagctgcatgctcaacctgctgctgtccctgccggaggccaacctgctcaccttccttttccttctggaccacctgaaaagggtggcagagaaggaggcagtcaataagatgtccctgcacaacctcgccacggtctttggccccacgctgctccggccctccgagaaggagagcaagctccctgccaaccccagccagcctatcaccatgactgacagctggtccttggaggtcatgtcccaggtccaggtgctgctgtacttcctgcagctggaggccatccctgccccggacagcaagagacagagcatcctgttctccaccgaagtctaaaggtcccagtccatctcctggaggcagacagatggcctggaaacctctggctaatcgggccatccgtagagcgggaaccttcctgaggtgtccttgggccacccccaagtgttgggccatctgccaagagacagcgacccaaagccgaaggacaggtggcctggaaagatcccgcccaggtctgggagccccaggctggcctcagactgtggttttttatgtggccacctgagggcgccccaagccagttcatctcagagtccaggcctgaccctgggagacagggtgaagggagtggtttttatgaacttaacttagagtctaaaagatttctactggatcacttgtcaagatgcgccctctctggggagaagggaacgtgactggattccctcactgttgtatcttgaataaacgctgctgcttcatcctg

SEQ ID NO: 318422 - DNA, 4164 bp, Homo sapiens
  misc_feature (273)..(273): n is a, c, g, or t
  misc_feature (4151)..(4151): n is a, c, g, or t
ttccaggactgcagaactggcccagacctctgtattggaaaggtctttatggaccagggagtccggtgtcttttttacggggacccctgggctgcgagttgcacagtccaattcgctgttgttagggcctcagtttcccaaaaggcacagggacggggggagggtggcggctcgatgggggagccgcctccagggggcccccccgccctgtgcccacggcgcggcccctttaaggaggcccgcctggctccgctccatcgcgcatcgcggccncctccccccggccctccccttcctgcggcgcagagtgcgggccgggcgggagtgcggcgagagccggctggctgagcttagcgtccgaggaggcggcggcggcggcggcggcagcggcggcggcggggctgtggggcggtgcggaagcgagaggcgaggagcgcgcgggccgtggccagagtctggcggcggcctggcggagcggagagcagcgcccgcgcctcgccgtgcggaggagccccgcacacaatagcggcgcgcgcagcccgcgcccttccccccggcgcgccccgccccgcgcgccgagcgccccgctccgcctcacctgccaccagggagtgggcgggcattgttcgccgccgccgccgccgcgcggggccatgggggccgcccggcgcccggggccgggcctggcgaggccgccgcgccgccgctgagacgggccccgcgcgcagcccggcggcgcaggtaaggccggccgcgccatggtggacccggtgggcttcgcggaggcgtggaaggcgcagttcccggactcagagcccccgcgcatggagctgcgctcagtgggcgacatcgagcaggagctggagcgctgcaaggcctccattcggcgcctggagcaggaggtgaaccaggagcgcttccgcatgatctacctgcagacgttgctggccaaggaaaagaagagctatgaccggcagcgatggggcttccggcgcgcggcgcaggcccccgacggcgcctccgagccccgagcgtccgcgtcgcgcccgcagccagcgcccgccgacggagccgacccgccgcccgccgaggagcccgaggcccggcccgacggcgagggttctccgggtaaggccaggcccgggaccgcccgcaggcccggggcagccgcgtcgggggaacgggacgaccggggaccccccgccagcgtggcggcgctcaggtccaacttcgagcggatccgcaagggccatggccagcccggggcggacgccgagaagcccttctacgtgaacgtcgagtttcaccacgagcgcggcctggtgaaggtcaacgacaaagaggtgtcggaccgcatcagctccctgggcagccaggccatgcagatggagcgcaaaaagtcccagcacggcgcgggctcgagcgtgggggatgcatccaggcccccttaccggggacgctcctcggagagcagctgcggcgtcgacggcgactacgaggacgccgagttgaacccccgcttcctgaaggacaacctgatcgacgccaatggcggtagcaggcccccttggccgcccctggagtaccagccctaccagagcatctacgtcgggggcatgatggaaggggagggcaagggcccgctcctgcgcagccagagcacctctgagcaggagaagcgccttacctggccccgcaggtcctactccccccggagttttgaggattgcggaggcggctataccccggactgcagctccaatgagaacctcacctccagcgaggaggacttctcctctggccagtccagccgcgtgtccccaagccccaccacctaccgcatgttccgggacaaaagccgctctccctcgcagaactcgcaacagtccttcgacagcagcagtccccccacgccgcagtgccataagcggcaccggcactgcccggttgtcgtgtccgaggccaccatcgtgggcgtccgcaagaccgggcagatctggcccaacgatggcgagggcgccttccatggagacgcagatggctcgttcggaacaccacctggatacggctgcgctgcagaccgggcagaggagcagcgccggcaccaagatgggctgccctacattgatgactcgccctcctcatcgccccacctcagcagcaagggcaggggcagccgggatgcgctggtctcgggagccctggagtccactaaagcgagtgagctggacttggaaaagggcttggagatgagaaaatgggtcctgtcgggaatcctggctagcgaggagacttacctgagccacctggaggcactgctgctgcccatgaagcctttgaaagccgctgccaccacctctcagccggtgctgacgagtcagcagatcgagaccatcttcttcaaagtgcctgagctctacgagatccacaaggagttctatgatgggctcttcccccgcgtgcagcagtggagccaccagcagcgggtgggcgacctcttccagaagctggccagccagctgggtgtgtaccgggccttcgtggacaactacggagttgccatggaaatggctgagaagtgctgtcaggccaatgctcagtttgcagaaatctccgagaacctgagagccagaagcaacaaagatgccaaggatccaacgaccaagaactctctggaaactctgctctacaagcctgtggaccgtgtgacgaggagcacgctggtcctccatgacttgctgaagcacactcctgccagccaccctgaccaccccttgctgcaggacgccctccgcatctcacagaacttcctgtccagcatcaatgaggagatcacaccccgacggcagtccatgacggtgaagaagggagagcaccggcagctgctgaaggacagcttcatggtggagctggtggagggggcccgcaagctgcgccacgtcttcctgttcaccgacctgcttctctgcaccaagctcaagaagcagagcggaggcaaaacgcagcagtatgactgcaaatggtacattccgctcacggatctcagcttccagatggtggatgaactggaggcagtgcccaacatccccctggtgcccgatgaggagctggacgctttgaagatcaagatctcccagatcaagagtgacatccagagagagaagagggcgaacaagggcagcaaggctacggagaggctgaagaagaagctgtcggagcaggagtcactgctgctgcttatgtctcccagcatggccttcagggtgcacagccgcaacggcaagagttacacgttcctgatctcctctgactatgagcgtgcagagtggagggagaacatccgggagcagcagaagaagtgtttcagaagcttctccctgacatccgtggagctgcagatgctgaccaactcgtgtgtgaaactccagactgtccacagcattccgctgaccatcaataaggaagatgatgagtctccggggctctatgggtttctgaatgtcatcgtccactcagccactggatttaagcagagttcaaaagcccttcagcggccagtagcatctgactttgagcctcagggtctgagtgaagccgctcgttggaactccaaggaaaaccttctcgctggacccagtgaaaatgaccccaaccttttcgttgcactgtatgattttgtggccagtggagataacactctaagcataactaaaggtgaaaagctccgggtcttaggctataatcacaatggggaatggtgtgaagcccaaaccaaaaatggccaaggctgggtcccaagcaactacatcacgccagtcaacagtctggagaaacactcctggtaccatgggcctgtgtcccgcaatgccgctgagtatctgctgagcagcgggatcaatggcagcttcttggtgcgtgagagtgagagcagtcctggccagaggtccatctcgctgagatacgaagggagggtgtaccattacaggatcaacactgcttctgatggcaagctctacgtctcctccgagagccgcttcaacaccctggccgagttggttcatcatcattcaacggtggccgacgggctcatcaccacgctccattatccagccccaaagcgcaacaagcccactgtctatggtgtgtccccnaactacgacaagt

SEQ ID NO: 318423 - DNA, 4089 bp, Homo sapiens
  misc_feature (273)..(273): n is a, c, g, or t
  misc_feature (4076)..(4076): n is a, c, g, or t
ttccaggactgcagaactggcccagacctctgtattggaaaggtctttatggaccagggagtccggtgtcttttttacggggacccctgggctgcgagttgcacagtccaattcgctgttgttagggcctcagtttcccaaaaggcacagggacggggggagggtggcggctcgatgggggagccgcctccagggggcccccccgccctgtgcccacggcgcggcccctttaaggaggcccgcctggctccgctccatcgcgcatcgcggccncctccccccggccctccccttcctgcggcgcagagtgcgggccgggcgggagtgcggcgagagccggctggctgagcttagcgtccgaggaggcggcggcggcggcggcggcagcggcggcggcggggctgtggggcggtgcggaagcgagaggcgaggagcgcgcgggccgtggccagagtctggcggcggcctggcggagcggagagcagcgcccgcgcctcgccgtgcggaggagccccgcacacaatagcggcgcgcgcagcccgcgcccttccccccggcgcgccccgccccgcgcgccgagcgccccgctccgcctcacctgccaccagggagtgggcgggcattgttcgccgccgccgccgccgcgcggggccatgggggccgcccggcgcccggggccgggcctggcgaggccgccgcgccgccgctgagacgggccccgcgcgcagcccggcggcgcaggtaaggccggccgcgccatggtggacccggtgggcttcgcggaggcgtggaaggcgcagttcccggactcagagcccccgcgcatggagctgcgctcagtgggcgacatcgagcaggagctggagcgctgcaaggcctccattcggcgcctggagcaggaggtgaaccaggagcgcttccgcatgatctacctgcagacgttgctggccaaggaaaagaagagctatgaccggcagcgatggggcttccggcgcgcggcgcaggcccccgacggcgcctccgagccccgagcgtccgcgtcgcgcccgcagccagcgcccgccgacggagccgacccgccgcccgccgaggagcccgaggcccggcccgacggcgagggttctccgggtaaggccaggcccgggaccgcccgcaggcccggggcagccgcgtcgggggaacgggacgaccggggaccccccgccagcgtggcggcgctcaggtccaacttcgagcggatccgcaagggccatggccagcccggggcggacgccgagaagcccttctacgtgaacgtcgagtttcaccacgagcgcggcctggtgaaggtcaacgacaaagaggtgtcggaccgcatcagctccctgggcagccaggccatgcagatggagcgcaaaaagtcccagcacggcgcgggctcgagcgtgggggatgcatccaggcccccttaccggggacgctcctcggagagcagctgcggcgtcgacggcgactacgaggacgccgagttgaacccccgcttcctgaaggacaacctgatcgacgccaatggcggtagcaggcccccttggccgcccctggagtaccagccctaccagagcatctacgtcgggggcatgatggaaggggagggcaagggcccgctcctgcgcagccagagcacctctgagcaggagaagcgccttacctggccccgcaggtcctactccccccggagttttgaggattgcggaggcggctataccccggactgcagctccaatgagaacctcacctccagcgaggaggacttctcctctggccagtccagccgcgtgtccccaagccccaccacctaccgcatgttccgggacaaaagccgctctccctcgcagaactcgcaacagtccttcgacagcagcagtccccccacgccgcagtgccataagcggcaccggcactgcccggttgtcgtgtccgaggccaccatcgtgggcgtccgcaagaccgggcagatctggcccaacgatggcgagggcgccttccatggagacgcagatggctcgttcggaacaccacctggatacggctgcgctgcagaccgggcagaggagcagcgccggcaccaagatgggctgccctacattgatgactcgccctcctcatcgccccacctcagcagcaagggcaggggcagccgggatgcgctggtctcgggagccctggagtccactaaagcgagtgagctggacttggaaaagggcttggagatgagaaaatgggtcctgtcgggaatcctggctagcgaggagacttacctgagccacctggaggcactgctgctgcccatgaagcctttgaaagccgctgccaccacctctcagccggtgctgacgagtcagcagatcgagaccatcttcttcaaagtgcctgagctctacgagatccacaaggagttctatgatgggctcttcccccgcgtgcagcagtggagccaccagcagcgggtgggcgacctcttccagaagctggccagccagctgggtgtgtaccgggccttcgtggacaactacggagttgccatggaaatggctgagaagtgctgtcaggccaatgctcagtttgcagaaatctccgagaacctgagagccagaagcaacaaagatgccaaggatccaacgaccaagaactctctggaaactctgctctacaagcctgtggaccgtgtgacgaggagcacgctggtcctccatgacttgctgaagcacactcctgccagccaccctgaccaccccttgctgcaggacgccctccgcatctcacagaacttcctgtccagcatcaatgaggagatcacaccccgacggcagtccatgacggtgaagaagggagagcaccggcagctgctgaaggacagcttcatggtggagctggtggagggggcccgcaagctgcgccacgtcttcctgttcaccgacctgcttctctgcaccaagctcaagaagcagagcggaggcaaaacgcagcagtatgactgcaaatggtacattccgctcacggatctcagcttccagatggtggatgaactggaggcagtgcccaacatccccctggtgcccgatgaggagctggacgctttgaagatcaagatctcccagatcaagagtgacatccagagagagaagagggcgaacaagggcagcaaggctacggagaggctgaagaagaagctgtcggagcaggagtcactgctgctgcttatgtctcccagcatggccttcagggtgcacagccgcaacggcaagagttacacgttcctgatctcctctgactatgagcgtgcagagtggagggagaacatccgggagcagcagaagaagtgtttcagaagcttctccctgacatccgtggagctgcagatgctgaccaactcgtgtgtgaaactccagactgtccacagcattccgctgaccatcaataaggaagaagcccttcagcggccagtagcatctgactttgagcctcagggtctgagtgaagccgctcgttggaactccaaggaaaaccttctcgctggacccagtgaaaatgaccccaaccttttcgttgcactgtatgattttgtggccagtggagataacactctaagcataactaaaggtgaaaagctccgggtcttaggctataatcacaatggggaatggtgtgaagcccaaaccaaaaatggccaaggctgggtcccaagcaactacatcacgccagtcaacagtctggagaaacactcctggtaccatgggcctgtgtcccgcaatgccgctgagtatctgctgagcagcgggatcaatggcagcttcttggtgcgtgagagtgagagcagtcctggccagaggtccatctcgctgagatacgaagggagggtgtaccattacaggatcaacactgcttctgatggcaagctctacgtctcctccgagagccgcttcaacaccctggccgagttggttcatcatcattcaacggtggccgacgggctcatcaccacgctccattatccagccccaaagcgcaacaagcccactgtctatggtgtgtccccnaactacgacaagt

SEQ ID NO: 318424 - DNA, 4657 bp, Homo sapiens
  misc_feature (273)..(273): n is a, c, g, or t
ttccaggactgcagaactggcccagacctctgtattggaaaggtctttatggaccagggagtccggtgtcttttttacggggacccctgggctgcgagttgcacagtccaattcgctgttgttagggcctcagtttcccaaaaggcacagggacggggggagggtggcggctcgatgggggagccgcctccagggggcccccccgccctgtgcccacggcgcggcccctttaaggaggcccgcctggctccgctccatcgcgcatcgcggccncctccccccggccctccccttcctgcggcgcagagtgcgggccgggcgggagtgcggcgagagccggctggctgagcttagcgtccgaggaggcggcggcggcggcggcggcagcggcggcggcggggctgtggggcggtgcggaagcgagaggcgaggagcgcgcgggccgtggccagagtctggcggcggcctggcggagcggagagcagcgcccgcgcctcgccgtgcggaggagccccgcacacaatagcggcgcgcgcagcccgcgcccttccccccggcgcgccccgccccgcgcgccgagcgccccgctccgcctcacctgccaccagggagtgggcgggcattgttcgccgccgccgccgccgcgcggggccatgggggccgcccggcgcccggggccgggcctggcgaggccgccgcgccgccgctgagacgggccccgcgcgcagcccggcggcgcaggtaaggccggccgcgccatggtggacccggtgggcttcgcggaggcgtggaaggcgcagttcccggactcagagcccccgcgcatggagctgcgctcagtgggcgacatcgagcaggagctggagcgctgcaaggcctccattcggcgcctggagcaggaggtgaaccaggagcgcttccgcatgatctacctgcagacgttgctggccaaggaaaagaagagctatgaccggcagcgatggggcttccggcgcgcggcgcaggcccccgacggcgcctccgagccccgagcgtccgcgtcgcgcccgcagccagcgcccgccgacggagccgacccgccgcccgccgaggagcccgaggcccggcccgacggcgagggttctccgggtaaggccaggcccgggaccgcccgcaggcccggggcagccgcgtcgggggaacgggacgaccggggaccccccgccagcgtggcggcgctcaggtccaacttcgagcggatccgcaagggccatggccagcccggggcggacgccgagaagcccttctacgtgaacgtcgagtttcaccacgagcgcggcctggtgaaggtcaacgacaaagaggtgtcggaccgcatcagctccctgggcagccaggccatgcagatggagcgcaaaaagtcccagcacggcgcgggctcgagcgtgggggatgcatccaggcccccttaccggggacgctcctcggagagcagctgcggcgtcgacggcgactacgaggacgccgagttgaacccccgcttcctgaaggacaacctgatcgacgccaatggcggtagcaggcccccttggccgcccctggagtaccagccctaccagagcatctacgtcgggggcatgatggaaggggagggcaagggcccgctcctgcgcagccagagcacctctgagcaggagaagcgccttacctggccccgcaggtcctactccccccggagttttgaggattgcggaggcggctataccccggactgcagctccaatgagaacctcacctccagcgaggaggacttctcctctggccagtccagccgcgtgtccccaagccccaccacctaccgcatgttccgggacaaaagccgctctccctcgcagaactcgcaacagtccttcgacagcagcagtccccccacgccgcagtgccataagcggcaccggcactgcccggttgtcgtgtccgaggccaccatcgtgggcgtccgcaagaccgggcagatctggcccaacgatggcgagggcgccttccatggagacgcagatggctcgttcggaacaccacctggatacggctgcgctgcagaccgggcagaggagcagcgccggcaccaagatgggctgccctacattgatgactcgccctcctcatcgccccacctcagcagcaagggcaggggcagccgggatgcgctggtctcgggagccctggagtccactaaagcgagtgagctggacttggaaaagggcttggagatgagaaaatgggtcctgtcgggaatcctggctagcgaggagacttacctgagccacctggaggcactgctgctgcccatgaagcctttgaaagccgctgccaccacctctcagccggtgctgacgagtcagcagatcgagaccatcttcttcaaagtgcctgagctctacgagatccacaaggagttctatgatgggctcttcccccgcgtgcagcagtggagccaccagcagcgggtgggcgacctcttccagaagctggccagccagctgggtgtgtaccgggccttcgtggacaactacggagttgccatggaaatggctgagaagtgctgtcaggccaatgctcagtttgcagaaatctccgagaacctgagagccagaagcaacaaagatgccaaggatccaacgaccaagaactctctggaaactctgctctacaagcctgtggaccgtgtgacgaggagcacgctggtcctccatgacttgctgaagcacactcctgccagccaccctgaccaccccttgctgcaggacgccctccgcatctcacagaacttcctgtccagcatcaatgaggagatcacaccccgacggcagtccatgacggtgaagaagggagagcaccggcagctgctgaaggacagcttcatggtggagctggtggagggggcccgcaagctgcgccacgtcttcctgttcaccgacctgcttctctgcaccaagctcaagaagcagagcggaggcaaaacgcagcagtatgactgcaaatggtacattccgctcacggatctcagcttccagatggtggatgaactggaggcagtgcccaacatccccctggtgcccgatgaggagctggacgctttgaagatcaagatctcccagatcaagagtgacatccagagagagaagagggcgaacaagggcagcaaggctacggagaggctgaagaagaagctgtcggagcaggagtcactgctgctgcttatgtctcccagcatggccttcagggtgcacagccgcaacggcaagagttacacgttcctgatctcctctgactatgagcgtgcagagtggagggagaacatccgggagcagcagaagaagtgtttcagaagcttctccctgacatccgtggagctgcagatgctgaccaactcgtgtgtgaaactccagactgtccacagcattccgctgaccatcaataaggaagatgatgagtctccggggctctatgggtttctgaatgtcatcgtccactcagccactggatttaagcagagttcaagcagaggagagaagggagagcaaactgagagccaagtttccagacggtcctgcaggaggagaggatgcagctgcccagagggaagcaggatcacatttaaggaagtgtgtggggtccctggatgacaccagcacccagtgcggctctgtctggcacccgctcccaaggtgggaggagtgggtgtcccctgtgtgtcagtgggcagctcctgctgaacccgcagctcactagggagcctgacagtggggccatgcgcctgacactcctctctgcttgtggacctggcaaggcagggagcagaaaacagagccacttgaaggctttctgtctgcgtctgtgtgcagtgtggatttagttgtgcttttttcttgctgggagagcacagccaccatttacaagcagtgtcaccgtcgtgggtggcgaggacagaacaggagcctctgctctctgtacctatctgggcccggtgggctcccttgtcctggcttccatctctgtctcagcgaccattcagccctgcgcaggaacacgtgttgcttagaaaagccaaatccagccttgtctctgcctcctctggtctcatgatgtgcatctgttaccttgaaactggaaaccagtctatcaatgtctgtgccaattttttattccctccccaacctccttccccataggactttttatttatgtaggatgtgtgctgtctaatgatgggatgaccacacttttccatgttctaaaagtgctcctctcccgcagggtcccagggctggtggttgctttgggtctacagctacgtcttacccgcctcctgcctcaacagcctgtgtggtggcaaagccggtgtggggctggggaacgcagcgttctccaggagggggacccggctctccttctgcagtgcaggcgaaggcctagatgccagtgtgacctcccacaaggcgtggcttccagactccccggccggaagtgatgcttttttgccttgggccctgggtttgaagcagcctggctttctcttggtaagtggctggtgtcttagcagctgcaatctgagctcagccacctacacaccaccgtggccgacactttcattaaaaagtttcctgagacgacttgc

SEQ ID NO: 318425 - DNA, 1530 bp, Homo sapiens
agagccagtgcctggaggccaacaccctggtcttcagtcactgggagtcacagagaggggcccgataaagagccctcctggcagcatcagtaccagatgctgcttctcagggtggggtccctgaggcctggagtgtggcctctgacgaccttcagggccaggtgcggaatgagagcctgtggccgcatggcccccggtgggagacgtcctgccgccctttgcttctctgtaccactctggctgcacagttcagagccttgggaaacgttaaccagtaggacctagaaggggagctggacccgcaggccctgcaggacagagactggcagcgcaccgtcatcgccatgaatgggatcgaagtaaagctctcggtcaagttcaacagcagggagttcagcttgaagaggatgccgtcccgaaaacagacaggggtcttcggagtcaagattgctgtggtcaccaagagagagaggtccaaggtgccctacatcgtgcgccagtgcgtggaggagatcgagcgccgaggcatggaggaggtgggcatctaccgcgtgtccggtgtggccacggacatccaggcactgaaggcagccttcgacgtcaataacaaggacgtgtcggtgatgatgagcgagatggacgtgaacgccatcgcaggcacgctgaagctgtacttccgtgagctgcccgagcccctcttcactgacgagttctaccccaacttcgcagagggcatcgctctttcagacccggttgcaaaggagagctgcatgctcaacctgctgctgtccctgccggaggccaacctgctcaccttccttttccttctggaccacctgaaaagggtggcagagaaggaggcagtcaataagatgtccctgcacaacctcgccacggtctttggccccacgctgctccggccctccgagaaggagagcaagctccctgccaaccccagccagcctatcaccatgactgacagctggtccttggaggtcatgtcccaggtccaggtgctgctgtacttcctgcagctggaggccatccctgccccggacagcaagagacagagcatcctgttctccaccgaagtctaaaggtcccagtccatctcctggaggcagacagatggcctggaaacctctggctaatcgggccatccgtagagcgggaaccttcctgaggtgtccttgggccacccccaagtgttgggccatctgccaagagacagcgacccaaagccgaaggacaggtggcctggaaagatcccgcccaggtctgggagccccaggctggcctcagactgtggttttttatgtggccacctgagggcgccccaagccagttcatctcagagtccaggcctgaccctgggagacagggtgaagggagtggtttttatgaacttaacttagagtctaaaagatttctactggatcacttgtcaagatgcgccctctctggggagaagggaacgtgactggattccctcactgttgtatcttgaataaacgctgctgcttcatcctg

SEQ ID NO: 318426 - DNA, 1428 bp, Homo sapiens
ggccgtggaggctggaagctctcgtttagccccaccagcttcccagagcagcaaggccaagcatgcaagagtcaccatccaccctggccatgatgcagggcctcctttgctggacccgcaggccctgcaggacagagactggcagcgcaccgtcatcgccatgaatgggatcgaagtaaagctctcggtcaagttcaacagcagggagttcagcttgaagaggatgccgtcccgaaaacagacaggggtcttcggagtcaagattgctgtggtcaccaagagagagaggtccaaggtgccctacatcgtgcgccagtgcgtggaggagatcgagcgccgaggcatggaggaggtgggcatctaccgcgtgtccggtgtggccacggacatccaggcactgaaggcagccttcgacgtcagtgagtgttggcctgcgcaggacgggatggaggtgtgggcaatggtgtccgcgatgagatctcagagtgctccatggcccagataacaaggacgtgtcggtgatgatgagcgagatggacgtgaacgccatcgcaggcacgctgaagctgtacttccgtgagctgcccgagcccctcttcactgacgagttctaccccaacttcgcagagggcatcgctctttcagacccggttgcaaaggagagctgcatgctcaacctgctgctgtccctgccggaggccaacctgctcaccttccttttccttctggaccacctgaaaagggtggcagagaaggaggcagtcaataagatgtccctgcacaacctcgccacggtctttggccccacgctgctccggccctccgagaaggagagcaagctccctgccaaccccagccagcctatcaccatgactgacagctggtccttggaggtcatgtcccaggtccaggtgctgctgtacttcctgcagctggaggccatccctgccccggacagcaagagacagagcatcctgttctccaccgaagtctaaaggtcccagtccatctcctggaggcagacagatggcctggaaacctctggctaatcgggccatccgtagagcgggaaccttcctgaggtgtccttgggccacccccaagtgttgggccatctgccaagagacagcgacccaaagccgaaggacaggtggcctggaaagatcccgcccaggtctgggagccccaggctggcctcagactgtggttttttatgtggccacctgagggcgccccaagccagttcatctcagagtccaggcctgaccctgggagacagggtgaagggagtggtttttatgaacttaacttagagtctaaaagatttctactggatcacttgtcaagatgcgccctctctggggagaagggaacgtgactggattccctcactgttgtatcttgaataaacgctgctgcttcatcctg

SEQ ID NO: 318427 - DNA, 3552 bp, Homo sapiens
  misc_feature (273)..(273): n is a, c, g, or t
  misc_feature (3539)..(3539): n is a, c, g, or t
ttccaggactgcagaactggcccagacctctgtattggaaaggtctttatggaccagggagtccggtgtcttttttacggggacccctgggctgcgagttgcacagtccaattcgctgttgttagggcctcagtttcccaaaaggcacagggacggggggagggtggcggctcgatgggggagccgcctccagggggcccccccgccctgtgcccacggcgcggcccctttaaggaggcccgcctggctccgctccatcgcgcatcgcggccncctccccccggccctccccttcctgcggcgcagagtgcgggccgggcgggagtgcggcgagagccggctggctgagcttagcgtccgaggaggcggcggcggcggcggcggcagcggcggcggcggggctgtggggcggtgcggaagcgagaggcgaggagcgcgcgggccgtggccagagtctggcggcggcctggcggagcggagagcagcgcccgcgcctcgccgtgcggaggagccccgcacacaatagcggcgcgcgcagcccgcgcccttccccccggcgcgccccgccccgcgcgccgagcgccccgctccgcctcacctgccaccagggagtgggcgggcattgttcgccgccgccgccgccgcgcggggccatgggggccgcccggcgcccggggccgggcctggcgaggccgccgcgccgccgctgagacgggccccgcgcgcagcccggcggcgcaggtaaggccggccgcgccatggtggacccggtgggcttcgcggaggcgtggaaggcgcagttcccggactcagagcccccgcgcatggagctgcgctcagtgggcgacatcgagcaggagctggagcgctgcaaggcctccattcggcgcctggagcaggaggtgaaccaggagcgcttccgcatgatctacctgcagacgttgctggccaaggaaaagaagagctatgaccggcagcgatggggcttccggcgcgcggcgcaggcccccgacggcgcctccgagccccgagcgtccgcgtcgcgcccgcagccagcgcccgccgacggagccgacccgccgcccgccgaggagcccgaggcccggcccgacggcgagggttctccgggtaaggccaggcccgggaccgcccgcaggcccggggcagccgcgtcgggggaacgggacgaccggggaccccccgccagcgtggcggcgctcaggtccaacttcgagcggatccgcaagggccatggccagcccggggcggacgccgagaagcccttctacgtgaacgtcgagtttcaccacgagcgcggcctggtgaaggtcaacgacaaagaggtgtcggaccgcatcagctccctgggcagccaggccatgcagatggagcgcaaaaagtcccagcacggcgcgggctcgagcgtgggggatgcatccaggcccccttaccggggacgctcctcggagagcagctgcggcgtcgacggcgactacgaggacgccgagttgaacccccgcttcctgaaggacaacctgatcgacgccaatggcggtagcaggcccccttggccgcccctggagtaccagccctaccagagcatctacgtcgggggcatgatggaaggggagggcaagggcccgctcctgcgcagccagagcacctctgagcaggagaagcgccttacctggccccgcaggtcctactccccccggagttttgaggattgcggaggcggctataccccggactgcagctccaatgagaacctcacctccagcgaggaggacttctcctctggccagtccagccgcgtgtccccaagccccaccacctaccgcatgttccgggacaaaagccgctctccctcgcagaactcgcaacagtccttcgacagcagcagtccccccacgccgcagtgccataagcggcaccggcactgcccggttgtcgtgtccgaggccaccatcgtgggcgtccgcaagaccgggcagatctggcccaacgatggcgagggcgccttccatggagacgcagatggctcgttcggaacaccacctggatacggctgcgctgcagaccgggcagaggagcagcgccggcaccaagatgggctgccctacattgatgactcgccctcctcatcgccccacctcagcagcaagggcaggggcagccgggatgcgctggtctcgggagccctggagtccactaaagcgagtgagctggacttggaaaagggcttggagatgagaaaatgggtcctgtcgggaatcctggctagcgaggagacttacctgagccacctggaggcactgctgctgcccatgaagcctttgaaagccgctgccaccacctctcagccggtgctgacgagtcagcagatcgagaccatcttcttcaaagtgcctgagctctacgagatccacaaggagttctatgatgggctcttcccccgcgtgcagcagtggagccaccagcagcgggtgggcgacctcttccagaagctggccagccagctgggtgtgtaccgggccttcgtggacaactacggagttgccatggaaatggctgagaagtgctgtcaggccaatgctcagtttgcagaaatctccgagaacctgagagccagaagcaacaaagatgccaaggatccaacgaccaagaactctctggaaactctgctctacaagcctgtggaccgtgtgacgaggagcacgctggtcctccatgacttgctgaagcacactcctgccagccaccctgaccaccccttgctgcaggacgccctccgcatctcacagaacttcctgtccagcatcaatgaggagatcacaccccgacggcagtccatgacggtgaagaagggagagggagaagacaggatgaaagcttcatcaacgaggaagagattactccttatggaagaagcccttcagcggccagtagcatctgactttgagcctcagggtctgagtgaagccgctcgttggaactccaaggaaaaccttctcgctggacccagtgaaaatgaccccaaccttttcgttgcactgtatgattttgtggccagtggagataacactctaagcataactaaaggtgaaaagctccgggtcttaggctataatcacaatggggaatggtgtgaagcccaaaccaaaaatggccaaggctgggtcccaagcaactacatcacgccagtcaacagtctggagaaacactcctggtaccatgggcctgtgtcccgcaatgccgctgagtatctgctgagcagcgggatcaatggcagcttcttggtgcgtgagagtgagagcagtcctggccagaggtccatctcgctgagatacgaagggagggtgtaccattacaggatcaacactgcttctgatggcaagctctacgtctcctccgagagccgcttcaacaccctggccgagttggttcatcatcattcaacggtggccgacgggctcatcaccacgctccattatccagccccaaagcgcaacaagcccactgtctatggtgtgtccccnaactacgacaagt

SEQ ID NO: 318428 - DNA, 2329 bp, Homo sapiens
  misc_feature (273)..(273): n is a, c, g, or t
ttccaggactgcagaactggcccagacctctgtattggaaaggtctttatggaccagggagtccggtgtcttttttacggggacccctgggctgcgagttgcacagtccaattcgctgttgttagggcctcagtttcccaaaaggcacagggacggggggagggtggcggctcgatgggggagccgcctccagggggcccccccgccctgtgcccacggcgcggcccctttaaggaggcccgcctggctccgctccatcgcgcatcgcggccncctccccccggccctccccttcctgcggcgcagagtgcgggccgggcgggagtgcggcgagagccggctggctgagcttagcgtccgaggaggcggcggcggcggcggcggcagcggcggcggcggggctgtggggcggtgcggaagcgagaggcgaggagcgcgcgggccgtggccagagtctggcggcggcctggcggagcggagagcagcgcccgcgcctcgccgtgcggaggagccccgcacacaatagcggcgcgcgcagcccgcgcccttccccccggcgcgccccgccccgcgcgccgagcgccccgctccgcctcacctgccaccagggagtgggcgggcattgttcgccgccgccgccgccgcgcggggccatgggggccgcccggcgcccggggccgggcctggcgaggccgccgcgccgccgctgagacgggccccgcgcgcagcccggcggcgcaggtaaggccggccgcgccatggtggacccggtgggcttcgcggaggcgtggaaggcgcagttcccggactcagagcccccgcgcatggagctgcgctcagtgggcgacatcgagcaggagctggagcgctgcaaggcctccattcggcgcctggagcaggaggtgaaccaggagcgcttccgcatgatctacctgcagacgttgctggccaaggaaaagaagagctatgaccggcagcgatggggcttccggcgcgcggcgcaggcccccgacggcgcctccgagccccgagcgtccgcgtcgcgcccgcagccagcgcccgccgacggagccgacccgccgcccgccgaggagcccgaggcccggcccgacggcgagggttctccgggtaaggccaggcccgggaccgcccgcaggcccggggcagccgcgtcgggggaacgggacgaccggggaccccccgccagcgtggcggcgctcaggtccaacttcgagcggatccgcaagggccatggccagcccggggcggacgccgagaagcccttctacgtgaacgtcgagtttcaccacgagcgcggcctggtgaaggtcaacgacaaagaggtgtcggaccgcatcagctccctgggcagccaggccatgcagatggagcgcaaaaagtcccagcacggcgcgggctcgagcgtgggggatgcatccaggcccccttaccggggacgctcctcggagagcagctgcggcgtcgacggcgactacgaggacgccgagttgaacccccgcttcctgaaggacaacctgatcgacgccaatggcggtagcaggcccccttggccgcccctggagtaccagccctaccagagcatctacgtcgggggcatgatggaaggggagggcaagggcccgctcctgcgcagccagagcacctctgagcaggagaagcgccttacctggccccgcaggtcctactccccccggagttttgaggattgcggaggcggctataccccggactgcagctccaatgagaacctcacctccagcgaggaggacttctcctctggccagtccagccgcgtgtccccaagccccaccacctaccgcatgttccgggacaaaagccgctctccctcgcagaactcgcaacagtccttcgacagcagcagtccccccacgccgcagtgccataagcggcaccggcactgcccggttgtcgtgtccgaggccaccatcgtgggcgtccgcaagaccgggcagatctggcccaacgatggcgagggcgccttccatggagacgcagatggctcgttcggaacaccacctggatacggctgcgctgcagaccgggcagaggagcagcgccggcaccaagatgggctgccctacattgatgactcgccctcctcatcgccccacctcagcagcaagggcaggggcagccgggatgcgctggtctcgggagccctggagtccactaaagcgagtgagctggacttggaaaagggcttggagatgagaaaatgggtcctgtcgggaatcctggctagcgaggagacttacctgagcccctaggggtcctctagatcacccac

SEQ ID NO: 318429 - DNA, 368 bp, Homo sapiens
ggattgcggaggcggctataccccggactgcagctccaatgagaacctcacctccagcgaggaggacttctcctctggccagtccagccgcgtgtccccaagccccaccacctaccgcatgttccgggacaaaagccgctctccctcgcagaactcgcaacagtccttcgacagcagcagtccccccacgccgcagtgccataagcggcaccggcactgcccggttgtcgtgtccgaggccaccatcgtgggcgtccgcaagaccgggcagatctggcccaacgatggcgagggcgccttccatggagacgcaggtgagttcctcacgccacgtgcgtgggcacacctgcacgggggaggaaaaccat

SEQ ID NO: 318430 - DNA, 4518 bp, Homo sapiens
cccggaggcagcggctgcgccctgcgccggggcggagccgggggcgggccggcggccggcaggcgggggctggggcccgaggccgggagtgcctgagcgccggcggcgacgacggcagcggcggcccagcgggctcggtggttgggtccgcggcggctcggggtccgcccgcgggctgcggtgcgagcgggcggcccggctcccctcctcccccgcccgccgccgccgctgtgattgggtggaagatggcgctggccggatggaaatcctaatgacagtctccaaattcgcctccatctgtaccatgggcgccaatgcttcggcattagagaaagagattggtccagaacagtttccggtcaatgagcactattttggattagtcaattttgggaatacctgctactgcaattcagttcttcaagcactttatttttgtcgtccatttcgggaaaaagttcttgcgtataagagtcaacctaggaaaaaggagagccttcttacatgcttagcagatctcttccatagcatagccactcagaagaaaaaggttggagtaataccccctaagaagttcatcacaagattacggaaagaaaatgagctttttgacaactacatgcaacaagatgcccatgaattcttaaattacctactaaatacaattgctgatattttacaagaagagagaaagcaggaaaaacaaaatggtcgtttacctaatggtaatattgataatgaaaataataacagcacaccagacccaacgtgggttcatgagatttttcagggaacattaactaatgaaaccagatgtcttacttgtgaaactataagcagcaaagatgaagattttttagacctttctgttgacgtggaacaaaatacatcaattactcactgcttaaggggtttcagcaacacagaaactctgtgcagtgaatacaagtattactgtgaagagtgtcgcagcaaacaggaagcacacaaacggatgaaagttaaaaaactgcccatgattctagctctacacctgaagagatttaaatatatggatcaacttcatcgatatacaaaactctcttaccgggtagtttttcctttagaacttcgtctgtttaacacttcaggtgatgccaccaatccagacagaatgtacgaccttgttgctgttgtggttcactgtggaagtggtcccaatcgaggccattatattgcaatagttaagagtcatgatttttggttgttgtttgatgacgacattgtagaaaaaatagatgcacaagctattgaagaattctacgggttgacatcagatatctcaaagaactctgagtctggttacatccttttctatcagtctcgggactgagagggaaccgtgatgaagagacactttctgcctcatttcttctctggttattttggaaaggatcaagcactgatttttcaagaaaagagaaatgcaggaagctcagggggcagtagcacactttgcacacgataaagcaaagacgatggattgacaagcccttccgatcatggtagttgatttatttgctcaggtatcatgctgtctgtacagttccatacaacaaggaggtgaaatcagagataccagctcctcttttaaaacagccttccagtcattggcacgcattttctctttattaattgcaccaataatgctttgaattccttgggggtgcagtagaaagaatcggaatctgtgccgtattgataaggagatgatgttgaacacactgcataaatttgcctggttcagtatgtatagaagcatattcagtggtcttttcaagagtaaaccagaaatacttttgggcccaacacttgcagttgccttcctgatgtaaaaactaacatgctagataatccagtgtcgggaagacaaagatgttttgcttctctgaagaagcttataataatatacagtatatgtatatgtagggagcaattggtcaaaagtggctttttgtttccccaaggggaaagactggctttgtaattataattttttccttatttattttacttaaaactggtagagtctaagtattatatgaagtgcccatgattctgtcagtaaatttgaacatatttttattagttaatgtcagtttaagttgtccttttgtttgtttctatttttaaggtgaattttaatttctatctgaaatcagttaagataccttgagaaaaactgcagtgagaggagataaatatcctttttcaggaggaactgatatctctggctaaatatttgtccttttattatggtttctaaatcagttattttcttcagctttaatttcataaaattaaaaaactattttaaaaattcctgtagttgttggaataattaaaaattctggtgcagtggtggtataccaatctttagaattcttaagtattctaatgtttcaagttgagatcatgcttgggaaaatcatgtcatagcatttatgttattttcagatgccattttttaccctggaaagaagtcataatgttcatcataaccctagcagcctggatagtgagctaaacaaacccttcaaagattaaattttaatcaagtagaccgggaatacaaaagacaagtccttccttcccttccccccacctttacaaatcttactggaagggtgttcagaaattaaaatctgtgtttgctaagacttcattctgttgggggttttaagaagtaatatatgtaacataaaatatatgtaaacgattgcagtttttttggacgtttttccatgcatcagtaagttgtctgacagtagccaaatgtaacttgcagaaaattattgaaaattatattcagaataatagcaatcaggccttggatgttctttattaaactcttttcaggcagtaaatttaaaaaaaattgtcattttctaaagtccttttgctaaaactgttgactatggaaaacaacaaaaaggaattttttagtctgctgctattattaacatttattatctgtatcttttggctcaggaaatgacttcacctattttttccataagcagacctttaacagagtcacttaattgggctgcttaaacggatgttctgggagaaaattataatatttagtatttgtacaaaatatcaaaaagtattttgacaagtttctttttaagatagttcctaaagccttaccctggctagaggtgttttgtacaaattatatataagccagcctgatctaccaacatgccacagagaatcacaatcaacagtgtggggaaagtcagggcagtggaagtggatgcactctttttattttgaaggcttaaaccaaattgtcttggaattaaagctgtatttctgcagctttcggtacagagaaaaagaggaaagtgaagctgtgtcagttttaacattagctatatcaacatgtttaagaaagatagatgaagtcatttgcataaaggtacagcattgaaatactatgttgtgtttgtttttacatttttgcattaaaaaaaaacatgccgtaaaagccaagttaaatttcatattaaagcaagttctagtgtatgtgttgagttcctggtaatcacatacttgttcacatctacaccgtacttcatagtatgatttgtcaggggagggattgtggggtgacagttttacatttactttttcttcttaatgcagctggatctaagtaaaatgttttgaagtttatcagaaactaaatgtacttttaaaacgtatagggtcagggttgggggaaaaatacaggtatagtaagtaagaaaagtgacccatgaagaaagcatcgtgaggttgtatgttggttgactgtgattaaaatgcggggctggtgtaagttgtaagtggtggctgattgccgtgtaactatgtacatgattgttgggatggctgtcccatattttgtatattggaataaaaatttctataaattattgtaactaaaagtaaatattctaaattaagtcccacttcttaagtcacatggcttctgtcttggaaattttacctttaaaagattatttaagacaggaaccaggaggcttgggaacagggaaagagggaaatgttgtattatgtgggtcttggggcctctaaccatcagtatagggttttttctttccttgatggcagtagaaagacctcattttcataacataactactcttgatactttctttaaaaacactttttattaaagattctatcatgaggtatttggctgggagctgggaggctaaagcgctcatgtcctggctcttcagtgaatttaactgtgtgaccttgggcaagtcacttaacctctctgtgcttcagtctccctgtcttgtaaaatgggagtaatacctacctcacagggttgttgtggggattaattagagataatgtctgtaaagcatttaaggttcttgaagaaggcactatataaatacaaaataatatctattaaagttggtttatttgtgcctgtgggtttcaagtgtg

SEQ ID NO: 318431 - DNA, 1069 bp, Homo sapiens
  misc_feature (1)..(3): n is a, c, g, or t
  misc_feature (48)..(48): n is a, c, g, or t
  misc_feature (55)..(55): n is a, c, g, or t
nnnggaatgactatggcactgtggcacaataatcttgcacggatctgnggaatancatttcaaggttcagtggaggagaaccccaagagcaccaaaatggaaagatgatttgtaaagctgaggaaaatgtccagctgtgtttttatgaggactctcactgcactgatatgacagatgacaccttccctcaacactgttcatcattgactgctgagggctccttcttcagtttataacaggatggtaacttcataagcaatgtaggactttcacagggttccacacgaagcgtgtctggataattcagccaagctcttcagtctccagcagtgatggaatcaggagctcgcttggccagccctctaatgactcagtcacagggtcatccacttgggggtgtgaggagaggaggcttctccccgcaagtgctttcggggtgatgccgtagattctttgtacctcaggagttacttttgcaattagaggttctctctctctcttggtattttatgcatctaattctgcttttctatgcatgagtcttgtcggattcaggcacagcaataagtctccaaaatagggtcagagtgagtttaatgaagaagttattgttttcttaaggatgaaaataaacagagagaatgccttattacataatcaataacgtcggcctcttgattaaaacacaaatgcaatttagcccgaaattattctctagtttgatgttctacaaaattagattacgataataaatgattggacctcttaagcacaggcaggtgtccacacgctgatagcctctggaggagcaggcttcccaatccggatttcctacggatgaaagtttaggaagatgtagtactgatcccaacatctcactcatagtttctgcaattattaaaggctaaaagacaacacacataatggaaaagcttagacttttggaatcggaggctggatttagatactagtttctctgcttaatcagctgtgcaaattttgtttcaagttacttaatctttctgagcctgttttcttaaaataaaacattttgaaatggggtaacaat

SEQ ID NO: 318432 - DNA, 1094 bp, Homo sapiens
  misc_feature (80)..(80): n is a, c, g, or t
tggttaataaaatattaggtggtttgggttcttccgatcttctactcttcacttacacctctcttgtccataaggaatancatttcaaggttcagtggaggagaaccccaagagcaccaaaatggaaagatgatttgtaaagctgaggaaaatgtccagctgtgtttttatgaggactctcactgcactgatatgacagatgacaccttccctcaacactgttcatcattgactgctgagggctccttcttcagtttataacaggatggtaacttcataagcaatgtaggactttcacagggttccacacgaagcgtgtctggataattcagccaagctcttcagtctccagcagtgatggaatcaggagctcgcttggccagccctctaatgactcagtcacagggtcatccacttgggggtgtgaggagaggaggcttctccccgcaagtgctttcggggtgatgccgtagattctttgtacctcaggagttacttttgcaattagaggttctctctctctcttggtattttatgcatctaattctgcttttctatgcatgagtcttgtcggattcaggcacagcaataagtctccaaaatagggtcagagtgagtttaatgaagaagttattgttttcttaaggatgaaaataaacagagagaatgccttattacataatcaataacgtcggcctcttgattaaaacacaaatgcaatttagcccgaaattattctctagtttgatgttctacaaaattagattacgataataaatgattggacctcttaagcacaggcaggtgtccacacgctgatagcctctggaggagcaggcttcccaatccggatttcctacggatgaaagtttaggaagatgtagtactgatcccaacatctcactcatagtttctgcaattattaaaggctaaaagacaacacacataatggaaaagcttagacttttggaatcggaggctggatttagatactagtttctctgcttaatcagctgtgcaaattttgtttcaagttacttaatctttctgagcctgttttcttaaaataaaacattttgaaatggggtaacaat

SEQ ID NO: 318433 - DNA, 1071 bp, Homo sapiens
  misc_feature (57)..(57): n is a, c, g, or t
ggccgccgccactcccctttcgatacatattatagtagaaagcctcttcgggaatancatttcaaggttcagtggaggagaaccccaagagcaccaaaatggaaagatgatttgtaaagctgaggaaaatgtccagctgtgtttttatgaggactctcactgcactgatatgacagatgacaccttccctcaacactgttcatcattgactgctgagggctccttcttcagtttataacaggatggtaacttcataagcaatgtaggactttcacagggttccacacgaagcgtgtctggataattcagccaagctcttcagtctccagcagtgatggaatcaggagctcgcttggccagccctctaatgactcagtcacagggtcatccacttgggggtgtgaggagaggaggcttctccccgcaagtgctttcggggtgatgccgtagattctttgtacctcaggagttacttttgcaattagaggttctctctctctcttggtattttatgcatctaattctgcttttctatgcatgagtcttgtcggattcaggcacagcaataagtctccaaaatagggtcagagtgagtttaatgaagaagttattgttttcttaaggatgaaaataaacagagagaatgccttattacataatcaataacgtcggcctcttgattaaaacacaaatgcaatttagcccgaaattattctctagtttgatgttctacaaaattagattacgataataaatgattggacctcttaagcacaggcaggtgtccacacgctgatagcctctggaggagcaggcttcccaatccggatttcctacggatgaaagtttaggaagatgtagtactgatcccaacatctcactcatagtttctgcaattattaaaggctaaaagacaacacacataatggaaaagcttagacttttggaatcggaggctggatttagatactagtttctctgcttaatcagctgtgcaaattttgtttcaagttacttaatctttctgagcctgttttcttaaaataaaacattttgaaatggggtaacaat

SEQ ID NO: 318434 - DNA, 1078 bp, Homo sapiens
  misc_feature (1)..(3): n is a, c, g, or t
  misc_feature (64)..(64): n is a, c, g, or t
nnnttgaaatcagcaagtggcatctgttagcagaaaaatcattggccaggaatctagggaatancatttcaaggttcagtggaggagaaccccaagagcaccaaaatggaaagatgatttgtaaagctgaggaaaatgtccagctgtgtttttatgaggactctcactgcactgatatgacagatgacaccttccctcaacactgttcatcattgactgctgagggctccttcttcagtttataacaggatggtaacttcataagcaatgtaggactttcacagggttccacacgaagcgtgtctggataattcagccaagctcttcagtctccagcagtgatggaatcaggagctcgcttggccagccctctaatgactcagtcacagggtcatccacttgggggtgtgaggagaggaggcttctccccgcaagtgctttcggggtgatgccgtagattctttgtacctcaggagttacttttgcaattagaggttctctctctctcttggtattttatgcatctaattctgcttttctatgcatgagtcttgtcggattcaggcacagcaataagtctccaaaatagggtcagagtgagtttaatgaagaagttattgttttcttaaggatgaaaataaacagagagaatgccttattacataatcaataacgtcggcctcttgattaaaacacaaatgcaatttagcccgaaattattctctagtttgatgttctacaaaattagattacgataataaatgattggacctcttaagcacaggcaggtgtccacacgctgatagcctctggaggagcaggcttcccaatccggatttcctacggatgaaagtttaggaagatgtagtactgatcccaacatctcactcatagtttctgcaattattaaaggctaaaagacaacacacataatggaaaagcttagacttttggaatcggaggctggatttagatactagtttctctgcttaatcagctgtgcaaattttgtttcaagttacttaatctttctgagcctgttttcttaaaataaaacattttgaaatggggtaacaat

SEQ ID NO: 318435 - DNA, 4495 bp, Homo sapiens
agcggaaggggaaatgtcaggaaaagtgaagattcagtaacttatttttactatgctgtcaaatttctccagtatcaaattgtattttaaaaaatagttctaatgacaagcagaagatgattccatttttgtttaaaaaagcaatttttttttctgaatgatgtatggtttacaacagtcattaaagcaactatttacaagggcgccaatgcttcggcattagagaaagagattggtccagaacagtttccggtcaatgagcactattttggattagtcaattttgggaatacctgctactgcaattcagttcttcaagcactttatttttgtcgtccatttcgggaaaaagttcttgcgtataagagtcaacctaggaaaaaggagagccttcttacatgcttagcagatctcttccatagcatagccactcagaagaaaaaggttggagtaataccccctaagaagttcatcacaagattacggaaagaaaatgactgtcagttccatgacggagggaacccatttgtttttgctcaccattgtattcccagcacataatccagttcctggcacataagctttttgacaactacatgcaacaagatgcccatgaattcttaaattacctactaaatacaattgctgatattttacaagaagagagaaagcaggaaaaacaaaatggtcgtttacctaatggtaatattgataatgaaaataataacagcacaccagacccaacgtgggttcatgagatttttcagggaacattaactaatgaaaccagatgtcttacttgtgaaactataagcagcaaagatgaagattttttagacctttctgttgacgtggaacaaaatacatcaattactcactgcttaaggggtttcagcaacacagaaactctgtgcagtgaatacaagtattactgtgaagagtgtcgcagcaaacaggaagcacacaaacggatgaaagttaaaaaactgcccatgattctagctctacacctgaagagatttaaatatatggatcaacttcatcgatatacaaaactctcttaccgggtagtttttcctttagaacttcgtctgtttaacacttcaggtgatgccaccaatccagacagaatgtacgaccttgttgctgttgtggttcactgtggaagtggtcccaatcgaggccattatattgcaatagttaagagtcatgatttttggttgttgtttgatgacgacattgtagaaaaaatagatgcacaagctattgaagaattctacgggttgacatcagatatctcaaagaactctgagtctggttacatccttttctatcagtctcgggactgagagggaaccgtgatgaagagacactttctgcctcatttcttctctggttattttggaaaggatcaagcactgatttttcaagaaaagagaaatgcaggaagctcagggggcagtagcacactttgcacacgataaagcaaagacgatggattgacaagcccttccgatcatggtagttgatttatttgctcaggtatcatgctgtctgtacagttccatacaacaaggaggtgaaatcagagataccagctcctcttttaaaacagccttccagtcattggcacgcattttctctttattaattgcaccaataatgctttgaattccttgggggtgcagtagaaagaatcggaatctgtgccgtattgataaggagatgatgttgaacacactgcataaatttgcctggttcagtatgtatagaagcatattcagtggtcttttcaagagtaaaccagaaatacttttgggcccaacacttgcagttgccttcctgatgtaaaaactaacatgctagataatccagtgtcgggaagacaaagatgttttgcttctctgaagaagcttataataatatacagtatatgtatatgtagggagcaattggtcaaaagtggctttttgtttccccaaggggaaagactggctttgtaattataattttttccttatttattttacttaaaactggtagagtctaagtattatatgaagtgcccatgattctgtcagtaaatttgaacatatttttattagttaatgtcagtttaagttgtccttttgtttgtttctatttttaaggtgaattttaatttctatctgaaatcagttaagataccttgagaaaaactgcagtgagaggagataaatatcctttttcaggaggaactgatatctctggctaaatatttgtccttttattatggtttctaaatcagttattttcttcagctttaatttcataaaattaaaaaactattttaaaaattcctgtagttgttggaataattaaaaattctggtgcagtggtggtataccaatctttagaattcttaagtattctaatgtttcaagttgagatcatgcttgggaaaatcatgtcatagcatttatgttattttcagatgccattttttaccctggaaagaagtcataatgttcatcataaccctagcagcctggatagtgagctaaacaaacccttcaaagattaaattttaatcaagtagaccgggaatacaaaagacaagtccttccttcccttccccccacctttacaaatcttactggaagggtgttcagaaattaaaatctgtgtttgctaagacttcattctgttgggggttttaagaagtaatatatgtaacataaaatatatgtaaacgattgcagtttttttggacgtttttccatgcatcagtaagttgtctgacagtagccaaatgtaacttgcagaaaattattgaaaattatattcagaataatagcaatcaggccttggatgttctttattaaactcttttcaggcagtaaatttaaaaaaaattgtcattttctaaagtccttttgctaaaactgttgactatggaaaacaacaaaaaggaattttttagtctgctgctattattaacatttattatctgtatcttttggctcaggaaatgacttcacctattttttccataagcagacctttaacagagtcacttaattgggctgcttaaacggatgttctgggagaaaattataatatttagtatttgtacaaaatatcaaaaagtattttgacaagtttctttttaagatagttcctaaagccttaccctggctagaggtgttttgtacaaattatatataagccagcctgatctaccaacatgccacagagaatcacaatcaacagtgtggggaaagtcagggcagtggaagtggatgcactctttttattttgaaggcttaaaccaaattgtcttggaattaaagctgtatttctgcagctttcggtacagagaaaaagaggaaagtgaagctgtgtcagttttaacattagctatatcaacatgtttaagaaagatagatgaagtcatttgcataaaggtacagcattgaaatactatgttgtgtttgtttttacatttttgcattaaaaaaaaacatgccgtaaaagccaagttaaatttcatattaaagcaagttctagtgtatgtgttgagttcctggtaatcacatacttgttcacatctacaccgtacttcatagtatgatttgtcaggggagggattgtggggtgacagttttacatttactttttcttcttaatgcagctggatctaagtaaaatgttttgaagtttatcagaaactaaatgtacttttaaaacgtatagggtcagggttgggggaaaaatacaggtatagtaagtaagaaaagtgacccatgaagaaagcatcgtgaggttgtatgttggttgactgtgattaaaatgcggggctggtgtaagttgtaagtggtggctgattgccgtgtaactatgtacatgattgttgggatggctgtcccatattttgtatattggaataaaaatttctataaattattgtaactaaaagtaaatattctaaattaagtcccacttcttaagtcacatggcttctgtcttggaaattttacctttaaaagattatttaagacaggaaccaggaggcttgggaacagggaaagagggaaatgttgtattatgtgggtcttggggcctctaaccatcagtatagggttttttctttccttgatggcagtagaaagacctcattttcataacataactactcttgatactttctttaaaaacactttttattaaagattctatcatgaggtatttggctgggagctgggaggctaaagcgctcatgtcctggctcttcagtgaatttaactgtgtgaccttgggcaagtcacttaacctctctgtgcttcagtctccctgtcttgtaaaatgggagtaatacctacctcacagggttgttgtggggattaattagagataatgtctgtaaagcatttaaggttcttgaagaaggcactatataaatacaaaataatatctattaaagttggtttatttgtgcctgtgggtttcaagtgtg

SEQ ID NO: 318436 - DNA, 3497 bp, Homo sapiens
tggcctcgtgatcggaggcgttgaatgtgccgaggcggtattggcccggaggctgtagaaatggcccgggtagtttttcctttagaacttcgtctgtttaacacttcaggtgatgccaccaatccagacagaatgtacgaccttgttgctgttgtggttcactgtggaagtggtcccaatcgaggccattatattgcaatagttaagagtcatgatttttggttgttgtttgatgacgacattgtagaaaaaatagatgcacaagctattgaagaattctacgggttgacatcagatatctcaaagaactctgagtctggttacatccttttctatcagtctcgggactgagagggaaccgtgatgaagagacactttctgcctcatttcttctctggttattttggaaaggatcaagcactgatttttcaagaaaagagaaatgcaggaagctcagggggcagtagcacactttgcacacgataaagcaaagacgatggattgacaagcccttccgatcatggtagttgatttatttgctcaggtatcatgctgtctgtacagttccatacaacaaggaggtgaaatcagagataccagctcctcttttaaaacagccttccagtcattggcacgcattttctctttattaattgcaccaataatgctttgaattccttgggggtgcagtagaaagaatcggaatctgtgccgtattgataaggagatgatgttgaacacactgcataaatttgcctggttcagtatgtatagaagcatattcagtggtcttttcaagagtaaaccagaaatacttttgggcccaacacttgcagttgccttcctgatgtaaaaactaacatgctagataatccagtgtcgggaagacaaagatgttttgcttctctgaagaagcttataataatatacagtatatgtatatgtagggagcaattggtcaaaagtggctttttgtttccccaaggggaaagactggctttgtaattataattttttccttatttattttacttaaaactggtagagtctaagtattatatgaagtgcccatgattctgtcagtaaatttgaacatatttttattagttaatgtcagtttaagttgtccttttgtttgtttctatttttaaggtgaattttaatttctatctgaaatcagttaagataccttgagaaaaactgcagtgagaggagataaatatcctttttcaggaggaactgatatctctggctaaatatttgtccttttattatggtttctaaatcagttattttcttcagctttaatttcataaaattaaaaaactattttaaaaattcctgtagttgttggaataattaaaaattctggtgcagtggtggtataccaatctttagaattcttaagtattctaatgtttcaagttgagatcatgcttgggaaaatcatgtcatagcatttatgttattttcagatgccattttttaccctggaaagaagtcataatgttcatcataaccctagcagcctggatagtgagctaaacaaacccttcaaagattaaattttaatcaagtagaccgggaatacaaaagacaagtccttccttcccttccccccacctttacaaatcttactggaagggtgttcagaaattaaaatctgtgtttgctaagacttcattctgttgggggttttaagaagtaatatatgtaacataaaatatatgtaaacgattgcagtttttttggacgtttttccatgcatcagtaagttgtctgacagtagccaaatgtaacttgcagaaaattattgaaaattatattcagaataatagcaatcaggccttggatgttctttattaaactcttttcaggcagtaaatttaaaaaaaattgtcattttctaaagtccttttgctaaaactgttgactatggaaaacaacaaaaaggaattttttagtctgctgctattattaacatttattatctgtatcttttggctcaggaaatgacttcacctattttttccataagcagacctttaacagagtcacttaattgggctgcttaaacggatgttctgggagaaaattataatatttagtatttgtacaaaatatcaaaaagtattttgacaagtttctttttaagatagttcctaaagccttaccctggctagaggtgttttgtacaaattatatataagccagcctgatctaccaacatgccacagagaatcacaatcaacagtgtggggaaagtcagggcagtggaagtggatgcactctttttattttgaaggcttaaaccaaattgtcttggaattaaagctgtatttctgcagctttcggtacagagaaaaagaggaaagtgaagctgtgtcagttttaacattagctatatcaacatgtttaagaaagatagatgaagtcatttgcataaaggtacagcattgaaatactatgttgtgtttgtttttacatttttgcattaaaaaaaaacatgccgtaaaagccaagttaaatttcatattaaagcaagttctagtgtatgtgttgagttcctggtaatcacatacttgttcacatctacaccgtacttcatagtatgatttgtcaggggagggattgtggggtgacagttttacatttactttttcttcttaatgcagctggatctaagtaaaatgttttgaagtttatcagaaactaaatgtacttttaaaacgtatagggtcagggttgggggaaaaatacaggtatagtaagtaagaaaagtgacccatgaagaaagcatcgtgaggttgtatgttggttgactgtgattaaaatgcggggctggtgtaagttgtaagtggtggctgattgccgtgtaactatgtacatgattgttgggatggctgtcccatattttgtatattggaataaaaatttctataaattattgtaactaaaagtaaatattctaaattaagtcccacttcttaagtcacatggcttctgtcttggaaattttacctttaaaagattatttaagacaggaaccaggaggcttgggaacagggaaagagggaaatgttgtattatgtgggtcttggggcctctaaccatcagtatagggttttttctttccttgatggcagtagaaagacctcattttcataacataactactcttgatactttctttaaaaacactttttattaaagattctatcatgaggtatttggctgggagctgggaggctaaagcgctcatgtcctggctcttcagtgaatttaactgtgtgaccttgggcaagtcacttaacctctctgtgcttcagtctccctgtcttgtaaaatgggagtaatacctacctcacagggttgttgtggggattaattagagataatgtctgtaaagcatttaaggttcttgaagaaggcactatataaatacaaaataatatctattaaagttggtttatttgtgcctgtgggtttcaagtgtg

SEQ ID NO: 318437 - DNA, 2212 bp, Homo sapiens
  misc_feature (1198)..(1198): n is a, c, g, or t
cccggaggcagcggctgcgccctgcgccggggcggagccgggggcgggccggcggccggcaggcgggggctggggcccgaggccgggagtgcctgagcgccggcggcgacgacggcagcggcggcccagcgggctcggtggttgggtccgcggcggctcggggtccgcccgcgggctgcggtgcgagcgggcggcccggctcccctcctcccccgcccgccgccgccgctgtgattgggtggaagatggcgctggccggatggaaatcctaatgacagtctccaaattcgcctccatctgtaccatgggcgccaatgcttcggcattagagaaagagattggtccagaacagtttccggtcaatgagcactattttggattagtcaattttgggaatacctgctactgcaattcagttcttcaagcactttatttttgtcgtccatttcgggaaaaagttcttgcgtataagagtcaacctaggaaaaaggagagccttcttacatgcttagcagatctcttccatagcatagccactcagaagaaaaaggttggagtaataccccctaagaagttcatcacaagattacggaaagaaaatgagctttttgacaactacatgcaacaagatgcccatgaattcttaaattacctactaaatacaattgctgatattttacaagaagagagaaagcaggaaaaacaaaatggtcgtttacctaatggtaatattgataatgaaaataataacagcacaccagacccaacgtgggttcatgagatttttcagggaacattaactaatgaaaccagatgtcttacttgtgaaactataagcagcaaagatgaagattttttagacctttctgttgacgtggaacaaaatacatcaattactcactgcttaaggggtttcagcaacacagaaactctgtgcagtgaatacaagtattactgtgaagagtgtcgcagcaaacaggaagcacacaaacggatgaaagttaaaaaactgcccatgattctagctctacacctgaagagatttaaatatatggatcaacttcatcgatatacaaaactctcttaccgggtagtttttcctttagaacttcgtctgtttaacacttcaggtgatgccaccaatccagacagaatgtacgaccttgttgctgttgtggttcactgtggaagggaatancatttcaaggttcagtggaggagaaccccaagagcaccaaaatggaaagatgatttgtaaagctgaggaaaatgtccagctgtgtttttatgaggactctcactgcactgatatgacagatgacaccttccctcaacactgttcatcattgactgctgagggctccttcttcagtttataacaggatggtaacttcataagcaatgtaggactttcacagggttccacacgaagcgtgtctggataattcagccaagctcttcagtctccagcagtgatggaatcaggagctcgcttggccagccctctaatgactcagtcacagggtcatccacttgggggtgtgaggagaggaggcttctccccgcaagtgctttcggggtgatgccgtagattctttgtacctcaggagttacttttgcaattagaggttctctctctctcttggtattttatgcatctaattctgcttttctatgcatgagtcttgtcggattcaggcacagcaataagtctccaaaatagggtcagagtgagtttaatgaagaagttattgttttcttaaggatgaaaataaacagagagaatgccttattacataatcaataacgtcggcctcttgattaaaacacaaatgcaatttagcccgaaattattctctagtttgatgttctacaaaattagattacgataataaatgattggacctcttaagcacaggcaggtgtccacacgctgatagcctctggaggagcaggcttcccaatccggatttcctacggatgaaagtttaggaagatgtagtactgatcccaacatctcactcatagtttctgcaattattaaaggctaaaagacaacacacataatggaaaagcttagacttttggaatcggaggctggatttagatactagtttctctgcttaatcagctgtgcaaattttgtttcaagttacttaatctttctgagcctgttttcttaaaataaaacattttgaaatggggtaacaat

SEQ ID NO: 318438 - DNA, 508 bp, Homo sapiens
ctctgtgcagtgaatacaagtattactgtgaagagtgtcgcagcaaacaggaagcacacaaacggtaattttagagctttatggatttttaagtgattttattttttgtaattgatgttggaggtgggcttagaaaaacaatctaggaaaatttacattgagtaaaaattcttaattctatcactaacagttaatgttcattaagtattactaggtaaatgatattctactcaatgtttattttacaaaaactgtgtaccctgaagtgatttcctatgtctagcgattatttaatcatcataaaccagtacagttaaaatatttggctttgaggctttcctgatgatgtaaacttttttcttggtgaagagggttgagggagatagcactccccattgcccatcccccacacccccagtttctgcttttcctacataggatgttgtacattctcttagcatgttattgtaagactggtttggtatcaataaatggaataataaacatc

SEQ ID NO: 318439 - DNA, 556 bp, Homo sapiens
cccggaggcagcggctgcgccctgcgccggggcggagccgggggcgggccggcggccggcaggcgggggctggggcccgaggccgggagtgcctgagcgccggcggcgacgacggcagcggcggcccagcgggctcggtggttgggtccgcggcggctcggggtccgcccgcgggctgcggtgcgagcgggcggcccggctcccctcctcccccgcccgccgccgccgctgtgattgggtggaagatggcgctggccggatggaaatcctaatgacagtctccaaattcgcctccatctgtaccatggagtggtgaatcagatctgaaagatgccttaaaaagcagattctctactacacgctgaggaacagtacaaaaaatgactgaaatcaggtggacataaaatcgacagtattaaagaaatcatattgaaggatgaatcattgaagactccatttcccaactggatgattgttctttctcacagtttacattttaggaaagcatttgtattaaatggactatattaaaatgattttggagaattgtttgggc

SEQ ID NO: 318440 - DNA, 3903 bp, Homo sapiens
ggacgcgtgggtcgacccacgcgtccgcttaaattacctactaaatacaattgctgatattttacaagaagagagaaagcaggaaaaacaaaatggtcgtttacctaatggtaatattgataatgaaaataataacagcacaccagacccaacgtgggttcatgagatttttcagggaacattaactaatgaaaccagatgtcttacttgtgaaactataagcagcaaagatgaagattttttagacctttctgttgacgtggaacaaaatacatcaattactcactgcttaaggggtttcagcaacacagaaactctgtgcagtgaatacaagtattactgtgaagagtgtcgcagcaaacaggaagcacacaaacggatgaaagttaaaaaactgcccatgattctagctctacacctgaagagatttaaatatatggatcaacttcatcgatatacaaaactctcttaccgggtagtttttcctttagaacttcgtctgtttaacacttcaggtgatgccaccaatccagacagaatgtacgaccttgttgctgttgtggttcactgtggaagtggtcccaatcgaggccattatattgcaatagttaagagtcatgatttttggttgttgtttgatgacgacattgtagaaaaaatagatgcacaagctattgaagaattctacgggttgacatcagatatctcaaagaactctgagtctggttacatccttttctatcagtctcgggactgagagggaaccgtgatgaagagacactttctgcctcatttcttctctggttattttggaaaggatcaagcactgatttttcaagaaaagagaaatgcaggaagctcagggggcagtagcacactttgcacacgataaagcaaagacgatggattgacaagcccttccgatcatggtagttgatttatttgctcaggtatcatgctgtctgtacagttccatacaacaaggaggtgaaatcagagataccagctcctcttttaaaacagccttccagtcattggcacgcattttctctttattaattgcaccaataatgctttgaattccttgggggtgcagtagaaagaatcggaatctgtgccgtattgataaggagatgatgttgaacacactgcataaatttgcctggttcagtatgtatagaagcatattcagtggtcttttcaagagtaaaccagaaatacttttgggcccaacacttgcagttgccttcctgatgtaaaaactaacatgctagataatccagtgtcgggaagacaaagatgttttgcttctctgaagaagcttataataatatacagtatatgtatatgtagggagcaattggtcaaaagtggctttttgtttccccaaggggaaagactggctttgtaattataattttttccttatttattttacttaaaactggtagagtctaagtattatatgaagtgcccatgattctgtcagtaaatttgaacatatttttattagttaatgtcagtttaagttgtccttttgtttgtttctatttttaaggtgaattttaatttctatctgaaatcagttaagataccttgagaaaaactgcagtgagaggagataaatatcctttttcaggaggaactgatatctctggctaaatatttgtccttttattatggtttctaaatcagttattttcttcagctttaatttcataaaattaaaaaactattttaaaaattcctgtagttgttggaataattaaaaattctggtgcagtggtggtataccaatctttagaattcttaagtattctaatgtttcaagttgagatcatgcttgggaaaatcatgtcatagcatttatgttattttcagatgccattttttaccctggaaagaagtcataatgttcatcataaccctagcagcctggatagtgagctaaacaaacccttcaaagattaaattttaatcaagtagaccgggaatacaaaagacaagtccttccttcccttccccccacctttacaaatcttactggaagggtgttcagaaattaaaatctgtgtttgctaagacttcattctgttgggggttttaagaagtaatatatgtaacataaaatatatgtaaacgattgcagtttttttggacgtttttccatgcatcagtaagttgtctgacagtagccaaatgtaacttgcagaaaattattgaaaattatattcagaataatagcaatcaggccttggatgttctttattaaactcttttcaggcagtaaatttaaaaaaaattgtcattttctaaagtccttttgctaaaactgttgactatggaaaacaacaaaaaggaattttttagtctgctgctattattaacatttattatctgtatcttttggctcaggaaatgacttcacctattttttccataagcagacctttaacagagtcacttaattgggctgcttaaacggatgttctgggagaaaattataatatttagtatttgtacaaaatatcaaaaagtattttgacaagtttctttttaagatagttcctaaagccttaccctggctagaggtgttttgtacaaattatatataagccagcctgatctaccaacatgccacagagaatcacaatcaacagtgtggggaaagtcagggcagtggaagtggatgcactctttttattttgaaggcttaaaccaaattgtcttggaattaaagctgtatttctgcagctttcggtacagagaaaaagaggaaagtgaagctgtgtcagttttaacattagctatatcaacatgtttaagaaagatagatgaagtcatttgcataaaggtacagcattgaaatactatgttgtgtttgtttttacatttttgcattaaaaaaaaacatgccgtaaaagccaagttaaatttcatattaaagcaagttctagtgtatgtgttgagttcctggtaatcacatacttgttcacatctacaccgtacttcatagtatgatttgtcaggggagggattgtggggtgacagttttacatttactttttcttcttaatgcagctggatctaagtaaaatgttttgaagtttatcagaaactaaatgtacttttaaaacgtatagggtcagggttgggggaaaaatacaggtatagtaagtaagaaaagtgacccatgaagaaagcatcgtgaggttgtatgttggttgactgtgattaaaatgcggggctggtgtaagttgtaagtggtggctgattgccgtgtaactatgtacatgattgttgggatggctgtcccatattttgtatattggaataaaaatttctataaattattgtaactaaaagtaaatattctaaattaagtcccacttcttaagtcacatggcttctgtcttggaaattttacctttaaaagattatttaagacaggaaccaggaggcttgggaacagggaaagagggaaatgttgtattatgtgggtcttggggcctctaaccatcagtatagggttttttctttccttgatggcagtagaaagacctcattttcataacataactactcttgatactttctttaaaaacactttttattaaagattctatcatgaggtatttggctgggagctgggaggctaaagcgctcatgtcctggctcttcagtgaatttaactgtgtgaccttgggcaagtcacttaacctctctgtgcttcagtctccctgtcttgtaaaatgggagtaatacctacctcacagggttgttgtggggattaattagagataatgtctgtaaagcatttaaggttcttgaagaaggcactatataaatacaaaataatatctattaaagttggtttatttgtgcctgtgggtttcaagtgtg

SEQ ID NO: 318441 - DNA, 3353 bp, Homo sapiens
tagaggatcccaaatctctcatgcgctggtcccaatcgaggccattatattgcaatagttaagagtcatgatttttggttgttgtttgatgacgacattgtagaaaaaatagatgcacaagctattgaagaattctacgggttgacatcagatatctcaaagaactctgagtctggttacatccttttctatcagtctcgggactgagagggaaccgtgatgaagagacactttctgcctcatttcttctctggttattttggaaaggatcaagcactgatttttcaagaaaagagaaatgcaggaagctcagggggcagtagcacactttgcacacgataaagcaaagacgatggattgacaagcccttccgatcatggtagttgatttatttgctcaggtatcatgctgtctgtacagttccatacaacaaggaggtgaaatcagagataccagctcctcttttaaaacagccttccagtcattggcacgcattttctctttattaattgcaccaataatgctttgaattccttgggggtgcagtagaaagaatcggaatctgtgccgtattgataaggagatgatgttgaacacactgcataaatttgcctggttcagtatgtatagaagcatattcagtggtcttttcaagagtaaaccagaaatacttttgggcccaacacttgcagttgccttcctgatgtaaaaactaacatgctagataatccagtgtcgggaagacaaagatgttttgcttctctgaagaagcttataataatatacagtatatgtatatgtagggagcaattggtcaaaagtggctttttgtttccccaaggggaaagactggctttgtaattataattttttccttatttattttacttaaaactggtagagtctaagtattatatgaagtgcccatgattctgtcagtaaatttgaacatatttttattagttaatgtcagtttaagttgtccttttgtttgtttctatttttaaggtgaattttaatttctatctgaaatcagttaagataccttgagaaaaactgcagtgagaggagataaatatcctttttcaggaggaactgatatctctggctaaatatttgtccttttattatggtttctaaatcagttattttcttcagctttaatttcataaaattaaaaaactattttaaaaattcctgtagttgttggaataattaaaaattctggtgcagtggtggtataccaatctttagaattcttaagtattctaatgtttcaagttgagatcatgcttgggaaaatcatgtcatagcatttatgttattttcagatgccattttttaccctggaaagaagtcataatgttcatcataaccctagcagcctggatagtgagctaaacaaacccttcaaagattaaattttaatcaagtagaccgggaatacaaaagacaagtccttccttcccttccccccacctttacaaatcttactggaagggtgttcagaaattaaaatctgtgtttgctaagacttcattctgttgggggttttaagaagtaatatatgtaacataaaatatatgtaaacgattgcagtttttttggacgtttttccatgcatcagtaagttgtctgacagtagccaaatgtaacttgcagaaaattattgaaaattatattcagaataatagcaatcaggccttggatgttctttattaaactcttttcaggcagtaaatttaaaaaaaattgtcattttctaaagtccttttgctaaaactgttgactatggaaaacaacaaaaaggaattttttagtctgctgctattattaacatttattatctgtatcttttggctcaggaaatgacttcacctattttttccataagcagacctttaacagagtcacttaattgggctgcttaaacggatgttctgggagaaaattataatatttagtatttgtacaaaatatcaaaaagtattttgacaagtttctttttaagatagttcctaaagccttaccctggctagaggtgttttgtacaaattatatataagccagcctgatctaccaacatgccacagagaatcacaatcaacagtgtggggaaagtcagggcagtggaagtggatgcactctttttattttgaaggcttaaaccaaattgtcttggaattaaagctgtatttctgcagctttcggtacagagaaaaagaggaaagtgaagctgtgtcagttttaacattagctatatcaacatgtttaagaaagatagatgaagtcatttgcataaaggtacagcattgaaatactatgttgtgtttgtttttacatttttgcattaaaaaaaaacatgccgtaaaagccaagttaaatttcatattaaagcaagttctagtgtatgtgttgagttcctggtaatcacatacttgttcacatctacaccgtacttcatagtatgatttgtcaggggagggattgtggggtgacagttttacatttactttttcttcttaatgcagctggatctaagtaaaatgttttgaagtttatcagaaactaaatgtacttttaaaacgtatagggtcagggttgggggaaaaatacaggtatagtaagtaagaaaagtgacccatgaagaaagcatcgtgaggttgtatgttggttgactgtgattaaaatgcggggctggtgtaagttgtaagtggtggctgattgccgtgtaactatgtacatgattgttgggatggctgtcccatattttgtatattggaataaaaatttctataaattattgtaactaaaagtaaatattctaaattaagtcccacttcttaagtcacatggcttctgtcttggaaattttacctttaaaagattatttaagacaggaaccaggaggcttgggaacagggaaagagggaaatgttgtattatgtgggtcttggggcctctaaccatcagtatagggttttttctttccttgatggcagtagaaagacctcattttcataacataactactcttgatactttctttaaaaacactttttattaaagattctatcatgaggtatttggctgggagctgggaggctaaagcgctcatgtcctggctcttcagtgaatttaactgtgtgaccttgggcaagtcacttaacctctctgtgcttcagtctccctgtcttgtaaaatgggagtaatacctacctcacagggttgttgtggggattaattagagataatgtctgtaaagcatttaaggttcttgaagaaggcactatataaatacaaaataatatctattaaagttggtttatttgtgcctgtgggtttcaagtgtg

SEQ ID NO: 318442 - DNA, 1874 bp, Homo sapiens
aaacttcatactggtgagaaaccctatgaatgtaaggaatgcgggaaggcctttagagtgcgacaacaactaacactccatcagagaattcatactggtgagaaaccctatgaatgtaaggaatgtggaaagacctttagccgtggttatcatcttattctccatcacagaattcatactggtgaaaaaccttacgaatgtaaggaatgctggaaagcctttagtcgctactcacaacttatttcacatcagagtattcatattggtgttaagccctatgactgtaaggaatgcgggaaggccttcagactactttcacaactcacacagcatcagagtattcatattggtgagaaaccttataaatgtaaggaatgtggcaaggcctttagattgcgccaaaaacttactctacatcagagcattcatactggcgaaaaaccctttgagtgtaaggaatgtaggaaggcctttagacttaattcatcccttattcaacatctgagaattcattctggtgagaaaccctatgaatgtaaggaatgtaagaaggcctttaggcaacattcacaccttactcatcatctgaaaattcataatgtaaaaatctaagaaagtcttttcaacttctgtgttatagaacattctatgaatgtagtaattaatctattttgctccatacatgcaactgcgttggcattagaggttttataccattaaaagagtgtgacaatgtattgtagtccatcatcactcaaacctgaaacttcagcatatttgttctaaaaactaatcctgttataagaatgagaaagacatttaccgtcatccctatcccatcactttgtgtcatactggacaagacgcttaactgctctgtgctataattttttaatttatgacatggtcatataagagtgcagcagtttgacacactttcaatcaagaggtggaatctacatccctctgttgtatacaggaatctacatccctctgtgactgcttcgcccagtagaatatggtagacgtactgctgtgctggtttcttgactcagactttactggtagggttacttcatctcatgaaatgacagaactgtcttgttacaaagtctggctactttgctgaagagaccacatgaagaggccctgaaactacgtagagagggagaggcacctgctgaaccctgtcttcttgacatccaccaagataccagacatttgagtgaaattttggatccaccagaccagccaccagctaaatgccagtgagcgacttggtaacctgaactgatgccatgtagaatggaagaattgaccagctgagcccctgcccaaatttctgacccacaaaaacatgagatataataaaatggttgttgttttaagccactaaactttcttttattatcatactaaatatttctttttacataattcatactaaaggctgtgggcataatgagtatagaaatgccttccaccaacatttaatcttcattgaacttgagatatcttattctcgttaaaatattgaaagtaaggaattcctttccagtttgttcattaaaaaacagataccctagaccaggtgaggtggcccatgcctgtaaatccagcactttgggaggccaagtaaggacgattgcttgaggccagaagttcgagaccagcctgggcaacatggtgagaccctgtctctaccaaaaaactttaaaaattagctgggcataatggtgcatgcctgtagtcctagctactcgaggctgaggtgggaggatcatttgaacccaagagttgaggcttcagtgagctgtgattgtaccactgcactccagcttgagtgactgcaagaccctgtctcaaaaaaaaaa

SEQ ID NO: 318443 - DNA, 1847 bp, Homo sapiens
aaacttcatactggtgagaaaccctatgaatgtaaggaatgcgggaaggcctttagagtgcgacaacaactaacactccatcagagaattcatactggtgagaaaccctatgaatgtaaggaatgtggaaagacctttagccgtggttatcatcttattctccatcacagaattcatactggtgaaaaaccttacgaatgtaaggaatgctggaaagcctttagtcgctactcacaacttatttcacatcagagtattcatattggtgttaagccctatgactgtaaggaatgcgggaaggccttcagactactttcacaactcacacagcatcagagtattcatattggtgagaaaccttataaatgtaaggaatgtggcaaggcctttagattgcgccaaaaacttactctacatcagagcattcatactggcgaaaaaccctttgagtgtaaggaatgtaggaaggcctttagacttaattcatcccttattcaacatctgagaattcattctggtgagaaaccctatgaatgtaaggaatgtaagaaggcctttaggcaacattcacaccttactcatcatctgaaaattcataatgtaaaaatctaagaaagtcttttcaacttctgtgttatagaacattctatgaatgtagtaattaatctattttgctccatacatgcaactgcgttggcattagaggttttataccattaaaagagtgtgacaatgtattgtagtccatcatcactcaaacctgaaacttcagcatatttgttctaaaaactaatcctgttataagaatgagaaagacatttaccgtcatccctatcccatcactttgtgtcatactggacaagacgcttaactgctctgtgctataattttttaatttatgacatggtcatataagagtgcagcagtttgacacactttcaatcaagaggtggaatctacatccctctgtgactgcttcgcccagtagaatatggtagacgtactgctgtgctggtttcttgactcagactttactggtagggttacttcatctcatgaaatgacagaactgtcttgttacaaagtctggctactttgctgaagagaccacatgaagaggccctgaaactacgtagagagggagaggcacctgctgaaccctgtcttcttgacatccaccaagataccagacatttgagtgaaattttggatccaccagaccagccaccagctaaatgccagtgagcgacttggtaacctgaactgatgccatgtagaatggaagaattgaccagctgagcccctgcccaaatttctgacccacaaaaacatgagatataataaaatggttgttgttttaagccactaaactttcttttattatcatactaaatatttctttttacataattcatactaaaggctgtgggcataatgagtatagaaatgccttccaccaacatttaatcttcattgaacttgagatatcttattctcgttaaaatattgaaagtaaggaattcctttccagtttgttcattaaaaaacagataccctagaccaggtgaggtggcccatgcctgtaaatccagcactttgggaggccaagtaaggacgattgcttgaggccagaagttcgagaccagcctgggcaacatggtgagaccctgtctctaccaaaaaactttaaaaattagctgggcataatggtgcatgcctgtagtcctagctactcgaggctgaggtgggaggatcatttgaacccaagagttgaggcttcagtgagctgtgattgtaccactgcactccagcttgagtgactgcaagaccctgtctcaaaaaaaaaa

SEQ ID NO: 318444 - DNA, 2536 bp, Homo sapiens
aggccgagcgggaggtcggggctgcgggcgctcgctggtggcggacccggaggctgctgcggcgccggggctccgtggcctggattgaatccgatcgggagccatgagcgtggacaaagctgagctatgcgggtctctgctcacctggttacagacgttccacgttccgtctccctgtgccagccctcaggacctgagcagcggccttgccgtagcctatgtgctgaaccagatagacccctcctggttcaacgaggcatggctccagggcatctcggaagatccaggtcccaactggaagctgaaggtcagcaatctgaagatggtcttacggagcctagtagagtactcccaggatgtcctggcgcatcctgtgtcagaagagcatctcccagatgtgagcctcattggagagttctcagacccggcagagctcggcaagctgcttcagctggtgctgggctgtgccatcagttgcgagaaaaagcaggaccacatccagagaatcatgacgctggaagaatcggttcagcatgtggtgatggaagccatccaagagctcatgaccaaagacactcctgactccctgtcaccagagacgtatggcaactttgacagccagtcccgcaggtactatttcctaagtgaggaggctgaggagggggacgaattacagcagcgctgtctggatctggagcggcagctgatgctcctgtcagaggagaagcagagcctggcgcaagagaatgcagggctgcgggagcggatgggccggcctgaaggcgagggtaccccaggtctcactgccaagaagctgctgctgctgcaatcccagctggagcagttgcaggaggagaacttcaggctggagagtggcagggaggatgagcgcctgcgctgtgccgagctggagagggaggttgcggagctgcagcaccggaaccaggcgctgactagcctggcccaggaggcacaggccctgaaggatgagatggatgaactacggcagtcttcggagcgtgctgggcagctggaggccacgctgaccagttgccggcgccgcttgggcgagctgagggagctgcggcggcaggtgcggcagctggaggaacgcaacgccggccacgccgagcgcacgcgacaactggaggatgagctacgccgagcgggctccctgcgcgcccagctggaggcgcagcggcggcaggtgcaggaactgcagggccagcggcaggaggaggccatgaaggccgagaaatggctatttgaatgccgcaacctggaggaaaagtatgagtcggtgacaaaggagaaggagcggctgttggcggagcgggactccttgcgggaggccaatgaggagctgcgctgcgcccagctgcagccgcgggggttgacccaggccgatccctcactggatcccacctccacacccgtggataacttagccgcagagatcctgcctgcggagctcagggagacgctcctgcggcttcagctggagaacaagcggctgtgcaggcaggaggcggccgaccgggagcggcaggaggagctgcagcgccacctggaggatgccaaccgcgcgcgccacgggttggagacgcagcaccggctgaaccagcagcagctatccgagctgcgggcccaggtggaggacctgcagaaagccctgcaggagcaggggggcaagactgaagattccattttgctgaaaaggaagctggaggaacatttgcagaagcttcatgaggcagatctggagttgcagaggaagcgggagtacattgaggagctggagccacccactgacagcagcacagcccggcggatcgaggagctgcagcataacttgcagaagaaggacgcggacttgcgggccatggaggagcgataccgccgctacgtggacaaggcccgcatggtcatgcagaccatggaacccaagcagcggccagctgcgggggcacctccagaactccattccctgaggacacagctccgagaacgggatgtccgcatccgacacctggagatggactttgagaaaagccgaagtcagcgggagcaggaagaaaagctgctcatcagtgcctggtataatatgggcatggccttgcagcagcgagctggggaggagcgggcgcctgcccatgcccagtcattcctggcacagcagcggctggcaaccaattctcgccgtggacccttgggacgcctggcatctctgaaccttcgccccactgacaagcactgacagacctcacaatcaagccagcctgggctccacccaccctggcttcctccagctcacatggcgcccagcactgggcttcagccaggtgctcgagagctttgaggccatgatctctgctcttccctctcccagattggtggggagggagggcgggaggtagatataggcctgttctttttagcaatgtgattcttgttgttgattctctctctggagttcatgtgctgcctcaggagactctgattttatatttgagaaaaataaaggcgttcaatctgc

SEQ ID NO: 318445 - DNA, 409 bp, Homo sapiens
  misc_feature (383)..(383): n is a, c, g, or t
aaatctgtctggcattagctcttattcctgcattcggtctttcttcagtggtccatgaatgcttcttctcctccatggtctggaagcggcatggccaaacttggaggtggtatcagggtggtatagggtggtatagtcctgataccacccactgacagcagcagcccggcggatcgaggagctgcagcataacttgcagaagaaggacgcggacttgcgggccatggaggagcgataccgccgctacgtggacaaggcccgcatggtcatgcagaccatggaacccaagcagcggccagctgcgggggcacctccagaactccattccctgaggacacagctccgagaacgggatgtccgcatccgacacctggagatgactntgagaaaaccccagtcacggaacaag

SEQ ID NO: 318446 - DNA, 2583 bp, Homo sapiens
tgccggcccttgtccccttcccccactatcctctccacccgctcccaggggctggagtctggaaaaccacgcgggaggaggttgtggggatatggacgagcatccgaggcccccgggtgcgtacggctgcgcatgagtgggctgtaatcgggtgtctggggttacagacgttccacgttccgtctccctgtgccagccctcaggacctgagcagcggccttgccgtagcctatgtgctgaaccagatagacccctcctggttcaacgaggcatggctccagggcatctcggaagatccaggtcccaactggaagctgaaggtgacaagtggactcctgattagaggacagactggtcagcaatctgaagatggtcttacggagcctagtagagtactcccaggatgtcctggcgcatcctgtgtcagaagagcatctcccagatgtgagcctcattggagagttctcagacccggcagagctcggcaagctgcttcagctggtgctgggctgtgccatcagttgcgagaaaaagcaggaccacatccagagaatcatgacgctggaagaatcggttcagcatgtggtgatggaagccatccaagagctcatgaccaaagacactcctgactccctgtcaccagagacgtatggcaactttgacagccagtcccgcaggtactatttcctaagtgaggaggctgaggagggggacgaattacagcagcgctgtctggatctggagcggcagctgatgctcctgtcagaggagaagcagagcctggcgcaagagaatgcagggctgcgggagcggatgggccggcctgaaggcgagggtaccccaggtctcactgccaagaagctgctgctgctgcaatcccagctggagcagttgcaggaggagaacttcaggctggagagtggcagggaggatgagcgcctgcgctgtgccgagctggagagggaggttgcggagctgcagcaccggaaccaggcgctgactagcctggcccaggaggcacaggccctgaaggatgagatggatgaactacggcagtcttcggagcgtgctgggcagctggaggccacgctgaccagttgccggcgccgcttgggcgagctgagggagctgcggcggcaggtgcggcagctggaggaacgcaacgccggccacgccgagcgcacgcgacaactggaggatgagctacgccgagcgggctccctgcgcgcccagctggaggcgcagcggcggcaggtgcaggaactgcagggccagcggcaggaggaggccatgaaggccgagaaatggctatttgaatgccgcaacctggaggaaaagtatgagtcggtgacaaaggagaaggagcggctgttggcggagcgggactccttgcgggaggccaatgaggagctgcgctgcgcccagctgcagccgcgggggttgacccaggccgatccctcactggatcccacctccacacccgtggataacttagccgcagagatcctgcctgcggagctcagggagacgctcctgcggcttcagctggagaacaagcggctgtgcaggcaggaggcggccgaccgggagcggcaggaggagctgcagcgccacctggaggatgccaaccgcgcgcgccacgggttggagacgcagcaccggctgaaccagcagcagctatccgagctgcgggcccaggtggaggacctgcagaaagccctgcaggagcaggggggcaagactgaagattccattttgctgaaaaggaagctggaggaacatttgcagaagcttcatgaggcagatctggagttgcagaggaagcgggagtacattgaggagctggagccacccactgacagcagcacagcccggcggatcgaggagctgcagcataacttgcagaagaaggacgcggacttgcgggccatggaggagcgataccgccgctacgtggacaaggcccgcatggtcatgcagaccatggaacccaagcagcggccagctgcgggggcacctccagaactccattccctgaggacacagctccgagaacgggatgtccgcatccgacacctggagatggactttgagaaaagccgaagtcagcgggagcaggaagaaaagctgctcatcagtgcctggtataatatgggcatggccttgcagcagcgagctggggaggagcgggcgcctgcccatgcccagtcattcctggcacagcagcggctggcaaccaattctcgccgtggacccttgggacgcctggcatctctgaaccttcgccccactgacaagcactgacagacctcacaatcaagccagcctgggctccacccaccctggcttcctccagctcacatggcgcccagcactgggcttcagccaggtgctcgagagctttgaggccatgatctctgctcttccctctcccagattggtggggagggagggcgggaggtagatataggcctgttctttttagcaatgtgattcttgttgttgattctctctctggagttcatgtgctgcctcaggagactctgattttatatttgagaaaaataaaggcgttcaatctgc

SEQ ID NO: 318447 - DNA, 2606 bp, Homo sapiens
aggccgagcgggaggtcggggctgcgggcgctcgctggtggcggacccggaggctgctgcggcgccggggctccgtggcctggattgaatccgatcgggagccatgagcgtggacaaagctgagctatgcgggtctctgctcacctggttacagacgttccacgttccgtctccctgtgccagccctcaggacctgagcagcggccttgccgtagcctatgtgctgaaccagatgtgagtggagctgaaggggaggatcccaaaagtgtcccccagtctgctcatcccaccttctcgcccccagagacccctcctggttcaacgaggcatggctccagggcatctcggaagatccaggtcccaactggaagctgaaggtcagcaatctgaagatggtcttacggagcctagtagagtactcccaggatgtcctggcgcatcctgtgtcagaagagcatctcccagatgtgagcctcattggagagttctcagacccggcagagctcggcaagctgcttcagctggtgctgggctgtgccatcagttgcgagaaaaagcaggaccacatccagagaatcatgacgctggaagaatcggttcagcatgtggtgatggaagccatccaagagctcatgaccaaagacactcctgactccctgtcaccagagacgtatggcaactttgacagccagtcccgcaggtactatttcctaagtgaggaggctgaggagggggacgaattacagcagcgctgtctggatctggagcggcagctgatgctcctgtcagaggagaagcagagcctggcgcaagagaatgcagggctgcgggagcggatgggccggcctgaaggcgagggtaccccaggtctcactgccaagaagctgctgctgctgcaatcccagctggagcagttgcaggaggagaacttcaggctggagagtggcagggaggatgagcgcctgcgctgtgccgagctggagagggaggttgcggagctgcagcaccggaaccaggcgctgactagcctggcccaggaggcacaggccctgaaggatgagatggatgaactacggcagtcttcggagcgtgctgggcagctggaggccacgctgaccagttgccggcgccgcttgggcgagctgagggagctgcggcggcaggtgcggcagctggaggaacgcaacgccggccacgccgagcgcacgcgacaactggaggatgagctacgccgagcgggctccctgcgcgcccagctggaggcgcagcggcggcaggtgcaggaactgcagggccagcggcaggaggaggccatgaaggccgagaaatggctatttgaatgccgcaacctggaggaaaagtatgagtcggtgacaaaggagaaggagcggctgttggcggagcgggactccttgcgggaggccaatgaggagctgcgctgcgcccagctgcagccgcgggggttgacccaggccgatccctcactggatcccacctccacacccgtggataacttagccgcagagatcctgcctgcggagctcagggagacgctcctgcggcttcagctggagaacaagcggctgtgcaggcaggaggcggccgaccgggagcggcaggaggagctgcagcgccacctggaggatgccaaccgcgcgcgccacgggttggagacgcagcaccggctgaaccagcagcagctatccgagctgcgggcccaggtggaggacctgcagaaagccctgcaggagcaggggggcaagactgaagattccattttgctgaaaaggaagctggaggaacatttgcagaagcttcatgaggcagatctggagttgcagaggaagcgggagtacattgaggagctggagccacccactgacagcagcacagcccggcggatcgaggagctgcagcataacttgcagaagaaggacgcggacttgcgggccatggaggagcgataccgccgctacgtggacaaggcccgcatggtcatgcagaccatggaacccaagcagcggccagctgcgggggcacctccagaactccattccctgaggacacagctccgagaacgggatgtccgcatccgacacctggagatggactttgagaaaagccgaagtcagcgggagcaggaagaaaagctgctcatcagtgcctggtataatatgggcatggccttgcagcagcgagctggggaggagcgggcgcctgcccatgcccagtcattcctggcacagcagcggctggcaaccaattctcgccgtggacccttgggacgcctggcatctctgaaccttcgccccactgacaagcactgacagacctcacaatcaagccagcctgggctccacccaccctggcttcctccagctcacatggcgcccagcactgggcttcagccaggtgctcgagagctttgaggccatgatctctgctcttccctctcccagattggtggggagggagggcgggaggtagatataggcctgttctttttagcaatgtgattcttgttgttgattctctctctggagttcatgtgctgcctcaggagactctgattttatatttgagaaaaataaaggcgttcaatctgc

SEQ ID NO: 318448 - DNA, 2504 bp, Homo sapiens
tgccggcccttgtccccttcccccactatcctctccacccgctcccaggggctggagtctggaaaaccacgcgggaggaggttgtggggatatggacgagcatccgaggcccccggttacagacgttccacgttccgtctccctgtgccagccctcaggacctgagcagcggccttgccgtagcctatgtgctgaaccagatagacccctcctggttcaacgaggcatggctccagggcatctcggaagatccaggtcccaactggaagctgaaggtcagcaatctgaagatggtcttacggagcctagtagagtactcccaggatgtcctggcgcatcctgtgtcagaagagcatctcccagatgtgagcctcattggagagttctcagacccggcagagctcggcaagctgcttcagctggtgctgggctgtgccatcagttgcgagaaaaagcaggaccacatccagagaatcatgacgctggaagaatcggttcagcatgtggtgatggaagccatccaagagctcatgaccaaagacactcctgactccctgtcaccagagacgtatggcaactttgacagccagtcccgcaggtactatttcctaagtgaggaggctgaggagggggacgaattacagcagcgctgtctggatctggagcggcagctgatgctcctgtcagaggagaagcagagcctggcgcaagagaatgcagggctgcgggagcggatgggccggcctgaaggcgagggtaccccaggtctcactgccaagaagctgctgctgctgcaatcccagctggagcagttgcaggaggagaacttcaggctggagagtggcagggaggatgagcgcctgcgctgtgccgagctggagagggaggttgcggagctgcagcaccggaaccaggcgctgactagcctggcccaggaggcacaggccctgaaggatgagatggatgaactacggcagtcttcggagcgtgctgggcagctggaggccacgctgaccagttgccggcgccgcttgggcgagctgagggagctgcggcggcaggtgcggcagctggaggaacgcaacgccggccacgccgagcgcacgcgacaactggaggatgagctacgccgagcgggctccctgcgcgcccagctggaggcgcagcggcggcaggtgcaggaactgcagggccagcggcaggaggaggccatgaaggccgagaaatggctatttgaatgccgcaacctggaggaaaagtatgagtcggtgacaaaggagaaggagcggctgttggcggagcgggactccttgcgggaggccaatgaggagctgcgctgcgcccagctgcagccgcgggggttgacccaggccgatccctcactggatcccacctccacacccgtggataacttagccgcagagatcctgcctgcggagctcagggagacgctcctgcggcttcagctggagaacaagcggctgtgcaggcaggaggcggccgaccgggagcggcaggaggagctgcagcgccacctggaggatgccaaccgcgcgcgccacgggttggagacgcagcaccggctgaaccagcagcagctatccgagctgcgggcccaggtggaggacctgcagaaagccctgcaggagcaggggggcaagactgaagattccattttgctgaaaaggaagctggaggaacatttgcagaagcttcatgaggcagatctggagttgcagaggaagcgggagtacattgaggagctggagccacccactgacagcagcacagcccggcggatcgaggagctgcagcataacttgcagaagaaggacgcggacttgcgggccatggaggagcgataccgccgctacgtggacaaggcccgcatggtcatgcagaccatggaacccaagcagcggccagctgcgggggcacctccagaactccattccctgaggacacagctccgagaacgggatgtccgcatccgacacctggagatggactttgagaaaagccgaagtcagcgggagcaggaagaaaagctgctcatcagtgcctggtataatatgggcatggccttgcagcagcgagctggggaggagcgggcgcctgcccatgcccagtcattcctggcacagcagcggctggcaaccaattctcgccgtggacccttgggacgcctggcatctctgaaccttcgccccactgacaagcactgacagacctcacaatcaagccagcctgggctccacccaccctggcttcctccagctcacatggcgcccagcactgggcttcagccaggtgctcgagagctttgaggccatgatctctgctcttccctctcccagattggtggggagggagggcgggaggtagatataggcctgttctttttagcaatgtgattcttgttgttgattctctctctggagttcatgtgctgcctcaggagactctgattttatatttgagaaaaataaaggcgttcaatctgc

SEQ ID NO: 318449 - DNA, 2100 bp, Homo sapiens
agaaggatccccttcttcttggggcctgtgttatcagttgcgaaaaaaagcaggcaccacatccagagaatcatgacgctggaagaatcggttcagcatgtggtgatggaagccatccaagagctcatgaccaaagacactcctgactccctgtcaccagagacgtatggcaactttgacagccagtcccgcaggtactatttcctaagtgaggaggctgaggagggggacgaattacagcagcgctgtctggatctggagcggcagctgatgctcctgtcagaggagaagcagagcctggcgcaagagaatgcagggctgcgggagcggatgggccggcctgaaggcgagggtaccccaggtctcactgccaagaagctgctgctgctgcaatcccagctggagcagttgcaggaggagaacttcaggctggagagtggcagggaggatgagcgcctgcgctgtgccgagctggagagggaggttgcggagctgcagcaccggaaccaggcgctgactagcctggcccaggaggcacaggccctgaaggatgagatggatgaactacggcagtcttcggagcgtgctgggcagctggaggccacgctgaccagttgccggcgccgcttgggcgagctgagggagctgcggcggcaggtgcggcagctggaggaacgcaacgccggccacgccgagcgcacgcgacaactggaggatgagctacgccgagcgggctccctgcgcgcccagctggaggcgcagcggcggcaggtgcaggaactgcagggccagcggcaggaggaggccatgaaggccgagaaatggctatttgaatgccgcaacctggaggaaaagtatgagtcggtgacaaaggagaaggagcggctgttggcggagcgggactccttgcgggaggccaatgaggagctgcgctgcgcccagctgcagccgcgggggttgacccaggccgatccctcactggatcccacctccacacccgtggataacttagccgcagagatcctgcctgcggagctcagggagacgctcctgcggcttcagctggagaacaagcggctgtgcaggcaggaggcggccgaccgggagcggcaggaggagctgcagcgccacctggaggatgccaaccgcgcgcgccacgggttggagacgcagcaccggctgaaccagcagcagctatccgagctgcgggcccaggtggaggacctgcagaaagccctgcaggagcaggggggcaagactgaagattccattttgctgaaaaggaagctggaggaacatttgcagaagcttcatgaggcagatctggagttgcagaggaagcgggagtacattgaggagctggagccacccactgacagcagcacagcccggcggatcgaggagctgcagcataacttgcagaagaaggacgcggacttgcgggccatggaggagcgataccgccgctacgtggacaaggcccgcatggtcatgcagaccatggaacccaagcagcggccagctgcgggggcacctccagaactccattccctgaggacacagctccgagaacgggatgtccgcatccgacacctggagatggactttgagaaaagccgaagtcagcgggagcaggaagaaaagctgctcatcagtgcctggtataatatgggcatggccttgcagcagcgagctggggaggagcgggcgcctgcccatgcccagtcattcctggcacagcagcggctggcaaccaattctcgccgtggacccttgggacgcctggcatctctgaaccttcgccccactgacaagcactgacagacctcacaatcaagccagcctgggctccacccaccctggcttcctccagctcacatggcgcccagcactgggcttcagccaggtgctcgagagctttgaggccatgatctctgctcttccctctcccagattggtggggagggagggcgggaggtagatataggcctgttctttttagcaatgtgattcttgttgttgattctctctctggagttcatgtgctgcctcaggagactctgattttatatttgagaaaaataaaggcgttcaatctgc

SEQ ID NO: 318450 - DNA, 1445 bp, Homo sapiens
gcgctcgggttaaggtgggtgatggtggctatgatggtggggatgatgaggctattgttttttgtgaattcttcgataatggcccatttgggcaaaaagccggttagcggcggcaggtgcaggaactgcagggccagcggcaggaggaggccatgaaggccgagaaatggctatttgaatgccgcaacctggaggaaaagtatgagtcggtgacaaaggagaaggagcggctgttggcggagcgggactccttgcgggaggccaatgaggagctgcgctgcgcccagctgcagccgcgggggttgacccaggccgatccctcactggatcccacctccacacccgtggataacttagccgcagagatcctgcctgcggagctcagggagacgctcctgcggcttcagctggagaacaagcggctgtgcaggcaggaggcggccgaccgggagcggcaggaggagctgcagcgccacctggaggatgccaaccgcgcgcgccacgggttggagacgcagcaccggctgaaccagcagcagctatccgagctgcgggcccaggtggaggacctgcagaaagccctgcaggagcaggggggcaagactgaagattccattttgctgaaaaggaagctggaggaacatttgcagaagcttcatgaggcagatctggagttgcagaggaagcgggagtacattgaggagctggagccacccactgacagcagcacagcccggcggatcgaggagctgcagcataacttgcagaagaaggacgcggacttgcgggccatggaggagcgataccgccgctacgtggacaaggcccgcatggtcatgcagaccatggaacccaagcagcggccagctgcgggggcacctccagaactccattccctgaggacacagctccgagaacgggatgtccgcatccgacacctggagatggactttgagaaaagccgaagtcagcgggagcaggaagaaaagctgctcatcagtgcctggtataatatgggcatggccttgcagcagcgagctggggaggagcgggcgcctgcccatgcccagtcattcctggcacagcagcggctggcaaccaattctcgccgtggacccttgggacgcctggcatctctgaaccttcgccccactgacaagcactgacagacctcacaatcaagccagcctgggctccacccaccctggcttcctccagctcacatggcgcccagcactgggcttcagccaggtgctcgagagctttgaggccatgatctctgctcttccctctcccagattggtggggagggagggcgggaggtagatataggcctgttctttttagcaatgtgattcttgttgttgattctctctctggagttcatgtgctgcctcaggagactctgattttatatttgagaaaaataaaggcgttcaatctgc

SEQ ID NO: 318451 - DNA, 2489 bp, Homo sapiens
aggccgagcgggaggtcggggctgcgggcgctcgctggtggcggacccggaggctgctgcggcgccggggctccgtggcctggattgaatccgatcgggagccatgagcgtggacaaagctgagctatgcgggtctctgctcacctggttacagacgttccacgttccgtctccctgtgccagccctcaggacctgagcagcggccttgccgtagcctatgtgctgaaccagatagacccctcctggttcaacgaggcatggctccagggcatctcggaagatccaggtcccaactggaagctgaaggtcagcaatctgaagatggtcttacggagcctagtagagtactcccaggatgtcctggcgcatcctgtgtcagaagagcatctcccagatgtgagcctcattggagagttctcagacccggcagagctcggcaagctgcttcagctggtgctgggctgtgccatcagttgcgagaaaaagcaggaccacatccagagaatcatgacgctggaagaatcggttcagcatgtggtgatggaagccatccaagagctcatgaccaaagacactcctgactccctgtcaccagagacgtatggcaactttgacagccagtcccgcaggtactatttcctaagtgaggaggctgaggagggggacgaattacagcagcgctgtctggatctggagcggcagctgatgctcctgtcagaggagaagcagagcctggcgcaagagaatgcagggctgcgggagcggatgggccggcctgaaggcgagggtaccccaggtctcactgccaagaagctgctgctgctgcaatcccagctggagcagttgcaggaggagaacttcaggctggagagtggcagggaggatgagcgcctgcgctgtgccgagctggagagggaggttgcggagctgcagcaccggaaccaggcgctgactagcctggcccaggaggcacaggccctgaaggatgagatggatgaactacggcagtcttcggagcgtgctgggcagctggaggccacgctgaccagttgccggcgccgcttgggcgagctgagggagctgcggcggcaggtgcggcagctggaggaacgcaacgccggccacgccgagcgcacgcgacaactggaggatgagctacgccgagcgggctccctgcgcgcccagctggaggcgcagcggcggcaggtgcaggaactgcagggccagcggcaggaggaggccatgaaggccgagaaatggctatttgaatgccgcaacctggaggaaaagtatgagtcggtgacaaaggagaaggagcggctgttggcggagcgggactccttgcgggaggccaatgaggagctgcgctgcgcccagctgcagccgcgggggttgacccaggccgatccctcactggatcccacctccacacccgtggataacttagccgcagagatcctgcctgcggagctcagggagacgctcctgcggcttcagctggagaacaagcggctgtgcaggcaggaggcggccgaccgggagcggcaggaggagctgcagcgccacctggaggatgccaaccgcgcgcgccacgggttggagacgcagcaccggctgaaccagcagcagctatccgagctgcgggcccaggtggaggacctgcagaaagccctgcaggagcaggggggcaagactgaagattccattttgctgaaaaggaagctggaggaacatttgcagaagcttcatgaggcagatctggagttgcagaggaagcgggagtacattgaggagctggagccacccactgacagcagcacagcccggcggatcgaggagctgcagcataacttgcagaagaaggacgcggacttgcgggccatggaggagcgataccgccgctacgtggacaaggcccgcatggtcatgcagaccatggaacccaagcagcggccagctgcgggggcacctccagaactccattccctgaggacacagctccgagaacgggatgtccgcatccgacacctggagatggactttgagaaaagccgaagtcagcgggagcaggaagaaaagctgctcatcagtgcctggtataatatgggcatggccttgcagcagcgagctggggaggagcgggcgcctgcccatgcccagtcattcctggcacagcagcggctggcaaccaattctcgccgtggacccttgggacgcctggcatctctgaaccttcgccccactgacaagcactgacagacctcacaatcaagccagcactgggcttcagccaggtgctcgagagctttgaggccatgatctctgctcttccctctcccagattggtggggagggagggcgggaggtagatataggcctgttctttttagcaatgtgattcttgttgttgattctctctctggagttcatgtgctgcctcaggagactctgattttatatttgagaaaaataaaggcgttcaatctgc

SEQ ID NO: 318452 - DNA, 2068 bp, Homo sapiens
  misc_feature (2042)..(2042): n is a, c, g, or t
aggccgagcgggaggtcggggctgcgggcgctcgctggtggcggacccggaggctgctgcggcgccggggctccgtggcctggattgaatccgatcgggagccatgagcgtggacaaagctgagctatgcgggtctctgctcacctggttacagacgttccacgttccgtctccctgtgccagccctcaggacctgagcagcggccttgccgtagcctatgtgctgaaccagatagacccctcctggttcaacgaggcatggctccagggcatctcggaagatccaggtcccaactggaagctgaaggtcagcaatctgaagatggtcttacggagcctagtagagtactcccaggatgtcctggcgcatcctgtgtcagaagagcatctcccagatgtgagcctcattggagagttctcagacccggcagagctcggcaagctgcttcagctggtgctgggctgtgccatcagttgcgagaaaaagcaggaccacatccagagaatcatgacgctggaagaatcggttcagcatgtggtgatggaagccatccaagagctcatgaccaaagacactcctgactccctgtcaccagagacgtatggcaactttgacagccagtcccgcaggtactatttcctaagtgaggaggctgaggagggggacgaattacagcagcgctgtctggatctggagcggcagctgatgctcctgtcagaggagaagcagagcctggcgcaagagaatgcagggctgcgggagcggatgggccggcctgaaggcgagggtaccccaggtctcactgccaagaagctgctgctgctgcaatcccagctggagcagttgcaggaggagaacttcaggctggagagtggcagggaggatgagcgcctgcgctgtgccgagctggagagggaggttgcggagctgcagcaccggaaccaggcgctgactagcctggcccaggaggcacaggccctgaaggatgagatggatgaactacggcagtcttcggagcgtgctgggcagctggaggccacgctgaccagttgccggcgccgcttgggcgagctgagggagctgcggcggcaggtgcggcagctggaggaacgcaacgccggccacgccgagcgcacgcgacaactggaggatgagctacgccgagcgggctccctgcgcgcccagctggaggcgcagcggcggcaggtgcaggaactgcagggccagcggcaggaggaggccatgaaggccgagaaatggctatttgaatgccgcaacctggaggaaaagtatgagtcggtgacaaaggagaaggagcggctgttggcggagcgggactccttgcgggaggccaatgaggagctgcgctgcgcccagctgcagccgcgggggttgacccaggccgatccctcactggatcccacctccacacccgtggataacttagccgcagagatcctgcctgcggagctcagggagacgctcctgcggcttcagctggagaacaagcggctgtgcaggcaggaggcggccgaccgggagcggcaggaggagctgcagcgccacctggaggatgccaaccgcgcgcgccacgggttggagacgcagcaccggctgaaccagcagcagctatccgagctgcgggcccaggtggaggacctgcagaaagccctgcaggagcaggggggcaagactgaagattccattttgctgaaaaggaagctggaggaacatttgcagaagcttcatgaggcagatctggagttgcagaggaagcgggagtacattgaggagctggagccacccactgacagcagcacagcccggcggatcgaggagctgcagcataacttgcagaagaaggacgcggacttgcgggccatggaggagcgataccgccgctacgtggacaaggcccgcatggtcatgcagaccatggaacccaagcagcggccagctgcgggggcacctccagaactccattccctgaggacacagctccgagaacgggatgtccgcatccgacacctggagatgactntgagaaaaccccagtcacggaacaag

SEQ ID NO: 318453 - DNA, 1499 bp, Homo sapiens
aggccgagcgggaggtcggggctgcgggcgctcgctggtggcggacccggaggctgctgcggcgccggggctccgtggcctggattgaatccgatcgggagccatgagcgtggacaaagctgagctatgcgggtctctgctcacctggttacagacgttccacgttccgtctccctgtgccagccctcaggacctgagcagcggccttgccgtagcctatgtgctgaaccagatagacccctcctggttcaacgaggcatggctccagggcatctcggaagatccaggtcccaactggaagctgaaggtcagcaatctgaagatggtcttacggagcctagtagagtactcccaggatgtcctggcgcatcctgtgtcagaagagcatctcccagatgtgagcctcattggagagttctcagacccggcagagctcggcaagctgcttcagctggtgctgggctgtgccatcagttgcgagaaaaagcaggaccacatccagagaatcatgacgctggaagaatcggttcagcatgtggtgatggaagccatccaagagctcatgaccaaagacactcctgactccctgtcaccagagacgtatggcaactttgacagccagtcccgcaggtactatttcctaagtgaggaggctgaggagggggacgaattacagcagcgctgtctggatctggagcggcagctgatgctcctgtcagaggagaagcagagcctggcgcaagagaatgcagggctgcgggagcggatgggccggcctgaaggcgagggtaccccaggtctcactgccaagaagctgctgctgctgcaatcccagctggagcagttgcaggaggagaacttcaggctggagagtggcagggaggatgagcgcctgcgctgtgccgagctggagagggaggttgcggagctgcagcaccggaaccaggcgctgactagcctggcccaggaggcacaggccctgaaggatgagatggatgaactacggcagtcttcggagcgtgctgggcagctggaggccacgctgaccagttgccggcgccgcttgggcgagctgagggagctgcggcggcaggtgcggcagctggaggaacgcaacgccggccacgccgagcgcacgcgacaactggaggatgagctacgccgagcgggctccctgcgcgcccagctggaggcgcagcggcggcaggtgcaggaactgcagggccagcggcaggaggaggccatgaaggccgagaaatggctatttgaatgccgcaacctggaggaaaagtatgagtcggtgacaaaggagaaggagcggctgttggcggagcgggactccttgcgggaggccaatgaggagctgcgctgcgcccagctgcagccgcgggggttgacccaggccgatcctcatggatccactcacaccggggatactagcgcgaaaccggctgcggagcaggtagacgcccgggctcgtgggacaacgtggcgagagc

SEQ ID NO: 318454 - DNA, 1734 bp, Homo sapiens
tgccggcccttgtccccttcccccactatcctctccacccgctcccaggggctggagtctggaaaaccacgcgggaggaggttgtggggatatggacgagcatccgaggcccccgggtgcgtacggctgcgcatgagtgggctgtaatcgggtgtctggggttacagacgttccacgttccgtctccctgtgccagccctcaggacctgagcagcggccttgccgtagcctatgtgctgaaccagatagacccctcctggttcaacgaggcatggctccagggcatctcggaagatccaggtcccaactggaagctgaaggtgacaagtggactcctgattagaggacagactggtgaagagatgaccagggacgggccagctaggcacatgtcctgggtgatgggcaggaagagggacagatgtctggtgatcaaccatttgttcatccattcatctatggagtactcaccctgtgccaggcctgggcattcagcaaggaataacacagacaaaaacctgccccacacagccatcattctagtgacaagcaacacatacacaaccataaaaattaacttccaggctgggcgcagtggctcatgcctgtaatcccaacactttgagaggctaaagtgggtggatcacctggggccaggagttcaagaccagcctggccaacaagttgaaaccccatctctactaaaaatacaaaaattagctgggtggggtggtgtgcacctgtaatcccagttacttgggaggctgagacatgagaatcacttgaacctgggaggtggaggatgcagtgagctgagattgagccattgcactccagcctgggcaacagagcgagactcttgtctcaagaagaagaaaaaaagaaaaagaaaaagaaaaagaaaaaacttttgatgccagtagttctgtgaagacaacaaaaaagcagggctttgagagagagcaatgagggcataggtggctgattacatcagatgggttaatctccaagtgaaatttgggggaacggtgttccaggcatagggaatagcagatgtaaaggccgtgatttgggaataaacttggtgtgatggaggaatggcagagagggcagaacagagcaagagggcaagatttgtaggagatgaggtcatcaggggcctggcaggccatggtgggggtgtggattctatttttaagtgctgtggaaagtcaaggcagggttttagcagagcaaagatgcaacctggcttgggctttataaagctccccctggctgcatggagagaaataaaatgtaggcagcaaaagtggaagaggagaggcagctggtgcactaatccaggtgagaggtaaagatggatgggtagggctgaaggatggtggggcaggtggtgagaagtgacttggttctggagacatatgaaggaagatggtcaggcaggccgggcacagtggctcatgcctgtaatcccagcaattttagaggctgaggtgggaggattgcttgagctcaggagcttgagaccagcctgggctacatagcaaaacctcctctctacaaataaaaaaaagtagtcgattgtggtggcatatgcctgtagtcccagctactgggaggcagagataggaggattgcttgaccccaggaggtcgaggctgcagtgagccaagattgcaccactgcactccagcctgggtgacagagccagaccctgtcttaaaaagctaaagc

SEQ ID NO: 318455 - DNA, 1266 bp, Homo sapiens
tgccggcccttgtccccttcccccactatcctctccacccgctcccaggggctggagtctggaaaaccacgcgggaggaggttgtggggatatggacgagcatccgaggcccccgggtgcgtacggctgcgcatgagtgggctgtaatcgggtgtctggggttacagacgttccacgttccgtctccctgtgccagccctcaggacctgagcagcggccttgccgtagcctatgtgctgaaccagatagacccctcctggttcaacgaggcatggctccagggcatctcggaagatccaggtcccaactggaagctgaaggtgacaagtggactcctgattagaggacagactggtgaagagatgaccagggacgggccagctaggcacatgtcctgggtgatgggcaggaagagggacagatgtctggtgatcaaccatttgttcatccattcatctatggagtactcaccctgtgccaggcctgggcattcagcaaggaataacacagacaaaaacctgccccacacagccatcattctagtgacaagcaacacatacacaaccataaaaattaacttccaggctgggcgcagtggctcatgcctgtaatcccaacactttgagaggctaaagtgggtggatcacctggggccaggagttcaagaccagcctggccaacaagttgaaaccccatctctactaaaaatacaaaaattagctgggtggggtggtgtgcacctgtaatcccagttacttgggaggctgagacatgagaatcacttgaacctgggaggtggaggatgcagtgagctgagattgagccattgcactccagcctgggcaacagagcgagactcttgtctcaagaagaagaaaaaaagaaaaagaaaaagaaaaagaaaaaacttttgatgccagtagttctgtgaagacaacaaaaaagcagggctttgagagagagcaatgagggcataggtggctgattacatcagatgggttaatctccaagtgaaatttgggggaacggtgttccaggcatagggaatagcagatgtaaaggccgtgatttgggaataaacttgagaaatatttctttgaatcagggagctagcacctttgagttttccagaaaagcacgtctccccagtgtgtgcactgtgatgtggtgtccaagatccacattgaacatacttcaactacttgtacttagataacatcactctgaagtatactaccaaaatgtcaattgagaagagctgaaaat

SEQ ID NO: 318456 - DNA, 1142 bp, Homo sapiens
ctcagcctctggagtagctgggaataggcgcgtgccaccacgcccagctacttttattttttattttatttttgtagagacggagtctcgctgtgttgccagggctgttctcgaactcctgggttcaagcagtcctccctcctcgacctcccaaagtgctgggattacagatgtgaaccatcgcgccaggcattttattttattttattttatttattttttttgagacagtctcactcttccagcctgggcaacagagcgagactcttgtctcaagaagaagaaaaaaagaaaaagaaaaagaaaaagaaaaaacttttgatgccagtagttctgtgaagacaacaaaaaagcagggctttgagagagagcaatgagggcataggtggctgattacatcagatgggttaatctccaagtgaaatttgggggaacggtgttccaggcatagggaatagcagatgtaaaggccgtgatttgggaataaacttggtgtgatggaggaatggcagagagggcagaacagagcaagagggcaagatttgtaggagatgaggtcatcaggggcctggcaggccatggtgggggtgtggattctatttttaagtgctgtggaaagtcaaggcagggttttagcagagcaaagatgcaacctggcttgggctttataaagctccccctggctgcatggagagaaataaaatgtaggcagcaaaagtggaagaggagaggcagctggtgcactaatccaggtgagaggtaaagatggatgggtagggctgaaggatggtggggcaggtggtgagaagtgacttggttctggagacatatgaaggaagatggtcaggcaggccgggcacagtggctcatgcctgtaatcccagcaattttagaggctgaggtgggaggattgcttgagctcaggagcttgagaccagcctgggctacatagcaaaacctcctctctacaaataaaaaaaagtagtcgattgtggtggcatatgcctgtagtcccagctactgggaggcagagataggaggattgcttgaccccaggaggtcgaggctgcagtgagccaagattgcaccactgcactccagcctgggtgacagagccagaccctgtcttaaaaagctaaagc

SEQ ID NO: 318457 - DNA, 206 bp, Homo sapiens
cccagcagcgtggagctgatgggccacctcttccgccagcagcccggcggatcgaggagctgcagcataacttgcagaagaaggacgcggacttgcgggccatggaggagcgataccgccgctacgtggacaaggcccgcatggtgaggacgctgggtgttcccacaagttgcctgccctggcttcttactttttgtgcctcctat

SEQ ID NO: 318458 - DNA, 431 bp, Homo sapiens
gcttccctctgtgttggaggcaggagggcagcctctgggctggggttattgggcagaactggccttgacgggaggatggagaggttctcaggttggatagtagatactttgaaggctggcctcagatatccagttcattacaatgccccttcccactcctcagctcatgaccaaagacactcctgactccctgtcaccagagacgtatggcaactttgacagccaggtaagagatttgggggaaaggtgttccaggcacagggatcagcaaatccaaaggccgggagttggggataagtttgctgtgattaaccttgtgacttaaccttgttaaaggtccagaccccacttacagatgctcagggtagcctaagggggaggggcttgtccttaagcctgtaagccacgcccatcttccagggtgctagcca

SEQ ID NO: 318459 - DNA, 913 bp, Homo sapiens
  misc_feature (861)..(861): n is a, c, g, or t
  misc_feature (869)..(869): n is a, c, g, or t
  misc_feature (871)..(871): n is a, c, g, or t
  misc_feature (878)..(879): n is a, c, g, or t
  misc_feature (881)..(881): n is a, c, g, or t
  misc_feature (884)..(885): n is a, c, g, or t
ctgcccgatgccccatacaggccattgtaagtaccatgggcccaggatggcaccccctaccctcaccctgggaaggaagaattagggcctctctggatcccccactcaccttgcctcttctctctcccagtccattttgctgaaaaggaagctggaggaacatttgcagaagcttcatgaggcagatctggagttgcagaggaagcgggagtacattgaggagctggagccacccactgacagcagcacagcccggcggatcgaggagctgcagcataacttgcagaagaaggacgcggacttgcgggccatggaggagcgataccgccgctacgtggacaaggcccgcatggtcatgcagaccatggaacccaagcagcggccagctgcgggggcacctccagaactccattccctgaggacacagctccgagaacgggatgtccgcatccgacacctggagatggactttgagaaaagccgaagtcagcgggagcaggaagaaaagctgctcatcagtgcctggtataatatgggcatggccttgcagcagcgagctggggaggagcgggcgcctgcccatgcccagtcattcctggcacagcagcggctggcaaccaattctcgccgtggacccttgggacgcctggcatctctgaaccttcgccccactgacaagcactgacagacctcacaatcaagccagcctgggctccacccaccctggcttcctccagctcacatggcgcccagcactgggcttcagccaggtgctcgagagctttgaggccatgatctctgctcttccctctcccagattggtggggagggagagaaatagccggcttagcaggacggggncccccggnanggggccnnancgnnttggaaaaggcccgaaaaaaacaaaaaa

SEQ ID NO: 318460 - DNA, 2549 bp, Homo sapiens
tgccggcccttgtccccttcccccactatcctctccacccgctcccaggggctggagtctggaaaaccacgcgggaggaggttgtggggatatggacgagcatccgaggcccccgggtgcgtacggctgcgcatgagtgggctgtaatcgggtgtctggggttacagacgttccacgttccgtctccctgtgccagccctcaggacctgagcagcggccttgccgtagcctatgtgctgaaccagatagacccctcctggttcaacgaggcatggctccagggcatctcggaagatccaggtcccaactggaagctgaaggtcagcaatctgaagatggtcttacggagcctagtagagtactcccaggatgtcctggcgcatcctgtgtcagaagagcatctcccagatgtgagcctcattggagagttctcagacccggcagagctcggcaagctgcttcagctggtgctgggctgtgccatcagttgcgagaaaaagcaggaccacatccagagaatcatgacgctggaagaatcggttcagcatgtggtgatggaagccatccaagagctcatgaccaaagacactcctgactccctgtcaccagagacgtatggcaactttgacagccagtcccgcaggtactatttcctaagtgaggaggctgaggagggggacgaattacagcagcgctgtctggatctggagcggcagctgatgctcctgtcagaggagaagcagagcctggcgcaagagaatgcagggctgcgggagcggatgggccggcctgaaggcgagggtaccccaggtctcactgccaagaagctgctgctgctgcaatcccagctggagcagttgcaggaggagaacttcaggctggagagtggcagggaggatgagcgcctgcgctgtgccgagctggagagggaggttgcggagctgcagcaccggaaccaggcgctgactagcctggcccaggaggcacaggccctgaaggatgagatggatgaactacggcagtcttcggagcgtgctgggcagctggaggccacgctgaccagttgccggcgccgcttgggcgagctgagggagctgcggcggcaggtgcggcagctggaggaacgcaacgccggccacgccgagcgcacgcgacaactggaggatgagctacgccgagcgggctccctgcgcgcccagctggaggcgcagcggcggcaggtgcaggaactgcagggccagcggcaggaggaggccatgaaggccgagaaatggctatttgaatgccgcaacctggaggaaaagtatgagtcggtgacaaaggagaaggagcggctgttggcggagcgggactccttgcgggaggccaatgaggagctgcgctgcgcccagctgcagccgcgggggttgacccaggccgatccctcactggatcccacctccacacccgtggataacttagccgcagagatcctgcctgcggagctcagggagacgctcctgcggcttcagctggagaacaagcggctgtgcaggcaggaggcggccgaccgggagcggcaggaggagctgcagcgccacctggaggatgccaaccgcgcgcgccacgggttggagacgcagcaccggctgaaccagcagcagctatccgagctgcgggcccaggtggaggacctgcagaaagccctgcaggagcaggggggcaagactgaagattccattttgctgaaaaggaagctggaggaacatttgcagaagcttcatgaggcagatctggagttgcagaggaagcgggagtacattgaggagctggagccacccactgacagcagcacagcccggcggatcgaggagctgcagcataacttgcagaagaaggacgcggacttgcgggccatggaggagcgataccgccgctacgtggacaaggcccgcatggtcatgcagaccatggaacccaagcagcggccagctgcgggggcacctccagaactccattccctgaggacacagctccgagaacgggatgtccgcatccgacacctggagatggactttgagaaaagccgaagtcagcgggagcaggaagaaaagctgctcatcagtgcctggtataatatgggcatggccttgcagcagcgagctggggaggagcgggcgcctgcccatgcccagtcattcctggcacagcagcggctggcaaccaattctcgccgtggacccttgggacgcctggcatctctgaaccttcgccccactgacaagcactgacagacctcacaatcaagccagcctgggctccacccaccctggcttcctccagctcacatggcgcccagcactgggcttcagccaggtgctcgagagctttgaggccatgatctctgctcttccctctcccagattggtggggagggagggcgggaggtagatataggcctgttctttttagcaatgtgattcttgttgttgattctctctctggagttcatgtgctgcctcaggagactctgattttatatttgagaaaaataaaggcgttcaatctgc

SEQ ID NO: 318461 - DNA, 2435 bp, Homo sapiens
aaaaaaaaaaaaaaaaaaagaaacaaagatggtcaggcagacaaaaggggcagacagccagacaggtcacccctagaggaaggcgcacgcagacagaataggatgagatgagcagggaaggagaagtgaggtggagagaggatgggacctacagattcagagtgggaggcctctgaacttgtccacagttccttgttcctccctaggtcagcaatctgaagatggtcttacggagcctagtagagtactcccaggatgtcctggcgcatcctgtgtcagaagagcatctcccagatgtgagcctcattggagagttctcagacccggcagagctcggcaagctgcttcagctggtgctgggctgtgccatcagttgcgagaaaaagcaggaccacatccagagaatcatgacgctggaagaatcggttcagcatgtggtgatggaagccatccaagagctcatgaccaaagacactcctgactccctgtcaccagagacgtatggcaactttgacagccagtcccgcaggtactatttcctaagtgaggaggctgaggagggggacgaattacagcagcgctgtctggatctggagcggcagctgatgctcctgtcagaggagaagcagagcctggcgcaagagaatgcagggctgcgggagcggatgggccggcctgaaggcgagggtaccccaggtctcactgccaagaagctgctgctgctgcaatcccagctggagcagttgcaggaggagaacttcaggctggagagtggcagggaggatgagcgcctgcgctgtgccgagctggagagggaggttgcggagctgcagcaccggaaccaggcgctgactagcctggcccaggaggcacaggccctgaaggatgagatggatgaactacggcagtcttcggagcgtgctgggcagctggaggccacgctgaccagttgccggcgccgcttgggcgagctgagggagctgcggcggcaggtgcggcagctggaggaacgcaacgccggccacgccgagcgcacgcgacaactggaggatgagctacgccgagcgggctccctgcgcgcccagctggaggcgcagcggcggcaggtgcaggaactgcagggccagcggcaggaggaggccatgaaggccgagaaatggctatttgaatgccgcaacctggaggaaaagtatgagtcggtgacaaaggagaaggagcggctgttggcggagcgggactccttgcgggaggccaatgaggagctgcgctgcgcccagctgcagccgcgggggttgacccaggccgatccctcactggatcccacctccacacccgtggataacttagccgcagagatcctgcctgcggagctcagggagacgctcctgcggcttcagctggagaacaagcggctgtgcaggcaggaggcggccgaccgggagcggcaggaggagctgcagcgccacctggaggatgccaaccgcgcgcgccacgggttggagacgcagcaccggctgaaccagcagcagctatccgagctgcgggcccaggtggaggacctgcagaaagccctgcaggagcaggggggcaagactgaagattccattttgctgaaaaggaagctggaggaacatttgcagaagcttcatgaggcagatctggagttgcagaggaagcgggagtacattgaggagctggagccacccactgacagcagcacagcccggcggatcgaggagctgcagcataacttgcagaagaaggacgcggacttgcgggccatggaggagcgataccgccgctacgtggacaaggcccgcatggtcatgcagaccatggaacccaagcagcggccagctgcgggggcacctccagaactccattccctgaggacacagctccgagaacgggatgtccgcatccgacacctggagatggactttgagaaaagccgaagtcagcgggagcaggaagaaaagctgctcatcagtgcctggtataatatgggcatggccttgcagcagcgagctggggaggagcgggcgcctgcccatgcccagtcattcctggcacagcagcggctggcaaccaattctcgccgtggacccttgggacgcctggcatctctgaaccttcgccccactgacaagcactgacagacctcacaatcaagccagcctgggctccacccaccctggcttcctccagctcacatggcgcccagcactgggcttcagccaggtgctcgagagctttgaggccatgatctctgctcttccctctcccagattggtggggagggagggcgggaggtagatataggcctgttctttttagcaatgtgattcttgttgttgattctctctctggagttcatgtgctgcctcaggagactctgattttatatttgagaaaaataaaggcgttcaatctgc

SEQ ID NO: 318462 - DNA, 2560 bp, Homo sapiens
tgccggcccttgtccccttcccccactatcctctccacccgctcccaggggctggagtctggaaaaccacgcgggaggaggttgtggggatatggacgagcatccgaggcccccggttacagacgttccacgttccgtctccctgtgccagccctcaggacctgagcagcggccttgccgtagcctatgtgctgaaccagatagacccctcctggttcaacgaggcatggctccagggcatctcggaagatccaggtcccaactggaagctgaaggtgacaagtggactcctgattagaggacagactggtcagcaatctgaagatggtcttacggagcctagtagagtactcccaggatgtcctggcgcatcctgtgtcagaagagcatctcccagatgtgagcctcattggagagttctcagacccggcagagctcggcaagctgcttcagctggtgctgggctgtgccatcagttgcgagaaaaagcaggcctcccccaccttgatccccagaccacatccagagaatcatgacgctggaagaatcggttcagcatgtggtgatggaagccatccaagagctcatgaccaaagacactcctgactccctgtcaccagagacgtatggcaactttgacagccagtcccgcaggtactatttcctaagtgaggaggctgaggagggggacgaattacagcagcgctgtctggatctggagcggcagctgatgctcctgtcagaggagaagcagagcctggcgcaagagaatgcagggctgcgggagcggatgggccggcctgaaggcgagggtaccccaggtctcactgccaagaagctgctgctgctgcaatcccagctggagcagttgcaggaggagaacttcaggctggagagtggcagggaggatgagcgcctgcgctgtgccgagctggagagggaggttgcggagctgcagcaccggaaccaggcgctgactagcctggcccaggaggcacaggccctgaaggatgagatggatgaactacggcagtcttcggagcgtgctgggcagctggaggccacgctgaccagttgccggcgccgcttgggcgagctgagggagctgcggcggcaggtgcggcagctggaggaacgcaacgccggccacgccgagcgcacgcgacaactggaggatgagctacgccgagcgggctccctgcgcgcccagctggaggcgcagcggcggcaggtgcaggaactgcagggccagcggcaggaggaggccatgaaggccgagaaatggctatttgaatgccgcaacctggaggaaaagtatgagtcggtgacaaaggagaaggagcggctgttggcggagcgggactccttgcgggaggccaatgaggagctgcgctgcgcccagctgcagccgcgggggttgacccaggccgatccctcactggatcccacctccacacccgtggataacttagccgcagagatcctgcctgcggagctcagggagacgctcctgcggcttcagctggagaacaagcggctgtgcaggcaggaggcggccgaccgggagcggcaggaggagctgcagcgccacctggaggatgccaaccgcgcgcgccacgggttggagacgcagcaccggctgaaccagcagcagctatccgagctgcgggcccaggtggaggacctgcagaaagccctgcaggagcaggggggcaagactgaagattccattttgctgaaaaggaagctggaggaacatttgcagaagcttcatgaggcagatctggagttgcagaggaagcgggagtacattgaggagctggagccacccactgacagcagcacagcccggcggatcgaggagctgcagcataacttgcagaagaaggacgcggacttgcgggccatggaggagcgataccgccgctacgtggacaaggcccgcatggtcatgcagaccatggaacccaagcagcggccagctgcgggggcacctccagaactccattccctgaggacacagctccgagaacgggatgtccgcatccgacacctggagatggactttgagaaaagccgaagtcagcgggagcaggaagaaaagctgctcatcagtgcctggtataatatgggcatggccttgcagcagcgagctggggaggagcgggcgcctgcccatgcccagtcattcctggcacagcagcggctggcaaccaattctcgccgtggacccttgggacgcctggcatctctgaaccttcgccccactgacaagcactgacagacctcacaatcaagccagcctgggctccacccaccctggcttcctccagctcacatggcgcccagcactgggcttcagccaggtgctcgagagctttgaggccatgatctctgctcttccctctcccagattggtggggagggagggcgggaggtagatataggcctgttctttttagcaatgtgattcttgttgttgattctctctctggagttcatgtgctgcctcaggagactctgattttatatttgagaaaaataaaggcgttcaatctgc

SEQ ID NO: 318463 - DNA, 1387 bp, Homo sapiens
aaaaaaaaaaaaaaaaaaagaaacaaagatggtcaggcagacaaaaggggcagacagccagacaggtcacccctagaggaaggcgcacgcagacagaataggatgagatgagcagggaaggagaagtgaggtggagagaggatgggacctacagattcagagtgggaggcctctgaacttgtccacagttccttgttcctccctaggtcagcaatctgaagatggtcttacggagcctagtagagtactcccaggatgtcctggcgcatcctgtgtcagaagagcatctcccagatgtgagcctcattggagagttctcagacccggcagagctcggcaagctgcttcagctggtgctgggctgtgccatcagttgcgagaaaaagcaggaccacatccagagaatcatgacgctggaagaatcggttcagcatgtggtgatggaagccatccaagagctcatgaccaaagacactcctgactccctgtcaccagagacgtatggcaactttgacagccagccctgcaggagcaggggggcaagactgaagattccattttgctgaaaaggaagctggaggaacatttgcagaagcttcatgaggcagatctggagttgcagaggaagcgggagtacattgaggagctggagccacccactgacagcagcacagcccggcggatcgaggagctgcagcataacttgcagaagaaggacgcggacttgcgggccatggaggagcgataccgccgctacgtggacaaggcccgcatggtcatgcagaccatggaacccaagcagcggccagctgcgggggcacctccagaactccattccctgaggacacagctccgagaacgggatgtccgcatccgacacctggagatggactttgagaaaagccgaagtcagcgggagcaggaagaaaagctgctcatcagtgcctggtataatatgggcatggccttgcagcagcgagctggggaggagcgggcgcctgcccatgcccagtcattcctggcacagcagcggctggcaaccaattctcgccgtggacccttgggacgcctggcatctctgaaccttcgccccactgacaagcactgacagacctcacaatcaagccagcctgggctccacccaccctggcttcctccagctcacatggcgcccagcactgggcttcagccaggtgctcgagagctttgaggccatgatctctgctcttccctctcccagattggtggggagggagggcgggaggtagatataggcctgttctttttagcaatgtgattcttgttgttgattctctctctggagttcatgtgctgcctcaggagactctgattttatatttgagaaaaataaaggcgttcaatctgc

SEQ ID NO: 318464 - DNA, 1082 bp, Homo sapiens
ggaagatggtggctgaaccagcttgggagctgtgggatgggaagaagtggacagcaggggctgttccggggcatacctgctaagggtgcggagggttgtggctctgacagctgtggagccggtgggaccagggcacacagccccaggcatgaggggcaggcagagagggctctgtggccatgtaggggcatttctggctggcggggaggtctgtggctaccactgggacaaaagagaagccagcccggaggtcagcccactgctgctcatccccggcccacaggcagaagcttcatgaggcagatctggagttgcagaggaagcgggagtacattgaggagctggagccacccactgacagcagcacagcccggcggatcgaggagctgcagcataacttgcagaagaaggacgcggacttgcgggccatggaggagcgataccgccgctacgtggacaaggcccgcatggtcatgcagaccatggaacccaagcagcggccagctgcgggggcacctccagaactccattccctgaggacacagctccgagaacgggatgtccgcatccgacacctggagatggactttgagaaaagccgaagtcagcgggagcaggaagaaaagctgctcatcagtgcctggtataatatgggcatggccttgcagcagcgagctggggaggagcgggcgcctgcccatgcccagtcattcctggcacagcagcggctggcaaccaattctcgccgtggacccttgggacgcctggcatctctgaaccttcgccccactgacaagcactgacagacctcacaatcaagccagcctgggctccacccaccctggcttcctccagctcacatggcgcccagcactgggcttcagccaggtgctcgagagctttgaggccatgatctctgctcttccctctcccagattggtggggagggagggcgggaggtagatataggcctgttctttttagcaatgtgattcttgttgttgattctctctctggagttcatgtgctgcctcaggagactctgattttatatttgagaaaaataaaggcgttcaatctgc

SEQ ID NO: 318465 - DNA, 790 bp, Homo sapiens
ggacctagtgaccagagggtggggagatcccagagcccagcagcgtggagctgatgggccacctcttccgccagcagcccggcggatcgaggagctgcagcataacttgcagaagaaggacgcggacttgcgggccatggaggagcgataccgccgctacgtggacaaggcccgcatggtcatgcagaccatggaacccaagcagcggccagctgcgggggcacctccagaactccattccctgaggacacagctccgagaacgggatgtccgcatccgacacctggagatggactttgagaaaagccgaagtcagcgggagcaggaagaaaagctgctcatcagtgcctggtataatatgggcatggccttgcagcagcgagctggggaggagcgggcgcctgcccatgcccagtcattcctggcacagcagcggctggcaaccaattctcgccgtggacccttgggacgcctggcatctctgaaccttcgccccactgacaagcactgacagacctcacaatcaagccagcctgggctccacccaccctggcttcctccagctcacatggcgcccagcactgggcttcagccaggtgctcgagagctttgaggccatgatctctgctcttccctctcccagattggtggggagggagggcgggaggtagatataggcctgttctttttagcaatgtgattcttgttgttgattctctctctggagttcatgtgctgcctcaggagactctgattttatatttgagaaaaataaaggcgttcaatctgc

SEQ ID NO: 318466 - DNA, 1827 bp, Homo sapiens
tgccggcccttgtccccttcccccactatcctctccacccgctcccaggggctggagtctggaaaaccacgcgggaggaggttgtggggatatggacgagcatccgaggcccccgggtgcgtacggctgcgcatgagtgggctgtaatcgggtgtctggggttacagacgttccacgttccgtctccctgtgccagccctcaggacctgagcagcggccttgccgtagcctatgtgctgaaccagatagacccctcctggttcaacgaggcatggctccagggcatctcggaagatccaggtcccaactggaagctgaaggtgacaagtggactcctgattagaggacagactggtgaagagatgaccagggacgggccagctaggcacatgtcctgggtgatgggcaggaagagggacagatgtctggtgatcaaccatttgttcatccattcatctatggagtactcaccctgtgccaggcctgggcattcagcaaggaataacacagacaaaaacctgccccacacagccatcattctagtgacaagcaacacatacacaaccataaaaattaacttccaggctgggcgcagtggctcatgcctgtaatcccaacactttgagaggctaaagtgggtggatcacctggggccaggagttcaagaccagcctggccaacaagttgaaaccccatctctactaaaaatacaaaaattagctgggtggggtggtgtgcacctgtaatcccagttacttgggaggctgagacatgagaatcacttgaacctgggaggtggaggatgcagtgagctgagattgagccattgcactccagcctgggcaacagagcgagactcttgtctcaagaagaagaaaaaaagaaaaagaaaaagaaaaagaaaaaacttttgatgccagtagttctgtgaagacaacaaaaaagcagggctttgagagagagcaatgagggcataggtggctgattacatcagatgggttaatctccaagtgaaatttgggggaacggtgttccaggcatagggaatagcagatgtaaaggccgtgatttgggaataaacttggtgtgatggaggaatggcagagagggcagaacagagcaagagggcaagatttgtaggagatgaggtcatcaggggcctggcaggccatggtgggggtgtggattctatttttaagtgctgtggaaagtcaaggcagggttttagcagagcaaagatgcaacctggcttgggctttataaagctccccctggctgcatggagagaaataaaatgtaggcagcaaaagtggaagaggagaggcagctggtgcactaatccaggtgagaggtaaagatggatgggtagggctgaaggatggtggggcaggtggtgagaagtgacttggttctggagacatatgaaggaagatggtcaggcctgggcattcagcaaggaataaccagacaaaacctgccccacaagccatcattctagtgacaagcaacacatacacaaccataaaaattaacttctggctgggtgccgtggctcatggctgtaatcccagcactttgggaggtcaaggcaggcggaacatgaggtcaggagtttgagaccagcctggccaacatggtgaaaccccatctctactaaaaatacaaaaattagctgggcatggtggtgggtgcctgtaatcccagctactcaggaggctgaggcaggaaaatcatttgaacccgggaggcggaggttgcagttagctgagattgtgccactgcgctccagcctaggcgacagggcaagagtccatctcaaaaaaaaaa

SEQ ID NO: 318467 - DNA, 826 bp, Homo sapiens
tgccggcccttgtccccttcccccactatcctctccacccgctcccaggggctggagtctggaaaaccacgcgggaggaggttgtggggatatggacgagcatccgaggcccccgggtgcgtacggctgcgcatgagtgggctgtaatcgggtgtctggggttacagacgttccacgttccgtctccctgtgccagccctcaggacctgagcagcggccttgccgtagcctatgtgctgaaccagatgtgagtggagctgaaggggaggatcccaaaagtgtcccccagtctgctcatcccaccttctcgcccccagagacccctcctggttcaacgaggcatggctccagggcatctcggaagatccaggtcccaactggaagctgaaggtgacaagtggactcctgattagaggacagactggtcagcaatctgaagatggtcttacggagcctagtagagtactcccaggatgtcctggcgcatcctgtgtcagaagagcatctcccagatgtgagcctcattggagagttctcagacccggcagagctcggcaagctgcttcagctggtgctgggctgtgccatcagttgcgagaaaaagcaggcctcccccaccttgatccccagaccacatccagagaatcatgacgctggaagaatcggttcagcatgtggtgatggaagccatccaagagctcatgaccaaagacactcctgactccctgtcaccagagacgtatggcaactttgacagccagatggagtctcactctgtcacccaggctggagtgcagtggcacgatctcggctcactgcaacctcc

SEQ ID NO: 318468 - DNA, 369 bp, Homo sapiens
aatgggagttgtcaggtttcctcaatcccaaggtggctaaaagcatgccagccctgtagcagatcgagggcgctccctgcttcttccttaaagggccctgtccaggctggtcgggtgggcaggcattaaccatgtaactgtactttctcacttgtgttggggcaggtaacttcctgctaggggtttcctctctatgggtgttgtagacctagaaatagagtcctaggtgctcagtgttacggggccagctgacactcccgccagcagggaaagaacaggaggttgcccccggatcggctatcaccaggagacccaggctcaggccacaggccctgtggtctccaccccgcagtcagaccagcgtcatgg

SEQ ID NO: 318469 - DNA, 4940 bp, Homo sapiens
gggctttgtagactcaagactgctgagaagaatcaggcagtcatgtaaaggggttgaaggcatgtgtgtttccttccaggagtatgaactgtgtgaagagtggggctgcctgtaccccattccaagagaacatttaatcagccttcatcaaaagcatcttctccaccttctagaaagaagagatcatgacaaggctctgcaactcctgcgaagaatccctgaccccaccatgtgccttgaagtgacagagcaatccctcgaccagcacactagcttggccacttctcacttcttggccaactacctcaccacccacttctatggacaactgactgctgtccgacaccgtgaaatccaggcgctgtatgtgggatccaagattctgctgaccctgcctgagcagcaccgggccagctattcccacttgtcctctaaccccctgttcatgctggagcagctgcttatgaacatgaaggtggattgggccactgtggctgtgcagactctccagcagctgctggttggacaggagattggcttcactatggacgaggtggactcactgctttccagatacgcagagaaagccctggactttccataccctcagagggagaaacgatcagattctgtgattcacctccaagaaattgtccaccaggctgcagatcccgagaccctccctagatcaccatcagcagagttctctcctgctgctcctcctggtatctccagtatacattcccctagtctaagggaaaggagtttcccaccaacccagccctcacaggaatttgtgcccccagcgacaccccctgccaggcaccagtgggtaccggatgagactgagagtatctgcatggtctgctgcagggagcacttcaccatgtttaacaggcgtcatcattgtcgccgctgtggccggctagtgtgcagctcctgctccactaagaaaatggtggttgaaggctgcagagagaaccctgctcgtgtgtgtgatcagtgctatagttactgcaacaaagatgtaccagaggagccttcagaaaaaccagaagctctagacagctccaagagtgaaagccctccatactcgtttgtggtgagagtccccaaagcagatgaggtggaatggattttggatctcaaagaggaggaaaatgagctggtgcggagtgaattttactatgagcaggcccccagcgcctccttgtgcattgccatcctgaatctgcaccgggacagcattgcctgtggtcaccagctgattgagcactgctgcaggctctccaagggcctcaccaacccagaggtggatgccgggctgctcacggacatcatgaagcagctgctgttcagcgccaagatgatgttcgtcaaagccggccagagccaagacttggctctttgtgacagctacatcagcaaggtagatgtgctgaatattttagttgctgctgcctatcgccacgtgccatctttggatcagatcttgcagccagctgcagtaaccaggctaaggaaccagcttttggaagccgagtactaccaactgggcgttgaggtctccacaaagactgggcttgataccaccggggcgtggcatgcttggggcatggcctgcctcaaagccgggaacctcactgctgcacgggagaagttcagtcgctgtctgaagcccccatttgacctcaatcagctgaatcatggctcaaggctggtgcaggatgtggttgagtacctagagtccacagtgaggccctttgtatccttgcaagatgacgattactttgccaccctgagggaactggaagctacccttcggacgcagagcctttctctggcagtgattcctgaagggaaaatcatgaacaacacctactaccaggaatgcctcttctacctgcacaactatagcaccaacctggccatcatcagcttctacgtgaggcacagctgcctgcgggaagctcttctgcaccttctcaacaaggagagtcctccagaagtttttatagaaggcattttccaaccaagctataaaagtgggaagctacacactttggagaacttgctagaatccattgatccaaccttggagagctggggaaagtacttgattgctgcctgccaacatttacagaagaagaactactaccacattctgtatgagctgcagcagtttatgaaggaccaagttcgggccgccatgacctgtattcggttcttcagtcacaaagcaaagtcatatacagaactgggagagaagctctcatggctacttaaggccaaggaccacctgaagatctacctccaagaaacatcccgcagctctggaaggaagaaaaccacattcttcagaaagaagatgactgcagctgatgtgtcaaggcacatgaacacacttcagctgcagatggaagtgaccaggttcttgcatcggtgcgaaagtgctgggacctctcaaatcaccactttgcctctgccaaccctgtttggaaataaccacatgaaaatggatgttgcctgcaaggtcatgctgggagggaaaaatgtagaagatggttttggaattgctttccgtgttctgcaggacttccagctggatgctgccatgacctactgcagagctgcccgccagttggtggagaaagagaagtacagtgagatccagcaactgctcaaatgtgtcagtgagtcaggcatggcagccaaaagtgacggggacaccatcctcctcaactgcctggaagcgttcaagagaattccgccccaggagctggagggcctgatccaggcaatacacaatgatgacaacaaggttcgggcctacctgatatgttgcaaactgcgttctgcctacttgattgctgtgaagcaagaacactcacgggccacagcccttgtccagcaggtgcagcaggccgccaagagcagcggggatgcagtagtgcaagacatctgtgcccagtggcttctgacaagccacccccggggtgcccatggcccaggctccaggaagtgaccttgggcagtggggccaggaacacgtggcctgagagctgggcaacagcagtgatggcgatgccctccacctctttcctccagtggagtgggacttctctggctctgccctaggttggaaagagttggattggaccctacttgccttcccgggcaaggataggacctttcacgcaagtgccatgtttctctaaaattgtggaatctatgtgtgtttgtctggagatggccagttctttctacctcagagtgagtgagtgagtatgtgtgcacacacgtgtgcatgttcctgtgcgctgatgtttacgcccaagcatttctgaacaaatgaaactcttctccatttaaaagaggcactttactttggacttgccactctgaaaaccttccctgcgttttggttcttgacccgggttgtcctgtttgtatagtcccccctctgtggacgtgctttagtagctcctcttacctagagggcttttacagagaattagagcaacaccaaaaggattgcctcttttccttccttcccattccaaaattcagagatggctttggggcaagtgctacctgtggaataaacctgttttccaggtgtctcttctcccaagcacaagaagtcctggagtctttggaaggtagtctgaatagaagggttttcaggtgcaggcatctgaaagctgtgggtatgtgtataaatgatcaggtctgtgaggctaacacgggcaagagggaaagaaaggctaaccatccaaacagggatacaggggaggcggtggggggtggtggggggagcgggtgctcacaagcacagagctgcctgttgtgaatgtccctgctgcaaagttggtgggtgagagaatgggacttcctctttgagagtctggggagagaaaaggtggccaggatcctaggactgaatgactcgattttacctatttgagctgcagtcctgtttgcgctccttgaattggttaggaagctgcttccttttccctcctgcttcccttcagtctcttcaggaccacaggatggatatgcagacatgtggggtcattgggaagggagtgcgcttcttttctctgtcttagaaaagggagtcaagggttggctttggaattgggcctctggacagagtcagaatgagggaataatgaataggtcacatctggttggtggaaaactaggtgaagtgcttctttaatatgcactgtcttgtcttcccacgcaagatgtgacaatgtttgagaaaaggtgtgtcatactcagtgacttcaatttgcaaatgtggggcctaaagaaagctctgcagctctgaacctctcactggccagagctcagcctattggtcccatccatgatgctgagacaaacagaaactggaagctgaagtcagtgtctctggtgcttagaaaccctgtggatttccctctgaaccaagatttttagtagtaaaataaacaactcatggacatctgtcagatgagaagttttggtcctgttagagaggagaaagactgtaatgaaactactagacccatttgggctaaagtttggcttttccttccttgagtcatagaacatatccatctcccaggaaatgtccttctctggcgtctgcttgcccttctgagtctgccttttttgcactgaacataagcactttatactaatgggtcacaaatcttgcagcccttaatttgggataagaccagattttcctgacattttcctctaactcattgaactatcaaattataggcaaccactgactagactgatatgagatgaggctaaaagcctttgaacaccacgctgtagtctccaacagaaaaacaccaccaaaacagatacccatgttgaggggttgaatgttttactacaaacaagccacaataaagtgtctatcaacatgt

SEQ ID NO: 318470 - DNA, 3005 bp, Homo sapiens
cagcggacaacacggcgtgcccccctggcgggaagctcttctgcaccttctcaacaaggagagtcctccagaagtttttatagaaggcattttccaaccaagctataaaagtgggaagctacacactttggagaacttgctagaatccattgatccaaccttggagagctggggaaagtacttgattgctgcctgccaacatttacagaagaagaactactaccacattctgtatgagctgcagcagtttatgaaggaccaagttcgggccgccatgacctgtattcggttcttcagtcacaaagcaaagtcatatacagaactgggagagaagctctcatggctacttaaggccaaggaccacctgaagatctacctccaagaaacatcccgcagctctggaaggaagaaaaccacattcttcagaaagaagatgactgcagctgatgtgtcaaggcacatgaacacacttcagctgcagatggaagtgaccaggttcttgcatcggtgcgaaagtgctgggacctctcaaatcaccactttgcctctgccaaccctgtttggaaataaccacatgaaaatggatgttgcctgcaaggtcatgctgggagggaaaaatgtagaagatggttttggaattgctttccgtgttctgcaggacttccagctggatgctgccatgacctactgcagagctgcccgccagttggtggagaaagagaagtacagtgagatccagcaactgctcaaatgtgtcagtgagtcaggcatggcagccaaaagtgacggggacaccatcctcctcaactgcctggaagcgttcaagagaattccgccccaggagctggagggcctgatccaggcaatacacaatgatgacaacaaggttcgggcctacctgatatgttgcaaactgcgttctgcctacttgattgctgtgaagcaagaacactcacgggccacagcccttgtccagcaggtgcagcaggccgccaagagcagcggggatgcagtagtgcaagacatctgtgcccagtggcttctgacaagccacccccggggtgcccatggcccaggctccaggaagtgaccttgggcagtggggccaggaacacgtggcctgagagctgggcaacagcagtgatggcgatgccctccacctctttcctccagtggagtgggacttctctggctctgccctaggttggaaagagttggattggaccctacttgccttcccgggcaaggataggacctttcacgcaagtgccatgtttctctaaaattgtggaatctatgtgtgtttgtctggagatggccagttctttctacctcagagtgagtgagtgagtatgtgtgcacacacgtgtgcatgttcctgtgcgctgatgtttacgcccaagcatttctgaacaaatgaaactcttctccatttaaaagaggcactttactttggacttgccactctgaaaaccttccctgcgttttggttcttgacccgggttgtcctgtttgtatagtcccccctctgtggacgtgctttagtagctcctcttacctagagggcttttacagagaattagagcaacaccaaaaggattgcctcttttccttccttcccattccaaaattcagagatggctttggggcaagtgctacctgtggaataaacctgttttccaggtgtctcttctcccaagcacaagaagtcctggagtctttggaaggtagtctgaatagaagggttttcaggtgcaggcatctgaaagctgtgggtatgtgtataaatgatcaggtctgtgaggctaacacgggcaagagggaaagaaaggctaaccatccaaacagggatacaggggaggcggtggggggtggtggggggagcgggtgctcacaagcacagagctgcctgttgtgaatgtccctgctgcaaagttggtgggtgagagaatgggacttcctctttgagagtctggggagagaaaaggtggccaggatcctaggactgaatgactcgattttacctatttgagctgcagtcctgtttgcgctccttgaattggttaggaagctgcttccttttccctcctgcttcccttcagtctcttcaggaccacaggatggatatgcagacatgtggggtcattgggaagggagtgcgcttcttttctctgtcttagaaaagggagtcaagggttggctttggaattgggcctctggacagagtcagaatgagggaataatgaataggtcacatctggttggtggaaaactaggtgaagtgcttctttaatatgcactgtcttgtcttcccacgcaagatgtgacaatgtttgagaaaaggtgtgtcatactcagtgacttcaatttgcaaatgtggggcctaaagaaagctctgcagctctgaacctctcactggccagagctcagcctattggtcccatccatgatgctgagacaaacagaaactggaagctgaagtcagtgtctctggtgcttagaaaccctgtggatttccctctgaaccaagatttttagtagtaaaataaacaactcatggacatctgtcagatgagaagttttggtcctgttagagaggagaaagactgtaatgaaactactagacccatttgggctaaagtttggcttttccttccttgagtcatagaacatatccatctcccaggaaatgtccttctctggcgtctgcttgcccttctgagtctgccttttttgcactgaacataagcactttatactaatgggtcacaaatcttgcagcccttaatttgggataagaccagattttcctgacattttcctctaactcattgaactatcaaattataggcaaccactgactagactgatatgagatgaggctaaaagcctttgaacaccacgctgtagtctccaacagaaaaacaccaccaaaacagatacccatgttgaggggttgaatgttttactacaaacaagccacaataaagtgtctatcaacatgt

SEQ ID NO: 318471 - DNA, 4789 bp, Homo sapiens
cgtttgaatagtagccttgaaaggcggggtcgacggatagaccacgtactcctaaatgctgatggcattcgaggttttccagttgttcttcagcaaatcagtaagagtctcaattatctgcttatgtcagccagtcaaaccaaatcagagagtgtggaagaaaagggaggaggccctccacggtgcagcatcactgaactgcttcagatgtgctggcccagcctaagcgaggactgtgttgccagccacaccaccctctcccagcagctagatcaggtccttcagtcactgagagaggcactagagctgccagagcccaggactcctccactgtcttccctggtggagcaggcagcccagaaagctccagaggcagaggcccaccctgtgcagatccagactcagctcctccagaagaacctgggcaaacagaccccatcaggcagcaggcagatggactacttgggcaccttcttcagttactgcagcacccttgctgcagttctccttcaaagtttgagctctgagcctgatcatgtggaggtcaaggtaggaaatccctttgttctgctgcaacagagctcttcccaactggtgtcacatctcctgtttgagagacaagttcccccagagagactggcagcccttctggcccaagagaatctcagcctaagtgtgccacaggtcatcgtcagctgctgctgtgagccccttgctctttgctcatcccggcaaagccagcagacctcctccctcctgactcgtctgggtactctggcccagctacacgcctctcactgcctggatgacctcccactttctacaccgagctccccgaggacaactgagaaccctacattggaaagaaagccctactcctccccaagggactcatcactcccagccctcacctcctctgccttggcctttcttaagtcacgctcaaagctcctagctacggtggcctgcctgggggcttccccgaggttaaaggtcagcaaacccagcttgtcatggaaggaacttcgtggccgcagggaggtgcctctggctgcagagcaggtagcccgggagtgtgagcgccttctggaacaattccctctgtttgaggccttcctcctggctgcctgggagcccctgcgagggtctttgcagcaggggcagagtctggcagtgaatctctgtggttgggccagtctttctaccgttctcctgggcctacattctcccattgccctagatgtactgagtgaggcttttgaggaatccttggtggccagagattggtcccgggcccttcagctcactgaagtgtacgggcgagatgtggacgatttgagcagcataaaggatgcagtcctgagctgtgctgtggcatgtgacaaagaaggttggcaatacctgtttcccgtgaaggatgcatctctgagaagtcggctggccctacagtttgtggacaggtggcccctggagtcatgcctggagattctggcctactgcatttcagacacggctgtccaagaaggactaaagtgtgagctacagaggaagctggcggagctgcaggtgtatcagaagattctgggtttgcagtctcccccagtgtggtgtgactggcagaccttgaggagctgttgtgttgaggacccatcaactgtcatgaacatgattctagaagcacaggagtatgaactgtgtgaagagtggggctgcctgtaccccattccaagagaacatttaatcagccttcatcaaaagcatcttctccaccttctagaaagaagagatcatgacaaggctctgcaactcctgcgaagaatccctgaccccaccatgtgccttgaagtgacagagcaatccctcgaccagcacactagcttggccacttctcacttcttggccaactacctcaccacccacttctatggacaactgactgctgtccgacaccgtgaaatccaggcgctgtatgtgggatccaagattctgctgaccctgcctgagcagcaccgggccagctattcccacttgtcctctaaccccctgttcatgctggagcagctgcttatgaacatgaaggtggattgggccactgtggctgtgcagactctccagcagctgctggttggacaggagattggcttcactatggacgaggtggactcactgctttccagatacgcagagaaagccctggactttccataccctcagagggagaaacgatcagattctgtgattcacctccaagaaattgtccaccaggctgcagatcccgagaccctccctagatcaccatcagcagagttctctcctgctgctcctcctggtatctccagtatacattcccctagtctaagggaaaggagtttcccaccaacccagccctcacaggaatttgtgcccccagcgacaccccctgccaggcaccagtgggtaccggatgagactgagagtatctgcatggtctgctgcagggagcacttcaccatgtttaacaggcgtcatcattgtcgccgctgtggccggctagtgtgcagctcctgctccactaagaaaatggtggttgaaggctgcagagagaaccctgctcgtgtgtgtgatcagtgctatagttactgcaacaaagatgtaccagaggagccttcagaaaaaccagaagctctagacagctccaagagtgaaagccctccatactcgtttgtggtgagagtccccaaagcagatgaggtggaatggattttggatctcaaagaggaggaaaatgagctggtgcggagtgaattttactatgagcaggcccccagcgcctccttgtgcattgccatcctgaatctgcaccgggacagcattgcctgtggtcaccagctgattgagcactgctgcaggctctccaagggcctcaccaacccagaggtggatgccgggctgctcacggacatcatgaagcagctgctgttcagcgccaagatgatgttcgtcaaagccggccagagccaagacttggctctttgtgacagctacatcagcaaggtagatgtgctgaatattttagttgctgctgcctatcgccacgtgccatctttggatcagatcttgcagccagctgcagtaaccaggctaaggaaccagcttttggaagccgagtactaccaactgggcgttgaggtctccacaaagactgggcttgataccaccggggcgtggcatgcttggggcatggcctgcctcaaagccgggaacctcactgctgcacgggagaagttcagtcgctgtctgaagcccccatttgacctcaatcagctgaatcatggctcaaggctggtgcaggatgtggttgagtacctagagtccacagtgaggccctttgtatccttgcaagatgacgattactttgccaccctgagggaactggaagctacccttcggacgcagagcctttctctggcagtgattcctgaagggaaaatcatgaacaacacctactaccaggaatgcctcttctacctgcacaactatagcaccaacctggccatcatcagcttctacgtgaggcacagctgcctgcgggaagctcttctgcaccttctcaacaaggtgggacatggacacagctcaaaaaggcagtgcctgccttactcctctggcttggaccactcagccttaagcgggacaataaccccctgacacttaaccctgtgttgagctatggggccatctctagcagagtcaagtcaaaacaggggactctgcacaactgttattcagtgagtgtgaaaagtcttagcctagatcccaaatcactgccctcaccagcaaaggcatgtttcattccttctgccaaaacatgcagcagaatcggatagtggttaagagcatgtctctggaatgagatgctcagtgtgagtcttgtgtggccttgggcatattgcttagagtctgcttccacgcgcctccctacctggcctgggatggtgtccagcttctgacccagctgctggtccattcagagttgttactacaagggccaggaagtaaccatggtgccaatcctatagttgaaccccaaatagatgatgaaagaagaatatgctctcctttttttcttctcccatcctctgcccccctcccactggaagcaaaggcaccactgaagaacattacatctttggagctcttaataagcaatcaggacttcgttttaccgtgacccatttttttgtttttgttttttcgagatggggactcactatgttgcccaggctagaatgcagtggcatgatcacagctcactgcacccttgacctcctaggctcaagaaatcctccaacctcatcctactgagtagctgggactacaggcacatgcactgcacccagctacattcctttttttatctgaatgttccataataacttggagaaattggctgagatgtaccaaattttgtaggaaattgaaggagctcaaggcagactttaatttcactctgccaccctaattcaaaacagcagccaatgcaaatgtacagatagacatattttctaagattgatccaagtgaaatcagcagttcacaaagttattatgactatacccctacaggacactgaaggggggtgtttttaccagtgcttagctactgactattcttagctactaaccaggtcttaagaataatgtagaagtcatgttatatggagttgagttgctaacttttttccttttcctcagtttccagatgagtttagcagtaaagatgcttttcccaggcacaaattgggaatgga

SEQ ID NO: 318472 - DNA, 3338 bp, Homo sapiens
cgtttgaatagtagccttgaaaggcggggtcgacggatagaccacgtactcctaaatgctgatggcattcgaggttttccagttgttcttcagcaaatcagtaagagtctcaattatctgcttatgtcagccagtcaaaccaaatcagagagtgtggaagaaaagggaggaggccctccacggtgcagcatcactgaactgcttcagatgtgctggcccagcctaagcgaggactgtgttgccagccacaccaccctctcccagcagctagatcaggtccttcagtcactgagagaggcactagagctgccagagcccaggactcctccactgtcttccctggtggagcaggcagcccagaaagctccagaggcagaggcccaccctgtgcagatccagactcagctcctccagaagaacctgggcaaacagaccccatcaggcagcaggcagatggactacttgggcaccttcttcagttactgcagcacccttgctgcagttctccttcaaagtttgagctctgagcctgatcatgtggaggtcaaggtaggaaatccctttgttctgctgcaacagagctcttcccaactggtgtcacatctcctgtttgagagacaagttcccccagagagactggcagcccttctggcccaagagaatctcagcctaagtgtgccacaggtcatcgtcagctgctgctgtgagccccttgctctttgctcatcccggcaaagccagcagacctcctccctcctgactcgtctgggtactctggcccagctacacgcctctcactgcctggatgacctcccactttctacaccgagctccccgaggacaactgagaaccctacattggaaagaaagccctactcctccccaagggactcatcactcccagccctcacctcctctgccttggcctttcttaagtcacgctcaaagctcctagctacggtggcctgcctgggggcttccccgaggttaaaggtcagcaaacccagcttgtcatggaaggaacttcgtggccgcagggaggtgcctctggctgcagagcaggtagcccgggagtgtgagcgccttctggaacaattccctctgtttgaggccttcctcctggctgcctgggagcccctgcgagggtctttgcagcaggggcagagtctggcagtgaatctctgtggttgggccagtctttctaccgttctcctgggcctacattctcccattgccctagatgtactgagtgaggcttttgaggaatccttggtggccagagattggtcccgggcccttcagctcactgaagtgtacgggcgagatgtggacgatttgagcagcataaaggatgcagtcctgagctgtgctgtggcatgtgacaaagaaggttggcaatacctgtttcccgtgaaggatgcatctctgagaagtcggctggccctacagtttgtggacaggtggcccctggagtcatgcctggagattctggcctactgcatttcagacacggctgtccaagaaggactaaagtgtgagctacagaggaagctggcggagctgcaggtgtatcagaagattctgggtttgcagtctcccccagtgtggtgtgactggcagaccttgaggagctgttgtgttgaggacccatcaactgtcatgaacatgattctagaagcacaggagtatgaactgtgtgaagagtggggctgcctgtaccccattccaagagaacatttaatcagccttcatcaaaagcatcttctccaccttctagaaagaagagatcatgacaaggctctgcaactcctgcgaagaatccctgaccccaccatgtgccttgaagtgacagagcaatccctcgaccagcacactagcttggccacttctcacttcttggccaactacctcaccacccacttctatggacaactgactgctgtccgacaccgtgaaatccaggcgctgtatgtgggatccaagattctgctgaccctgcctgagcagcaccgggccagctattcccacttgtcctctaaccccctgttcatgctggagcagctgcttatgaacatgaaggtggattgggccactgtggctgtgcagactctccagcagctgctggttggacaggagattggcttcactatggacgaggtggactcactgctttccagatacgcagagaaagccctggactttccataccctcagagggagaaacgatcagattctgtgattcacctccaagaaattgtccaccaggctgcagatcccgagaccctccctagatcaccatcagcagagttctctcctgctgctcctcctggtatctccagtatacattcccctagtctaagggaaaggagtttcccaccaacccagccctcacaggaatttgtgcccccagcgacaccccctgccaggcaccagtgggtaccggatgagactgagagtatctgcatggtctgctgcagggagcacttcaccatgtttaacaggcgtcatcattgtcgccgctgtggccggctagtgtgcagctcctgctccactaagaaaatggtggttgaaggctgcagagagaaccctgctcgtgtgtgtgatcagtgctatagttactgcaacaaagatgtaccagaggagccttcagaaaaaccagaagctctagacagctccaagagtgaaagccctccatactcgtttgtggtgagagtccccaaagcagatgaggtggaatggattttggatctcaaagaggaggaaaatgagctggtgcggagtgaattttactatgagcaggcccccagcgcctccttgtgcattgccatcctgaatctgcaccgggacagcattgcctgtggtcaccagctgattgagcactgctgcaggctctccaagggcctcaccaacccagaggtggatgccgggctgctcacggacatcatgaagcagctgctgttcagcgccaagatgatgttcgtcaaagccggccagagccaagacttggctctttgtgacaggtagagggcagtgggtctctattcttttacacaggagcagtttctagccagcttctttttctgaccccactgtgatttttttatctcaccatcctctctgacaagacatgctgaaagatttttcatctgtgtaatgttgatgaaacggtgttgccagatctcaagtgttcttccccgtcctacctgacaccctgtgtccttttctttttcagagcagaccctcaaagcagagtttactctagctataccagtcagaaagagagtaaagactttcattagttgatttgtcattaaagtcaatgtagggaaccaccttta

SEQ ID NO: 318473 - DNA, 357 bp, Homo sapiens
gtaggagccacctccatgcaagtcagccatgggccttcggatgatttcatcaatatagccaagggctcagtgcggtggtgcttggggttagcacagagagtggggatttcttcctgactgaattttttattcttatataactgaaaatttaatgtgccttgtttcctgctttctctctcgatacctttagcatgtatattgttaagtatgaaatcagtgggtgactctgcactttataaataggcaaaaatctaaaaattcaataacatgatagttgattagactgtaggaaaacagcattctcagagaatgcaagtgggacataaatttgtacagcctctgtcggaaggcagtttg

SEQ ID NO: 318474 - DNA, 6544 bp, Homo sapiens
cgtttgaatagtagccttgaaaggcggggtcgacggatagaccacgtactcctaaatgctgatggcattcgaggttttccagttgttcttcagcaaatcagtaagagtctcaattatctgcttatgtcagccagtcaaaccaaatcagagagtgtggaagaaaagggaggaggccctccacggtgcagcatcactgaactgcttcagatgtgctggcccagcctaagcgaggactgtgttgccagccacaccaccctctcccagcagctagatcaggtccttcagtcactgagagaggcactagagctgccagagcccaggactcctccactgtcttccctggtggagcaggcagcccagaaagctccagaggcagaggcccaccctgtgcagatccagactcagctcctccagaagaacctgggcaaacagaccccatcaggcagcaggcagatggactacttgggcaccttcttcagttactgcagcacccttgctgcagttctccttcaaagtttgagctctgagcctgatcatgtggaggtcaaggtaggaaatccctttgttctgctgcaacagagctcttcccaactggtgtcacatctcctgtttgagagacaagttcccccagagagactggcagcccttctggcccaagagaatctcagcctaagtgtgccacaggtcatcgtcagctgctgctgtgagccccttgctctttgctcatcccggcaaagccagcagacctcctccctcctgactcgtctgggtactctggcccagctacacgcctctcactgcctggatgacctcccactttctacaccgagctccccgaggacaactgagaaccctacattggaaagaaagccctactcctccccaagggactcatcactcccagccctcacctcctctgccttggcctttcttaagtcacgctcaaagctcctagctacggtggcctgcctgggggcttccccgaggttaaaggtcagcaaacccagcttgtcatggaaggaacttcgtggccgcagggaggtgcctctggctgcagagcaggtagcccgggagtgtgagcgccttctggaacaattccctctgtttgaggccttcctcctggctgcctgggagcccctgcgagggtctttgcagcaggggcagagtctggcagtgaatctctgtggttgggccagtctttctaccgttctcctgggcctacattctcccattgccctagatgtactgagtgaggcttttgaggaatccttggtggccagagattggtcccgggcccttcagctcactgaagtgtacgggcgagatgtggacgatttgagcagcataaaggatgcagtcctgagctgtgctgtggcatgtgacaaagaaggttggcaatacctgtttcccgtgaaggatgcatctctgagaagtcggctggccctacagtttgtggacaggtggcccctggagtcatgcctggagattctggcctactgcatttcagacacggctgtccaagaaggactaaagtgtgagctacagaggaagctggcggagctgcaggtgtatcagaagattctgggtttgcagtctcccccagtgtggtgtgactggcagaccttgaggagctgttgtgttgaggacccatcaactgtcatgaacatgattctagaagcacaggagtatgaactgtgtgaagagtggggctgcctgtaccccattccaagagaacatttaatcagccttcatcaaaagcatcttctccaccttctagaaagaagagatcatgacaaggctctgcaactcctgcgaagaatccctgaccccaccatgtgccttgaagtgacagagcaatccctcgaccagcacactagcttggccacttctcacttcttggccaactacctcaccacccacttctatggacaactgactgctgtccgacaccgtgaaatccaggcgctgtatgtgggatccaagattctgctgaccctgcctgagcagcaccgggccagctattcccacttgtcctctaaccccctgttcatgctggagcagctgcttatgaacatgaaggtggattgggccactgtggctgtgcagactctccagcagctgctggttggacaggagattggcttcactatggacgaggtggactcactgctttccagatacgcagagaaagccctggactttccataccctcagagggagaaacgatcagattctgtgattcacctccaagaaattgtccaccaggctgcagatcccgagaccctccctagatcaccatcagcagagttctctcctgctgctcctcctggtatctccagtatacattcccctagtctaagggaaaggagtttcccaccaacccagccctcacaggaatttgtgcccccagcgacaccccctgccaggcaccagtgggtaccggatgagactgagagtatctgcatggtctgctgcagggagcacttcaccatgtttaacaggcgtcatcattgtcgccgctgtggccggctagtgtgcagctcctgctccactaagaaaatggtggttgaaggctgcagagagaaccctgctcgtgtgtgtgatcagtgctatagttactgcaacaaagatgtaccagaggagccttcagaaaaaccagaagctctagacagctccaagagtgaaagccctccatactcgtttgtggtgagagtccccaaagcagatgaggtggaatggattttggatctcaaagaggaggaaaatgagctggtgcggagtgaattttactatgagcaggcccccagcgcctccttgtgcattgccatcctgaatctgcaccgggacagcattgcctgtggtcaccagctgattgagcactgctgcaggctctccaagggcctcaccaacccagaggtggatgccgggctgctcacggacatcatgaagcagctgctgttcagcgccaagatgatgttcgtcaaagccggccagagccaagacttggctctttgtgacagctacatcagcaaggtagatgtgctgaatattttagttgctgctgcctatcgccacgtgccatctttggatcagatcttgcagccagctgcagtaaccaggctaaggaaccagcttttggaagccgagtactaccaactgggcgttgaggtctccacaaagactgggcttgataccaccggggcgtggcatgcttggggcatggcctgcctcaaagccgggaacctcactgctgcacgggagaagttcagtcgctgtctgaagcccccatttgacctcaatcagctgaatcatggctcaaggctggtgcaggatgtggttgagtacctagagtccacagtgaggccctttgtatccttgcaagatgacgattactttgccaccctgagggaactggaagctacccttcggacgcagagcctttctctggcagtgattcctgaagggaaaatcatgaacaacacctactaccaggaatgcctcttctacctgcacaactatagcaccaacctggccatcatcagcttctacgtgaggcacagctgcctgcgggaagctcttctgcaccttctcaacaaggagagtcctccagaagtttttatagaaggcattttccaaccaagctataaaagtgggaagctacacactttggagaacttgctagaatccattgatccaaccttggagagctggggaaagtacttgattgctgcctgccaacatttacagaagaagaactactaccacattctgtatgagctgcagcagtttatgaaggaccaagttcgggccgccatgacctgtattcggttcttcagtcacaaagcaaagtcatatacagaactgggagagaagctctcatggctacttaaggccaaggaccacctgaagatctacctccaagaaacatcccgcagctctggaaggaagaaaaccacattcttcagaaagaagatgactgcagctgatgtgtcaaggcacatgaacacacttcagctgcagatggaagtgaccaggttcttgcatcggtgcgaaagtgctgggacctctcaaatcaccactttgcctctgccaaccctgtttggaaataaccacatgaaaatggatgttgcctgcaaggtcatgctgggagggaaaaatgtagaagatggttttggaattgctttccgtgttctgcaggacttccagctggatgctgccatgacctactgcagagctgcccgccagttggtggagaaagagaagtacagtgagatccagcaactgctcaaatgtgtcagtgagtcaggcatggcagccaaaagtgacggggacaccatcctcctcaactgcctggaagcgttcaagagaattccgccccaggagctggagggcctgatccaggcaatacacaatgatgacaacaaggttcgggcctacctgatatgttgcaaactgcgttctgcctacttgattgctgtgaagcaagaacactcacgggccacagcccttgtccagcaggtgcagcaggccgccaagagcagcggggatgcagtagtgcaagacatctgtgcccagtggcttctgacaagccacccccggggtgcccatggcccaggctccaggaagtgaccttgggcagtggggccaggaacacgtggcctgagagctgggcaacagcagtgatggcgatgccctccacctctttcctccagtggagtgggacttctctggctctgccctaggttggaaagagttggattggaccctacttgccttcccgggcaaggataggacctttcacgcaagtgccatgtttctctaaaattgtggaatctatgtgtgtttgtctggagatggccagttctttctacctcagagtgagtgagtgagtatgtgtgcacacacgtgtgcatgttcctgtgcgctgatgtttacgcccaagcatttctgaacaaatgaaactcttctccatttaaaagaggcactttactttggacttgccactctgaaaaccttccctgcgttttggttcttgacccgggttgtcctgtttgtatagtcccccctctgtggacgtgctttagtagctcctcttacctagagggcttttacagagaattagagcaacaccaaaaggattgcctcttttccttccttcccattccaaaattcagagatggctttggggcaagtgctacctgtggaataaacctgttttccaggtgtctcttctcccaagcacaagaagtcctggagtctttggaaggtagtctgaatagaagggttttcaggtgcaggcatctgaaagctgtgggtatgtgtataaatgatcaggtctgtgaggctaacacgggcaagagggaaagaaaggctaaccatccaaacagggatacaggggaggcggtggggggtggtggggggagcgggtgctcacaagcacagagctgcctgttgtgaatgtccctgctgcaaagttggtgggtgagagaatgggacttcctctttgagagtctggggagagaaaaggtggccaggatcctaggactgaatgactcgattttacctatttgagctgcagtcctgtttgcgctccttgaattggttaggaagctgcttccttttccctcctgcttcccttcagtctcttcaggaccacaggatggatatgcagacatgtggggtcattgggaagggagtgcgcttcttttctctgtcttagaaaagggagtcaagggttggctttggaattgggcctctggacagagtcagaatgagggaataatgaataggtcacatctggttggtggaaaactaggtgaagtgcttctttaatatgcactgtcttgtcttcccacgcaagatgtgacaatgtttgagaaaaggtgtgtcatactcagtgacttcaatttgcaaatgtggggcctaaagaaagctctgcagctctgaacctctcactggccagagctcagcctattggtcccatccatgatgctgagacaaacagaaactggaagctgaagtcagtgtctctggtgcttagaaaccctgtggatttccctctgaaccaagatttttagtagtaaaataaacaactcatggacatctgtcagatgagaagttttggtcctgttagagaggagaaagactgtaatgaaactactagacccatttgggctaaagtttggcttttccttccttgagtcatagaacatatccatctcccaggaaatgtccttctctggcgtctgcttgcccttctgagtctgccttttttgcactgaacataagcactttatactaatgggtcacaaatcttgcagcccttaatttgggataagaccagattttcctgacattttcctctaactcattgaactatcaaattataggcaaccactgactagactgatatgagatgaggctaaaagcctttgaacaccacgctgtagtctccaacagaaaaacaccaccaaaacagatacccatgttgaggggttgaatgttttactacaaacaagccacaataaagtgtctatcaacatgt

SEQ ID NO: 318475 - DNA, 5003 bp, Homo sapiens
  misc_feature (4986)..(4986): n is a, c, g, or t
cgtttgaatagtagccttgaaaggcggggtcgacggatagaccacgtactcctaaatgctgatggcattcgaggttttccagttgttcttcagcaaatcagtaagagtctcaattatctgcttatgtcagccagtcaaaccaaatcagagagtgtggaagaaaagggaggaggccctccacggtgcagcatcactgaactgcttcagatgtgctggcccagcctaagcgaggactgtgttgccagccacaccaccctctcccagcagctagatcaggtccttcagtcactgagagaggcactagagctgccagagcccaggactcctccactgtcttccctggtggagcaggcagcccagaaagctccagaggcagaggcccaccctgtgcagatccagactcagctcctccagaagaacctgggcaaacagaccccatcaggcagcaggcagatggactacttgggcaccttcttcagttactgcagcacccttgctgcagttctccttcaaagtttgagctctgagcctgatcatgtggaggtcaaggtaggaaatccctttgttctgctgcaacagagctcttcccaactggtgtcacatctcctgtttgagagacaagttcccccagagagactggcagcccttctggcccaagagaatctcagcctaagtgtgccacaggtcatcgtcagctgctgctgtgagccccttgctctttgctcatcccggcaaagccagcagacctcctccctcctgactcgtctgggtactctggcccagctacacgcctctcactgcctggatgacctcccactttctacaccgagctccccgaggacaactgagaaccctacattggaaagaaagccctactcctccccaagggactcatcactcccagccctcacctcctctgccttggcctttcttaagtcacgctcaaagctcctagctacggtggcctgcctgggggcttccccgaggttaaaggtcagcaaacccagcttgtcatggaaggaacttcgtggccgcagggaggtgcctctggctgcagagcaggtagcccgggagtgtgagcgccttctggaacaattccctctgtttgaggccttcctcctggctgcctgggagcccctgcgagggtctttgcagcaggggcagagtctggcagtgaatctctgtggttgggccagtctttctaccgttctcctgggcctacattctcccattgccctagatgtactgagtgaggcttttgaggaatccttggtggccagagattggtcccgggcccttcagctcactgaagtgtacgggcgagatgtggacgatttgagcagcataaaggatgcagtcctgagctgtgctgtggcatgtgacaaagaaggttggcaatacctgtttcccgtgaaggatgcatctctgagaagtcggctggccctacagtttgtggacaggtggcccctggagtcatgcctggagattctggcctactgcatttcagacacggctgtccaagaaggactaaagtgtgagctacagaggaagctggcggagctgcaggtgtatcagaagattctgggtttgcagtctcccccagtgtggtgtgactggcagaccttgaggagctgttgtgttgaggacccatcaactgtcatgaacatgattctagaagcacaggagtatgaactgtgtgaagagtggggctgcctgtaccccattccaagagaacatttaatcagccttcatcaaaagcatcttctccaccttctagaaagaagagatcatgacaaggctctgcaactcctgcgaagaatccctgaccccaccatgtgccttgaagtgacagagcaatccctcgaccagcacactagcttggccacttctcacttcttggccaactacctcaccacccacttctatggacaactgactgctgtccgacaccgtgaaatccaggcgctgtatgtgggatccaagattctgctgaccctgcctgagcagcaccgggccagctattcccacttgtcctctaaccccctgttcatgctggagcagctgcttatgaacatgaaggtggattgggccactgtggctgtgcagactctccagcagctgctggttggacaggagattggcttcactatggacgaggtggactcactgctttccagatacgcagagaaagccctggactttccataccctcagagggagaaacgatcagattctgtgattcacctccaagaaattgtccaccaggctgcagatcccgagaccctccctagatcaccatcagcagagttctctcctgctgctcctcctggtatctccagtatacattcccctagtctaagggaaaggagtttcccaccaacccagccctcacaggaatttgtgcccccagcgacaccccctgccaggcaccagtgggtaccggatgagactgagagtatctgcatggtctgctgcagggagcacttcaccatgtttaacaggcgtcatcattgtcgccgctgtggccggctagtgtgcagctcctgctccactaagaaaatggtggttgaaggctgcagagagaaccctgctcgtgtgtgtgatcagtgctatagttactgcaacaaagatgtaccagaggagccttcagaaaaaccagaagctctagacagctccaagagtgaaagccctccatactcgtttgtggtgagagtccccaaagcagatgaggtggaatggattttggatctcaaagaggaggaaaatgagctggtgcggagtgaattttactatgagcaggcccccagcgcctccttgtgcattgccatcctgaatctgcaccgggacagcattgcctgtggtcaccagctgattgagcactgctgcaggctctccaagggcctcaccaacccagaggtggatgccgggctgctcacggacatcatgaagcagctgctgttcagcgccaagatgatgttcgtcaaagccggccagagccaagacttggctctttgtgacagctacatcagcaaggtagatgtgctgaatattttagttgctgctgcctatcgccacgtgccatctttggatcagatcttgcagccagctgcagtaaccaggctaaggaaccagcttttggaagccgagtactaccaactgggcgttgaggtctccacaaagactgggcttgataccaccggggcgtggcatgcttggggcatggcctgcctcaaagccgggaacctcactgctgcacgggagaagttcagtcgctgtctgaagcccccatttgacctcaatcagctgaatcatggctcaaggctggtgcaggatgtggttgagtacctagagtccacagtgaggccctttgtatccttgcaagatgacgattactttgccaccctgagggaactggaagctacccttcggacgcagagcctttctctggcagtgattcctgaagggaaaatcatgaacaacacctactaccaggaatgcctcttctacctgcacaactatagcaccaacctggccatcatcagcttctacgtgaggcacagctgcctgcgggaagctcttctgcaccttctcaacaaggagagtcctccagaagtttttatagaaggcattttccaaccaagctataaaagtgggaagctacacactttggagaacttgctagaatccattgatccaaccttggagagctggggaaagtacttgattgctgcctgccaacatttacagaagaagaactactaccacattctgtatgagctgcagcagtttatgaaggaccaagttcgggccgccatgacctgtattcggttcttcagtcacaaagcaaagtcatatacagaactgggagagaagctctcatggctacttaaggccaaggaccacctgaagatctacctccaagaaacatcccgcagctctggaaggaagaaaaccacattcttcagaaagaagatgactgcagctgatgtgtcaaggcacatgaacacacttcagctgcagatggaagtgaccaggttcttgcatcggtgcgaaagtgctgggacctctcaaatcaccactttgcctctgccaaccctgtttggaaataaccacatgaaaatggatgttgcctgcaaggtcatgctgggagggaaaaatgtagaagatggttttggaattgctttccgtgttctgcaggacttccagctggatgctgccatgacctactgcagagctgcccgccagttggtggagaaagagaagtacagtgagatccagcaactgctcaaatgtgtcagtgagtcaggcatggcagccaaaagtgacggggacaccatcctcctcaactgcctggaagcgttcaagagaattccgccccaggagctggagggcctgatccaggcaatacacaatgatgacaacaaggtgagcggaattgtctccaaacgctggtgatgccaatgaattgtgtctcaggcttgcctagtcacctttatcccttgctccccacaatagttccatacaacccgtatctcagcttctgtattatcagaggtggagctgaggcttggataggggtgtagaaaggagggaatagatgaggagcaggtgaacatggactgcatgcgtctttgccttcccaagtctttatccccaagacaaacatgtcctaggctgctcttgaatctccattttatactgatgtcttctctcagagagccctaggaaatccctcacctcacctccatctttgggtggactgatggattgaggttcccagagtaagcaggtatctctttatcctagagggaaaaaggtacagtaagaaaaaaatccccaccccacactttgaccaacaatgtccaacaatgtctcggtctccagaatgaacctctcctcaggggccaaagaactcgtccctgtttgggaaaatggtgaacctttgcttcccgttgcctttgggaggagtgccagtcagaataaaantcttcccagatgccccc

SEQ ID NO: 318476 - DNA, 3639 bp, Homo sapiens
cgtttgaatagtagccttgaaaggcggggtcgacggatagaccacgtactcctaaatgctgatggcattcgaggttttccagttgttcttcagcaaatcagtaagagtctcaattatctgcttatgtcagccagtcaaaccaaatcagagagtgtggaagaaaagggaggaggccctccacggtgcagcatcactgaactgcttcagatgtgctggcccagcctaagcgaggactgtgttgccagccacaccaccctctcccagcagctagatcaggtccttcagtcactgagagaggcactagagctgccagagcccaggactcctccactgtcttccctggtggagcaggcagcccagaaagctccagaggcagaggcccaccctgtgcagatccagactcagctcctccagaagaacctgggcaaacagaccccatcaggcagcaggcagatggactacttgggcaccttcttcagttactgcagcacccttgctgcagttctccttcaaagtttgagctctgagcctgatcatgtggaggtcaaggtaggaaatccctttgttctgctgcaacagagctcttcccaactggtgtcacatctcctgtttgagagacaagttcccccagagagactggcagcccttctggcccaagagaatctcagcctaagtgtgccacaggtcatcgtcagctgctgctgtgagccccttgctctttgctcatcccggcaaagccagcagacctcctccctcctgactcgtctgggtactctggcccagctacacgcctctcactgcctggatgacctcccactttctacaccgagctccccgaggacaactgagaaccctacattggaaagaaagccctactcctccccaagggactcatcactcccagccctcacctcctctgccttggcctttcttaagtcacgctcaaagctcctagctacggtggcctgcctgggggcttccccgaggttaaaggtcagcaaacccagcttgtcatggaaggaacttcgtggccgcagggaggtgcctctggctgcagagcaggtagcccgggagtgtgagcgccttctggaacaattccctctgtttgaggccttcctcctggctgcctgggagcccctgcgagggtctttgcagcaggggcagagtctggcagtgaatctctgtggttgggccagtctttctaccgttctcctgggcctacattctcccattgccctagatgtactgagtgaggcttttgaggaatccttggtggccagagattggtcccgggcccttcagctcactgaagtgtacgggcgagatgtggacgatttgagcagcataaaggatgcagtcctgagctgtgctgtggcatgtgacaaagaaggttggcaatacctgtttcccgtgaaggatgcatctctgagaagtcggctggccctacagtttgtggacaggtggcccctggagtcatgcctggagattctggcctactgcatttcagacacggctgtccaagaaggactaaagtgtgagctacagaggaagctggcggagctgcaggtgtatcagaagattctgggtttgcagtctcccccagtgtggtgtgactggcagaccttgaggagctgttgtgttgaggacccatcaactgtcatgaacatgattctagaagcacaggagtatgaactgtgtgaagagtggggctgcctgtaccccattccaagagaacatttaatcagccttcatcaaaagcatcttctccaccttctagaaagaagagatcatgacaaggctctgcaactcctgcgaagaatccctgaccccaccatgtgccttgaagtgacagagcaatccctcgaccagcacactagcttggccacttctcacttcttggccaactacctcaccacccacttctatggacaactgactgctgtccgacaccgtgaaatccaggcgctgtatgtgggatccaagattctgctgaccctgcctgagcagcaccgggccagctattcccacttgtcctctaaccccctgttcatgctggagcagctgcttatgaacatgaaggtggattgggccactgtggctgtgcagactctccagcagctgctggttggacaggagattggcttcactatggacgaggtggactcactgctttccagatacgcagagaaagccctggactttccataccctcagagggagaaacgatcagattctgtgattcacctccaagaaattgtccaccaggctgcagatcccgagaccctccctagatcaccatcagcagagttctctcctgctgctcctcctggtatctccagtatacattcccctagtctaagggaaaggagtttcccaccaacccagccctcacaggaatttgtgcccccagcgacaccccctgccaggcaccagtgggtaccggatgagactgagagtatctgcatggtctgctgcagggagcacttcaccatgtttaacaggcgtcatcattgtcgccgctgtggccggctagtgtgcagctcctgctccactaagaaaatggtggttgaaggctgcagagagaaccctgctcgtgtgtgtgatcagtgctatagttactgcaacaaagatgtaccagaggagccttcagaaaaaccagaagctctagacagctccaagagtgaaagccctccatactcgtttgtggtgagagtccccaaagcagatgaggtggaatggattttggatctcaaagaggaggaaaatgagctggtgcggagtgaattttactatgagcaggcccccagcgcctccttgtgcattgccatcctgaatctgcaccgggacagcattgcctgtggtcaccagctgattgagcactgctgcaggctctccaagggcctcaccaacccagaggtggatgccgggctgctcacggacatcatgaagcagctgctgttcagcgccaagatgatgttcgtcaaagccggccagagccaagacttggctctttgtgacagctacatcagcaaggtagatgtgctgaatattttagttgctgctgcctatcgccacgtgccatctttggatcagatcttgcagccagctgcagtaaccaggctaaggaaccagcttttggaagccgagtactaccaactgggcgttgaggtctccacaaagactgggcttgataccaccggggcgtggcatgcttggggcatggcctgcctcaaagccgggaacctcactgctgcacgggagaagttcagtcgctgtctgaagcccccatttgacctcaatcagctgaatcatggctcaaggctggtgcaggatgtggttgagtacctagagtccacagtgaggccctttgtatccttggtaagagcaaggcaggaagagtgcctggctcagggagggagacccaggaatagcaatgacctgggaaaagaatcagtggaaattcagctaacagtgtcagtcctggctcagcatcaagcaggttaaaaattttttttttccatcacatatagttagataagtaaccatatatggttagataagtaatagatgtaattttttttaaaaaaaggagacaatttttaaaaagataaaaatgacatatgacatataatcccatac

SEQ ID NO: 318477 - DNA, 1606 bp, Homo sapiens
cgtttgaatagtagccttgaaaggcggggtcgacggatagaccacgtactcctaaatgctgatggcattcgaggttttccagttgttcttcagcaaatcagtaagagtctcaattatctgcttatgtcagccagtcaaaccaaatcagagagtgtggaagaaaagggaggaggccctccacggtgcagcatcactgaactgcttcagatgtgctggcccagcctaagcgaggactgtgttgccagccacaccaccctctcccagcagctagatcaggtccttcagtcactgagagaggcactagagctgccagagcccaggactcctccactgtcttccctggtggagcaggcagcccagaaagctccagaggcagaggcccaccctgtgcagatccagactcagctcctccagaagaacctgggcaaacagaccccatcaggcagcaggcagatggactacttgggcaccttcttcagttactgcagcacccttgctgcagttctccttcaaagtttgagctctgagcctgatcatgtggaggtcaaggtaggaaatccctttgttctgctgcaacagagctcttcccaactggtgtcacatctcctgtttgagagacaagttcccccagagagactggcagcccttctggcccaagagaatctcagcctaagtgtgccacaggtcatcgtcagctgctgctgtgagccccttgctctttgctcatcccggcaaagccagcagacctcctccctcctgactcgtctgggtactctggcccagctacacgcctctcactgcctggatgacctcccactttctacaccgagctccccgaggacaactgagaaccctacattggaaagaaagccctactcctccccaagggactcatcactcccagccctcacctcctctgccttggcctttcttaagtcacgctcaaagctcctagctacggtggcctgcctgggggcttccccgaggttaaaggtcagcaaacccagcttgtcatggaaggaacttcgtggccgcagggaggtgcctctggctgcagagcaggtagcccgggagtgtgagcgccttctggaacaattccctctgtttgaggccttcctcctggctgcctgggagcccctgcgagggtctttgcagcaggggcagagtctggcagtgaatctctgtggttgggccagtctttctaccgttctcctgggcctacattctcccattgccctagatgtactgagtgaggcttttgaggaatccttggtggccagagattggtcccgggcccttcagctcactgaagtgtacgggcgagatgtggacgatttgagcagcataaaggatgcagtcctgagctgtgctgtggcatgtggtgagcagaatgctatgcctccctttttcactagtggtaatatttggtattcactgggtatattatcacatttaatcctcacggtaactctagagagaagccccactataatctcatgttattaagaggagaccaggtctcagaggggttaggaaacttgcccagggtggtaagtggtagagtagagcttagaacccaagtccatctgactttaaacagccacgc

SEQ ID NO: 318478 - DNA, 914 bp, Homo sapiens
cgtaaagaaggaatttgaagaggaatcagtaaaaagaaggagatggctccattaatcaagtgtgaaagacttttccaggaaacaggctagtgtaaaagctgcaagtgaaatgtataaatacagatctaaggttttaaaagaagatacactgctcttgaattatggctcctaaaaaatccaaggtagaagcaaaatcactgaaaatatttcaagagctggcatttggatatcttggttattaggagtaaacattttgaagcaaaacatgtgattaaggctcttgagaagaggagcttatcctgcattatccaggtaagccctaaatgcaatcatatgtatccttataagacaggggcagagggagatttgacatgaagggaaggcaatgtgaaggtgaaggcagagataggagtgatgtggccacaaatcgaagaatgccacggaatgccagtagccaccagatgattgagaagcaaggaacaaattctttcccagggcctccagagggagtatgtccctgctaatactttgatttcagacttctggcctccagactgataatgcatttctgtttaaagccccccagtttgtggttatttgttacagcagccgcaggaaactaatgtatcattctgaggtcccccaaatctcaacccattgcagttcaagatagagtccaaaatctcattagctgagaagtatggcgtaccagaaaagaagtgactactgtaataaaaggcatacatctaaagattagaagacatgatgaaaacatcttccatcagtgctatagtttgaatgtttgtcccctccaaaattcttgttgaaagataattcccagtgtaacagtattgagagatgggccctctaagaagtgattgagttatgaggactctgcccttatgaatggagta

SEQ ID NO: 318479 - DNA, 395 bp, Homo sapiens
taaataaaacacgtccctctgaaggagtgaatggcaggagacacatggaaagccccaaccaccatgttctcccccgactcctgaaaaacagtggctaaactccttggatttgccgttttttccttcctttcttagcagaggagtagccgttgggaagcattgggtcaagtctggaaaataaacctacggacagcttgtctctacaattccaacctaaattggtgaaacaatctgaaacccactactaaccacctccaaaggaataagatatgcccccgatttggtataacaaactcacgttttggactatgaacagagttacggaaaaagagaagaaaccaattctacaaacagctctatcttaacttccccttttccccaccacctaagcagta

SEQ ID NO: 318480 - DNA, 1368 bp, Homo sapiens
gcgggggtcggagccgcaaggctgcggcggcgacgagctccgagcgggacactgaacggcccgtatgcgcaagataagcacggactgaatcaggtacacgcacctgccggggacgcactgaccgaggtgcggacggcggtaccaggacaggtaaagccgcgaacactcggacctaagaacttgacaggtacaccctgcctgatgaagctacgtacggccaggtgcgcatcgagtgaatcagagacgaagtttcgccatgttgcccaggctgatctcaagctcttgggctcaagcaatccacctgccttggcctcccgaagtgctgggattacagggtgagaacctacttcttcataaagagaatttggagggagctttttgttctgcggggacaacatctggatttgaatacatccatgctcaaaaggagatttctcataatggacccaactgaaagcactcagagtacaaggaccggtgagctttcaaaaggagacacttcgggagactcgccaggggccctcgtatccccggcagcgcgagttttggaggtcagtggagggctctcgcatcatgcatgtaactttcatactcaaagacttaccttcatcctgcatccctcacccccctgcagaaacttggggcttgaattcatttaaaaacatttgcggtttcagaagccttctttttattatgaagctgccaaggagatcttagaatgaaaggcatttttagagatgagaaagaaggaagccaggccaaggccgggccggctctcagctgtgggtctgtaaaggtgacacgtgggacatggccacctgcagaccctgcaggcggctgggcagaggcacccacagggacctgggtttgaatccctgctctgccagtcatttccacagcgatcttgggggaagttgtgtaacctctgggccctgcgacgccctttcctggagcctggagctggaacgaagccccttggagccctgacatcagaggtgacgttagtcttcgcaggcaatgactcggcggaatgtgatgccactccctaacccgtgtccggactggcagagtgtgtgccgcctcccaccaggtggtctggctgctttgatggatctcctaacttctctgcaccccagagccctcagtgctggccagaccttcactcactcctgggtgacaaccccgttctcagatagtgggtcccacaggctggcctgtggcgccccctgctggtgactgcagggagaaggatgccctaagccaaaggaagtccttcctggggtctaatctctaccttttgcatgatgaggcagctgaggtggctcgctttctcctccaccccagaaaataaagtcatatggagtccaa

SEQ ID NO: 318481 - DNA, 401 bp, Homo sapiens
  misc_feature (306)..(306): n is a, c, g, or t
  misc_feature (364)..(364): n is a, c, g, or t
gcgggggtcggagccgcaaggctgcggcggcgacgagctccgagcgggacactgaacggcccgtatgcgcaagataagcacggactgaatcaggtacacgcacctgccggggacgcactgaccgaggtgcggacggcggtaccaggacaggtaaagccgcgaacactcggacctaagaacttgacaggtacaccctgcctgatgaagctacgtacggccaggtgcgcatcgagtgaatcagcatcgtattaaccagaagctgcatttacctgggaccatacatcagcccgagcctgtttccagtgnaagagttgtgttcgtgcttgggagggaccatttcattcacaacttgccccagcttctnggaggctcttcctggggtttgggtgtcttaaggttca

SEQ ID NO: 318482 - DNA, 1275 bp, Homo sapiens
gcgggggtcggagccgcaaggctgcggcggcgacgagctccgagcgggacactgaacggcccgtatgcgcaagataagcacggactgaatcaggtacacgcacctgccggggacgcactgaccgaggtgcggacggcggtaccaggacaggtaaagccgcgaacactcggacctaagaacttgacaggtacaccctgcctgatgaagctacgtacggccaggtgcgcatcgagtgaatcagggtgagaacctacttcttcataaagagaatttggagggagctttttgttctgcggggacaacatctggatttgaatacatccatgctcaaaaggagatttctcataatggacccaactgaaagcactcagagtacaaggaccggtgagctttcaaaaggagacacttcgggagactcgccaggggccctcgtatccccggcagcgcgagttttggaggtcagtggagggctctcgcatcatgcatgtaactttcatactcaaagacttaccttcatcctgcatccctcacccccctgcagaaacttggggcttgaattcatttaaaaacatttgcggtttcagaagccttctttttattatgaagctgccaaggagatcttagaatgaaaggcatttttagagatgagaaagaaggaagccaggccaaggccgggccggctctcagctgtgggtctgtaaaggtgacacgtgggacatggccacctgcagaccctgcaggcggctgggcagaggcacccacagggacctgggtttgaatccctgctctgccagtcatttccacagcgatcttgggggaagttgtgtaacctctgggccctgcgacgccctttcctggagcctggagctggaacgaagccccttggagccctgacatcagaggtgacgttagtcttcgcaggcaatgactcggcggaatgtgatgccactccctaacccgtgtccggactggcagagtgtgtgccgcctcccaccaggtggtctggctgctttgatggatctcctaacttctctgcaccccagagccctcagtgctggccagaccttcactcactcctgggtgacaaccccgttctcagatagtgggtcccacaggctggcctgtggcgccccctgctggtgactgcagggagaaggatgccctaagccaaaggaagtccttcctggggtctaatctctaccttttgcatgatgaggcagctgaggtggctcgctttctcctccaccccagaaaataaagtcatatggagtccaa

SEQ ID NO: 318483 - DNA, 359 bp, Homo sapiens
gcgggggtcggagccgcaaggctgcggcggcgacgagctccgagcgggacactgaacggcccgtatgcgcaagataagcacggactgaatcaggtacacgcacctgccggggacgcactgaccgaggtgcggacggcggtaccaggacaggtaaagccgcgaacactcggacctaagaacttgacaggtacaccctgcctgatgaagctacgtacggccaggtgcgcatcgagtgaatcagatcatcactacgaagagcaaaacaggccacttgcccaccttgacagagctggtaagtggcagagccaggaccatccagacggctcagcttccaagccagcaagcctcatcgccatgca

SEQ ID NO: 318484 - DNA, 665 bp, Homo sapiens
gcgggggtcggagccgcaaggctgcggcggcgacgagctccgagcgggacactgaacggcccgtatgcgcaagataagcacggactgaatcaggtacacgcacctgccggggacgcactgaccgaggtgcggacggcggtaccaggacaggtaaagccgcgaacactcggacctaagaacttgacaggtacaccctgcctgatgaagctacgtacggccaggtgcgcatcgagtgaatcagagacgaagtttcgccatgttgcccaggctgatctcaagctcttgggctcaagcaatccacctgccttggcctcccgaagtgctgggattacagggtgagaacctacttcttcataaagagaatttggagggagctttttgttctgcggggacaacatctggatttgaatacatccatgctcaaaaggagatttctcataatggacccaactgaaagcactcagagtacaaggaccggtgagctttcaaaaggagacacttcgggagactcgccaggggccctcgtatccccgagtatagcggtccacgccgatgggtacaaccacagctctattcccatggacccagaacatgtagagctggtgaaaaggacaatggctggagtaagcctgcctgcgacaggggttcctgcctgggctcgggag

SEQ ID NO: 318485 - DNA, 2931 bp, Homo sapiens
tttcttcggaatgagagactcaaccataatagaaagaatggagaactattaaccaccattcttcagtgggctgtgattttcagaggggaatactaagaaatggttttccatactggaacccaaaggtaaagacactcaaggacagacatttttggcagagcatagatgaaaatggcaagttccctggctttccttctgctcaactttcatgtctccctcttcttggtccagctgctcactccttgctcagctcagttttctgtgcttggaccctctgggcccatcctggccatggtgggtgaagacgctgatctgccctgtcacctgttcccgaccatgagtgcagagaccatggagctgaggtgggtgagttccagcctaaggcaggtggtgaacgtgtatgcagatggaaaggaagtggaagacaggcagagtgcaccgtatcgagggagaacttcgattctgcgggatggcatcactgcagggaaggctgctctccgaatacacaacgtcacagcctctgacagtggaaagtacttgtgttatttccaagatggtgacttctacgaaaaagccctggtggagctgaaggttgcagcattgggttctgatcttcacattgaagtgaagggttatgaggatggagggatccatctggagtgcaggtccactggctggtacccccaaccccaaataaagtggagcgacaccaagggagagaacatcccggctgtggaagcacctgtggttgcagatggagtgggcctgtatgcagtagcagcatctgtgatcatgagaggcagctctggtgggggtgtatcctgcatcatcagaaattccctcctcggcctggaaaagacagccagcatatccatcgcagaccccttcttcaggagcgcccagccctggatcgcggccctggcagggaccctgcctatctcgttgctgcttctcgcaggagccagttacttcttgtggagacaacagaaggaaaaaattgctctgtccagggagacagaaagagagcgagagatgaaagaaatgggatacgctgcaacagagcaagaaataagcctaagagagaagctccaggaggaactcaagtggaggaaaatccagtacatggctcgtggagagaagtctttggcctatcatgaatggaaaatggccctcttcaaacctgcggatgtgattctggatccagacacggcaaacgccatcctccttgtttctgaggaccagaggagtgtgcagcgtgctgaagagccgcgggatctgccagacaaccctgagagatttgaatggcgttactgtgtccttggctgtgaaaacttcacatcagggagacattactgggaggtggaagtgggggacagaaaagagtggcatattggggtatgtagtaagaacgtggagaggaaaaaaggttgggtcaaaatgacaccggagaacggatactggactatgggcctgactgatgggaataagtatcgggctctcactgagcccagaaccaacctgaaacttcctgagcctcctaggaaagtggggatcttcctggactatgagactggagagatctcgttctataatgccacagatggatctcatatctacacctttccgcacgcctctttctctgagcctctatatcctgttttcagaattttgaccttggagcccactgccctgaccatttgcccaataccaaaagaagtagagagttcccccgatcctgacctagtgcctgatcattccctggagacaccactgaccccgggcttagctaatgaaagtggggagcctcaggctgaagtaacatctctgcttctccctgcccaccctggagctgaggtctccccttctgcaacaaccaatcagaaccataagctacaggcacgcactgaagcactttactgatattcattccattattccatatgacagttgttttgagtttcgtaccaccttattgtccccttatacagataaggaaactggggtgcagaaaggtgaattaactttacaaagtagacatgacaagtgaacagcagagctgggatctaaacagcaataactaacattaacagagaatttaaaatgttcttagtgctgtgttataagctttggtggatgtcactcctttaatcctcacaacaccctgtcgggtagtcatattttgcaagtatggaagctgaggcagggcaacatgaagtaacttacataactcatacagtaatttgtgcagttgggagatgttcagccttagtccctggctaattgcctgttcttttccagcctgattttttttcccacaggaagagcccacatgtagccctgaggtttccttcccaggacagctgcagggtagagatcattttaagtgcttgtggagttgacatccctattgactctttcccagctgatatcagagacttagacccagcactccttggattagctctgcagagtgtcttggttgagagaataacctcatagtaccaacatgacatgtgacttggaaagagactagaggccacacttgataaatcatggggcacagatatgttcccacccaacaaatgtgataagtgattgtgcagccagagccagccttccttcaatcaaggtttccaggcagagcaaataccctagagattctctgtgatataggaaatttggatcaaggaagctaaaagaattacagggatgtttttaatcccactatggactcagtctcctggaaataggtctgtccactcctggtcattggtggatgttaaacccatattcctttcaactgctgcctgctagggaaaactgctcctcattatcatcactattattgctcaccactgtatcccctctacttggcaagtggttgtcaagttctagttgttcaataaatgtgttaataatgcttaaaaaaaa

SEQ ID NO: 318486 - DNA, 2697 bp, Homo sapiens
tttcttcggaatgagagactcaaccataatagaaagaatggagaactattaaccaccattcttcagtgggctgtgattttcagaggggaatactaagaaatggttttccatactggaacccaaaggtaaagacactcaaggacagacatttttggcagagctcagttttctgtgcttggaccctctgggcccatcctggccatggtgggtgaagacgctgatctgccctgtcacctgttcccgaccatgagtgcagagaccatggagctgaggtgggtgagttccagcctaaggcaggtggtgaacgtgtatgcagatggaaaggaagtggaagacaggcagagtgcaccgtatcgagggagaacttcgattctgcgggatggcatcactgcagggaaggctgctctccgaatacacaacgtcacagcctctgacagtggaaagtacttgtgttatttccaagatggtgacttctacgaaaaagccctggtggagctgaaggttgcagctgtggttgcagatggagtgggcctgtatgcagtagcagcatctgtgatcatgagaggcagctctggtgggggtgtatcctgcatcatcagaaattccctcctcggcctggaaaagacagccagcatatccatcgcagaccccttcttcaggagcgcccagccctggatcgcggccctggcagggaccctgcctatctcgttgctgcttctcgcaggagccagttacttcttgtggagacaacagaaggaaaaaattgctctgtccagggagacagaaagagagcgagagatgaaagaaatgggatacgctgcaacagagcaagaaataagcctaagagagaagctccaggaggaactcaagtggaggaaaatccagtacatggctcgtggagagaagtctttggcctatcatgaatggaaaatggccctcttcaaacctgcggatgtgattctggatccagacacggcaaacgccatcctccttgtttctgaggaccagaggagtgtgcagcgtgctgaagagccgcgggatctgccagacaaccctgagagatttgaatggcgttactgtgtccttggctgtgaaaacttcacatcagggagacattactgggaggtggaagtgggggacagaaaagagtggcatattggggtatgtagtaagaacgtggagaggaaaaaaggttgggtcaaaatgacaccggagaacggatactggactatgggcctgactgatgggaataagtatcgggctctcactgagcccagaaccaacctgaaacttcctgagcctcctaggaaagtggggatcttcctggactatgagactggagagatctcgttctataatgccacagatggatctcatatctacacctttccgcacgcctctttctctgagcctctatatcctgttttcagaattttgaccttggagcccactgccctgaccatttgcccaataccaaaagaagtagagagttcccccgatcctgacctagtgcctgatcattccctggagacaccactgaccccgggcttagctaatgaaagtggggagcctcaggctgaagtaacatctctgcttctccctgcccaccctggagctgaggtctccccttctgcaacaaccaatcagaaccataagctacaggcacgcactgaagcactttactgatattcattccattattccatatgacagttgttttgagtttcgtaccaccttattgtccccttatacagataaggaaactggggtgcagaaaggtgaattaactttacaaagtagacatgacaagtgaacagcagagctgggatctaaacagcaataactaacattaacagagaatttaaaatgttcttagtgctgtgttataagctttggtggatgtcactcctttaatcctcacaacaccctgtcgggtagtcatattttgcaagtatggaagctgaggcagggcaacatgaagtaacttacataactcatacagtaatttgtgcagttgggagatgttcagccttagtccctggctaattgcctgttcttttccagcctgattttttttcccacaggaagagcccacatgtagccctgaggtttccttcccaggacagctgcagggtagagatcattttaagtgcttgtggagttgacatccctattgactctttcccagctgatatcagagacttagacccagcactccttggattagctctgcagagtgtcttggttgagagaataacctcatagtaccaacatgacatgtgacttggaaagagactagaggccacacttgataaatcatggggcacagatatgttcccacccaacaaatgtgataagtgattgtgcagccagagccagccttccttcaatcaaggtttccaggcagagcaaataccctagagattctctgtgatataggaaatttggatcaaggaagctaaaagaattacagggatgtttttaatcccactatggactcagtctcctggaaataggtctgtccactcctggtcattggtggatgttaaacccatattcctttcaactgctgcctgctagggaaaactgctcctcattatcatcactattattgctcaccactgtatcccctctacttggcaagtggttgtcaagttctagttgttcaataaatgtgttaataatgcttaaaaaaaa

SEQ ID NO: 318487 - DNA, 1856 bp, Homo sapiens
aacccttccctattcattccattgcagagtggaggaaaatccagtacatggctcgtggagagaagtctttggcctatcatgaatggaaaatggccctcttcaaacctgcggatgtgattctggatccagacacggcaaacgccatcctccttgtttctgaggaccagaggagtgtgcagcgtgctgaagagccgcgggatctgccagacaaccctgagagatttgaatggcgttactgtgtccttggctgtgaaaacttcacatcagggagacattactgggaggtggaagtgggggacagaaaagagtggcatattggggtatgtagtaagaacgtggagaggaaaaaaggttgggtcaaaatgacaccggagaacggatactggactatgggcctgactgatgggaataagtatcgggctctcactgagcccagaaccaacctgaaacttcctgagcctcctaggaaagtggggatcttcctggactatgagactggagagatctcgttctataatgccacagatggatctcatatctacacctttccgcacgcctctttctctgagcctctatatcctgttttcagaattttgaccttggagcccactgccctgaccatttgcccaataccaaaagaagtagagagttcccccgatcctgacctagtgcctgatcattccctggagacaccactgaccccgggcttagctaatgaaagtggggagcctcaggctgaagtaacatctctgcttctccctgcccaccctggagctgaggtctccccttctgcaacaaccaatcagaaccataagctacaggcacgcactgaagcactttactgatattcattccattattccatatgacagttgttttgagtttcgtaccaccttattgtccccttatacagataaggaaactggggtgcagaaaggtgaattaactttacaaagtagacatgacaagtgaacagcagagctgggatctaaacagcaataactaacattaacagagaatttaaaatgttcttagtgctgtgttataagctttggtggatgtcactcctttaatcctcacaacaccctgtcgggtagtcatattttgcaagtatggaagctgaggcagggcaacatgaagtaacttacataactcatacagtaatttgtgcagttgggagatgttcagccttagtccctggctaattgcctgttcttttccagcctgattttttttcccacaggaagagcccacatgtagccctgaggtttccttcccaggacagctgcagggtagagatcattttaagtgcttgtggagttgacatccctattgactctttcccagctgatatcagagacttagacccagcactccttggattagctctgcagagtgtcttggttgagagaataacctcatagtaccaacatgacatgtgacttggaaagagactagaggccacacttgataaatcatggggcacagatatgttcccacccaacaaatgtgataagtgattgtgcagccagagccagccttccttcaatcaaggtttccaggcagagcaaataccctagagattctctgtgatataggaaatttggatcaaggaagctaaaagaattacagggatgtttttaatcccactatggactcagtctcctggaaataggtctgtccactcctggtcattggtggatgttaaacccatattcctttcaactgctgcctgctagggaaaactgctcctcattatcatcactattattgctcaccactgtatcccctctacttggcaagtggttgtcaagttctagttgttcaataaatgtgttaataatgcttaaaaaaaa

SEQ ID NO: 318488 - DNA, 2217 bp, Homo sapiens
tttcttcggaatgagagactcaaccataatagaaagaatggagaactattaaccaccattcttcagtgggctgtgattttcagaggggaatactaagaaatggttttccatactggaacccaaaggtaaagacactcaaggacagacatttttggcagagcatagatgaaaatggcaagttccctggctttccttctgctcaactttcatgtctccctcttcttggtccagctgctcactccttgctcagctcagttttctgtgcttggaccctctgggcccatcctggccatggtgggtgaagacgctgatctgccctgtcacctgttcccgaccatgagtgcagagaccatggagctgaggtgggtgagttccagcctaaggcaggtggtgaacgtgtatgcagatggaaaggaagtggaagacaggcagagtgcaccgtatcgagggagaacttcgattctgcgggatggcatcactgcagggaaggctgctctccgaatacacaacgtcacagcctctgacagtggaaagtacttgtgttatttccaagatggtgacttctacgaaaaagccctggtggagctgaaggttgcagcattgggttctgatcttcacattgaagtgaagggttatgaggatggagggatccatctggagtgcaggtccactggctggtacccccaaccccaaataaagtggagcgacaccaagggagagaacatcccggctgtggaagcacctgtggttgcagatggagtgggcctgtatgcagtagcagcatctgtgatcatgagaggcagctctggtgggggtgtatcctgcatcatcagaaattccctcctcggcctggaaaagacagccagcatatccatcgcagaccccttcttcaggagcgcccagccctggatcgcggccctggcagggaccctgcctatctcgttgctgcttctcgcaggagccagttacttcttgtggagacaacagaaggaaaaaattgctctgtccagggagacagaaagagagcgagagatgaaagaaatgggatacgctgcaacagagcaagaaataagcctaagagagaagctccaggaggaactcaagtggaggaaaatccagtacatggctcgtggagagaagtctttggcctatcatgaatggaaaatggccctcttcaaacctgcggatgtgattctggatccagacacggcaaacgccatcctccttgtttctgaggaccagaggagtgtgcagcgtgctgaagagccgcgggatctgccagacaaccctgagagatttgaatggcgttactgtgtccttggctgtgaaaacttcacatcagggagacattactgggaggtggaagtgggggacagaaaagagtggcatattggggtatgtagtaagaacgtggagaggaaaaaaggttgggtcaaaatgacaccggagaacggatactggactatgggcctgactgatgggaataagtatcgggctctcactgagcccagaaccaacctgaaacttcctgagcctcctaggaaagtggggatcttcctggactatgagactggagagatctcgttctataatgccacagatggatctcatatctacacctttccgcacgcctctttctctgagcctctatatcctgttttcagaattttgaccttggagcccactgccctgaccatttgcccaataccaaaagaagtagagagttcccccgatcctgacctagtgcctgatcattccctggagacaccactgaccccgggcttagctaatgaaagtggggagcctcaggctgaagtaacatctctgcttctccaagacgtgctggaaaggttgagcccagagtggccgaggctggaccctgtggcaccaagtggggtcggctgaccgtgtggcaggtatcgtagcactggactcttggcgtgtgggaagggatgctttctctttgtcgcccattcttcattactgtttctcatcagttcccctgtgcagatgggctgtgaaattaaattggagtcttgataagaacattttaatttgacttaatattttaaagattgaatccagatcacttgttgctgtcttaatggaatggttttctacaggagctgtaacatacttaaaaatatgaatgtattatgtaaatatggcttctttacataaaaaataaaatgtcaacactgtacttttctgaacaca

SEQ ID NO: 318489 - DNA, 1304 bp, Homo sapiens
tttcttcggaatgagagactcaaccataatagaaagaatggagaactattaaccaccattcttcagtgggctgtgattttcagaggggaatactaagaaatggttttccatactggaacccaaaggtaaagacactcaaggacagacatttttggcagagcatagatgaaaatggcaagttccctggctttccttctgctcaactttcatgtctccctcttcttggtccagctgctcactccttgctcagctcagttttctgtgcttggaccctctgggcccatcctggccatggtgggtgaagacgctgatctgccctgtcacctgttcccgaccatgagtgcagagaccatggagctgaggtgggtgagttccagcctaaggcaggtggtgaacgtgtatgcagatggaaaggaagtggaagacaggcagagtgcaccgtatcgagggagaacttcgattctgcgggatggcatcactgcagggaaggctgctctccgaatacacaacgtcacagcctctgacagtggaaagtacttgtgttatttccaagatggtgacttctacgaaaaagccctggtggagctgaaggttgcagcattgggttctgatcttcacattgaagtgaagggttatgaggatggagggatccatctggagtgcaggtccactggctggtacccccaaccccaaataaagtggagcgacaccaagggagagaacatcccggctgtggaagcacctgtggttgcagatggagtgggcctgtatgcagtagcagcatctgtgatcatgagaggcagctctggtgggggtgtatcctgcatcatcagaaattccctcctcggcctggaaaagacagccagcatatccatcgcaggtcagtaccctgcttggcctcagctttactgagctgagctgtggcaggtgatgaagggggatgtgtgagtctctactgtgtgagtctctgcggtcaacctgggtctctacaatgcatgtaaggctcaaagcagggacctgaaggctactcactgctttaggggagcttccccacgccacaaagctgttcatgccacaaacatttactgatcacttcctgtctgacagaaacagaaagtgtgacaggcagtgggaattggggaaaaacattaagagaagctccttatgtaaagtcaaatgacaaaatgggaaaacatatatatatttacaaactcatagagaaagagctaatctttttgaaacagaagagtttgaaaactgagtaaaaaatattaacaaaggtcatgaattgttaattcacagga

SEQ ID NO: 318490 - DNA, 3002 bp, Homo sapiens
tttcttcggaatgagagactcaaccataatagaaagaatggagaactattaaccaccattcttcagtgggctgtgattttcagaggggaatactaagaagtaagtggggaatgttgattagagcctgggctacaatgcctgggaggacaagagctgaatcgctgagagtgatggttttccatactggaacccaaaggtaaagacactcaaggacagacatttttggcagagcatagatgaaaatggcaagttccctggctttccttctgctcaactttcatgtctccctcttcttggtccagctgctcactccttgctcagctcagttttctgtgcttggaccctctgggcccatcctggccatggtgggtgaagacgctgatctgccctgtcacctgttcccgaccatgagtgcagagaccatggagctgaggtgggtgagttccagcctaaggcaggtggtgaacgtgtatgcagatggaaaggaagtggaagacaggcagagtgcaccgtatcgagggagaacttcgattctgcgggatggcatcactgcagggaaggctgctctccgaatacacaacgtcacagcctctgacagtggaaagtacttgtgttatttccaagatggtgacttctacgaaaaagccctggtggagctgaaggttgcagcattgggttctgatcttcacattgaagtgaagggttatgaggatggagggatccatctggagtgcaggtccactggctggtacccccaaccccaaataaagtggagcgacaccaagggagagaacatcccggctgtggaagcacctgtggttgcagatggagtgggcctgtatgcagtagcagcatctgtgatcatgagaggcagctctggtgggggtgtatcctgcatcatcagaaattccctcctcggcctggaaaagacagccagcatatccatcgcagaccccttcttcaggagcgcccagccctggatcgcggccctggcagggaccctgcctatctcgttgctgcttctcgcaggagccagttacttcttgtggagacaacagaaggaaaaaattgctctgtccagggagacagaaagagagcgagagatgaaagaaatgggatacgctgcaacagagcaagaaataagcctaagagagaagctccaggaggaactcaagtggaggaaaatccagtacatggctcgtggagagaagtctttggcctatcatgaatggaaaatggccctcttcaaacctgcggatgtgattctggatccagacacggcaaacgccatcctccttgtttctgaggaccagaggagtgtgcagcgtgctgaagagccgcgggatctgccagacaaccctgagagatttgaatggcgttactgtgtccttggctgtgaaaacttcacatcagggagacattactgggaggtggaagtgggggacagaaaagagtggcatattggggtatgtagtaagaacgtggagaggaaaaaaggttgggtcaaaatgacaccggagaacggatactggactatgggcctgactgatgggaataagtatcgggctctcactgagcccagaaccaacctgaaacttcctgagcctcctaggaaagtggggatcttcctggactatgagactggagagatctcgttctataatgccacagatggatctcatatctacacctttccgcacgcctctttctctgagcctctatatcctgttttcagaattttgaccttggagcccactgccctgaccatttgcccaataccaaaagaagtagagagttcccccgatcctgacctagtgcctgatcattccctggagacaccactgaccccgggcttagctaatgaaagtggggagcctcaggctgaagtaacatctctgcttctccctgcccaccctggagctgaggtctccccttctgcaacaaccaatcagaaccataagctacaggcacgcactgaagcactttactgatattcattccattattccatatgacagttgttttgagtttcgtaccaccttattgtccccttatacagataaggaaactggggtgcagaaaggtgaattaactttacaaagtagacatgacaagtgaacagcagagctgggatctaaacagcaataactaacattaacagagaatttaaaatgttcttagtgctgtgttataagctttggtggatgtcactcctttaatcctcacaacaccctgtcgggtagtcatattttgcaagtatggaagctgaggcagggcaacatgaagtaacttacataactcatacagtaatttgtgcagttgggagatgttcagccttagtccctggctaattgcctgttcttttccagcctgattttttttcccacaggaagagcccacatgtagccctgaggtttccttcccaggacagctgcagggtagagatcattttaagtgcttgtggagttgacatccctattgactctttcccagctgatatcagagacttagacccagcactccttggattagctctgcagagtgtcttggttgagagaataacctcatagtaccaacatgacatgtgacttggaaagagactagaggccacacttgataaatcatggggcacagatatgttcccacccaacaaatgtgataagtgattgtgcagccagagccagccttccttcaatcaaggtttccaggcagagcaaataccctagagattctctgtgatataggaaatttggatcaaggaagctaaaagaattacagggatgtttttaatcccactatggactcagtctcctggaaataggtctgtccactcctggtcattggtggatgttaaacccatattcctttcaactgctgcctgctagggaaaactgctcctcattatcatcactattattgctcaccactgtatcccctctacttggcaagtggttgtcaagttctagttgttcaataaatgtgttaataatgcttaaaaaaaa

SEQ ID NO: 318491 - DNA, 2078 bp, Homo sapiens
catgacccacagctctccccttcgcagaccccttcttcaggagcgcccagccctggatcgcggccctggcagggaccctgcctatctcgttgctgcttctcgcaggagccagttacttcttgtggagacaacagaaggaaaaaattgctctgtccagggagacagaaagagagcgagagatgaaagaaatgggatacgctgcaacagagcaagaaataagcctaagagagaagctccaggaggaactcaagtggaggaaaatccagtacatggctcgtggagagaagtctttggcctatcatgaatggaaaatggccctcttcaaacctgcggatgtgattctggatccagacacggcaaacgccatcctccttgtttctgaggaccagaggagtgtgcagcgtgctgaagagccgcgggatctgccagacaaccctgagagatttgaatggcgttactgtgtccttggctgtgaaaacttcacatcagggagacattactgggaggtggaagtgggggacagaaaagagtggcatattggggtatgtagtaagaacgtggagaggaaaaaaggttgggtcaaaatgacaccggagaacggatactggactatgggcctgactgatgggaataagtatcgggctctcactgagcccagaaccaacctgaaacttcctgagcctcctaggaaagtggggatcttcctggactatgagactggagagatctcgttctataatgccacagatggatctcatatctacacctttccgcacgcctctttctctgagcctctatatcctgttttcagaattttgaccttggagcccactgccctgaccatttgcccaataccaaaagaagtagagagttcccccgatcctgacctagtgcctgatcattccctggagacaccactgaccccgggcttagctaatgaaagtggggagcctcaggctgaagtaacatctctgcttctccctgcccaccctggagctgaggtctccccttctgcaacaaccaatcagaaccataagctacaggcacgcactgaagcactttactgatattcattccattattccatatgacagttgttttgagtttcgtaccaccttattgtccccttatacagataaggaaactggggtgcagaaaggtgaattaactttacaaagtagacatgacaagtgaacagcagagctgggatctaaacagcaataactaacattaacagagaatttaaaatgttcttagtgctgtgttataagctttggtggatgtcactcctttaatcctcacaacaccctgtcgggtagtcatattttgcaagtatggaagctgaggcagggcaacatgaagtaacttacataactcatacagtaatttgtgcagttgggagatgttcagccttagtccctggctaattgcctgttcttttccagcctgattttttttcccacaggaagagcccacatgtagccctgaggtttccttcccaggacagctgcagggtagagatcattttaagtgcttgtggagttgacatccctattgactctttcccagctgatatcagagacttagacccagcactccttggattagctctgcagagtgtcttggttgagagaataacctcatagtaccaacatgacatgtgacttggaaagagactagaggccacacttgataaatcatggggcacagatatgttcccacccaacaaatgtgataagtgattgtgcagccagagccagccttccttcaatcaaggtttccaggcagagcaaataccctagagattctctgtgatataggaaatttggatcaaggaagctaaaagaattacagggatgtttttaatcccactatggactcagtctcctggaaataggtctgtccactcctggtcattggtggatgttaaacccatattcctttcaactgctgcctgctagggaaaactgctcctcattatcatcactattattgctcaccactgtatcccctctacttggcaagtggttgtcaagttctagttgttcaataaatgtgttaataatgcttaaaaaaaa

SEQ ID NO: 318492 - DNA, 1121 bp, Homo sapiens
tttcttcggaatgagagactcaaccataatagaaagaatggagaactattaaccaccattcttcagtgggctgtgattttcagaggggaatactaagaaatggttttccatactggaacccaaaggtaaagacactcaaggacagacatttttggcagagcatagatgaaaatggcaagttccctggctttccttctgctcaactttcatgtctccctcttcttggtccagctgctcactccttgctcagctcagttttctgtgcttggaccctctgggcccatcctggccatggtgggtgaagacgctgatctgccctgtcacctgttcccgaccatgagtgcagagaccatggagctgaggtgggtgagttccagcctaaggcaggtggtgaacgtgtatgcagatggaaaggaagtggaagacaggcagagtgcaccgtatcgagggagaacttcgattctgcgggatggcatcactgcagggaaggctgctctccgaatacacaacgtcacagcctctgacagtggaaagtacttgtgttatttccaagatggtgacttctacgaaaaagccctggtggagctgaaggttgcagcattgggttctgatcttcacattgaagtgaagggttatgaggatggagggatccatctggagtgcaggtccactggctggtacccccaaccccaaataaagtggagcgacaccaagggagagaacatcccggctgtggaagcacctgtggttgcagatggagtgggcctgtatgcagtagcagcatctgtgatcatgagaggcagctctggtgggggtgtatcctgcatcatcagaaattcccctagagattctctgtgatataggaaatttggatcaaggaagctaaaagaattacagggatgtttttaatcccactatggactcagtctcctggaaataggtctgtccactcctggtcattggtggatgttaaacccatattcctttcaactgctgcctgctagggaaaactgctcctcattatcatcactattattgctcaccactgtatcccctctacttggcaagtggttgtcaagttctagttgttcaataaatgtgttaataatgcttaaaaaaaa

SEQ ID NO: 318493 - DNA, 441 bp, Homo sapiens
ttccagcctaaggcaggtggtgaacgtgtatgcagatggaaaggaagtggaagacaggcagagtgcaccgtatcgagggagaacttcgattctgcgggatggcatcactgcagggaaggctgctctccgaatacacaacgtcacagcctctgacagtggaaagtacttgtgttatttccaagatggtgacttctacgaaaaagccctggtggagctgaaggttgcagtgcaggtgagcctccaggttttgttctgagaacacttctctgtaggatctagagcagatgcagagtccctcttccaaaagtactgcagacactcctggctgctcactagcaattgtctgcactgcctcccaacttagcttctctgcaacccttaagaaagacacattctttctttagaaagaattcctgctgtaccttacatgccgaagtaaac

SEQ ID NO: 318494 - DNA, 2153 bp, Homo sapiens
tgatgtttccccatcttgcgttccttcacactgtgtacatgctcttattggaaccctgggtaatctaactgttattgattcaatctttctgtaggaagaagaactgaagcagggagtaagttatgtcccctactgcaggtcttaactaacagtggaggggcctgccgacctgcggttttctcattgcttttgctctaatgtatgttcatgcttcagtttggaaagagaaaaaagtcatactaatttgcttctttttcaatgtagtgcttgaattgagatatataaatttagcattttttataactatcactactatccacatcaaaagaagaactatgacatcttttagaaaagggaacgaattgtcatttattggaaacattttagatccccagaggtataagtttcaaaccagtcttagcttttcaagttgttgatcagacccttctcttaacagagagataccacagtcactagagataccctgaggttcatgtcatcccaaaacccacagcactcagaagctaacctctacacccactcacactgtgagtattcagttcggtttcattttactgaaaacctgtgaaacctctttttataaaaatcaggcaattaaatcccttttcatcacacaattattgagccttgttccccatggctcaccaaaatgtgctcaattttgtgagagaaagactgtactccataactgactattcacgtcccatctttttggctcttccccaaagcagaatccttactgttggttgacagtaatctctttttaaaaagtaactctcagctttttccttagcaccagagcctttcggctccgggagacgagagggtcattacatacttttttttttttctggaaataggggcattgtgactttatagcctaaactggagctgtctgaacctgtggtcaggctcaagagccagcagggggagcagcaaactcaaaaaaaaaacaaattaaattaaattaaattaaattaaatagaagcaaaataaaagcagctttaatttcaagtgcatgtaccacgctatgtatgacaatatatcccactcactagcattatttaaaagtttcacattatttccatggatcaattagaaccacaacctgtccaatttcaacgtatctttcatttcttctgtatgctcttttctattattcattatgtgtgtttgtgtgtaacaaagaatgtttggaaaatgctggacacatttttacccttcattcccatggtctgtaaaaaaggaaagtgtaaaatcaatctgtaatgtcagacaataaagataatgtattacattattttgtattttgtgaaaaaaattactttactaaattaaagtcaaattttaacagaagacagtccccctgggtgaaggacacataacacatacagcctgtataattgcccatgaatgcatacatggggtattgctattgtatttccaatacacttagatcatggtaaagaaaaatgccttcttcatgatacttctctgcaaatggcttctttcctctcctgtctcttatttagcatgtgcatagaaaaaggaaataaggttcaattataacctccctcctcctagcagagagagagggcaatcatcctgtcgtcatcagccttgctttagccatttcccttggggatactttccaggccatttcccaggcagcaggatcttgaaaggctcctatggaccaggaagttcgtaaacagatggatgcacagagccaaactgtggcagtgcccccaaggtggcgccactgccccctcaccttccagctcctctccaccaagcccctcagcagcttctgcatctcagggggccaacagcgggtactgcggtgtcggtacccaaggaccagggcccacgtcacccagatgtcagcaatacatcgtctgggtagtggcagagtttgcctatttcacttatttatcttttttgcttttatacacaagcctcttttcaaaaaggacctgaggcagcttacaacaaaagatataaacagtgacttcataaaattgaaatagaaaaatcaaaaactaaagaaaataaaatgtgaatatgctaatcttaagggacaaggatgttactctgcatgttctggcaatgaagcaaaaaaaaaaaaaaag

SEQ ID NO: 318495 - DNA, 1713 bp, Homo sapiens
aggatcctcaggaaaccctggtactggcagcagccagcctctgctgtgcccacatgacccacaactctggcagcggacccggcacttccaacattattaaataataagaaagcggctcctactccaggctcaaacctccctgcagaccaatggacaccttctaagagtttggcgagtcagtgactgaagcgcccgtccattccaagataaataggatttaccaatccttggatgaagtgcttgggaagtctttaagtgccataatcaactgccatttcaaagaatatagatggttttgaaaagttcatgctgtcccttcattgaattttagaatgattgaagatagtgggaaaagaggaaataccatggcagaaagaagacagctgtttgcagagatgagggctcaagatctggatcgcatccgactctccacctacagaacagcatgcaagcttaggtttgttcagaagaaatgcaatttgcacctggtggacatatggaatgtcatagaagcattgcgggaaaatgctctgaacaacctggacccaaacactgaactcaacgtgtcccgcttagaggctgtgctctccactattttttaccagctcaacaaacggatgccaaccactcaccaaatccatgtggagcagtccatcagcctcctccttaacttcctgcttgcagcgtttgatccggaaggccatggtaaaatttcagtatttgctgtcaaaatggctttagccacattgtgtggagggaagatcatggacaaattaagatatattttctcaatgatttctgactccagtggggtgatggtttatggacgatatgaccaattccttcgggaagttctcaaactacccacggcagtttttgaaggtccttcatttggttacacagaacagtcagccagatcctgtttctcccaacagaaaaaagtcacgttaaatggtttcttggacacgcttatgtcagatcctcccccgcagtgtctggtctggttgcctcttctgcatcgactagcaaatgtggaaaatgtcttccatccggttgagtgttcctactgccacagtgagagtatgatgggatttcgctaccgatgccaacagtgtcacaattaccagctctgtcaggactgcttctggaggggacatgccggtggttctcatagcaaccagcaccaaatgaaagagtacacgtcatggaaatcacctgctaagaagctgactaatgcattaagcaagtccctgagctgtgcttccagccgtgaacctttgcaccccatgttcccagatcagcctgagaagccactcaacttggctcacatcgtgcctcccagacctgtaaccagcatgaacgacaccctgttctcccactctgttccctcctcaggaagtccttttattaccaggagctcggacggtgcttttggtggatgcgtctagatggataacatgacttcttctaccctaaaatattcctataatactttgagctgttctggttcctccagggtgcatggtacccattaacccaaaatatgattatttcccttttttcccattttcagtcattttggaatgttctctgtgaaccacagttgtgttgtttaaagctcacatttctttctgtcaccacagagattggcctacggtttctgttttgagggtgctgttcaataaagctgtgtacactaaatgtctttcctct

SEQ ID NO: 318496 - DNA, 1688 bp, Homo sapiens
agaggctggatttcatactcatagctctccctagaatttcagagagttctgttatgatctctgttgtaattaccaatttggttcaagtttgttctttaaatgaatatgcttagaattcacatatgttctggatgtactggaattaaaaggatttaagagatcatggtgtgcatgttctaggataaataggatttaccaatccttggatgaagtgcttgggaagtctttaagtgccataatcaactgccatttcaaagaatatagatggttttgaaaagttcatgctgtcccttcattgaattttagaatgattgaagatagtgggaaaagaggaaataccatggcagaaagaagacagctgtttgcagagatgagggctcaagatctggatcgcatccgactctccacctacagaacagcatgcaagcttaggtttgttcagaagaaatgcaatttgcacctggtggacatatggaatgtcatagaagcattgcgggaaaatgctctgaacaacctggacccaaacactgaactcaacgtgtcccgcttagaggctgtgctctccactattttttaccagctcaacaaacggatgccaaccactcaccaaatccatgtggagcagtccatcagcctcctccttaacttcctgcttgcagcgtttgatccggaaggccatggtaaaatttcagtatttgctgtcaaaatggctttagccacattgtgtggagggaagatcatggacaaattaagatatattttctcaatgatttctgactccagtggggtgatggtttatggacgatatgaccaattccttcgggaagttctcaaactacccacggcagtttttgaaggtccttcatttggttacacagaacagtcagccagatcctgtttctcccaacagaaaaaagtcacgttaaatggtttcttggacacgcttatgtcagatcctcccccgcagtgtctggtctggttgcctcttctgcatcgactagcaaatgtggaaaatgtcttccatccggttgagtgttcctactgccacagtgagagtatgatgggatttcgctaccgatgccaacagtgtcacaattaccagctctgtcaggactgcttctggaggggacatgccggtggttctcatagcaaccagcaccaaatgaaagagtacacgtcatggaaatcacctgctaagaagctgactaatgcattaagcaagtccctgagctgtgcttccagccgtgaacctttgcaccccatgttcccagatcagcctgagaagccactcaacttggctcacatcgtgcctcccagacctgtaaccagcatgaacgacaccctgttctcccactctgttccctcctcaggaagtccttttattaccaggagctcggacggtgcttttggtggatgcgtctagatggataacatgacttcttctaccctaaaatattcctataatactttgagctgttctggttcctccagggtgcatggtacccattaacccaaaatatgattatttcccttttttcccattttcagtcattttggaatgttctctgtgaaccacagttgtgttgtttaaagctcacatttctttctgtcaccacagagattggcctacggtttctgttttgagggtgctgttcaataaagctgtgtacactaaatgtctttcctct

SEQ ID NO: 318497 - DNA, 736 bp, Homo sapiens
tattgtaaaatctttagtgtctctgaattgattatttcaaaatggtgtcaaatgccagtagtcaattcagagacactaaagatttcacaatattcattggtattgtaaaaaaaaaatactattgtatggatttttgtattgctgttaagtattgttttgtgtgtgtgtgtgtgtgtgtgtgttggaacctcctggggacatgttatattttgaagtgattaaactatttaattgtgtgtctatattttggagtggaataatttcttcattaaaaaatgtttttaaaaacactatatcttgggtggtttattcctttgtttcagtgaatctttcctaaagcaacgtggagtcagtctgttgaaagaaggaaggcaggtacttgcagtttaaagcaggacccattgatggaatattgagccaccgaggcaaaatagctcaccttctcttgccttgggggatgcatggtttttaccattctactgttttattagcatctgtgagcatctaatagaaatactattctgctatttatggaaatccttattataattgatatggaagtgagtttgaaattctaacagctaacatatttcatgtttgtatcacacactgttcttaacactttatgtgacttcactcaattctttgaatcctctgcatctagccatgtattctgcaaatattaagtgctcaatggtttttttgttgaattactgaataaatgaattagtggtgt

SEQ ID NO: 318498 - DNA, 343 bp, Homo sapiens
ttgtgaagcctactcctttatttgcaggtcataaaaaaatctaacgagtcattctttatttcttcaattgtatcagctagaggttgggagtgaaacagagagtaatgtggattctgaatttgcacggactcagtttgaggatcttgttccctcaccaacctctgaaaaggcttttctagcgcaaatccatgcccgaaaacctgggtacattcacagtggagctaccacaagtaccatgcgtggcgacatgtgagtatcttccgcttggaggcattttctcagtacaagttcatatcagggggtggggtcttcggacataattaataactattgagtaatataa

SEQ ID NO: 318499 - DNA, 6498 bp, Homo sapiens
aggatcctcaggaaaccctggtactggcagcagccagcctctgctgtgcccacatgacccacaactctggcagcggacccggcacttccaacattattaaataataagaaagcggctcctactccaggctcaaacctccctgcagaccaatggacaccttctaagagtttggcgagtcagtgactgaagcgcccgtccattccaagataaataggatttaccaatccttggatgaagtgcttgggaagtctttaagtgccataatcaactgccatttcaaagaatatagatggttttgaaaagttcatgctgtcccttcattgaattttagaatgattgaagatagtgggaaaagaggaaataccatggcagaaagaagacagctgtttgcagagatgagggctcaagatctggatcgcatccgactctccacctacagaacagcatgcaagcttaggtttgttcagaagaaatgcaatttgcacctggtggacatatggaatgtcatagaagcattgcgggaaaatgctctgaacaacctggacccaaacactgaactcaacgtgtcccgcttagaggctgtgctctccactattttttaccagctcaacaaacggatgccaaccactcaccaaatccatgtggagcagtccatcagcctcctccttaacttcctgcttgcagcgtttgatccggaaggccatggtaaaatttcagtatttgctgtcaaaatggctttagccacattgtgtggagggaagatcatggacaaattaagatatattttctcaatgatttctgactccagtggggtgatggtttatggacgatatgaccaattccttcgggaagttctcaaactacccacggcagtttttgaaggtccttcatttggttacacagaacagtcagccagatcctgtttctcccaacagaaaaaagtcacgttaaatggtttcttggacacgcttatgtcagatcctcccccgcagtgtctggtctggttgcctcttctgcatcgactagcaaatgtggaaaatgtcttccatccggttgagtgttcctactgccacagtgagagtatgatgggatttcgctaccgatgccaacagtgtcacaattaccagctctgtcaggactgcttctggaggggacatgccggtggttctcatagcaaccagcaccaaatgaaagagtacacgtcatggaaatcacctgctaagaagctgactaatgcattaagcaagtccctgagctgtgcttccagccgtgaacctttgcaccccatgttcccagatcagcctgagaagccactcaacttggctcacatcgtgcctcccagacctgtaaccagcatgaacgacaccctgttctcccactctgttccctcctcaggaagtccttttattaccaggagcatgcttgagagttcaaaccggcttgatgaagaacacaggctaattgccaggtatgcggcaaggctggcagcagagtcctcttcgtctcagccacctcagcagagaagtgctcctgacatctctttcaccatcgatgcgaataagcagcaaaggcagctgattgctgagctagaaaacaagaacagagaaatcttacaggagatccagagacttcggctagagcatgaacaagcttctcagcccacgccagagaaggcacagcaaaaccccaccctgctggcagaactccggctcctcagacagcgcaaagatgagctggaacagagaatgtctgctctccaggagagccggagagagctaatggtccagttggagggtctcatgaagctactaaagactcagggggcaggctctccccgctcctcccccagccacaccatcagcaggccaattcccatgcccatccggtcagcgtcagcctgctccaccccgacgcacacgccgcaggactccctcacaggagtagggggagatgtacaagaggcatttgcacaaagttcaagaagaaacttaaggaatgacttgctagtggctgcagattccatcactaacactatgtcctctcttgtgaaagagctgaattctgaggttgggagtgaaacagagagtaatgtggattctgaatttgcacggactcagtttgaggatcttgttccctcaccaacctctgaaaaggcttttctagcgcaaatccatgcccgaaaacctgggtacattcacagtggagctaccacaagtaccatgcgtggcgacatggttacggaggatgcagatccctatgtgcagcctgaagatgaaaactatgaaaatgactctgtccggcagctggagaatgagctccagatggaggaatacctgaaacagaagctgcaagatgaagcttatcaggtcagcttgcaaggttgaatgcaatatccttttatcacactcctctcaagcaagctatagtcagacagatgatgaaagtaacatgaaaactggtgatgatggagagccctgtggccacacagaggaggaagacagcagcctggcagcagcctcaccgaagagaggaaccaccacacccagcagctcctgacagacccccacccctaaagatgtgtcctgatgactatagtgcagctaactttttggttctcagatttgtaggtgcataggtgtgtgtttcaaggaaggaaaaaaaaagacttctgttcaaagttaacttatcagctacatcctctgtaacgtggttcatccctggttaaaaagcaaacaaacacaggctgaaaacccatgctgctgttatacacaatggcagtattaacaagcattttaaacctttgcacatgatattgaacctgttcagtttacaatgacaatattaatactgtttatagctagaagtttgatttctgaattctttgagattttagcaaaacagtttattatacactgtacatttttttcacagcaattggaaaaaaacaaccacttgcaatcattcaataaccctgaagaatttggttcctgagtgtacaaactcagagcccggaagccaagaagggtccttggcctgcacggtctgtagttgactccaagtctctgtgagcagtgacttgaaccaaacacaccaggaataatccattctttggggcctctttccaactcgaggttgttttctttcaagatactctaatcagccatagaatttagtgtaaatatttttttttccaaatagatatcatattcaaaaaaggcagcattcaaattatatagaatctagtttttaaaatcagcacagatcttcttaaaaactgtgaactatgttttgaaatactcgttactaaagctgtttataaaccacaggtgccataagatccccaaacggactaaagttatctctgctcttccatggtcttgttcctctcgttttggctttaggaagcatgtctttaacagcaccgctcgttcacaagttcccccatcaagttgtttggaggccttcagctttaaatgtacaggcttaaagtgcgcttgcaaacgtttgctctcctttttttctgaatgttgattgccttagctggccacctggtgttctgcatgtagccttctgtggtcatgtgaaaggagacaggctcttctaagttgagttgggatttttgcactcagtgaaaagctgaagtgcaaaagagctatcaaagacaagaggataaaagactgggatagtcttttccaaggaccctctttagagggccctaaagacctcctttgggaattctggggaaaaagaaaaagtaatcttctacttgcttcaagatttgatttttttaaaaaagcctgcgacctattcaatacattatgcttaaattagcagtttctctggaattcctgtctctcctttaaaagaaaggagagaacattttagaacaatagttctcaaagtgtgttccccggacaagcagcatctgcaacacttaggaaggtcttcgaaatactaatttgtaagccccacctcaggcctactgaatcagaagctctgggggttgggtccagaagtctgttttagtcaaccctctaggtgattctgatgctcgctaaaggttgagaactactgctttagaatgaagtcgtataataaagtctctgaaaaggccttattcagaataagcaagaaaggttctgtgattcacttttgcttctggggctggcaaaaaccttctctgaacccacacaccaagttcgtagttggtaggtgcccagccaagtcctgacatcttcatgccccctctgcagagggcggctgtacgatgttcacatgtctgcgtttggtcagacatcatctccttggctgccctttgaaaccaaatcacttgccttggggataaagtgctcaattggcattagtgagaagcccatcctatcccttgacatacttaatcatatatctctccagagaactcacctgacaaatgtctctgagcacaggctgacaccaaagtggcacaactgcacagttctcagatttctttgcacagattgatttttattgcgggttttgttggggtgtcttaatgttcatctcttttccactgcccatcctctgtgaacccatacctctctagatggagcaggtggccactggtgcctcatactcagtattgaaaaccactacatcccagctacctataatgctgtcagctcaaaatcatagccaggtagttcttgaactcagaacttaaatcctgcacgtggcactccaccactgactggaccgagctggcatatgttgtttctttgtgtttctacatcaaaatgttcgtctaagatttgaactgttctgctgataaccttccccgttgtcatagctatttcattgccaaccaactccatcacatggttgttgatatcgtcatataaagccattgcaaggactctggaaactgccgccaatgaccaatttctgactaaccagccaccttttctctctcttagctccacgtcagcactgagaccagactcgagcacccctgtcctgtaagcgagacaaaatggcgtgtgttattttggggttttgtgttttttggtgggtttctttccttggctctccagatttacttttggggcctgttctaagtgcaaacccagcaagtttcacttgtcctgtccattagatacaactacatcttgcgggggttgtttctttcttgttccacaatgaattgcacatccatctccatcagagctgatagcctgttaataagcactggtctaacacagccaaccctcctccacagcgccatattaatggaggaggggaggaaggtgaaatctactgcatgggattcaggaaacagttgtggttggtcaggacggaagttggggtaagtttggttggtcagagggagttgtgctggagattgtgaaaaatgggttcttgaatgatctactataaggcagggaaggttcatttgtaagtagtaatgtgaactgaattgcattaagagtgtgtggcctttgttgtgatatactatgtattttcttatatgcatgagccaaactgttgcatcataatttagcactgatgtctgcttttattttgatcatctttgtccacccttattagttcttggctgttaaccgtagatagatcttgtaaatccagcaacctttggttgctgcattccccttggttcgattccacgcaaggagccacaagtgagaactccactgtccttagaagaaagggcatttttacttttgaaccaaaaagagaaaaaaaaatcagaagtgttgcatcttgaggcgaattaactgtaagacatttttaattatgactactgcaatttgacaccatttgaaataatcaattcagagacactaaagatttcacaatattcattggtattgtaaaaaaaaaatactattgtatggatttttgtattgctgttaagtattgttttgtgtgtgtgtgtgtgtgtgtgtgttggaacctcctggggacatgttatattttgaagtgattaaactatttaattgtgtgtctatattttggagtggaataatttcttcattaaaaaatgtttttaaaaacactatatcttgggtggtttattcctttgtttcagtgaatctttcctaaagcaacgtggagtcagtctgttgaaagaaggaaggcaggtacttgcagtttaaagcaggacccattgatggaatattgagccaccgaggcaaaatagctcaccttctcttgccttgggggatgcatggtttttaccattctactgttttattagcatctgtgagcatctaatagaaatactattctgctatttatggaaatccttattataattgatatggaagtgagtttgaaattctaacagctaacatatttcatgtttgtatcacacactgttcttaacactttatgtgacttcactcaattctttgaatcctctgcatctagccatgtattctgcaaatattaagtgctcaatggtttttttgttgaattactgaataaatgaattagtggtgt

SEQ ID NO: 318500 - DNA, 6446 bp, Homo sapiens
ggcgccggccgcggctagcgcgaagcatgtgccgggcgccgcagccaggactgcggcgcggcgcctccccgggcggcgggcggcgcctcaggcccgcggggcggcggtagcggctgctgcaggatgtccggcccgggggcgcggggccgcgcagataaataggatttaccaatccttggatgaagtgcttgggaagtctttaagtgccataatcaactgccatttcaaagaatatagatggttttgaaaagttcatgctgtcccttcattgaattttagaatgattgaagatagtgggaaaagaggaaataccatggcagaaagaagacagctgtttgcagagatgagggctcaagatctggatcgcatccgactctccacctacagaacagcatgcaagcttaggtttgttcagaagaaatgcaatttgcacctggtggacatatggaatgtcatagaagcattgcgggaaaatgctctgaacaacctggacccaaacactgaactcaacgtgtcccgcttagaggctgtgctctccactattttttaccagctcaacaaacggatgccaaccactcaccaaatccatgtggagcagtccatcagcctcctccttaacttcctgcttgcagcgtttgatccggaaggccatggtaaaatttcagtatttgctgtcaaaatggctttagccacattgtgtggagggaagatcatggacaaattaagatatattttctcaatgatttctgactccagtggggtgatggtttatggacgatatgaccaattccttcgggaagttctcaaactacccacggcagtttttgaaggtccttcatttggttacacagaacagtcagccagatcctgtttctcccaacagaaaaaagtcacgttaaatggtttcttggacacgcttatgtcagatcctcccccgcagtgtctggtctggttgcctcttctgcatcgactagcaaatgtggaaaatgtcttccatccggttgagtgttcctactgccacagtgagagtatgatgggatttcgctaccgatgccaacagtgtcacaattaccagctctgtcaggactgcttctggaggggacatgccggtggttctcatagcaaccagcaccaaatgaaagagtacacgtcatggaaatcacctgctaagaagctgactaatgcattaagcaagtccctgagctgtgcttccagccgtgaacctttgcaccccatgttcccagatcagcctgagaagccactcaacttggctcacatcgtgcctcccagacctgtaaccagcatgaacgacaccctgttctcccactctgttccctcctcaggaagtccttttattaccaggagcatgcttgagagttcaaaccggcttgatgaagaacacaggctaattgccaggtatgcggcaaggctggcagcagagtcctcttcgtctcagccacctcagcagagaagtgctcctgacatctctttcaccatcgatgcgaataagcagcaaaggcagctgattgctgagctagaaaacaagaacagagaaatcttacaggagatccagagacttcggctagagcatgaacaagcttctcagcccacgccagagaaggcacagcaaaaccccaccctgctggcagaactccggctcctcagacagcgcaaagatgagctggaacagagaatgtctgctctccaggagagccggagagagctaatggtccagttggagggtctcatgaagctactaaagactcagggggcaggctctccccgctcctcccccagccacaccatcagcaggccaattcccatgcccatccggtcagcgtcagcctgctccaccccgacgcacacgccgcaggactccctcacaggagtagggggagatgtacaagaggcatttgcacaaagttcaagaagaaacttaaggaatgacttgctagtggctgcagattccatcactaacactatgtcctctcttgtgaaagagctgaattctgaggttgggagtgaaacagagagtaatgtggattctgaatttgcacggactcagtttgaggatcttgttccctcaccaacctctgaaaaggcttttctagcgcaaatccatgcccgaaaacctgggtacattcacagtggagctaccacaagtaccatgcgtggcgacatggttacggaggatgcagatccctatgtgcagcctgaagatgaaaactatgaaaatgactctgtccggcagctggagaatgagctccagatggaggaatacctgaaacagaagctgcaagatgaagcttatcaggtcagcttgcaaggttgaatgcaatatccttttatcacactcctctcaagcaagctatagtcagacagatgatgaaagtaacatgaaaactggtgatgatggagagccctgtggccacacagaggaggaagacagcagcctggcagcagcctcaccgaagagaggaaccaccacacccagcagctcctgacagacccccacccctaaagatgtgtcctgatgactatagtgcagctaactttttggttctcagatttgtaggtgcataggtgtgtgtttcaaggaaggaaaaaaaaagacttctgttcaaagttaacttatcagctacatcctctgtaacgtggttcatccctggttaaaaagcaaacaaacacaggctgaaaacccatgctgctgttatacacaatggcagtattaacaagcattttaaacctttgcacatgatattgaacctgttcagtttacaatgacaatattaatactgtttatagctagaagtttgatttctgaattctttgagattttagcaaaacagtttattatacactgtacatttttttcacagcaattggaaaaaaacaaccacttgcaatcattcaataaccctgaagaatttggttcctgagtgtacaaactcagagcccggaagccaagaagggtccttggcctgcacggtctgtagttgactccaagtctctgtgagcagtgacttgaaccaaacacaccaggaataatccattctttggggcctctttccaactcgaggttgttttctttcaagatactctaatcagccatagaatttagtgtaaatatttttttttccaaatagatatcatattcaaaaaaggcagcattcaaattatatagaatctagtttttaaaatcagcacagatcttcttaaaaactgtgaactatgttttgaaatactcgttactaaagctgtttataaaccacaggtgccataagatccccaaacggactaaagttatctctgctcttccatggtcttgttcctctcgttttggctttaggaagcatgtctttaacagcaccgctcgttcacaagttcccccatcaagttgtttggaggccttcagctttaaatgtacaggcttaaagtgcgcttgcaaacgtttgctctcctttttttctgaatgttgattgccttagctggccacctggtgttctgcatgtagccttctgtggtcatgtgaaaggagacaggctcttctaagttgagttgggatttttgcactcagtgaaaagctgaagtgcaaaagagctatcaaagacaagaggataaaagactgggatagtcttttccaaggaccctctttagagggccctaaagacctcctttgggaattctggggaaaaagaaaaagtaatcttctacttgcttcaagatttgatttttttaaaaaagcctgcgacctattcaatacattatgcttaaattagcagtttctctggaattcctgtctctcctttaaaagaaaggagagaacattttagaacaatagttctcaaagtgtgttccccggacaagcagcatctgcaacacttaggaaggtcttcgaaatactaatttgtaagccccacctcaggcctactgaatcagaagctctgggggttgggtccagaagtctgttttagtcaaccctctaggtgattctgatgctcgctaaaggttgagaactactgctttagaatgaagtcgtataataaagtctctgaaaaggccttattcagaataagcaagaaaggttctgtgattcacttttgcttctggggctggcaaaaaccttctctgaacccacacaccaagttcgtagttggtaggtgcccagccaagtcctgacatcttcatgccccctctgcagagggcggctgtacgatgttcacatgtctgcgtttggtcagacatcatctccttggctgccctttgaaaccaaatcacttgccttggggataaagtgctcaattggcattagtgagaagcccatcctatcccttgacatacttaatcatatatctctccagagaactcacctgacaaatgtctctgagcacaggctgacaccaaagtggcacaactgcacagttctcagatttctttgcacagattgatttttattgcgggttttgttggggtgtcttaatgttcatctcttttccactgcccatcctctgtgaacccatacctctctagatggagcaggtggccactggtgcctcatactcagtattgaaaaccactacatcccagctacctataatgctgtcagctcaaaatcatagccaggtagttcttgaactcagaacttaaatcctgcacgtggcactccaccactgactggaccgagctggcatatgttgtttctttgtgtttctacatcaaaatgttcgtctaagatttgaactgttctgctgataaccttccccgttgtcatagctatttcattgccaaccaactccatcacatggttgttgatatcgtcatataaagccattgcaaggactctggaaactgccgccaatgaccaatttctgactaaccagccaccttttctctctcttagctccacgtcagcactgagaccagactcgagcacccctgtcctgtaagcgagacaaaatggcgtgtgttattttggggttttgtgttttttggtgggtttctttccttggctctccagatttacttttggggcctgttctaagtgcaaacccagcaagtttcacttgtcctgtccattagatacaactacatcttgcgggggttgtttctttcttgttccacaatgaattgcacatccatctccatcagagctgatagcctgttaataagcactggtctaacacagccaaccctcctccacagcgccatattaatggaggaggggaggaaggtgaaatctactgcatgggattcaggaaacagttgtggttggtcaggacggaagttggggtaagtttggttggtcagagggagttgtgctggagattgtgaaaaatgggttcttgaatgatctactataaggcagggaaggttcatttgtaagtagtaatgtgaactgaattgcattaagagtgtgtggcctttgttgtgatatactatgtattttcttatatgcatgagccaaactgttgcatcataatttagcactgatgtctgcttttattttgatcatctttgtccacccttattagttcttggctgttaaccgtagatagatcttgtaaatccagcaacctttggttgctgcattccccttggttcgattccacgcaaggagccacaagtgagaactccactgtccttagaagaaagggcatttttacttttgaaccaaaaagagaaaaaaaaatcagaagtgttgcatcttgaggcgaattaactgtaagacatttttaattatgactactgcaatttgacaccatttgaaataatcaattcagagacactaaagatttcacaatattcattggtattgtaaaaaaaaaatactattgtatggatttttgtattgctgttaagtattgttttgtgtgtgtgtgtgtgtgtgtgtgttggaacctcctggggacatgttatattttgaagtgattaaactatttaattgtgtgtctatattttggagtggaataatttcttcattaaaaaatgtttttaaaaacactatatcttgggtggtttattcctttgtttcagtgaatctttcctaaagcaacgtggagtcagtctgttgaaagaaggaaggcaggtacttgcagtttaaagcaggacccattgatggaatattgagccaccgaggcaaaatagctcaccttctcttgccttgggggatgcatggtttttaccattctactgttttattagcatctgtgagcatctaatagaaatactattctgctatttatggaaatccttattataattgatatggaagtgagtttgaaattctaacagctaacatatttcatgtttgtatcacacactgttcttaacactttatgtgacttcactcaattctttgaatcctctgcatctagccatgtattctgcaaatattaagtgctcaatggtttttttgttgaattactgaataaatgaattagtggtgt

SEQ ID NO: 318501 - DNA, 5725 bp, Homo sapiens
aggatcctcaggaaaccctggtactggcagcagccagcctctgctgtgcccacatgacccacaactctggcagcggacccggcacttccaacattattaaataataagaaagcggctcctactccaggctcaaacctccctgcagaccaatggacaccttctaagagtttggcgagtcagtgactgaagcgcccgtccattccaagataaataggatttaccaatccttggatgaagtgcttgggaagtctttaagtgccataatcaactgccatttcaaagaatatagatggttttgaaaagttcatgctgtcccttcattgaattttagaatgattgaagatagtgggaaaagaggaaataccatggcagaaagaagacagctgtttgcagagatgagggctcaagatctggatcgcatccgactctccacctacagaacagcatgcaagcttaggtttgttcagaagaaatgcaatttgcacctggtggacatatggaatgtcatagaagcattgcgggaaaatgctctgaacaacctggacccaaacactgaactcaacgtgtcccgcttagaggctgtgctctccactattttttaccagctcaacaaacggatgccaaccactcaccaaatccatgtggagcagtccatcagcctcctccttaacttcctgcttgcagcgtttgatccggaaggccatggtaaaatttcagtatttgctgtcaaaatggctttagccacattgtgtggagggaagatcatggacaaattaagatatattttctcaatgatttctgactccagtggggtgatggtttatggacgatatgaccaattccttcgggaagttctcaaactacccacggcagtttttgaaggtccttcatttggttacacagaacagtcagccagatcctgtttctcccaacagaaaaaagtcacgttaaatggtttcttggacacgcttatgtcagatcctcccccgcagtgtctggtctggttgcctcttctgcatcgactagcaaatgtggaaaatgtcttccatccggttgagtgttcctactgccacagtgagagtatgatgggatttcgctaccgatgccaacagtgtcacaattaccagctctgtcaggactgcttctggaggggacatgccggtggttctcatagcaaccagcaccaaatgaaagagtacacgtcatggaaatcacctgctaagaagctgactaatgcattaagcaagtccctgagctgtgcttccagccgtgaacctttgcaccccatgttcccagatcagcctgagaagccactcaacttggctcacatcgtgcctcccagacctgtaaccagcatgaacgacaccctgttctcccactctgttccctcctcaggaagtccttttattaccaggagcatgcttgagagttcaaaccggcttgatgaagaacacaggctaattgccaggtatgcggcaaggctggcagcagagtcctcttcgtctcagccacctcagcagagaagtgctcctgacatctctttcaccatcgatgcgaataagcagcaaaggcagctgattgctgagctagaaaacaagaacagagaaatcttacaggagatccagagacttcggctagagcatgaacaagcttctcagcccacgccagagaaggcacagcaaaaccccaccctgctggcagaactccggctcctcagacagcgcaaagatgagctggaacagagaatgtctgctctccaggagagccggagagagctaatggtccagttggagggtctcatgaagctactaaagactcagggggcaggctctccccgctcctcccccagccacaccatcagcaggccaattcccatgcccatccggtcagcgtcagcctgctccaccccgacgcacacgccgcaggactccctcacaggagtagggggagatgtacaagaggcatttgcacaaagttcaagaagaaacttaaggaatgacttgctagtggctgcagattccatcactaacactatgtcctctcttgtgaaagagctgaattctgaggttgggagtgaaacagagagtaatgtggattctgaatttgcacggactcagtttgaggatcttgttccctcaccaacctctgaaaaggcttttctagcgcaaatccatgcccgaaaacctgggtacattcacagtggagctaccacaagtaccatgcgtggcgacatggttacggaggatgcagatccctatgtgcagcctgaagatgaaaactatgaaaatgactctgtccggcagctggagaatgagctccagatggaggaatacctgaaacagaagctgcaagatgaagcttatcaggtcagcttgcaaggttgaatgcaatatccttttatcacactcctctcaagcaagctatagtcagacagatgatgaaagtaacatgaaaactggtgatgatggagagccctgtggccacacagaggaggaagacagcagcctggcagcagcctcaccgaagagaggaaccaccacacccagcagctcctgacagacccccacccctaaagatgtgtcctgatgactatagtgcagctaactttttggttctcagatttgtaggtgcataggtgtgtgtttcaaggaaggaaaaaaaaagacttctgttcaaagttaacttatcagctacatcctctgtaacgtggttcatccctggttaaaaagcaaacaaacacaggctgaaaacccatgctgctgttatacacaatggcagtattaacaagcattttaaacctttgcacatgatattgaacctgttcagtttacaatgacaatattaatactgtttatagctagaagtttgatttctgaattctttgagattttagcaaaacagtttattatacactgtacatttttttcacagcaattggaaaaaaacaaccacttgcaatcattcaataaccctgaagaatttggttcctgagtgtacaaactcagagcccggaagccaagaagggtccttggcctgcacggtctgtagttgactccaagtctctgtgagcagtgacttgaaccaaacacaccaggaataatccattctttggggcctctttccaactcgaggttgttttctttcaagatactctaatcagccatagaatttagtgtaaatatttttttttccaaatagatatcatattcaaaaaaggcagcattcaaattatatagaatctagtttttaaaatcagcacagatcttcttaaaaactgtgaactatgttttgaaatactcgttactaaagctgtttataaaccacaggtgccataagatccccaaacggactaaagttatctctgctcttccatggtcttgttcctctcgttttggctttaggaagcatgtctttaacagcaccgctcgttcacaagttcccccatcaagttgtttggaggccttcagctttaaatgtacaggcttaaagtgcgcttgcaaacgtttgctctcctttttttctgaatgttgattgccttagctggccacctggtgttctgcatgtagccttctgtggtcatgtgaaaggagacaggctcttctaagttgagttgggatttttgcactcagtgaaaagctgaagtgcaaaagagctatcaaagacaagaggataaaagactgggatagtcttttccaaggaccctctttagagggccctaaagacctcctttgggaattctggggaaaaagaaaaagtaatcttctacttgcttcaagatttgatttttttaaaaaagcctgcgacctattcaatacattatgcttaaattagcagtttctctggaattcctgtctctcctttaaaagaaaggagagaacattttagaacaatagttctcaaagtgtgttccccggacaagcagcatctgcaacacttaggaaggtcttcgaaatactaatttgtaagccccacctcaggcctactgaatcagaagctctgggggttgggtccagaagtctgttttagtcaaccctctaggtgattctgatgctcgctaaaggttgagaactactgctttagaatgaagtcgtataataaagtctctgaaaaggccttattcagaataagcaagaaaggttctgtgattcacttttgcttctggggctggcaaaaaccttctctgaacccacacaccaagttcgtagttggtaggtgcccagccaagtcctgacatcttcatgccccctctgcagagggcggctgtacgatgttcacatgtctgcgtttggtcagacatcatctccttggctgccctttgaaaccaaatcacttgccttggggataaagtgctcaattggcattagtgagaagcccatcctatcccttgacatacttaatcatatatctctccagagaactcacctgacaaatgtctctgagcacaggctgacaccaaagtggcacaactgcacagttctcagatttctttgcacagattgatttttattgcgggttttgttggggtgtcttaatgttcatctcttttccactgcccatcctctgtgaacccatacctctctagatggagcaggtggccactggtgcctcatactcagtattgaaaaccactacatcccagctacctataatgctgtcagctcaaaatcatagccaggtagttcttgaactcagaacttaaatcctgcacgtggcactccaccactgactggaccgagctggcatatgttgtttctttgtgtttctacatcaaaatgttcgtctaagatttgaactgttctgctgataaccttccccgttgtcatagctatttcattgccaaccaactccatcacatggttgttgatatcgtcatataaagccattgcaaggactctggaaactgccgccaatgaccaatttctgactaaccagccaccttttctctctcttagctccacgtcagcactgagaccagactcgagcacccctgtcctgtaagcgagacaaaatggcgtgtgttattttggggttttgtgttttttggtgggtttctttccttggctctccagatttacttttggggcctgttctaagtgcaaacccagcaagtttcacttgtcctgtccattagatacaactacatcttgcgggggttgtttctttcttgttccacaatgaattgcacatccatctccatcagagctgatagcctgttaataagcactggtctaacacagccaaccctcctccacagcgccatattaatggaggaggggaggaaggtgaaatctactgcatgggattcaggaaacagttgtggttggtcaggacggaagttggggtaagtttggttggtcagagggagttgtgctggagattgtgaaaaatgggttcttgaatgatctactataaggcagggaaggttcatttgtaagtagtaatgtgaactgaattgcattaagagtgtgtggcctttgttgtgatatactatgtattttcccccacactttgcctgaggtccggaaccgttcgcacccggcctgccccagtcaggccgttttagaagagcttctacttgggcgcccgccgtctctggcgcgaacattggaatgcatataccaccatctgttctgtgttgcttactcctggatacatttgatttcatcgcgtaagacctcagatacttatttacgagcgtggcatgtactaaagggttaatgaagca

SEQ ID NO: 318502 - DNA, 6692 bp, Homo sapiens
  misc_feature (18)..(18): n is a, c, g, or t
  misc_feature (35)..(35): n is a, c, g, or t
  misc_feature (42)..(42): n is a, c, g, or t
  misc_feature (49)..(49): n is a, c, g, or t
  misc_feature (62)..(62): n is a, c, g, or t
  misc_feature (65)..(65): n is a, c, g, or t
  misc_feature (85)..(85): n is a, c, g, or t
  misc_feature (90)..(90): n is a, c, g, or t
ccatgatcttgttttccnaaaacaagtttttcttntgaagantgggggntaaataacagggntgncttattgagtattcctcccngggtnaaaaaccaaaagaattccttgagcacaaggggaagaatgaacacagctttttattgaagttaaaggttactttggagtttgtttggaaatgtgtaaggtcaaatactatagttttcagcatatgtagtacttcagaggaagaattaaggggcatgttggtgcatttaactacaaaaccaggtggcaggttgctgctctctccttcagaaccccgctctgaggaaagctaaggaagagaacaggacgtctgagtgtgtgactgagaatgattgaagatagtgggaaaagaggaaataccatggcagaaagaagacagctgtttgcagagatgagggctcaagatctggatcgcatccgactctccacctacagaacagcatgcaagcttaggtttgttcagaagaaatgcaatttgcacctggtggacatatggaatgtcatagaagcattgcgggaaaatgctctgaacaacctggacccaaacactgaactcaacgtgtcccgcttagaggctgtgctctccactattttttaccagctcaacaaacggatgccaaccactcaccaaatccatgtggagcagtccatcagcctcctccttaacttcctgcttgcagcgtttgatccggaaggccatggtaaaatttcagtatttgctgtcaaaatggctttagccacattgtgtggagggaagatcatggacaaattaagatatattttctcaatgatttctgactccagtggggtgatggtttatggacgatatgaccaattccttcgggaagttctcaaactacccacggcagtttttgaaggtccttcatttggttacacagaacagtcagccagatcctgtttctcccaacagaaaaaagtcacgttaaatggtttcttggacacgcttatgtcagatcctcccccgcagtgtctggtctggttgcctcttctgcatcgactagcaaatgtggaaaatgtcttccatccggttgagtgttcctactgccacagtgagagtatgatgggatttcgctaccgatgccaacagtgtcacaattaccagctctgtcaggactgcttctggaggggacatgccggtggttctcatagcaaccagcaccaaatgaaagagtacacgtcatggaaatcacctgctaagaagctgactaatgcattaagcaagtccctgagctgtgcttccagccgtgaacctttgcaccccatgttcccagatcagcctgagaagccactcaacttggctcacatcgtgcctcccagacctgtaaccagcatgaacgacaccctgttctcccactctgttccctcctcaggaagtccttttattaccaggagctctcctcccaaggacagtgaagtagagcagaacaaactgctggctagggctgctccagcttttctgaagggcaaagggatacagtacagcctgaatgtggcagacaggctagctgatgaacatgttctcatcgggttgtatgtcaacatgctccggaacaacccctcatgcatgcttgagagttcaaaccggcttgatgaagaacacaggctaattgccaggtatgcggcaaggctggcagcagagtcctcttcgtctcagccacctcagcagagaagtgctcctgacatctctttcaccatcgatgcgaataagcagcaaaggcagctgattgctgagctagaaaacaagaacagagaaatcttacaggagatccagagacttcggctagagcatgaacaagcttctcagcccacgccagagaaggcacagcaaaaccccaccctgctggcagaactccggctcctcagacagcgcaaagatgagctggaacagagaatgtctgctctccaggagagccggagagagctaatggtccagttggagggtctcatgaagctactaaagactcagggggcaggctctccccgctcctcccccagccacaccatcagcaggccaattcccatgcccatccggtcagcgtcagcctgctccaccccgacgcacacgccgcaggactccctcacaggagtagggggagatgtacaagaggcatttgcacaaagttcaagaagaaacttaaggaatgacttgctagtggctgcagattccatcactaacactatgtcctctcttgtgaaagagctgaattctgaggttgggagtgaaacagagagtaatgtggattctgaatttgcacggactcagtttgaggatcttgttccctcaccaacctctgaaaaggcttttctagcgcaaatccatgcccgaaaacctgggtacattcacagtggagctaccacaagtaccatgcgtggcgacatggttacggaggatgcagatccctatgtgcagcctgaagatgaaaactatgaaaatgactctgtccggcagctggagaatgagctccagatggaggaatacctgaaacagaagctgcaagatgaagcttatcaggtcagcttgcaaggttgaatgcaatatccttttatcacactcctctcaagcaagctatagtcagacagatgatgaaagtaacatgaaaactggtgatgatggagagccctgtggccacacagaggaggaagacagcagcctggcagcagcctcaccgaagagaggaaccaccacacccagcagctcctgacagacccccacccctaaagatgtgtcctgatgactatagtgcagctaactttttggttctcagatttgtaggtgcataggtgtgtgtttcaaggaaggaaaaaaaaagacttctgttcaaagttaacttatcagctacatcctctgtaacgtggttcatccctggttaaaaagcaaacaaacacaggctgaaaacccatgctgctgttatacacaatggcagtattaacaagcattttaaacctttgcacatgatattgaacctgttcagtttacaatgacaatattaatactgtttatagctagaagtttgatttctgaattctttgagattttagcaaaacagtttattatacactgtacatttttttcacagcaattggaaaaaaacaaccacttgcaatcattcaataaccctgaagaatttggttcctgagtgtacaaactcagagcccggaagccaagaagggtccttggcctgcacggtctgtagttgactccaagtctctgtgagcagtgacttgaaccaaacacaccaggaataatccattctttggggcctctttccaactcgaggttgttttctttcaagatactctaatcagccatagaatttagtgtaaatatttttttttccaaatagatatcatattcaaaaaaggcagcattcaaattatatagaatctagtttttaaaatcagcacagatcttcttaaaaactgtgaactatgttttgaaatactcgttactaaagctgtttataaaccacaggtgccataagatccccaaacggactaaagttatctctgctcttccatggtcttgttcctctcgttttggctttaggaagcatgtctttaacagcaccgctcgttcacaagttcccccatcaagttgtttggaggccttcagctttaaatgtacaggcttaaagtgcgcttgcaaacgtttgctctcctttttttctgaatgttgattgccttagctggccacctggtgttctgcatgtagccttctgtggtcatgtgaaaggagacaggctcttctaagttgagttgggatttttgcactcagtgaaaagctgaagtgcaaaagagctatcaaagacaagaggataaaagactgggatagtcttttccaaggaccctctttagagggccctaaagacctcctttgggaattctggggaaaaagaaaaagtaatcttctacttgcttcaagatttgatttttttaaaaaagcctgcgacctattcaatacattatgcttaaattagcagtttctctggaattcctgtctctcctttaaaagaaaggagagaacattttagaacaatagttctcaaagtgtgttccccggacaagcagcatctgcaacacttaggaaggtcttcgaaatactaatttgtaagccccacctcaggcctactgaatcagaagctctgggggttgggtccagaagtctgttttagtcaaccctctaggtgattctgatgctcgctaaaggttgagaactactgctttagaatgaagtcgtataataaagtctctgaaaaggccttattcagaataagcaagaaaggttctgtgattcacttttgcttctggggctggcaaaaaccttctctgaacccacacaccaagttcgtagttggtaggtgcccagccaagtcctgacatcttcatgccccctctgcagagggcggctgtacgatgttcacatgtctgcgtttggtcagacatcatctccttggctgccctttgaaaccaaatcacttgccttggggataaagtgctcaattggcattagtgagaagcccatcctatcccttgacatacttaatcatatatctctccagagaactcacctgacaaatgtctctgagcacaggctgacaccaaagtggcacaactgcacagttctcagatttctttgcacagattgatttttattgcgggttttgttggggtgtcttaatgttcatctcttttccactgcccatcctctgtgaacccatacctctctagatggagcaggtggccactggtgcctcatactcagtattgaaaaccactacatcccagctacctataatgctgtcagctcaaaatcatagccaggtagttcttgaactcagaacttaaatcctgcacgtggcactccaccactgactggaccgagctggcatatgttgtttctttgtgtttctacatcaaaatgttcgtctaagatttgaactgttctgctgataaccttccccgttgtcatagctatttcattgccaaccaactccatcacatggttgttgatatcgtcatataaagccattgcaaggactctggaaactgccgccaatgaccaatttctgactaaccagccaccttttctctctcttagctccacgtcagcactgagaccagactcgagcacccctgtcctgtaagcgagacaaaatggcgtgtgttattttggggttttgtgttttttggtgggtttctttccttggctctccagatttacttttggggcctgttctaagtgcaaacccagcaagtttcacttgtcctgtccattagatacaactacatcttgcgggggttgtttctttcttgttccacaatgaattgcacatccatctccatcagagctgatagcctgttaataagcactggtctaacacagccaaccctcctccacagcgccatattaatggaggaggggaggaaggtgaaatctactgcatgggattcaggaaacagttgtggttggtcaggacggaagttggggtaagtttggttggtcagagggagttgtgctggagattgtgaaaaatgggttcttgaatgatctactataaggcagggaaggttcatttgtaagtagtaatgtgaactgaattgcattaagagtgtgtggcctttgttgtgatatactatgtattttcttatatgcatgagccaaactgttgcatcataatttagcactgatgtctgcttttattttgatcatctttgtccacccttattagttcttggctgttaaccgtagatagatcttgtaaatccagcaacctttggttgctgcattccccttggttcgattccacgcaaggagccacaagtgagaactccactgtccttagaagaaagggcatttttacttttgaaccaaaaagagaaaaaaaaatcagaagtgttgcatcttgaggcgaattaactgtaagacatttttaattatgactactgcaatttgacaccatttgaaataatcaattcagagacactaaagatttcacaatattcattggtattgtaaaaaaaaaatactattgtatggatttttgtattgctgttaagtattgttttgtgtgtgtgtgtgtgtgtgtgtgttggaacctcctggggacatgttatattttgaagtgattaaactatttaattgtgtgtctatattttggagtggaataatttcttcattaaaaaatgtttttaaaaacactatatcttgggtggtttattcctttgtttcagtgaatctttcctaaagcaacgtggagtcagtctgttgaaagaaggaaggcaggtacttgcagtttaaagcaggacccattgatggaatattgagccaccgaggcaaaatagctcaccttctcttgccttgggggatgcatggtttttaccattctactgttttattagcatctgtgagcatctaatagaaatactattctgctatttatggaaatccttattataattgatatggaagtgagtttgaaattctaacagctaacatatttcatgtttgtatcacacactgttcttaacactttatgtgacttcactcaattctttgaatcctctgcatctagccatgtattctgcaaatattaagtgctcaatggtttttttgttgaattactgaataaatgaattagtggtgt

SEQ ID NO: 318503 - DNA, 3873 bp, Homo sapiens
aggatcctcaggaaaccctggtactggcagcagccagcctctgctgtgcccacatgacccacaactctggcagcggacccggcacttccaacattattaaataataagaaagcggctcctactccaggctcaaacctccctgcagaccaatggacaccttctaagagtttggcgagtcagtgactgaagcgcccgtccattccaagataaataggatttaccaatccttggatgaagtgcttgggaagtctttaagtgccataatcaactgccatttcaaagaatatagatggttttgaaaagttcatgctgtcccttcattgaattttagaatgattgaagatagtgggaaaagaggaaataccatggcagaaagaagacagctgtttgcagagatgagggctcaagatctggatcgcatccgactctccacctacagaacagcatgcaagcttaggtttgttcagaagaaatgcaatttgcacctggtggacatatggaatgtcatagaagcattgcgggaaaatgctctgaacaacctggacccaaacactgaactcaacgtgtcccgcttagaggctgtgctctccactattttttaccagctcaacaaacggatgccaaccactcaccaaatccatgtggagcagtccatcagcctcctccttaacttcctgcttgcagcgtttgatccggaaggccatggtaaaatttcagtatttgctgtcaaaatggctttagccacattgtgtggagggaagatcatggacaaattaagatatattttctcaatgatttctgactccagtggggtgatggtttatggacgatatgaccaattccttcgggaagttctcaaactacccacggcagtttttgaaggtccttcatttggttacacagaacagtcagccagatcctgtttctcccaacagaaaaaagtcacgttaaatggtttcttggacacgcttatgtcagatcctcccccgcagtgtctggtctggttgcctcttctgcatcgactagcaaatgtggaaaatgtcttccatccggttgagtgttcctactgccacagtgagagtatgatgggatttcgctaccgatgccaacagtgtcacaattaccagctctgtcaggactgcttctggaggggacatgccggtggttctcatagcaaccagcaccaaatgaaagagtacacgtcatggaaatcacctgctaagaagctgactaatgcattaagcaagtccctgagctgtgcttccagccgtgaacctttgcaccccatgttcccagatcagcctgagaagccactcaacttggctcacatcgtgcctcccagacctgtaaccagcatgaacgacaccctgttctcccactctgttccctcctcaggaagtccttttattaccaggagcatgcttgagagttcaaaccggcttgatgaagaacacaggctaattgccaggtatgcggcaaggctggcagcagagtcctcttcgtctcagccacctcagcagagaagtgctcctgacatctctttcaccatcgatgcgaataagcagcaaaggcagctgattgctgagctagaaaacaagaacagagaaatcttacaggagatccagagacttcggctagagcatgaacaagcttctcagcccacgccagagaaggcacagcaaaaccccaccctgctggcagaactccggctcctcagacagcgcaaagatgagctggaacagagaatgtctgctctccaggagagccggagagagctaatggtccagttggagggtctcatgaagctactaaaggaagaagaactgaagcagggagtaagttatgtcccctactgcaggtcttaactaacagtggaggggcctgccgacctgcggttttctcattgcttttgctctaatgtatgttcatgcttcagtttggaaagagaaaaaagtcatactaatttgcttctttttcaatgtagtgcttgaattgagatatataaatttagcattttttataactatcactactatccacatcaaaagaagaactatgacatcttttagaaaagggaacgaattgtcatttattggaaacattttagatccccagaggtataagtttcaaaccagtcttagcttttcaagttgttgatcagacccttctcttaacagagagataccacagtcactagagataccctgaggttcatgtcatcccaaaacccacagcactcagaagctaacctctacacccactcacactgtgagtattcagttcggtttcattttactgaaaacctgtgaaacctctttttataaaaatcaggcaattaaatcccttttcatcacacaattattgagccttgttccccatggctcaccaaaatgtgctcaattttgtgagagaaagactgtactccataactgactattcacgtcccatctttttggctcttccccaaagcagaatccttactgttggttgacagtaatctctttttaaaaagtaactctcagctttttccttagcaccagagcctttcggctccgggagacgagagggtcattacatacttttttttttttctggaaataggggcattgtgactttatagcctaaactggagctgtctgaacctgtggtcaggctcaagagccagcagggggagcagcaaactcaaaaaaaaaacaaattaaattaaattaaattaaattaaatagaagcaaaataaaagcagctttaatttcaagtgcatgtaccacgctatgtatgacaatatatcccactcactagcattatttaaaagtttcacattatttccatggatcaattagaaccacaacctgtccaatttcaacgtatctttcatttcttctgtatgctcttttctattattcattatgtgtgtttgtgtgtaacaaagaatgtttggaaaatgctggacacatttttacccttcattcccatggtctgtaaaaaaggaaagtgtaaaatcaatctgtaatgtcagacaataaagataatgtattacattattttgtattttgtgaaaaaaattactttactaaattaaagtcaaattttaacagaagacagtccccctgggtgaaggacacataacacatacagcctgtataattgcccatgaatgcatacatggggtattgctattgtatttccaatacacttagatcatggtaaagaaaaatgccttcttcatgatacttctctgcaaatggcttctttcctctcctgtctcttatttagcatgtgcatagaaaaaggaaataaggttcaattataacctccctcctcctagcagagagagagggcaatcatcctgtcgtcatcagccttgctttagccatttcccttggggatactttccaggccatttcccaggcagcaggatcttgaaaggctcctatggaccaggaagttcgtaaacagatggatgcacagagccaaactgtggcagtgcccccaaggtggcgccactgccccctcaccttccagctcctctccaccaagcccctcagcagcttctgcatctcagggggccaacagcgggtactgcggtgtcggtacccaaggaccagggcccacgtcacccagatgtcagcaatacatcgtctgggtagtggcagagtttgcctatttcacttatttatcttttttgcttttatacacaagcctcttttcaaaaaggacctgaggcagcttacaacaaaagatataaacagtgacttcataaaattgaaatagaaaaatcaaaaactaaagaaaataaaatgtgaatatgctaatcttaagggacaaggatgttactctgcatgttctggcaatgaagcaaaaaaaaaaaaaaag

SEQ ID NO: 318504 - DNA, 5582 bp, Homo sapiens
tggagttggatgtgtgagtgtgcccagagttaaagggaatatcaaggatggtggcagaattaaagggcaaacttaccttccatcccaggtctagtattcagtcccccttcctcccactctccaccctactgcgtgctcttacttattctgttggaacccagtgtagcttcctgagatttaaaatataggaagactcaaaactatgttacttcttggaatatagataattcagtactgatttaaataacaactgaatagcaaggaccttctggaacataatcttacattcacaaaatcacctgctaagaagctgactaatgcattaagcaagtccctgagctgtgcttccagccgtgaacctttgcaccccatgttcccagatcagcctgagaagccactcaacttggctcacatcgtgcctcccagacctgtaaccagcatgaacgacaccctgttctcccactctgttccctcctcaggaagtccttttattaccaggagcatgcttgagagttcaaaccggcttgatgaagaacacaggctaattgccaggtatgcggcaaggctggcagcagagtcctcttcgtctcagccacctcagcagagaagtgctcctgacatctctttcaccatcgatgcgaataagcagcaaaggcagctgattgctgagctagaaaacaagaacagagaaatcttacaggagatccagagacttcggctagagcatgaacaagcttctcagcccacgccagagaaggcacagcaaaaccccaccctgctggcagaactccggctcctcagacagcgcaaagatgagctggaacagagaatgtctgctctccaggagagccggagagagctaatggtccagttggagggtctcatgaagctactaaagactcagggggcaggctctccccgctcctcccccagccacaccatcagcaggccaattcccatgcccatccggtcagcgtcagcctgctccaccccgacgcacacgccgcaggactccctcacaggagtagggggagatgtacaagaggcatttgcacaaagttcaagaagaaacttaaggaatgacttgctagtggctgcagattccatcactaacactatgtcctctcttgtgaaagagctgaattctgaggttgggagtgaaacagagagtaatgtggattctgaatttgcacggactcagtttgaggatcttgttccctcaccaacctctgaaaaggcttttctagcgcaaatccatgcccgaaaacctgggtacattcacagtggagctaccacaagtaccatgcgtggcgacatggttacggaggatgcagatccctatgtgcagcctgaagatgaaaactatgaaaatgactctgtccggcagctggagaatgagctccagatggaggaatacctgaaacagaagctgcaagatgaagcttatcaggtcagcttgcaaggttgaatgcaatatccttttatcacactcctctcaagcaagctatagtcagacagatgatgaaagtaacatgaaaactggtgatgatggagagccctgtggccacacagaggaggaagacagcagcctggcagcagcctcaccgaagagaggaaccaccacacccagcagctcctgacagacccccacccctaaagatgtgtcctgatgactatagtgcagctaactttttggttctcagatttgtaggtgcataggtgtgtgtttcaaggaaggaaaaaaaaagacttctgttcaaagttaacttatcagctacatcctctgtaacgtggttcatccctggttaaaaagcaaacaaacacaggctgaaaacccatgctgctgttatacacaatggcagtattaacaagcattttaaacctttgcacatgatattgaacctgttcagtttacaatgacaatattaatactgtttatagctagaagtttgatttctgaattctttgagattttagcaaaacagtttattatacactgtacatttttttcacagcaattggaaaaaaacaaccacttgcaatcattcaataaccctgaagaatttggttcctgagtgtacaaactcagagcccggaagccaagaagggtccttggcctgcacggtctgtagttgactccaagtctctgtgagcagtgacttgaaccaaacacaccaggaataatccattctttggggcctctttccaactcgaggttgttttctttcaagatactctaatcagccatagaatttagtgtaaatatttttttttccaaatagatatcatattcaaaaaaggcagcattcaaattatatagaatctagtttttaaaatcagcacagatcttcttaaaaactgtgaactatgttttgaaatactcgttactaaagctgtttataaaccacaggtgccataagatccccaaacggactaaagttatctctgctcttccatggtcttgttcctctcgttttggctttaggaagcatgtctttaacagcaccgctcgttcacaagttcccccatcaagttgtttggaggccttcagctttaaatgtacaggcttaaagtgcgcttgcaaacgtttgctctcctttttttctgaatgttgattgccttagctggccacctggtgttctgcatgtagccttctgtggtcatgtgaaaggagacaggctcttctaagttgagttgggatttttgcactcagtgaaaagctgaagtgcaaaagagctatcaaagacaagaggataaaagactgggatagtcttttccaaggaccctctttagagggccctaaagacctcctttgggaattctggggaaaaagaaaaagtaatcttctacttgcttcaagatttgatttttttaaaaaagcctgcgacctattcaatacattatgcttaaattagcagtttctctggaattcctgtctctcctttaaaagaaaggagagaacattttagaacaatagttctcaaagtgtgttccccggacaagcagcatctgcaacacttaggaaggtcttcgaaatactaatttgtaagccccacctcaggcctactgaatcagaagctctgggggttgggtccagaagtctgttttagtcaaccctctaggtgattctgatgctcgctaaaggttgagaactactgctttagaatgaagtcgtataataaagtctctgaaaaggccttattcagaataagcaagaaaggttctgtgattcacttttgcttctggggctggcaaaaaccttctctgaacccacacaccaagttcgtagttggtaggtgcccagccaagtcctgacatcttcatgccccctctgcagagggcggctgtacgatgttcacatgtctgcgtttggtcagacatcatctccttggctgccctttgaaaccaaatcacttgccttggggataaagtgctcaattggcattagtgagaagcccatcctatcccttgacatacttaatcatatatctctccagagaactcacctgacaaatgtctctgagcacaggctgacaccaaagtggcacaactgcacagttctcagatttctttgcacagattgatttttattgcgggttttgttggggtgtcttaatgttcatctcttttccactgcccatcctctgtgaacccatacctctctagatggagcaggtggccactggtgcctcatactcagtattgaaaaccactacatcccagctacctataatgctgtcagctcaaaatcatagccaggtagttcttgaactcagaacttaaatcctgcacgtggcactccaccactgactggaccgagctggcatatgttgtttctttgtgtttctacatcaaaatgttcgtctaagatttgaactgttctgctgataaccttccccgttgtcatagctatttcattgccaaccaactccatcacatggttgttgatatcgtcatataaagccattgcaaggactctggaaactgccgccaatgaccaatttctgactaaccagccaccttttctctctcttagctccacgtcagcactgagaccagactcgagcacccctgtcctgtaagcgagacaaaatggcgtgtgttattttggggttttgtgttttttggtgggtttctttccttggctctccagatttacttttggggcctgttctaagtgcaaacccagcaagtttcacttgtcctgtccattagatacaactacatcttgcgggggttgtttctttcttgttccacaatgaattgcacatccatctccatcagagctgatagcctgttaataagcactggtctaacacagccaaccctcctccacagcgccatattaatggaggaggggaggaaggtgaaatctactgcatgggattcaggaaacagttgtggttggtcaggacggaagttggggtaagtttggttggtcagagggagttgtgctggagattgtgaaaaatgggttcttgaatgatctactataaggcagggaaggttcatttgtaagtagtaatgtgaactgaattgcattaagagtgtgtggcctttgttgtgatatactatgtattttcttatatgcatgagccaaactgttgcatcataatttagcactgatgtctgcttttattttgatcatctttgtccacccttattagttcttggctgttaaccgtagatagatcttgtaaatccagcaacctttggttgctgcattccccttggttcgattccacgcaaggagccacaagtgagaactccactgtccttagaagaaagggcatttttacttttgaaccaaaaagagaaaaaaaaatcagaagtgttgcatcttgaggcgaattaactgtaagacatttttaattatgactactgcaatttgacaccatttgaaataatcaattcagagacactaaagatttcacaatattcattggtattgtaaaaaaaaaatactattgtatggatttttgtattgctgttaagtattgttttgtgtgtgtgtgtgtgtgtgtgtgttggaacctcctggggacatgttatattttgaagtgattaaactatttaattgtgtgtctatattttggagtggaataatttcttcattaaaaaatgtttttaaaaacactatatcttgggtggtttattcctttgtttcagtgaatctttcctaaagcaacgtggagtcagtctgttgaaagaaggaaggcaggtacttgcagtttaaagcaggacccattgatggaatattgagccaccgaggcaaaatagctcaccttctcttgccttgggggatgcatggtttttaccattctactgttttattagcatctgtgagcatctaatagaaatactattctgctatttatggaaatccttattataattgatatggaagtgagtttgaaattctaacagctaacatatttcatgtttgtatcacacactgttcttaacactttatgtgacttcactcaattctttgaatcctctgcatctagccatgtattctgcaaatattaagtgctcaatggtttttttgttgaattactgaataaatgaattagtggtgt

SEQ ID NO: 318505 - DNA, 4067 bp, Homo sapiens
  misc_feature (18)..(18): n is a, c, g, or t
  misc_feature (35)..(35): n is a, c, g, or t
  misc_feature (42)..(42): n is a, c, g, or t
  misc_feature (49)..(49): n is a, c, g, or t
  misc_feature (62)..(62): n is a, c, g, or t
  misc_feature (65)..(65): n is a, c, g, or t
  misc_feature (85)..(85): n is a, c, g, or t
  misc_feature (90)..(90): n is a, c, g, or t
ccatgatcttgttttccnaaaacaagtttttcttntgaagantgggggntaaataacagggntgncttattgagtattcctcccngggtnaaaaaccaaaagaattccttgagcacaaggggaagaatgaacacagctttttattgaagttaaaggttactttggagtttgtttggaaatgtgtaaggtcaaatactatagttttcagcatatgtagtacttcagaggaagaattaaggggcatgttggtgcatttaactacaaaaccaggtggcaggttgctgctctctccttcagaaccccgctctgaggaaagctaaggaagagaacaggacgtctgagtgtgtgactgagaatgattgaagatagtgggaaaagaggaaataccatggcagaaagaagacagctgtttgcagagatgagggctcaagatctggatcgcatccgactctccacctacagaacagcatgcaagcttaggtttgttcagaagaaatgcaatttgcacctggtggacatatggaatgtcatagaagcattgcgggaaaatgctctgaacaacctggacccaaacactgaactcaacgtgtcccgcttagaggctgtgctctccactattttttaccagctcaacaaacggatgccaaccactcaccaaatccatgtggagcagtccatcagcctcctccttaacttcctgcttgcagcgtttgatccggaaggccatggtaaaatttcagtatttgctgtcaaaatggctttagccacattgtgtggagggaagatcatggacaaattaagatatattttctcaatgatttctgactccagtggggtgatggtttatggacgatatgaccaattccttcgggaagttctcaaactacccacggcagtttttgaaggtccttcatttggttacacagaacagtcagccagatcctgtttctcccaacagaaaaaagtcacgttaaatggtttcttggacacgcttatgtcagatcctcccccgcagtgtctggtctggttgcctcttctgcatcgactagcaaatgtggaaaatgtcttccatccggttgagtgttcctactgccacagtgagagtatgatgggatttcgctaccgatgccaacagtgtcacaattaccagctctgtcaggactgcttctggaggggacatgccggtggttctcatagcaaccagcaccaaatgaaagagtacacgtcatggaaatcacctgctaagaagctgactaatgcattaagcaagtccctgagctgtgcttccagccgtgaacctttgcaccccatgttcccagatcagcctgagaagccactcaacttggctcacatcgtgcctcccagacctgtaaccagcatgaacgacaccctgttctcccactctgttccctcctcaggaagtccttttattaccaggagctctcctcccaaggacagtgaagtagagcagaacaaactgctggctagggctgctccagcttttctgaagggcaaagggatacagtacagcctgaatgtggcagacaggctagctgatgaacatgttctcatcgggttgtatgtcaacatgctccggaacaacccctcatgcatgcttgagagttcaaaccggcttgatgaagaacacaggctaattgccaggtatgcggcaaggctggcagcagagtcctcttcgtctcagccacctcagcagagaagtgctcctgacatctctttcaccatcgatgcgaataagcagcaaaggcagctgattgctgagctagaaaacaagaacagagaaatcttacaggagatccagagacttcggctagagcatgaacaagcttctcagcccacgccagagaaggcacagcaaaaccccaccctgctggcagaactccggctcctcagacagcgcaaagatgagctggaacagagaatgtctgctctccaggagagccggagagagctaatggtccagttggagggtctcatgaagctactaaaggaagaagaactgaagcagggagtaagttatgtcccctactgcaggtcttaactaacagtggaggggcctgccgacctgcggttttctcattgcttttgctctaatgtatgttcatgcttcagtttggaaagagaaaaaagtcatactaatttgcttctttttcaatgtagtgcttgaattgagatatataaatttagcattttttataactatcactactatccacatcaaaagaagaactatgacatcttttagaaaagggaacgaattgtcatttattggaaacattttagatccccagaggtataagtttcaaaccagtcttagcttttcaagttgttgatcagacccttctcttaacagagagataccacagtcactagagataccctgaggttcatgtcatcccaaaacccacagcactcagaagctaacctctacacccactcacactgtgagtattcagttcggtttcattttactgaaaacctgtgaaacctctttttataaaaatcaggcaattaaatcccttttcatcacacaattattgagccttgttccccatggctcaccaaaatgtgctcaattttgtgagagaaagactgtactccataactgactattcacgtcccatctttttggctcttccccaaagcagaatccttactgttggttgacagtaatctctttttaaaaagtaactctcagctttttccttagcaccagagcctttcggctccgggagacgagagggtcattacatacttttttttttttctggaaataggggcattgtgactttatagcctaaactggagctgtctgaacctgtggtcaggctcaagagccagcagggggagcagcaaactcaaaaaaaaaacaaattaaattaaattaaattaaattaaatagaagcaaaataaaagcagctttaatttcaagtgcatgtaccacgctatgtatgacaatatatcccactcactagcattatttaaaagtttcacattatttccatggatcaattagaaccacaacctgtccaatttcaacgtatctttcatttcttctgtatgctcttttctattattcattatgtgtgtttgtgtgtaacaaagaatgtttggaaaatgctggacacatttttacccttcattcccatggtctgtaaaaaaggaaagtgtaaaatcaatctgtaatgtcagacaataaagataatgtattacattattttgtattttgtgaaaaaaattactttactaaattaaagtcaaattttaacagaagacagtccccctgggtgaaggacacataacacatacagcctgtataattgcccatgaatgcatacatggggtattgctattgtatttccaatacacttagatcatggtaaagaaaaatgccttcttcatgatacttctctgcaaatggcttctttcctctcctgtctcttatttagcatgtgcatagaaaaaggaaataaggttcaattataacctccctcctcctagcagagagagagggcaatcatcctgtcgtcatcagccttgctttagccatttcccttggggatactttccaggccatttcccaggcagcaggatcttgaaaggctcctatggaccaggaagttcgtaaacagatggatgcacagagccaaactgtggcagtgcccccaaggtggcgccactgccccctcaccttccagctcctctccaccaagcccctcagcagcttctgcatctcagggggccaacagcgggtactgcggtgtcggtacccaaggaccagggcccacgtcacccagatgtcagcaatacatcgtctgggtagtggcagagtttgcctatttcacttatttatcttttttgcttttatacacaagcctcttttcaaaaaggacctgaggcagcttacaacaaaagatataaacagtgacttcataaaattgaaatagaaaaatcaaaaactaaagaaaataaaatgtgaatatgctaatcttaagggacaaggatgttactctgcatgttctggcaatgaagcaaaaaaaaaaaaaaag

SEQ ID NO: 318506 - DNA, 3851 bp, Homo sapiens
  misc_feature (18)..(18): n is a, c, g, or t
  misc_feature (35)..(35): n is a, c, g, or t
  misc_feature (42)..(42): n is a, c, g, or t
  misc_feature (49)..(49): n is a, c, g, or t
  misc_feature (62)..(62): n is a, c, g, or t
  misc_feature (65)..(65): n is a, c, g, or t
  misc_feature (85)..(85): n is a, c, g, or t
  misc_feature (90)..(90): n is a, c, g, or t
ccatgatcttgttttccnaaaacaagtttttcttntgaagantgggggntaaataacagggntgncttattgagtattcctcccngggtnaaaaaccaaaagaattccttgagcacaaggggaagaatgaacacagctttttattgaagttaaaggttactttggagtttgtttggaaatgtgtaaggtcaaatactatagttttcagcatatgtagtacttcagaggaagaattaaggggcatgttggtgcatttaactacaaaaccagaatgattgaagatagtgggaaaagaggaaataccatggcagaaagaagacagctgtttgcagagatgagggctcaagatctggatcgcatccgactctccacctacagaacagcatgcaagcttaggtttgttcagaagaaatgcaatttgcacctggtggacatatggaatgtcatagaagcattgcgggaaaatgctctgaacaacctggacccaaacactgaactcaacgtgtcccgcttagaggctgtgctctccactattttttaccagctcaacaaacggatgccaaccactcaccaaatccatgtggagcagtccatcagcctcctccttaacttcctgcttgcagcgtttgatccggaaggccatggtaaaatttcagtatttgctgtcaaaatggctttagccacattgtgtggagggaagatcatggacaaattaagatatattttctcaatgatttctgactccagtggggtgatggtttatggacgatatgaccaattccttcgggaagttctcaaactacccacggcagtttttgaaggtccttcatttggttacacagaacagtcagccagatcctgtttctcccaacagaaaaaagtcacgttaaatggtttcttggacacgcttatgtcagatcctcccccgcagtgtctggtctggttgcctcttctgcatcgactagcaaatgtggaaaatgtcttccatccggttgagtgttcctactgccacagtgagagtatgatgggatttcgctaccgatgccaacagtgtcacaattaccagctctgtcaggactgcttctggaggggacatgccggtggttctcatagcaaccagcaccaaatgaaagagtacacgtcatggaaatcacctgctaagaagctgactaatgcattaagcaagtccctgagctgtgcttccagccgtgaacctttgcaccccatgttcccagatcagcctgagaagccactcaacttggctcacatcgtgcctcccagacctgtaaccagcatgaacgacaccctgttctcccactctgttccctcctcaggaagtccttttattaccaggagcatgcttgagagttcaaaccggcttgatgaagaacacaggctaattgccaggtatgcggcaaggctggcagcagagtcctcttcgtctcagccacctcagcagagaagtgctcctgacatctctttcaccatcgatgcgaataagcagcaaaggcagctgattgctgagctagaaaacaagaacagagaaatcttacaggagatccagagacttcggctagagcatgaacaagcttctcagcccacgccagagaaggcacagcaaaaccccaccctgctggcagaactccggctcctcagacagcgcaaagatgagctggaacagagaatgtctgctctccaggagagccggagagagctaatggtccagttggagggtctcatgaagctactaaagactcagggggcaggctctccccgctcctcccccagccacaccatcagcaggccaattcccatgcccatccggtcagcgtcagcctgctccaccccgacgcacacgccgcaggactccctcacaggagtagggggagatgtacaagaggcatttgcacaaagttcaagaagaaacttaaggaatgacttgctagtggctgcagattccatcactaacactatgtcctctcttgtgaaagagctgaattctgaggttgggagtgaaacagagagtaatgtggattctgaatttgcacggactcagtttgaggatcttgttccctcaccaacctctgaaaaggcttttctagcgcaaatccatgcccgaaaacctgggtacattcacagtggagctaccacaagtaccatgcgtggcgacatggttacggaggatgcagatccctatgtgcagcctgaagatgaaaactatgaaaatgactctgtccggcagctggagaatgagctccagatggaggaatacctgaaacagaagctgcaagatgaagcttatcagctccacgtcagcactgagaccagactcgagcacccctgtcctgtaagcgagacaaaatggcgtgtgttattttggggttttgtgttttttggtgggtttctttccttggctctccagatttacttttggggcctgttctaagtgcaaacccagcaagtttcacttgtcctgtccattagatacaactacatcttgcgggggttgtttctttcttgttccacaatgaattgcacatccatctccatcagagctgatagcctgttaataagcactggtctaacacagccaaccctcctccacagcgccatattaatggaggaggggaggaaggtgaaatctactgcatgggattcaggaaacagttgtggttggtcaggacggaagttggggtaagtttggttggtcagagggagttgtgctggagattgtgaaaaatgggttcttgaatgatctactataaggcagggaaggttcatttgtaagtagtaatgtgaactgaattgcattaagagtgtgtggcctttgttgtgatatactatgtattttcttatatgcatgagccaaactgttgcatcataatttagcactgatgtctgcttttattttgatcatctttgtccacccttattagttcttggctgttaaccgtagatagatcttgtaaatccagcaacctttggttgctgcattccccttggttcgattccacgcaaggagccacaagtgagaactccactgtccttagaagaaagggcatttttacttttgaaccaaaaagagaaaaaaaaatcagaagtgttgcatcttgaggcgaattaactgtaagacatttttaattatgactactgcaatttgacaccatttgaaataatcaattcagagacactaaagatttcacaatattcattggtattgtaaaaaaaaaatactattgtatggatttttgtattgctgttaagtattgttttgtgtgtgtgtgtgtgtgtgtgtgttggaacctcctggggacatgttatattttgaagtgattaaactatttaattgtgtgtctatattttggagtggaataatttcttcattaaaaaatgtttttaaaaacactatatcttgggtggtttattcctttgtttcagtgaatctttcctaaagcaacgtggagtcagtctgttgaaagaaggaaggcaggtacttgcagtttaaagcaggacccattgatggaatattgagccaccgaggcaaaatagctcaccttctcttgccttgggggatgcatggtttttaccattctactgttttattagcatctgtgagcatctaatagaaatactattctgctatttatggaaatccttattataattgatatggaagtgagtttgaaattctaacagctaacatatttcatgtttgtatcacacactgttcttaacactttatgtgacttcactcaattctttgaatcctctgcatctagccatgtattctgcaaatattaagtgctcaatggtttttttgttgaattactgaataaatgaattagtggtgt

SEQ ID NO: 318507 - DNA, 1672 bp, Homo sapiens
ctcagggtatctctagtgactgtggtatctctctgttaagagaagggtctgatcaaccactcacactgtgagtattcagttcggtttcattttactgaaaacctgtgaaacctctttttataaaaatcaggcaattaaatcccttttcatcacacaattattgagccttgttccccatggctcaccaaaatgtgctcaattttgtgagagaaagactgtactccataactgactattcacgtcccatctttttggctcttccccaaagcagaatccttactgttggttgacagtaatctctttttaaaaagtaactctcagctttttccttagcaccagagcctttcggctccgggagacgagagggtcattacatacttttttttttttctggaaataggggcattgtgactttatagcctaaactggagctgtctgaacctgtggtcaggctcaagagccagcagggggagcagcaaactcaaaaaaaaaacaaattaaattaaattaaattaaattaaatagaagcaaaataaaagcagctttaatttcaagtgcatgtaccacgctatgtatgacaatatatcccactcactagcattatttaaaagtttcacattatttccatggatcaattagaaccacaacctgtccaatttcaacgtatctttcatttcttctgtatgctcttttctattattcattatgtgtgtttgtgtgtaacaaagaatgtttggaaaatgctggacacatttttacccttcattcccatggtctgtaaaaaaggaaagtgtaaaatcaatctgtaatgtcagacaataaagataatgtattacattattttgtattttgtgaaaaaaattactttactaaattaaagtcaaattttaacagaagacagtccccctgggtgaaggacacataacacatacagcctgtataattgcccatgaatgcatacatggggtattgctattgtatttccaatacacttagatcatggtaaagaaaaatgccttcttcatgatacttctctgcaaatggcttctttcctctcctgtctcttatttagcatgtgcatagaaaaaggaaataaggttcaattataacctccctcctcctagcagagagagagggcaatcatcctgtcgtcatcagccttgctttagccatttcccttggggatactttccaggccatttcccaggcagcaggatcttgaaaggctcctatggaccaggaagttcgtaaacagatggatgcacagagccaaactgtggcagtgcccccaaggtggcgccactgccccctcaccttccagctcctctccaccaagcccctcagcagcttctgcatctcagggggccaacagcgggtactgcggtgtcggtacccaaggaccagggcccacgtcacccagatgtcagcaatacatcgtctgggtagtggcagagtttgcctatttcacttatttatcttttttgcttttatacacaagcctcttttcaaaaaggacctgaggcagcttacaacaaaagatataaacagtgacttcataaaattgaaatagaaaaatcaaaaactaaagaaaataaaatgtgaatatgctaatcttaagggacaaggatgttactctgcatgttctggcaatgaagcaaaaaaaaaaaaaaag

SEQ ID NO: 318508 - DNA, 1262 bp, Homo sapiens
aggatcctcaggaaaccctggtactggcagcagccagcctctgctgtgcccacatgacccacaactctggcagcggacccggcacttccaacattattaaataataagaaagcggctcctactccaggctcaaacctccctgcagaccaatggacaccttctaagagtttggcgagtcagtgactgaagcgcccgtccattccaagataaataggatttaccaatccttggatgaagtgcttgggaagtctttaagtgccataatcaactgccatttcaaagaatatagatggttttgaaaagttcatgctgtcccttcattgaattttagaatgattgaagatagtgggaaaagaggaaataccatggcagaaagaagacagctgtttgcagagatgagggctcaagatctggatcgcatccgactctccacctacagaacagcatgcaagcttaggtttgttcagaagaaatgcaatttgcacctggtggacatatggaatgtcatagaagcattgcgggaaaatgctctgaacaacctggacccaaacactgaactcaacgtgtcccgcttagaggctgtgctctccactattttttaccagctcaacaaacggatgccaaccactcaccaaatccatgtggagcagtccatcagcctcctccttaacttcctgcttgcagcgtttgatccggaaggccatggtaaaatttcagtatttgctgtcaaaatggctttagccacattgtgtggagggaagatcatggacaaattaagatatattttctcaatgatttctgactccagtggggtgatggtttatggacgatatgaccaattccttcgggaagttctcaaactacccacggcagtttttgaaggtccttcatttggttacacagaacagtcagccagatcctgtttctcccaacagaaaaaagtcacgttaaatggtttcttggacacgcttatgtcagatcctcccccgcagtgtctggtctggttgcctcttctgcatcgactagcaaatgtggaaaatgtttgagctgttctggttcctccagggtgcatggtacccattaacccaaaatatgattatttcccttttttcccattttcagtcattttggaatgttctctgtgaaccacagttgtgttgtttaaagctcacatttctttctgtcaccacagagattggcctacggtttctgttttgagggtgctgttcaataaagctgtgtacactaaatgtctttcctct

SEQ ID NO: 318509 - DNA, 362 bp, Homo sapiens
gatgtgatgtttagaaatatgtacttttattaggaagctctgcattctgcaaatatcaagcagaggtagaccccatccttactgaaggtcattttatatcatttcagctcggacggtgcttttggtggatgcgtctagatggataacatgacttcttctaccctaaaatattcctataatactttgagctgttctggttcctccagggtgcatggtacccattaacccaaaatatgattatttcccttttttcccattttcagtcattttggaatgttctctgtgaaccacagttgtgttgtttaaagctcacatttctttctgtcaccacagagattggcctacggtttctgttttgaggg

SEQ ID NO: 318510 - DNA, 284 bp, Homo sapiens
tcccactctccaccctactgcgtgctcttacttattctgttggaacccagtgtagcttcctgagatttaaaatataggaagactcaaaactatgttacttcttggaatatagataattcagtactgatttaaataacaactgaatagcaaggaccttctggaacataatcttacattcacagtaagttaaaatcttttccaagttttgttttgtggaaacggcttaaaaattattgttagttttatttttcttagattctggagttcttttaagtgcgtgacta

SEQ ID NO: 318511 - DNA, 748 bp, Homo sapiens
aggatcctcaggaaaccctggtactggcagcagccagcctctgctgtgcccacatgacccacaactctggcagcggacccggcacttccaacattattaaataataagaaagcggctcctactccaggctcaaacctccctgcagaccaatggacaccttctaagagtttggcgagtcagtgactgaagcgcccgtccattccaagataaataggatttaccaatccttggatgaagtgcttgggaagtctttaagtgccataatcaactgccatttcaaagaatatagatggttttgaaaagttcatgctgtcccttcattgaattttagaatgattgaagatagtgggaaaagaggaaataccatggcagaaagaagacagctgtttgcagagatgagggctcaagatctggatcgcatccgactctccacctacagaacagcatgcaagcttaggtttgttcagaagaaatgcaatttgcacctggtggacatatggaatgtcatagaagcattgcgggaaaatgctctgaacaacctggacccaaacactgaactcaacgtgtcccgcttagaggctgtgctctccactattttttaccagctcaacaaacggatgccaaccactcaccaaatccatgtggagcagtccatcagcctcctccttaacttcctgcttgcagcgtttgatccgtaagcaccctctgaatgtctgttcctctctacatgtttggctttcacttcctg

SEQ ID NO: 318512 - DNA, 6473 bp, Homo sapiens
agaggctggatttcatactcatagctctccctagaatttcagagagttctgttatgatctctgttgtaattaccaatttggttcaagtttgttctttaaatgaatatgcttagaattcacatatgttctggatgtactggaattaaaaggatttaagagatcatggtgtgcatgttctaggataaataggatttaccaatccttggatgaagtgcttgggaagtctttaagtgccataatcaactgccatttcaaagaatatagatggttttgaaaagttcatgctgtcccttcattgaattttagaatgattgaagatagtgggaaaagaggaaataccatggcagaaagaagacagctgtttgcagagatgagggctcaagatctggatcgcatccgactctccacctacagaacagcatgcaagcttaggtttgttcagaagaaatgcaatttgcacctggtggacatatggaatgtcatagaagcattgcgggaaaatgctctgaacaacctggacccaaacactgaactcaacgtgtcccgcttagaggctgtgctctccactattttttaccagctcaacaaacggatgccaaccactcaccaaatccatgtggagcagtccatcagcctcctccttaacttcctgcttgcagcgtttgatccggaaggccatggtaaaatttcagtatttgctgtcaaaatggctttagccacattgtgtggagggaagatcatggacaaattaagatatattttctcaatgatttctgactccagtggggtgatggtttatggacgatatgaccaattccttcgggaagttctcaaactacccacggcagtttttgaaggtccttcatttggttacacagaacagtcagccagatcctgtttctcccaacagaaaaaagtcacgttaaatggtttcttggacacgcttatgtcagatcctcccccgcagtgtctggtctggttgcctcttctgcatcgactagcaaatgtggaaaatgtcttccatccggttgagtgttcctactgccacagtgagagtatgatgggatttcgctaccgatgccaacagtgtcacaattaccagctctgtcaggactgcttctggaggggacatgccggtggttctcatagcaaccagcaccaaatgaaagagtacacgtcatggaaatcacctgctaagaagctgactaatgcattaagcaagtccctgagctgtgcttccagccgtgaacctttgcaccccatgttcccagatcagcctgagaagccactcaacttggctcacatcgtgcctcccagacctgtaaccagcatgaacgacaccctgttctcccactctgttccctcctcaggaagtccttttattaccaggagcatgcttgagagttcaaaccggcttgatgaagaacacaggctaattgccaggtatgcggcaaggctggcagcagagtcctcttcgtctcagccacctcagcagagaagtgctcctgacatctctttcaccatcgatgcgaataagcagcaaaggcagctgattgctgagctagaaaacaagaacagagaaatcttacaggagatccagagacttcggctagagcatgaacaagcttctcagcccacgccagagaaggcacagcaaaaccccaccctgctggcagaactccggctcctcagacagcgcaaagatgagctggaacagagaatgtctgctctccaggagagccggagagagctaatggtccagttggagggtctcatgaagctactaaagactcagggggcaggctctccccgctcctcccccagccacaccatcagcaggccaattcccatgcccatccggtcagcgtcagcctgctccaccccgacgcacacgccgcaggactccctcacaggagtagggggagatgtacaagaggcatttgcacaaagttcaagaagaaacttaaggaatgacttgctagtggctgcagattccatcactaacactatgtcctctcttgtgaaagagctgaattctgaggttgggagtgaaacagagagtaatgtggattctgaatttgcacggactcagtttgaggatcttgttccctcaccaacctctgaaaaggcttttctagcgcaaatccatgcccgaaaacctgggtacattcacagtggagctaccacaagtaccatgcgtggcgacatggttacggaggatgcagatccctatgtgcagcctgaagatgaaaactatgaaaatgactctgtccggcagctggagaatgagctccagatggaggaatacctgaaacagaagctgcaagatgaagcttatcaggtcagcttgcaaggttgaatgcaatatccttttatcacactcctctcaagcaagctatagtcagacagatgatgaaagtaacatgaaaactggtgatgatggagagccctgtggccacacagaggaggaagacagcagcctggcagcagcctcaccgaagagaggaaccaccacacccagcagctcctgacagacccccacccctaaagatgtgtcctgatgactatagtgcagctaactttttggttctcagatttgtaggtgcataggtgtgtgtttcaaggaaggaaaaaaaaagacttctgttcaaagttaacttatcagctacatcctctgtaacgtggttcatccctggttaaaaagcaaacaaacacaggctgaaaacccatgctgctgttatacacaatggcagtattaacaagcattttaaacctttgcacatgatattgaacctgttcagtttacaatgacaatattaatactgtttatagctagaagtttgatttctgaattctttgagattttagcaaaacagtttattatacactgtacatttttttcacagcaattggaaaaaaacaaccacttgcaatcattcaataaccctgaagaatttggttcctgagtgtacaaactcagagcccggaagccaagaagggtccttggcctgcacggtctgtagttgactccaagtctctgtgagcagtgacttgaaccaaacacaccaggaataatccattctttggggcctctttccaactcgaggttgttttctttcaagatactctaatcagccatagaatttagtgtaaatatttttttttccaaatagatatcatattcaaaaaaggcagcattcaaattatatagaatctagtttttaaaatcagcacagatcttcttaaaaactgtgaactatgttttgaaatactcgttactaaagctgtttataaaccacaggtgccataagatccccaaacggactaaagttatctctgctcttccatggtcttgttcctctcgttttggctttaggaagcatgtctttaacagcaccgctcgttcacaagttcccccatcaagttgtttggaggccttcagctttaaatgtacaggcttaaagtgcgcttgcaaacgtttgctctcctttttttctgaatgttgattgccttagctggccacctggtgttctgcatgtagccttctgtggtcatgtgaaaggagacaggctcttctaagttgagttgggatttttgcactcagtgaaaagctgaagtgcaaaagagctatcaaagacaagaggataaaagactgggatagtcttttccaaggaccctctttagagggccctaaagacctcctttgggaattctggggaaaaagaaaaagtaatcttctacttgcttcaagatttgatttttttaaaaaagcctgcgacctattcaatacattatgcttaaattagcagtttctctggaattcctgtctctcctttaaaagaaaggagagaacattttagaacaatagttctcaaagtgtgttccccggacaagcagcatctgcaacacttaggaaggtcttcgaaatactaatttgtaagccccacctcaggcctactgaatcagaagctctgggggttgggtccagaagtctgttttagtcaaccctctaggtgattctgatgctcgctaaaggttgagaactactgctttagaatgaagtcgtataataaagtctctgaaaaggccttattcagaataagcaagaaaggttctgtgattcacttttgcttctggggctggcaaaaaccttctctgaacccacacaccaagttcgtagttggtaggtgcccagccaagtcctgacatcttcatgccccctctgcagagggcggctgtacgatgttcacatgtctgcgtttggtcagacatcatctccttggctgccctttgaaaccaaatcacttgccttggggataaagtgctcaattggcattagtgagaagcccatcctatcccttgacatacttaatcatatatctctccagagaactcacctgacaaatgtctctgagcacaggctgacaccaaagtggcacaactgcacagttctcagatttctttgcacagattgatttttattgcgggttttgttggggtgtcttaatgttcatctcttttccactgcccatcctctgtgaacccatacctctctagatggagcaggtggccactggtgcctcatactcagtattgaaaaccactacatcccagctacctataatgctgtcagctcaaaatcatagccaggtagttcttgaactcagaacttaaatcctgcacgtggcactccaccactgactggaccgagctggcatatgttgtttctttgtgtttctacatcaaaatgttcgtctaagatttgaactgttctgctgataaccttccccgttgtcatagctatttcattgccaaccaactccatcacatggttgttgatatcgtcatataaagccattgcaaggactctggaaactgccgccaatgaccaatttctgactaaccagccaccttttctctctcttagctccacgtcagcactgagaccagactcgagcacccctgtcctgtaagcgagacaaaatggcgtgtgttattttggggttttgtgttttttggtgggtttctttccttggctctccagatttacttttggggcctgttctaagtgcaaacccagcaagtttcacttgtcctgtccattagatacaactacatcttgcgggggttgtttctttcttgttccacaatgaattgcacatccatctccatcagagctgatagcctgttaataagcactggtctaacacagccaaccctcctccacagcgccatattaatggaggaggggaggaaggtgaaatctactgcatgggattcaggaaacagttgtggttggtcaggacggaagttggggtaagtttggttggtcagagggagttgtgctggagattgtgaaaaatgggttcttgaatgatctactataaggcagggaaggttcatttgtaagtagtaatgtgaactgaattgcattaagagtgtgtggcctttgttgtgatatactatgtattttcttatatgcatgagccaaactgttgcatcataatttagcactgatgtctgcttttattttgatcatctttgtccacccttattagttcttggctgttaaccgtagatagatcttgtaaatccagcaacctttggttgctgcattccccttggttcgattccacgcaaggagccacaagtgagaactccactgtccttagaagaaagggcatttttacttttgaaccaaaaagagaaaaaaaaatcagaagtgttgcatcttgaggcgaattaactgtaagacatttttaattatgactactgcaatttgacaccatttgaaataatcaattcagagacactaaagatttcacaatattcattggtattgtaaaaaaaaaatactattgtatggatttttgtattgctgttaagtattgttttgtgtgtgtgtgtgtgtgtgtgtgttggaacctcctggggacatgttatattttgaagtgattaaactatttaattgtgtgtctatattttggagtggaataatttcttcattaaaaaatgtttttaaaaacactatatcttgggtggtttattcctttgtttcagtgaatctttcctaaagcaacgtggagtcagtctgttgaaagaaggaaggcaggtacttgcagtttaaagcaggacccattgatggaatattgagccaccgaggcaaaatagctcaccttctcttgccttgggggatgcatggtttttaccattctactgttttattagcatctgtgagcatctaatagaaatactattctgctatttatggaaatccttattataattgatatggaagtgagtttgaaattctaacagctaacatatttcatgtttgtatcacacactgttcttaacactttatgtgacttcactcaattctttgaatcctctgcatctagccatgtattctgcaaatattaagtgctcaatggtttttttgttgaattactgaataaatgaattagtggtgt

SEQ ID NO: 318513 - DNA, 5660 bp, Homo sapiens
tggagttggatgtgtgagtgtgcccagagttaaagggaatatcaaggatggtggcagaattaaagggcaaacttaccttccatcccaggtctagtattcagtcccccttcctcccactctccaccctactgcgtgctcttacttattctgttggaacccagtgtagcttcctgagatttaaaatataggaagactcaaaactatgttacttcttggaatatagataattcagtactgatttaaataacaactgaatagcaaggaccttctggaacataatcttacattcacaaaatcacctgctaagaagctgactaatgcattaagcaagtccctgagctgtgcttccagccgtgaacctttgcaccccatgttcccagatcagcctgagaagccactcaacttggctcacatcgtgcctcccagacctgtaaccagcatgaacgacaccctgttctcccactctgttccctcctcaggaagtccttttattaccaggagctctcctcccaaggacagtgaagtagagcagaacaaactgctggctagggctgctccagcttttctgaagggcaaaggcatgcttgagagttcaaaccggcttgatgaagaacacaggctaattgccaggtatgcggcaaggctggcagcagagtcctcttcgtctcagccacctcagcagagaagtgctcctgacatctctttcaccatcgatgcgaataagcagcaaaggcagctgattgctgagctagaaaacaagaacagagaaatcttacaggagatccagagacttcggctagagcatgaacaagcttctcagcccacgccagagaaggcacagcaaaaccccaccctgctggcagaactccggctcctcagacagcgcaaagatgagctggaacagagaatgtctgctctccaggagagccggagagagctaatggtccagttggagggtctcatgaagctactaaagactcagggggcaggctctccccgctcctcccccagccacaccatcagcaggccaattcccatgcccatccggtcagcgtcagcctgctccaccccgacgcacacgccgcaggactccctcacaggagtagggggagatgtacaagaggcatttgcacaaagttcaagaagaaacttaaggaatgacttgctagtggctgcagattccatcactaacactatgtcctctcttgtgaaagagctgaattctgaggttgggagtgaaacagagagtaatgtggattctgaatttgcacggactcagtttgaggatcttgttccctcaccaacctctgaaaaggcttttctagcgcaaatccatgcccgaaaacctgggtacattcacagtggagctaccacaagtaccatgcgtggcgacatggttacggaggatgcagatccctatgtgcagcctgaagatgaaaactatgaaaatgactctgtccggcagctggagaatgagctccagatggaggaatacctgaaacagaagctgcaagatgaagcttatcaggtcagcttgcaaggttgaatgcaatatccttttatcacactcctctcaagcaagctatagtcagacagatgatgaaagtaacatgaaaactggtgatgatggagagccctgtggccacacagaggaggaagacagcagcctggcagcagcctcaccgaagagaggaaccaccacacccagcagctcctgacagacccccacccctaaagatgtgtcctgatgactatagtgcagctaactttttggttctcagatttgtaggtgcataggtgtgtgtttcaaggaaggaaaaaaaaagacttctgttcaaagttaacttatcagctacatcctctgtaacgtggttcatccctggttaaaaagcaaacaaacacaggctgaaaacccatgctgctgttatacacaatggcagtattaacaagcattttaaacctttgcacatgatattgaacctgttcagtttacaatgacaatattaatactgtttatagctagaagtttgatttctgaattctttgagattttagcaaaacagtttattatacactgtacatttttttcacagcaattggaaaaaaacaaccacttgcaatcattcaataaccctgaagaatttggttcctgagtgtacaaactcagagcccggaagccaagaagggtccttggcctgcacggtctgtagttgactccaagtctctgtgagcagtgacttgaaccaaacacaccaggaataatccattctttggggcctctttccaactcgaggttgttttctttcaagatactctaatcagccatagaatttagtgtaaatatttttttttccaaatagatatcatattcaaaaaaggcagcattcaaattatatagaatctagtttttaaaatcagcacagatcttcttaaaaactgtgaactatgttttgaaatactcgttactaaagctgtttataaaccacaggtgccataagatccccaaacggactaaagttatctctgctcttccatggtcttgttcctctcgttttggctttaggaagcatgtctttaacagcaccgctcgttcacaagttcccccatcaagttgtttggaggccttcagctttaaatgtacaggcttaaagtgcgcttgcaaacgtttgctctcctttttttctgaatgttgattgccttagctggccacctggtgttctgcatgtagccttctgtggtcatgtgaaaggagacaggctcttctaagttgagttgggatttttgcactcagtgaaaagctgaagtgcaaaagagctatcaaagacaagaggataaaagactgggatagtcttttccaaggaccctctttagagggccctaaagacctcctttgggaattctggggaaaaagaaaaagtaatcttctacttgcttcaagatttgatttttttaaaaaagcctgcgacctattcaatacattatgcttaaattagcagtttctctggaattcctgtctctcctttaaaagaaaggagagaacattttagaacaatagttctcaaagtgtgttccccggacaagcagcatctgcaacacttaggaaggtcttcgaaatactaatttgtaagccccacctcaggcctactgaatcagaagctctgggggttgggtccagaagtctgttttagtcaaccctctaggtgattctgatgctcgctaaaggttgagaactactgctttagaatgaagtcgtataataaagtctctgaaaaggccttattcagaataagcaagaaaggttctgtgattcacttttgcttctggggctggcaaaaaccttctctgaacccacacaccaagttcgtagttggtaggtgcccagccaagtcctgacatcttcatgccccctctgcagagggcggctgtacgatgttcacatgtctgcgtttggtcagacatcatctccttggctgccctttgaaaccaaatcacttgccttggggataaagtgctcaattggcattagtgagaagcccatcctatcccttgacatacttaatcatatatctctccagagaactcacctgacaaatgtctctgagcacaggctgacaccaaagtggcacaactgcacagttctcagatttctttgcacagattgatttttattgcgggttttgttggggtgtcttaatgttcatctcttttccactgcccatcctctgtgaacccatacctctctagatggagcaggtggccactggtgcctcatactcagtattgaaaaccactacatcccagctacctataatgctgtcagctcaaaatcatagccaggtagttcttgaactcagaacttaaatcctgcacgtggcactccaccactgactggaccgagctggcatatgttgtttctttgtgtttctacatcaaaatgttcgtctaagatttgaactgttctgctgataaccttccccgttgtcatagctatttcattgccaaccaactccatcacatggttgttgatatcgtcatataaagccattgcaaggactctggaaactgccgccaatgaccaatttctgactaaccagccaccttttctctctcttagctccacgtcagcactgagaccagactcgagcacccctgtcctgtaagcgagacaaaatggcgtgtgttattttggggttttgtgttttttggtgggtttctttccttggctctccagatttacttttggggcctgttctaagtgcaaacccagcaagtttcacttgtcctgtccattagatacaactacatcttgcgggggttgtttctttcttgttccacaatgaattgcacatccatctccatcagagctgatagcctgttaataagcactggtctaacacagccaaccctcctccacagcgccatattaatggaggaggggaggaaggtgaaatctactgcatgggattcaggaaacagttgtggttggtcaggacggaagttggggtaagtttggttggtcagagggagttgtgctggagattgtgaaaaatgggttcttgaatgatctactataaggcagggaaggttcatttgtaagtagtaatgtgaactgaattgcattaagagtgtgtggcctttgttgtgatatactatgtattttcttatatgcatgagccaaactgttgcatcataatttagcactgatgtctgcttttattttgatcatctttgtccacccttattagttcttggctgttaaccgtagatagatcttgtaaatccagcaacctttggttgctgcattccccttggttcgattccacgcaaggagccacaagtgagaactccactgtccttagaagaaagggcatttttacttttgaaccaaaaagagaaaaaaaaatcagaagtgttgcatcttgaggcgaattaactgtaagacatttttaattatgactactgcaatttgacaccatttgaaataatcaattcagagacactaaagatttcacaatattcattggtattgtaaaaaaaaaatactattgtatggatttttgtattgctgttaagtattgttttgtgtgtgtgtgtgtgtgtgtgtgttggaacctcctggggacatgttatattttgaagtgattaaactatttaattgtgtgtctatattttggagtggaataatttcttcattaaaaaatgtttttaaaaacactatatcttgggtggtttattcctttgtttcagtgaatctttcctaaagcaacgtggagtcagtctgttgaaagaaggaaggcaggtacttgcagtttaaagcaggacccattgatggaatattgagccaccgaggcaaaatagctcaccttctcttgccttgggggatgcatggtttttaccattctactgttttattagcatctgtgagcatctaatagaaatactattctgctatttatggaaatccttattataattgatatggaagtgagtttgaaattctaacagctaacatatttcatgtttgtatcacacactgttcttaacactttatgtgacttcactcaattctttgaatcctctgcatctagccatgtattctgcaaatattaagtgctcaatggtttttttgttgaattactgaataaatgaattagtggtgt

SEQ ID NO: 318514 - DNA, 3983 bp, Homo sapiens
  misc_feature (18)..(18): n is a, c, g, or t
  misc_feature (35)..(35): n is a, c, g, or t
  misc_feature (42)..(42): n is a, c, g, or t
  misc_feature (49)..(49): n is a, c, g, or t
  misc_feature (62)..(62): n is a, c, g, or t
  misc_feature (65)..(65): n is a, c, g, or t
  misc_feature (85)..(85): n is a, c, g, or t
  misc_feature (90)..(90): n is a, c, g, or t
ccatgatcttgttttccnaaaacaagtttttcttntgaagantgggggntaaataacagggntgncttattgagtattcctcccngggtnaaaaaccaaaagaattccttgagcacaaggggaagaatgaacacagctttttattgaagttaaaggttactttggagtttgtttggaaatgtgtaaggtcaaatactatagttttcagcatatgtagtacttcagaggaagaattaaggggcatgttggtgcatttaactacaaaaccagaatgattgaagatagtgggaaaagaggaaataccatggcagaaagaagacagctgtttgcagagatgagggctcaagatctggatcgcatccgactctccacctacagaacagcatgcaagcttaggtttgttcagaagaaatgcaatttgcacctggtggacatatggaatgtcatagaagcattgcgggaaaatgctctgaacaacctggacccaaacactgaactcaacgtgtcccgcttagaggctgtgctctccactattttttaccagctcaacaaacggatgccaaccactcaccaaatccatgtggagcagtccatcagcctcctccttaacttcctgcttgcagcgtttgatccggaaggccatggtaaaatttcagtatttgctgtcaaaatggctttagccacattgtgtggagggaagatcatggacaaattaagatatattttctcaatgatttctgactccagtggggtgatggtttatggacgatatgaccaattccttcgggaagttctcaaactacccacggcagtttttgaaggtccttcatttggttacacagaacagtcagccagatcctgtttctcccaacagaaaaaagtcacgttaaatggtttcttggacacgcttatgtcagatcctcccccgcagtgtctggtctggttgcctcttctgcatcgactagcaaatgtggaaaatgtcttccatccggttgagtgttcctactgccacagtgagagtatgatgggatttcgctaccgatgccaacagtgtcacaattaccagctctgtcaggactgcttctggaggggacatgccggtggttctcatagcaaccagcaccaaatgaaagagtacacgtcatggaaatcacctgctaagaagctgactaatgcattaagcaagtccctgagctgtgcttccagccgtgaacctttgcaccccatgttcccagatcagcctgagaagccactcaacttggctcacatcgtgcctcccagacctgtaaccagcatgaacgacaccctgttctcccactctgttccctcctcaggaagtccttttattaccaggagctctcctcccaaggacagtgaagtagagcagaacaaactgctggctagggctgctccagcttttctgaagggcaaagggatacagtacagcctgaatgtggcagacaggctagctgatgaacatgttctcatcgggttgtatgtcaacatgctccggaacaacccctcatgcatgcttgagagttcaaaccggcttgatgaagaacacaggctaattgccaggtatgcggcaaggctggcagcagagtcctcttcgtctcagccacctcagcagagaagtgctcctgacatctctttcaccatcgatgcgaataagcagcaaaggcagctgattgctgagctagaaaacaagaacagagaaatcttacaggagatccagagacttcggctagagcatgaacaagcttctcagcccacgccagagaaggcacagcaaaaccccaccctgctggcagaactccggctcctcagacagcgcaaagatgagctggaacagagaatgtctgctctccaggagagccggagagagctaatggtccagttggagggtctcatgaagctactaaaggaagaagaactgaagcagggagtaagttatgtcccctactgcaggtcttaactaacagtggaggggcctgccgacctgcggttttctcattgcttttgctctaatgtatgttcatgcttcagtttggaaagagaaaaaagtcatactaatttgcttctttttcaatgtagtgcttgaattgagatatataaatttagcattttttataactatcactactatccacatcaaaagaagaactatgacatcttttagaaaagggaacgaattgtcatttattggaaacattttagatccccagaggtataagtttcaaaccagtcttagcttttcaagttgttgatcagacccttctcttaacagagagataccacagtcactagagataccctgaggttcatgtcatcccaaaacccacagcactcagaagctaacctctacacccactcacactgtgagtattcagttcggtttcattttactgaaaacctgtgaaacctctttttataaaaatcaggcaattaaatcccttttcatcacacaattattgagccttgttccccatggctcaccaaaatgtgctcaattttgtgagagaaagactgtactccataactgactattcacgtcccatctttttggctcttccccaaagcagaatccttactgttggttgacagtaatctctttttaaaaagtaactctcagctttttccttagcaccagagcctttcggctccgggagacgagagggtcattacatacttttttttttttctggaaataggggcattgtgactttatagcctaaactggagctgtctgaacctgtggtcaggctcaagagccagcagggggagcagcaaactcaaaaaaaaaacaaattaaattaaattaaattaaattaaatagaagcaaaataaaagcagctttaatttcaagtgcatgtaccacgctatgtatgacaatatatcccactcactagcattatttaaaagtttcacattatttccatggatcaattagaaccacaacctgtccaatttcaacgtatctttcatttcttctgtatgctcttttctattattcattatgtgtgtttgtgtgtaacaaagaatgtttggaaaatgctggacacatttttacccttcattcccatggtctgtaaaaaaggaaagtgtaaaatcaatctgtaatgtcagacaataaagataatgtattacattattttgtattttgtgaaaaaaattactttactaaattaaagtcaaattttaacagaagacagtccccctgggtgaaggacacataacacatacagcctgtataattgcccatgaatgcatacatggggtattgctattgtatttccaatacacttagatcatggtaaagaaaaatgccttcttcatgatacttctctgcaaatggcttctttcctctcctgtctcttatttagcatgtgcatagaaaaaggaaataaggttcaattataacctccctcctcctagcagagagagagggcaatcatcctgtcgtcatcagccttgctttagccatttcccttggggatactttccaggccatttcccaggcagcaggatcttgaaaggctcctatggaccaggaagttcgtaaacagatggatgcacagagccaaactgtggcagtgcccccaaggtggcgccactgccccctcaccttccagctcctctccaccaagcccctcagcagcttctgcatctcagggggccaacagcgggtactgcggtgtcggtacccaaggaccagggcccacgtcacccagatgtcagcaatacatcgtctgggtagtggcagagtttgcctatttcacttatttatcttttttgcttttatacacaagcctcttttcaaaaaggacctgaggcagcttacaacaaaagatataaacagtgacttcataaaattgaaatagaaaaatcaaaaactaaagaaaataaaatgtgaatatgctaatcttaagggacaaggatgttactctgcatgttctggcaatgaagcaaaaaaaaaaaaaaag

SEQ ID NO: 318515 - DNA, 3148 bp, Homo sapiens
  misc_feature (18)..(18): n is a, c, g, or t
  misc_feature (35)..(35): n is a, c, g, or t
  misc_feature (42)..(42): n is a, c, g, or t
  misc_feature (49)..(49): n is a, c, g, or t
  misc_feature (62)..(62): n is a, c, g, or t
  misc_feature (65)..(65): n is a, c, g, or t
  misc_feature (85)..(85): n is a, c, g, or t
  misc_feature (90)..(90): n is a, c, g, or t
ccatgatcttgttttccnaaaacaagtttttcttntgaagantgggggntaaataacagggntgncttattgagtattcctcccngggtnaaaaaccaaaagaattccttgagcacaaggggaagaatgaacacagctttttattgaagttaaaggttactttggagtttgtttggaaatgtgtaaggtcaaatactatagttttcagcatatgtagtacttcagaggaagaattaaggggcatgttggtgcatttaactacaaaaccagaatgattgaagatagtgggaaaagaggaaataccatggcagaaagaagacagctgtttgcagagatgagggctcaagatctggatcgcatccgactctccacctacagaacagcatgcaagcttaggtttgttcagaagaaatgcaatttgcacctggtggacatatggaatgtcatagaagcattgcgggaaaatgctctgaacaacctggacccaaacactgaactcaacgtgtcccgcttagaggctgtgctctccactattttttaccagctcaacaaacggatgccaaccactcaccaaatccatgtggagcagtccatcagcctcctccttaacttcctgcttgcagcgtttgatccggaaggccatggtaaaatttcagtatttgctgtcaaaatggctttagccacattgtgtggagggaagatcatggacaaattaagatatattttctcaatgatttctgactccagtggggtgatggtttatggacgatatgaccaattccttcgggaagttctcaaactacccacggcagtttttgaaggtccttcatttggttacacagaacagtcagccagatcctgtttctcccaacagaaaaaagtcacgttaaatggtttcttggacacgcttatgtcagatcctcccccgcagtgtctggtctggttgcctcttctgcatcgactagcaaatgtggaaaatgtcttccatccggttgagtgttcctactgccacagtgagagtatgatgggatttcgctaccgatgccaacagtgtcacaattaccagctctgtcaggactgcttctggaggggacatgccggtggttctcatagcaaccagcaccaaatgaaagagtacacgtcatggaaatcacctgctaagaagctgactaatgcattaagcaagtccctgagctgtgcttccagccgtgaacctttgcaccccatgttcccagatcagcctgagaagccactcaacttggctcacatcgtgcctcccagacctgtaaccagcatgaacgacaccctgttctcccactctgttccctcctcaggaagtccttttattaccaggagctctcctcccaaggacagtgaagtagagcagaacaaactgctggctagggctgctccagcttttctgaagggcaaagggatacagtacagcctgaatgtggcagacaggctagctgatgaacatgttctcatcgggttgtatgtcaacatgctccggaacaacccctcatgcatgcttgagagttcaaaccggcttgatgaagaacacaggctaattgccaggtatgcggcaaggctggcagcagagtcctcttcgtctcagccacctcagcagagaagtgctcctgacatctctttcaccatcgatgcgaataagcagcaaaggcagctgattgctgagctagaaaacaagaacagagaaatcttacaggagatccagagacttcggctagagcatgaacaagcttctcagcccacgccagagaaggcacagcaaaaccccaccctgctggcagaactccggctcctcagacagcgcaaagatgagctggaacagagaatgtctgctctccaggagagccggagagagctaatggtccagttggagggtctcatgaagctactaaaggaagaagaactgaagcagggagtaagttatgtcccctactgcaggtcttaactaacagtggaggggcctgccgacctgcggttttctcattgcttttgctctaatgtatgttcatgcttcagtttggaaagagaaaaaagtcatactaatttgcttctttttcaatgtagtgcttgaattgagatatataaatttagcattttttataactatcactactatccacatcaaaagaagaactatgacatcttttagaaaagggaacgaattgtcatttattggaaacattttagatccccagaggtataagtttcaaaccagtcttagcttttcaagttgttgatcagacccttctcttaacagagagataccacagtcactagagataccctgaggttcatgtcatcccaaaacccacagcactcagaagctaacctctacacccactcacactgtgagtattcagttcggtttcattttactgaaaacctgtgaaacctctttttataaaaatcaggcaattaaatcccttttcatcacacaattattgagccttgttccccatggctcaccaaaatgtgctcaattttgtgagagaaagactgtactccataactgactattcacgtcccatctttttggctcttccccaaagcagaatccttactgttggttgacagtaatctctttttaaaaagtaactctcagctttttccttagcaccagagcctttcggctccgggagacgagagggtcattacatacttttttttttttctggaaataggggcattgtgactttatagcctaaactggagctgtctgaacctgtggtcaggctcaagagccagcagggggagcagcaaactcaaaaaaaaaacaaattaaattaaattaaattaaattaaatagaagcaaaataaaagcagctttaatttcaagtgcatgtaccacgctatgtatgacaatatatcccactcactagcattatttaaaagtttcacattatttccatggatcaattagaaccacaacctgtccaatttcaacgtatctttcatttcttctgtatgctcttttctattattcattatgtgtgtttgtgtgtaacaaagaatgtttggaaaatgctggacacatttttacccttcattcccatggtctgtaaaaaaggaaagtgtaaaatcaatctgtaatgtcagacaataaagataatgtattaca

SEQ ID NO: 318516 - DNA, 2957 bp, Homo sapiens
tggagttggatgtgtgagtgtgcccagagttaaagggaatatcaaggatggtggcagaattaaagggcaaacttaccttccatcccaggtctagtattcagtcccccttcctcccactctccaccctactgcgtgctcttacttattctgttggaacccagtgtagcttcctgagatttaaaatataggaagactcaaaactatgttacttcttggaatatagataattcagtactgatttaaataacaactgaatagcaaggaccttctggaacataatcttacattcacaaaatcacctgctaagaagctgactaatgcattaagcaagtccctgagctgtgcttccagccgtgaacctttgcaccccatgttcccagatcagcctgagaagccactcaacttggctcacatcgtgcctcccagacctgtaaccagcatgaacgacaccctgttctcccactctgttccctcctcaggaagtccttttattaccaggagcatgcttgagagttcaaaccggcttgatgaagaacacaggctaattgccaggtatgcggcaaggctggcagcagagtcctcttcgtctcagccacctcagcagagaagtgctcctgacatctctttcaccatcgatgcgaataagcagcaaaggcagctgattgctgagctagaaaacaagaacagagaaatcttacaggagatccagagacttcggctagagcatgaacaagcttctcagcccacgccagagaaggcacagcaaaaccccaccctgctggcagaactccggctcctcagacagcgcaaagatgagctggaacagagaatgtctgctctccaggagagccggagagagctaatggtccagttggagggtctcatgaagctactaaaggaagaagaactgaagcagggagtaagttatgtcccctactgcaggtcttaactaacagtggaggggcctgccgacctgcggttttctcattgcttttgctctaatgtatgttcatgcttcagtttggaaagagaaaaaagtcatactaatttgcttctttttcaatgtagtgcttgaattgagatatataaatttagcattttttataactatcactactatccacatcaaaagaagaactatgacatcttttagaaaagggaacgaattgtcatttattggaaacattttagatccccagaggtataagtttcaaaccagtcttagcttttcaagttgttgatcagacccttctcttaacagagagataccacagtcactagagataccctgaggttcatgtcatcccaaaacccacagcactcagaagctaacctctacacccactcacactgtgagtattcagttcggtttcattttactgaaaacctgtgaaacctctttttataaaaatcaggcaattaaatcccttttcatcacacaattattgagccttgttccccatggctcaccaaaatgtgctcaattttgtgagagaaagactgtactccataactgactattcacgtcccatctttttggctcttccccaaagcagaatccttactgttggttgacagtaatctctttttaaaaagtaactctcagctttttccttagcaccagagcctttcggctccgggagacgagagggtcattacatacttttttttttttctggaaataggggcattgtgactttatagcctaaactggagctgtctgaacctgtggtcaggctcaagagccagcagggggagcagcaaactcaaaaaaaaaacaaattaaattaaattaaattaaattaaatagaagcaaaataaaagcagctttaatttcaagtgcatgtaccacgctatgtatgacaatatatcccactcactagcattatttaaaagtttcacattatttccatggatcaattagaaccacaacctgtccaatttcaacgtatctttcatttcttctgtatgctcttttctattattcattatgtgtgtttgtgtgtaacaaagaatgtttggaaaatgctggacacatttttacccttcattcccatggtctgtaaaaaaggaaagtgtaaaatcaatctgtaatgtcagacaataaagataatgtattacattattttgtattttgtgaaaaaaattactttactaaattaaagtcaaattttaacagaagacagtccccctgggtgaaggacacataacacatacagcctgtataattgcccatgaatgcatacatggggtattgctattgtatttccaatacacttagatcatggtaaagaaaaatgccttcttcatgatacttctctgcaaatggcttctttcctctcctgtctcttatttagcatgtgcatagaaaaaggaaataaggttcaattataacctccctcctcctagcagagagagagggcaatcatcctgtcgtcatcagccttgctttagccatttcccttggggatactttccaggccatttcccaggcagcaggatcttgaaaggctcctatggaccaggaagttcgtaaacagatggatgcacagagccaaactgtggcagtgcccccaaggtggcgccactgccccctcaccttccagctcctctccaccaagcccctcagcagcttctgcatctcagggggccaacagcgggtactgcggtgtcggtacccaaggaccagggcccacgtcacccagatgtcagcaatacatcgtctgggtagtggcagagtttgcctatttcacttatttatcttttttgcttttatacacaagcctcttttcaaaaaggacctgaggcagcttacaacaaaagatataaacagtgacttcataaaattgaaatagaaaaatcaaaaactaaagaaaataaaatgtgaatatgctaatcttaagggacaaggatgttactctgcatgttctggcaatgaagcaaaaaaaaaaaaaaag

SEQ ID NO: 318517 - DNA, 4155 bp, Homo sapiens
  misc_feature (18)..(18): n is a, c, g, or t
  misc_feature (35)..(35): n is a, c, g, or t
  misc_feature (42)..(42): n is a, c, g, or t
  misc_feature (49)..(49): n is a, c, g, or t
  misc_feature (62)..(62): n is a, c, g, or t
  misc_feature (65)..(65): n is a, c, g, or t
  misc_feature (85)..(85): n is a, c, g, or t
  misc_feature (90)..(90): n is a, c, g, or t
ccatgatcttgttttccnaaaacaagtttttcttntgaagantgggggntaaataacagggntgncttattgagtattcctcccngggtnaaaaaccaaaagaattccttgagcacaaggggaagaatgaacacagctttttattgaagttaaaggttactttggagtttgtttggaaatgtgtaaggtcaaatactatagttttcagcatatgtagtacttcagaggaagaattaaggggcatgttggtgcatttaactacaaaaccaggtggcaggttgctgctctctccttcagaaccccgctctgaggaaagctaaggaagagaacaggacgtctgagtgtgtgactgagaatgattgaagatagtgggaaaagaggaaataccatggcagaaagaagacagctgtttgcagagatgagggctcaagatctggatcgcatccgactctccacctacagaacagcatgcaagcttaggtttgttcagaagaaatgcaatttgcacctggtggacatatggaatgtcatagaagcattgcgggaaaatgctctgaacaacctggacccaaacactgaactcaacgtgtcccgcttagaggctgtgctctccactattttttaccagctcaacaaacggatgccaaccactcaccaaatccatgtggagcagtccatcagcctcctccttaacttcctgcttgcagcgtttgatccggaaggccatggtaaaatttcagtatttgctgtcaaaatggctttagccacattgtgtggagggaagatcatggacaaattaagatatattttctcaatgatttctgactccagtggggtgatggtttatggacgatatgaccaattccttcgggaagttctcaaactacccacggcagtttttgaaggtccttcatttggttacacagaacagtcagccagatcctgtttctcccaacagaaaaaagtcacgttaaatggtttcttggacacgcttatgtcagatcctcccccgcagtgtctggtctggttgcctcttctgcatcgactagcaaatgtggaaaatgtcttccatccggttgagtgttcctactgccacagtgagagtatgatgggatttcgctaccgatgccaacagtgtcacaattaccagctctgtcaggactgcttctggaggggacatgccggtggttctcatagcaaccagcaccaaatgaaagagtacacgtcatggaaatcacctgctaagaagctgactaatgcattaagcaagtccctgagctgtgcttccagccgtgaacctttgcaccccatgttcccagatcagcctgagaagccactcaacttggctcacatcgtgcctcccagacctgtaaccagcatgaacgacaccctgttctcccactctgttccctcctcaggaagtccttttattaccaggagctctcctcccaaggacagtgaagtagagcagaacaaactgctggctagggctgctccagcttttctgaagggcaaagggatacagtacagcctgaatgtggcagacaggctagctgatgaacatgttctcatcgggttgtatgtcaacatgctccggaacaacccctcatgcatgcttgagagttcaaaccggcttgatgaagaacacaggctaattgccaggtatgcggcaaggctggcagcagagtcctcttcgtctcagccacctcagcagagaagtgctcctgacatctctttcaccatcgatgcgaataagcagcaaaggcagctgattgctgagctagaaaacaagaacagagaaatcttacaggagatccagagacttcggctagagcatgaacaagcttctcagcccacgccagagaaggcacagcaaaaccccaccctgctggcagaactccggctcctcagacagcgcaaagatgagctggaacagagaatgtctgctctccaggagagccggagagagctaatggtccagttggagggtctcatgaagctactaaagactcagggggcaggctctccccgctcctcccccagccacaccatcagcaggccaattcccatgcccatccggtcagcgtcagcctgctccaccccgacgcacacgccgcaggactccctcacaggagtagggggagatgtacaagaggcatttgcacaaagttcaagaagaaacttaaggaatgacttgctagtggctgcagattccatcactaacactatgtcctctcttgtgaaagagctgaattctgaggttgggagtgaaacagagagtaatgtggattctgaatttgcacggactcagtttgaggatcttgttccctcaccaacctctgaaaaggcttttctagcgcaaatccatgcccgaaaacctgggtacattcacagtggagctaccacaagtaccatgcgtggcgacatggttacggaggatgcagatccctatgtgcagcctgaagatgaaaactatgaaaatgactctgtccggcagctggagaatgagctccagatggaggaatacctgaaacagaagctgcaagatgaagcttatcaggtcagcttgcaaggttgaatgcaatatccttttatcacactcctctcaactccacgtcagcactgagaccagactcgagcacccctgtcctgtaagcgagacaaaatggcgtgtgttattttggggttttgtgttttttggtgggtttctttccttggctctccagatttacttttggggcctgttctaagtgcaaacccagcaagtttcacttgtcctgtccattagatacaactacatcttgcgggggttgtttctttcttgttccacaatgaattgcacatccatctccatcagagctgatagcctgttaataagcactggtctaacacagccaaccctcctccacagcgccatattaatggaggaggggaggaaggtgaaatctactgcatgggattcaggaaacagttgtggttggtcaggacggaagttggggtaagtttggttggtcagagggagttgtgctggagattgtgaaaaatgggttcttgaatgatctactataaggcagggaaggttcatttgtaagtagtaatgtgaactgaattgcattaagagtgtgtggcctttgttgtgatatactatgtattttcttatatgcatgagccaaactgttgcatcataatttagcactgatgtctgcttttattttgatcatctttgtccacccttattagttcttggctgttaaccgtagatagatcttgtaaatccagcaacctttggttgctgcattccccttggttcgattccacgcaaggagccacaagtgagaactccactgtccttagaagaaagggcatttttacttttgaaccaaaaagagaaaaaaaaatcagaagtgttgcatcttgaggcgaattaactgtaagacatttttaattatgactactgcaatttgacaccatttgaaataatcaattcagagacactaaagatttcacaatattcattggtattgtaaaaaaaaaatactattgtatggatttttgtattgctgttaagtattgttttgtgtgtgtgtgtgtgtgtgtgtgttggaacctcctggggacatgttatattttgaagtgattaaactatttaattgtgtgtctatattttggagtggaataatttcttcattaaaaaatgtttttaaaaacactatatcttgggtggtttattcctttgtttcagtgaatctttcctaaagcaacgtggagtcagtctgttgaaagaaggaaggcaggtacttgcagtttaaagcaggacccattgatggaatattgagccaccgaggcaaaatagctcaccttctcttgccttgggggatgcatggtttttaccattctactgttttattagcatctgtgagcatctaatagaaatactattctgctatttatggaaatccttattataattgatatggaagtgagtttgaaattctaacagctaacatatttcatgtttgtatcacacactgttcttaacactttatgtgacttcactcaattctttgaatcctctgcatctagccatgtattctgcaaatattaagtgctcaatggtttttttgttgaattactgaataaatgaattagtggtgt

SEQ ID NO: 318518 - DNA, 2971 bp, Homo sapiens
  misc_feature (18)..(18): n is a, c, g, or t
  misc_feature (35)..(35): n is a, c, g, or t
  misc_feature (42)..(42): n is a, c, g, or t
  misc_feature (49)..(49): n is a, c, g, or t
  misc_feature (62)..(62): n is a, c, g, or t
  misc_feature (65)..(65): n is a, c, g, or t
  misc_feature (85)..(85): n is a, c, g, or t
  misc_feature (90)..(90): n is a, c, g, or t
ccatgatcttgttttccnaaaacaagtttttcttntgaagantgggggntaaataacagggntgncttattgagtattcctcccngggtnaaaaaccaaaagaattccttgagcacaaggggaagaatgaacacagctttttattgaagttaaaggttactttggagtttgtttggaaatgtgtaaggtcaaatactatagttttcagcatatgtagtacttcagaggaagaattaaggggcatgttggtgcatttaactacaaaaccaggtggcaggttgctgctctctccttcagaaccccgctctgaggaaagctaaggaagagaacaggacgtctgagtgtgtgactgagaatgattgaagatagtgggaaaagaggaaataccatggcagaaagaagacagctgtttgcagagatgagggctcaagatctggatcgcatccgactctccacctacagaacagcatgcaagcttaggtttgttcagaagaaatgcaatttgcacctggtggacatatggaatgtcatagaagcattgcgggaaaatgctctgaacaacctggacccaaacactgaactcaacgtgtcccgcttagaggctgtgctctccactattttttaccagctcaacaaacggatgccaaccactcaccaaatccatgtggagcagtccatcagcctcctccttaacttcctgcttgcagcgtttgatccggaaggccatggtaaaatttcagtatttgctgtcaaaatggctttagccacattgtgtggagggaagatcatggacaaattaagatatattttctcaatgatttctgactccagtggggtgatggtttatggacgatatgaccaattccttcgggaagttctcaaactacccacggcagtttttgaaggtccttcatttggttacacagaacagtcagccagatcctgtttctcccaacagaaaaaagtcacgttaaatggtttcttggacacgcttatgtcagatcctcccccgcagtgtctggtctggttgcctcttctgcatcgactagcaaatgtggaaaatgtcttccatccggttgagtgttcctactgccacagtgagagtatgatgggatttcgctaccgatgccaacagtgtcacaattaccagctctgtcaggactgcttctggaggggacatgccggtggttctcatagcaaccagcaccaaatgaaagagtacacgtcatggaaatcacctgctaagaagctgactaatgcattaagcaagtccctgagctgtgcttccagccgtgaacctttgcaccccatgttcccagatcagcctgagaagccactcaacttggctcacatcgtgcctcccagacctgtaaccagcatgaacgacaccctgttctcccactctgttccctcctcaggaagtccttttattaccaggagctctcctcccaaggacagtgaagtagagcagaacaaactgctggctagggctgctccagcttttctgaagggcaaagggatacagtacagcctgaatgtggcagacaggctagctgatgaacatgttctcatcgggttgtatgtcaacatgctccggaacaacccctcatgcatgcttgagagttcaaaccggcttgatgaagaacacaggctaattgccaggtatgcggcaaggctggcagcagagtcctcttcgtctcagccacctcagcagagaagtgctcctgacatctctttcaccatcgatgcgaataagcagcaaaggcagctgattgctgagctagaaaacaagaacagagaaatcttacaggagatccagagacttcggctagagcatgaacaagcttctcagcccacgccagagaaggcacagcaaaaccccaccctgctggcagaactccggctcctcagacagcgcaaagatgagctggaacagagaatgtctgctctccaggagagccggagagagctaatggtccagttggagggtctcatgaagctactaaagactcagggggcaggctctccccgctcctcccccagccacaccatcagcaggccaattcccatgcccatccggtcagcgtcagcctgctccaccccgacgcacacgccgcaggactccctcacaggagtagggggagatgtacaagaggcatttgcacaaagttcaagaagaaacttaaggaatgacttgctagtggctgcagattccatcactaacactatgtcctctcttgtgaaagagctgaattctgaggttgggagtgaaacagagagtaatgtggattctgaatttgcacggactcagtttgaggatcttgttccctcaccaacctctgaaaaggcttttctagcgcaaatccatgcccgaaaacctgggtacattcacagtggagctaccacaagtaccatgcgtggcgacatggttacggaggatgcagatccctatgtgcagcctgaagatgaaaactatgaaaatgactctgtccggcagctggagaatgagctccagatggaggaatacctgaaacagaagctgcaagatgaagcttatcaggtcagcttgcaaggttgaatgcaatatccttttatcacactcctctcaagcaagctatagtcagacagatgatgaaagtaacatgaaaactggtgatgatggagagccctgtggccacacagaggaggaagacagcagcctggcagcagcctcaccgaagagaggaaccaccacacccagcagctcctgacagacccccacccctaaagatgtgtcctgatgactatagtgcagctaactttggtctcgaatgtggggaaggtggtgtcgaaggacgtgttaaacaggcacccaataattgtaaataacagttaaagaaaagtacaataattagttttatatctcggactcattttgtcgttgctgccacccatcatttctttctcatgtcggacaacacgaagagggggg

SEQ ID NO: 318519 - DNA, 3346 bp, Homo sapiens
actgctggccgtggatccatttcacaggcctgccttctctcactaacgctcttcctagtccccgggccaactcggacagtttgctcatttattgcaacggtcaaggctggcttgtgccagaacggcgcgcgcgcgcgcacgcacgcacacacacggggggaaacttttttaaaaatgaaaggctagaagagctcagcggcggcgcgggcgctgcgcgagggctccggagctgactcgccgaggcaggaaatccctccggtcgcgacgcccggccccggctcggcgcccgcgtgggatggtgcagcgctcgccgccgggcccgagagctgctgcactgaaggccggcgacgatggcagcgcgcccgctgcccgtgtcccccgcccgcgccctcctgctcgccctggccggtgctctgctcgcgccctgcgaggcccgaggggtgagcttatggaaccaaggaagagctgatgaagttgtcagtgcctctgttcggagtggggacctctggatcccagtgaagagcttcgactccaagaatcatccagaagtgctgaatattcgactacaacgggaaagcaaagaactgatcataaatctggaaagaaatgaaggtctcattgccagcagtttcacggaaacccactatctgcaagacggtactgatgtctccctcgctcgaaattacacgggtcactgttactaccatggacatgtacggggatattctgattcagcagtcagtctcagcacgtgttctggtctcaggggacttattgtgtttgaaaatgaaagctatgtcttagaaccaatgaaaagtgcaaccaacagatacaaactcttcccagcgaagaagctgaaaagcgtccggggatcatgtggatcacatcacaacacaccaaacctcgctgcaaagaatgtgtttccaccaccctctcagacatgggcaagaaggcataaaagagagaccctcaaggcaactaagtatgtggagctggtgatcgtggcagacaaccgagagtttcagaggcaaggaaaagatctggaaaaagttaagcagcgattaatagagattgctaatcacgttgacaagttttacagaccactgaacattcggatcgtgttggtaggcgtggaagtgtggaatgacatggacaaatgctctgtaagtcaggacccattcaccagcctccatgaatttctggactggaggaagatgaagcttctacctcgcaaatcccatgacaatgcgcagcttgtcagtggggtttatttccaagggaccaccatcggcatggccccaatcatgagcatgtgcacggcagaccagtctgggggaattgtcatggaccattcagacaatccccttggtgcagccgtgaccctggcacatgagctgggccacaatttcgggatgaatcatgacacactggacaggggctgtagctgtcaaatggcggttgagaaaggaggctgcatcatgaacgcttccaccgggtacccatttcccatggtgttcagcagttgcagcaggaaggacttggagaccagcctggagaaaggaatgggggtgtgcctgtttaacctgccggaagtcagggagtctttcgggggccagaagtgtgggaacagatttgtggaagaaggagaggagtgtgactgtggggagccagaggaatgtatgaatcgctgctgcaatgccaccacctgtaccctgaagccggacgctgtgtgcgcacatgggctgtgctgtgaagactgccagctgaagcctgcaggaacagcgtgcagggactccagcaactcctgtgacctcccagagttctgcacaggggccagccctcactgcccagccaacgtgtacctgcacgatgggcactcatgtcaggatgtggacggctactgctacaatggcatctgccagactcacgagcagcagtgtgtcacgctctggggaccaggtgctaaacctgcccctgggatctgctttgagagagtcaattctgcaggtgatccttatggcaactgtggcaaagtctcgaagagttcctttgccaaatgcgagatgagagatgctaaatgtggaaaaatccagtgtcaaggaggtgccagccggccagtcattggtaccaatgccgtttccatagaaacaaacatccccctgcagcaaggaggccggattctgtgccgggggacccacgtgtacttgggcgatgacatgccggacccagggcttgtgcttgcaggcacaaagtgtgcagatggaaaaatctgcctgaatcgtcaatgtcaaaatattagtgtctttggggttcacgagtgtgcaatgcagtgccacggcagaggggtgtgcaacaacaggaagaactgccactgcgaggcccactgggcacctcccttctgtgacaagtttggctttggaggaagcacagacagcggccccatccggcaagcagaagcaaggcaggaagctgcagagtccaacagggagcgcggccagggccaggagcccgtgggatcgcaggagcatgcgtctactgcctcactgacactcatctgagccctcccatgacatggagaccgtgaccagtgctgctgcagaggaggtcacgcgtccccaaggcctcctgtgactggcagcattgactctgtggctttgccatcgtttccatgacaacagacacaacacagttctcggggctcaggaggggaagtccagcctaccaggcacgtctgcagaaacagtgcaaggaagggcagcgacttcctggttgagcttctgctaaaacatggacatgcttcagtgctgctcctgagagagtagcaggttaccactctggcaggccccagccctgcagcaaggaggaagaggactcaaaagtctggcctttcactgagcccccacagcagtgggggagaagcaagggttgggcccagtgtcccctttccccagtgacacctcagccttggcagccctgatgactggtctctggctgcaacttaatgctctgatatggcttttagcatttattatatgaaaatagcagggttttagtttttaatttatcagagaccctgccacccattccatctccatccaagcaaactgaatggcattgaaacaaactggagaagaaggtaggagaaagggcggtgaactctggctctttgctgtggacatgcgtgaccagcagtactcaggtttgagggtttgcagaaagccagggaacccacagagtcaccaacccttcatttaacaagtaagaatgttaaaaagtgaaaacaatgtaagagcctaactccatcccccgtggccattactgcataaaatagagtgcatttgaaata

SEQ ID NO: 318520 - DNA, 679 bp, Homo sapiens
ccaccccgcaattatacccgcgcgcgccgcatgcagtcacagcaaaccacccccagggactcggcatcaccaggtgggggcgccagcgcaggatccttcacgcgacgcagcaaaactgggcagaggggtgggtggagatcggccgctctccacccacccctcttggtctttcttgctttttgcagccatttaaggtgtgatgtttgcattcagtgagtgcatactccataagaccctgtcaaacaaatgccattcccctttccaggaatgtatgaatcgctgctgcaatgccaccacctgtaccctgaagccggacgctgtgtgcgcacatgggctgtgctgtgaagactgccagctgaagcctgcaggaacagcgtgcagggactccagcaactcctgtgacctcccagagttctgcacaggggccagccctcactgcccagccaacgtgtacctgcacgatgggcactcatgtcaggatgtggacggctactgctacaatggcatctgccagactcacgagcagcagtgtgtcacgctctggggaccaggtacgtggccgccacaagctcggcatcaggagaggcactggcagacctgggctgtgggactgggggcatgtgctctgttttggttagcccccactcctggtgggcgctgtccacacagcatccggtgt

SEQ ID NO: 318521 - DNA, 1132 bp, Homo sapiens
acccctgtgctcgtggggaggaatgcacagatgatgaagactctacagctctaaaaattatataattctgaaggcacaatagcaaggcatattttctggcactctatatggttttatctaaatcctttccaattggaaagtcttcatggcagtgctgaagaatgcaagccagatcgccccagagatatttgaacaccgtaggtagaaatggtattgttaagagctcgacaaatcatttaaaaggcttttttttcccccattaccaggggtttgctaatagcctttatttgatttataccatattagcaatttctgagttttctcttttgctgagcttgtgcttttgtataaatcttttctatttgcttctcatttatgatcccacattcctgtccagagagtggtgtttttaattttctcagatggaaagcaacttcctaagcaagtaggtgaattaatcacaaaagcccacagtgagggggaggtcgagcggctcagtcaaccctcagtcatccatcacccgtggtggagttttcccggctgctccggtattatctcaaaatggtggttctcttacctcatagtgtctccgagagagtgggagaatggactcaatgagatcacatgtctgtaaattgtaaatcattccacaaaggtagtatattattacttagcttacaggggttttggaactatcaaaaagttaaaggcttttttcagaattcctactcatcattgctggaaagactcccagtgcccttagcagtcactcagcagcatgtccacagtttccgtgtgatggctcactttaaactggcccacatccaaacaccagccagcctgtgtcttcctcctcccaccactgatggaggcttggggatgtcagttaaattcagtctcagctccaaaggtgattcagagatgaatcagtaactgctttaatgatattaacatctcagaatcaaaaagaaccaagtattgtagatggcttaaaggagaaaagtatatcccttcatataccttgtttattctttatcaaaacattccagaatcctaactctgaaaacattaaccaattgctgtcactgacaaatgggacctgaggcctgtaaatacaaggatagagtcctat

SEQ ID NO: 318522 - DNA, 769 bp, Homo sapiens
cctccacccctaagggtggcctgccccttttctctctggcattatgtgggcaacagaggctacagtagagctcttttaataaggattaaaggcaatcgttcccaacatttggctggaggccctgaatttaaatgagcagaaacagataggaaattatcaacaatttcctgattttccatttctggatttcctgttcctctgttgacaagaaatcaagaaaatttatagataggatgtcgcttgtgcttatatttgactgtccgagaacatttcttctaggtttctcctaacccgttgttgtctcctaacttgaatttcagtagaccactgcttagcactcaatatttaatgaatattattcttggttcattctaaatcatttttctagttggaaacagtaggggttatcccaaatgataccttctaattcttagaattcccctcatacctgtggatagatgtctgttcccctaaaactgctcttatcggaaccagttcaggacttttaactctaattttacattcattctttcagtccaggtattctacttgtgtaaccctcacgtcttctgtttgctagtatgtttctaagactttctatggcaggtgctcacaacctctttttcgtttcctgccccatcacaggaaggggaggaactctcccatctggtactgtggctcaccttgacatggctgcttggtggcagaacactgtatcctaatcccaaggaacagagcttgaaaattacccccccaacctctaccctta

SEQ ID NO: 318523 - DNA, 595 bp, Homo sapiens
  misc_feature (569)..(569): n is a, c, g, or t
acgctctctctgttggggtcctgaagtggctctagcttctctggggttggggctccaggtgtgaagtcaggcatagacccagaaggctctctgtgttcccaggggaaagggacaggcggctcccaggtaggctccaggagaagactgcggggaagctggtgggtggtgtgtgggtgctcatggctgccctgccctgcccaggccgagcaggagctccgcgtggcccagacagagtttgaccggcaagcagaagtgacccgtctcttgctggagggaatcagtagcactcacgtgaaccacctgcgctgcccccacagagagagcgtctagaaacaaacatccccctgcagcaaggaggccggattctgtgccgggggacccacgtgtacttgggcgatgacatgccggacccagggcttgtgcttgcaggcacaaagtgtgcagatggaaaaatctgcctgaatcgtcaatgtcaaaatattagtgtctttggggttcacgagtgtgcaatgcagtgccacggcagagggtgtgtgcaacaacaggaagaactgcattgcgagggcggntggacctccttgacactggatttttc

SEQ ID NO: 318524 - DNA, 6043 bp, Homo sapiens
actgctggccgtggatccatttcacaggcctgccttctctcactaacgctcttcctagtccccgggccaactcggacagtttgctcatttattgcaacggtcaaggctggcttgtgccagaacggcgcgcgcgcgcgcacgcacgcacacacacggggggaaacttttttaaaaatgaaaggctagaagagctcagcggcggcgcgggcgctgcgcgagggctccggagctgactcgccgaggcaggaaatccctccggtcgcgacgcccggccccggctcggcgcccgcgtgggatggtgcagcgctcgccgccgggcccgagagctgctgcactgaaggccggcgacgatggcagcgcgcccgctgcccgtgtcccccgcccgcgccctcctgctcgccctggccggtgctctgctcgcgccctgcgaggcccgaggggtgagcttatggaaccaaggaagagctgatgaagttgtcagtgcctctgttcggagtggggacctctggatcccagtgaagagcttcgactccaagaatcatccagaagtgctgaatattcgactacaacgggaaagcaaagaactgatcataaatctggaaagaaatgaaggtctcattgccagcagtttcacggaaacccactatctgcaagacggtactgatgtctccctcgctcgaaattacacgggtcactgttactaccatggacatgtacggggatattctgattcagcagtcagtctcagcacgtgttctggtctcaggggacttattgtgtttgaaaatgaaagctatgtcttagaaccaatgaaaagtgcaaccaacagatacaaactcttcccagcgaagaagctgaaaagcgtccggggatcatgtggatcacatcacaacacaccaaacctcgctgcaaagaatgtgtttccaccaccctctcagacatgggcaagaaggcataaaagagagaccctcaaggcaactaagtatgtggagctggtgatcgtggcagacaaccgagagtttcagaggcaaggaaaagatctggaaaaagttaagcagcgattaatagagattgctaatcacgttgacaagttttacagaccactgaacattcggatcgtgttggtaggcgtggaagtgtggaatgacatggacaaatgctctgtaagtcaggacccattcaccagcctccatgaatttctggactggaggaagatgaagcttctacctcgcaaatcccatgacaatgcgcagcttgtcagtggggtttatttccaagggaccaccatcggcatggccccaatcatgagcatgtgcacggcagaccagtctgggggaattgtcatggaccattcagacaatccccttggtgcagccgtgaccctggcacatgagctgggccacaatttcgggatgaatcatgacacactggacaggggctgtagctgtcaaatggcggttgagaaaggaggctgcatcatgaacgcttccaccgggtacccatttcccatggtgttcagcagttgcagcaggaaggacttggagaccagcctggagaaaggaatgggggtgtgcctgtttaacctgccggaagtcagggagtctttcgggggccagaagtgtgggaacagatttgtggaagaaggagaggagtgtgactgtggggagccagaggaatgtatgaatcgctgctgcaatgccaccacctgtaccctgaagccggacgctgtgtgcgcacatgggctgtgctgtgaagactgccagctgaagcctgcaggaacagcgtgcagggactccagcaactcctgtgacctcccagagttctgcacaggggccagccctcactgcccagccaacgtgtacctgcacgatgggcactcatgtcaggatgtggacggctactgctacaatggcatctgccagactcacgagcagcagtgtgtcacgctctggggaccaggtgctaaacctgcccctgggatctgctttgagagagtcaattctgcaggtgatccttatggcaactgtggcaaagtctcgaagagttcctttgccaaatgcgagatgagagatgctaaatgtggaaaaatccagtgtcaaggaggtgccagccggccagtcattggtaccaatgccgtttccatagaaacaaacatccccctgcagcaaggaggccggattctgtgccgggggacccacgtgtacttgggcgatgacatgccggacccagggcttgtgcttgcaggcacaaagtgtgcagatggaaaaatctgcctgaatcgtcaatgtcaaaatattagtgtctttggggttcacgagtgtgcaatgcagtgccacggcagaggggtgtgcaacaacaggaagaactgccactgcgaggcccactgggcacctcccttctgtgacaagtttggctttggaggaagcacagacagcggccccatccggcaagcagataaccaaggtttaaccataggaattctggtgaccatcctgtgtcttcttgctgccggatttgtggtttatctcaaaaggaagaccttgatacgactgctgtttacaaataagaagaccaccattgaaaaactaaggtgtgtgcgcccttcccggccaccccgtggcttccaaccctgtcaggctcacctcggccaccttggaaaaggcctgatgaggaagccgccagattcctacccaccgaaggacaatcccaggagattgctgcagtgtcagaatgttgacatcagcagacccctcaacggcctgaatgtccctcagccccagtcaactcagcgagtgcttcctcccctccaccgggctccacgtgcacctagcgtccctgccagacccctgccagccaagcctgcacttaggcaggcccaggggacctgtaagccaaacccccctcagaagcctctgcctgcagatcctctggccagaacaactcggctcactcatgccttggccaggaccccaggacaatgggagactgggctccgcctggcacccctcagacctgctccacaatatccacaccaagtgcccagatccacccacaccgcctatattaagtgagaagccgacaccttttttcaacagtgaagacagaagtttgcactatctttcagctccagttggagttttttgtaccaacttttaggattttttttaatgtttaaaacatcattactataagaactttgagctactgccgtcagtgctgtgctgtgctatggtgctctgtctacttgctcaggtacttgtaaattattaatttatgcagaatgttgattacagtgcagtgcgctgtagtaggcatttttaccatcactgagttttccatggcaggaaggcttgttgtgcttttagtattttagtgaacttgaaatatcctgcttgatgggattctggacaggatgtgtttgctttctgatcaaggccttattggaaagcagtcccccaactacccccagctgtgcttatggtaccagatgcagctcaagagatcccaagtagaacctcagttgattttctggattccccatctcaggccagagccaaggggcttcaggtccaggctgtgtttggctttcagggaggccctgtgccccttgacaactggcaggcaggctcccagggacagctgggagaaatctggcttctggccaggaagctttggtgagaacctgggttgcagacaggaatcttaaggtgtagccacaccaggatagagactggaacactagacaagccagaacttgaccctgagctgaccagccgtgagcatgtttggaaggggtctgtagtgtcactcaaggcggtgcttgatagaaatgccaagcacttctttttctcgctgtcctttctagagcactgccaccagtaggttatttagcttgggaaaggtggtgtttctgtaagaaacctactgcccaggcactgcaaaccgccacctccctatactgcttggagctgagcaaatcaccacaaactgtaatacaatgatcctgtattcagacagatgaggctttccatgggaccacaactattttcagatgtgaaccattaaccagatctagtcaatcaagtctgtttactgcaaggttcaacttattaacaattaggcagactctttatgcttgcaaaaactacaaccaatggaatgtgatgttcatgggtatagttcatgtctgctatcattattcgtagatattggacaaagaaccttctctatggggcatcctctttttccaacttggctgcaggaatctttaaaagatgcttttaacagagtctgaacctatttcttaaacacttgcaacctacctgttgagcatcacagaatgtgataaggaaatcaacttgcttatcaacttcctaaatattatgagatgctggcttgggcagcatccccttgaactcttcactcttcaaatgcctgactagggagccatgtttcacaaggtctttaaagtgactaatggcatgagaaatacaaaaatactcagataaggtaaaatgccatgatgcctctgtcttctggactggttttcacattagaagacaattgacaacagttacataattcactctgagtgttttatgagaaagccttcttttgggggtcaacagttttcctatgctttgaaacagaaaaatatgtaccaagaatcttggtttgccttccagaaaacaaaactgcatttcactttcccggtgttccccactgtatctaggcaacatagtattcatgactatggataaactaaacacgtgacacaaacacacacaaaagggaacccagctctaatacattccaactcgtatagcatgcatctgtttattctatagttattaagttctttaaaatgtaaagccatgctggaaaataatactgctgagatacatacagaattactgtaactgattacacttggtaattgtactaaagccaaacatatatatactattaaaaaggtttacagaattttatggtgcattacgtgggcattgtctttttagatgcccaaatccttagatctggcatgttagcccttcctccaattataagaggatatgaactgagtttttcttttgttgtttgttcttagctgtaattcctatgcttctatttcagagagccaggagagtttgatattaaaggaggttaaaactgtgatcttatgccatgtcatcaatggccacttaggggccatggctgatgacacattcttatctctacagtactaatgtgttattatagagccatgcattttatttctgaataagaacatatttaaactaatattcccttacaatatggacagtattaatccttccaagatgcagtatttatcaagtgaagcatatttagcagcaaattccattttaacataacttaggaaccaataaccagggtgttttgtggttgggggaggcacggggtggagtattcttttttatatcctcaaaacaaaaaaaatcaatacttatatttcaatggcaatctagtatttttttaaaagactgtataggcatgaataatagaggtggtttgagttttgtagggccatcacctggaaagtcaatgtgactagacacaaagtagcccagaggctacttttcttcctacagcttattatagttgtaggttctatgacctcacttcatgggttccaggcaattccgctgaaaggtttgtctcctgaaattttttaagtttgttttcctgacacatgtaatcagatgtgtagcaaccgagggaaacgaagcctaacattctccattgtggaaatacacacaggaggttacacttcacagcgtggatttttccagcttacacatgtgggatgacatcacagaaaccacaaaagcagcaaattaaactgtaggagagtcaatactcctgacgagtctcggggggggcatttttatgccttcttaactttatgagaattctcaggctgaactataggccattgttcccaggcaaatcaatacatcaatgcatcctcaaaaaaaaaaaaaaaaaaaaaaaccggctaaaa

SEQ ID NO: 318525 - DNA, 6010 bp, Homo sapiens
actgctggccgtggatccatttcacaggcctgccttctctcactaacgctcttcctagtccccgggccaactcggacagtttgctcatttattgcaacggtcaaggctggcttgtgccagaacggcgcgcgcgcgcgcacgcacgcacacacacggggggaaacttttttaaaaatgaaaggctagaagagctcagcggcggcgcgggcgctgcgcgagggctccggagctgactcgccgaggcaggaaatccctccggtcgcgacgcccggccccggctcggcgcccgcgtgggatggtgcagcgctcgccgccgggcccgagagctgctgcactgaaggccggcgacgatggcagcgcgcccgctgcccgtgtcccccgcccgcgccctcctgctcgccctggccggtgctctgctcgcgccctgcgaggcccgaggggtgagcttatggaaccaaggaagagctgatgaagttgtcagtgcctctgttcggagtggggacctctggatcccagtgaagagcttcgactccaagaatcatccagaagtgctgaatattcgactacaacgggaaagcaaagaactgatcataaatctggaaagaaatgaaggtctcattgccagcagtttcacggaaacccactatctgcaagacggtactgatgtctccctcgctcgaaattacacgggtcactgttactaccatggacatgtacggggatattctgattcagcagtcagtctcagcacgtgttctggtctcaggggacttattgtgtttgaaaatgaaagctatgtcttagaaccaatgaaaagtgcaaccaacagatacaaactcttcccagcgaagaagctgaaaagcgtccggggatcatgtggatcacatcacaacacaccaaacctcgctgcaaagaatgtgtttccaccaccctctcagacatgggcaagaaggcataaaagagagaccctcaaggcaactaagtatgtggagctggtgatcgtggcagacaaccgagagtttcagaggcaaggaaaagatctggaaaaagttaagcagcgattaatagagattgctaatcacgttgacaagttttacagaccactgaacattcggatcgtgttggtaggcgtggaagtgtggaatgacatggacaaatgctctgtaagtcaggacccattcaccagcctccatgaatttctggactggaggaagatgaagcttctacctcgcaaatcccatgacaatgcgcagcttgtcagtggggtttatttccaagggaccaccatcggcatggccccaatcatgagcatgtgcacggcagaccagtctgggggaattgtcatggaccattcagacaatccccttggtgcagccgtgaccctggcacatgagctgggccacaatttcgggatgaatcatgacacactggacaggggctgtagctgtcaaatggcggttgagaaaggaggctgcatcatgaacgcttccaccgggtacccatttcccatggtgttcagcagttgcagcaggaaggacttggagaccagcctggagaaaggaatgggggtgtgcctgtttaacctgccggaagtcagggagtctttcgggggccagaagtgtgggaacagatttgtggaagaaggagaggagtgtgactgtggggagccagaggaatgtatgaatcgctgctgcaatgccaccacctgtaccctgaagccggacgctgtgtgcgcacatgggctgtgctgtgaagactgccagctgaagcctgcaggaacagcgtgcagggactccagcaactcctgtgacctcccagagttctgcacaggggccagccctcactgcccagccaacgtgtacctgcacgatgggcactcatgtcaggatgtggacggctactgctacaatggcatctgccagactcacgagcagcagtgtgtcacgctctggggaccaggtgctaaacctgcccctgggatctgctttgagagagtcaattctgcaggtgatccttatggcaactgtggcaaagtctcgaagagttcctttgccaaatgcgagatgagagatgctaaatgtggaaaaatccagtgtcaaggaggtgccagccggccagtcattggtaccaatgccgtttccatagaaacaaacatccccctgcagcaaggaggccggattctgtgccgggggacccacgtgtacttgggcgatgacatgccggacccagggcttgtgcttgcaggcacaaagtgtgcagatggaaaaatctgcctgaatcgtcaatgtcaaaatattagtgtctttggggttcacgagtgtgcaatgcagtgccacggcagaggggtgtgcaacaacaggaagaactgccactgcgaggcccactgggcacctcccttctgtgacaagtttggctttggaggaagcacagacagcggccccatccggcaagcagataaccaaggtttaaccataggaattctggtgaccatcctgtgtcttcttgctgccggatttgtggtttatctcaaaaggaagaccttgatacgactgctgtttacaaataagaagaccaccattgaaaaactaaggtgtgtgcgcccttcccggccaccccgtggcttccaaccctgtcaggctcacctcggccaccttggaaaaggcctgatgaggaagccgccagattcctacccaccgaaggacaatcccaggagattgctgcagtgtcagaatgttgacatcagcagacccctcaacggcctgaatgtccctcagccccagtcaactcagcgagtgcttcctcccctccaccgggctccacgtgcacctagcgtccctgccagacccctgccagccaagcctgcacttaggcaggcccaggggacctgtaagccaaacccccctcagaagcctctgcctgcagatcctctggccagaacaactcggctcactcatgccttggccaggaccccaggacaatgggagactgggctccgcctggcacccctcagacctgctccacaatatccacaccaagtgcccagatccacccacaccgcctatattaagtgagaagccgacaccttttttcaacagtgaagacagaagtttgcactatctttcagctccagttggagttttttgtaccaacttttaggattttttttaatgtttaaaacatcattactataagaactttgagctactgccgtcagtgctgtgctgtgctatggtgctctgtctacttgctcaggtacttgtaaattattaatttatgcagaatgttgattacagtgcagtgcgctgtagtaggcatttttaccatcactgagttttccatggcaggaaggcttgttgtgcttttagtattttagtgaacttgaaatatcctgcttgatgggattctggacaggatgtgtttgctttctgatcaaggccttattggaaagcagtcccccaactacccccagctgtgcttatggtaccagatgcagctcaagagatcccaagtagaacctcagttgattttctggattccccatctcaggccagagccaaggggcttcaggtccaggctgtgtttggctttcagggaggccctgtgccccttgacaactggcaggcaggctcccagggacagctgggagaaatctggcttctggccaggaagctttggtgagaacctgggttgcagacaggaatcttaaggtgtagccacaccaggatagagactggaacactagacaagccagaacttgaccctgagctgaccagccgtgagcatgtttggaaggggtctgtagtgtcactcaaggcggtgcttgatagaaatgccaagcacttctttttctcgctgtcctttctagagcactgccaccagtaggttatttagcttgggaaaggtggtgtttctgtaagaaacctactgcccaggcactgcaaaccgccacctccctatactgcttggagctgagcaaatcaccacaaactgtaatacaatgatcctgtattcagacagatgaggctttccatgggaccacaactattttcagatgtgaaccattaaccagatctagtcaatcaagtctgtttactgcaaggttcaacttattaacaattaggcagactctttatgcttgcaaaaactacaaccaatggaatgtgatgttcatgggtatagttcatgtctgctatcattattcgtagatattggacaaagaaccttctctatggggcatcctctttttccaacttggctgcaggaatctttaaaagatgcttttaacagagtctgaacctatttcttaaacacttgcaacctacctgttgagcatcacagaatgtgataaggaaatcaacttgcttatcaacttcctaaatattatgagatgctggcttgggcagcatccccttgaactcttcactcttcaaatgcctgactagggagccatgtttcacaaggtctttaaagtgactaatggcatgagaaatacaaaaatactcagataaggtaaaatgccatgatgcctctgtcttctggactggttttcacattagaagacaattgacaacagttacataattcactctgagtgttttatgagaaagccttcttttgggggtcaacagttttcctatgctttgaaacagaaaaatatgtaccaagaatcttggtttgccttccagaaaacaaaactgcatttcactttcccggtgttccccactgtatctaggcaacatagtattcatgactatggataaactaaacacgtgacacaaacacacacaaaagggaacccagctctaatacattccaactcgtatagcatgcatctgtttattctatagttattaagttctttaaaatgtaaagccatgctggaaaataatactgctgagatacatacagaattactgtaactgattacacttggtaattgtactaaagccaaacatatatatactattaaaaaggtttacagaattttatggtgcattacgtgggcattgtctttttagatgcccaaatccttagatctggcatgttagcccttcctccaattataagaggatatgaactgagtttttcttttgttgtttgttcttagctgtaattcctatgcttctatttcagagagccaggagagtttgatattaaaggaggttaaaactgtgatcttatgccatgtcatcaatggccacttaggggccatggctgatgacacattcttatctctacagtactaatgtgttattatagagccatgcattttatttctgaataagaacatatttaaactaatattcccttacaatatggacagtattaatccttccaagatgcagtatttatcaagtgaagcatatttagcagcaaattccattttaacataacttaggaaccaataaccagggtgttttgtggttgggggaggcacggggtggagtattcttttttatatcctcaaaacaaaaaaaatcaatacttatatttcaatggcaatctagtatttttttaaaagactgtataggcatgaataatagaggtggtttgagttttgtagggccatcacctggaaagtcaatgtgactagacacaaagtagcccagaggctacttttcttcctacagcttattatagttgtaggttctatgacctcacttcatgggttccaggcaattccgctgaaaggtttgtctcctgaaattttttaagtttgttttcctgacacatgtaatcagatgtgtagcaaccgagggaaacgaagcctaacattctccattgtggaaatacacacaggaggttacacttcacagcgtggatttttccagcttacacatgtgggatgacatcacagaaaccacaaaagcagcaaattaaactgtaggagagtcaatactcctgacgagtctcggggggggcatttttatgccttcttaactttatgagaattctcaggctgaactataggccattgttcccaggcaaatcaatacatcaatgcatcctc

SEQ ID NO: 318526 - DNA, 4982 bp, Homo sapiens
actgctggccgtggatccatttcacaggcctgccttctctcactaacgctcttcctagtccccgggccaactcggacagtttgctcatttattgcaacggtcaaggctggcttgtgccagaacggcgcgcgcgcgcgcacgcacgcacacacacggggggaaacttttttaaaaatgaaaggctagaagagctcagcggcggcgcgggcgctgcgcgagggctccggagctgactcgccgaggcaggaaatccctccggtcgcgacgcccggccccggctcggcgcccgcgtgggatggtgcagcgctcgccgccgggcccgagagctgctgcactgaaggccggcgacgatggcagcgcgcccgctgcccgtgtcccccgcccgcgccctcctgctcgccctggccggtgctctgctcgcgccctgcgaggcccgaggggtgagcttatggaaccaaggaagagctgatgaagttgtcagtgcctctgttcggagtggggacctctggatcccagtgaagagcttcgactccaagaatcatccagaagtgctgaatattcgactacaacgggaaagcaaagaactgatcataaatctggaaagaaatgaaggtctcattgccagcagtttcacggaaacccactatctgcaagacggtactgatgtctccctcgctcgaaattacacgggtcactgttactaccatggacatgtacggggatattctgattcagcagtcagtctcagcacgtgttctggtctcaggggacttattgtgtttgaaaatgaaagctatgtcttagaaccaatgaaaagtgcaaccaacagatacaaactcttcccagcgaagaagctgaaaagcgtccggggatcatgtggatcacatcacaacacaccaaacctcgctgcaaagaatgtgtttccaccaccctctcagacatgggcaagaaggcataaaagagagaccctcaaggcaactaagtatgtggagctggtgatcgtggcagacaaccgagagtttcagaggcaaggaaaagatctggaaaaagttaagcagcgattaatagagattgctaatcacgttgacaagttttacagaccactgaacattcggatcgtgttggtaggcgtggaagtgtggaatgacatggacaaatgctctgtaagtcaggacccattcaccagcctccatgaatttctggactggaggaagatgaagcttctacctcgcaaatcccatgacaatgcgcagcttgtcagtggggtttatttccaagggaccaccatcggcatggccccaatcatgagcatgtgcacggcagaccagtctgggggaattgtcatggaccattcagacaatccccttggtgcagccgtgaccctggcacatgagctgggccacaatttcgggatgaatcatgacacactggacaggggctgtagctgtcaaatggcggttgagaaaggaggctgcatcatgaacgcttccaccgggtacccatttcccatggtgttcagcagttgcagcaggaaggacttggagaccagcctggagaaaggaatgggggtgtgcctgtttaacctgccggaagtcagggagtctttcgggggccagaagtgtgggaacagatttgtggaagaaggagaggagtgtgactgtggggagccagaggaatgtatgaatcgctgctgcaatgccaccacctgtaccctgaagccggacgctgtgtgcgcacatgggctgtgctgtgaagactgccagctgaagcctgcaggaacagcgtgcagggactccagcaactcctgtgacctcccagagttctgcacaggggccagccctcactgcccagccaacgtgtacctgcacgatgggcactcatgtcaggatgtggacggctactgctacaatggcatctgccagactcacgagcagcagtgtgtcacgctctggggaccaggtgctaaacctgcccctgggatctgctttgagagagtcaattctgcaggtgatccttatggcaactgtggcaaagtctcgaagagttcctttgccaaatgcgagatgagagatgctaaatgtggaaaaatccagtgtcaaggaggtgccagccggccagtcattggtaccaatgccgtttccatagaaacaaacatccccctgcagcaaggaggccggattctgtgccgggggacccacgtgtacttgggcgatgacatgccggacccagggcttgtgcttgcaggcacaaagtgtgcagatggaaaaatctgcctgaatcgtcaatgtcaaaatattagtgtctttggggttcacgagtgtgcaatgcagtgccacggcagaggggtgtgcaacaacaggaagaactgccactgcgaggcccactgggcacctcccttctgtgacaagtttggctttggaggaagcacagacagcggccccatccggcaagcagataaccaaggtttaaccataggaattctggtgaccatcctgtgtcttcttgctgccggatttgtggtttatctcaaaaggaagaccttgatacgactgctgtttacaaataagaagaccaccattgaaaaactaaggtgtgtgcgcccttcccggccaccccgtggcttccaaccctgtcaggctcacctcggccaccttggaaaaggcctgatgaggaagccgccagattcctacccaccgaaggacaatcccaggagattgctgcagtgtcagaatgttgacatcagcagacccctcaacggcctgaatgtccctcagccccagtcaactcagcgagtgcttcctcccctccaccgggctccacgtgcacctagcgtccctgccagacccctgccagccaagcctgcacttaggcaggcccaggggacctgtaagccaaacccccctcagaagcctctgcctgcagatcctctggccagaacaactcggctcactcatgccttggccaggaccccaggacaatgggagactgggctccgcctggcacccctcagacctgctccacaatatccacaccaagtgcccagatccacccacaccgcctatattaagtgagaagccgacaccttttttcaacagtgaagacagaagtttgcactatctttcagctccagttggagttttttgtaccaacttttaggattttttttaatgtttaaaacatcattactataagaactttgagctactgccgtcagtgctgtgctgtgctatggtgctctgtctacttgctcaggtacttgtaaattattaatttatgcagaatgttgattacagtgcagtgcgctgtagtaggcatttttaccatcactgagttttccatggcaggaaggcttgttgtgcttttagtattttagtgaacttgaaatatcctgcttgatgggattctggacaggatgtgtttgctttctgatcaaggccttattggaaagcagtcccccaactacccccagctgtgcttatggtaccagatgcagctcaagagatcccaagtagaacctcagttgattttctggattccccatctcaggccagagccaaggggcttcaggtccaggctgtgtttggctttcagggaggccctgtgccccttgacaactggcaggcaggctcccagggacagctgggagaaatctggcttctggccaggaagctttggtgagaacctgggttgcagacaggaatcttaaggtgtagccacaccaggatagagactggaacactagacaagccagaacttgaccctgagctgaccagccgtgagcatgtttggaaggggtctgtagtgtcactcaaggcggtgcttgatagaaatgccaagcacttctttttctcgctgtcctttctagagcactgccaccagtaggttatttagcttgggaaaggtggtgtttctgtaagaaacctactgcccaggcactgcaaaccgccacctccctatactgcttggagctgagcaaatcaccacaaactgtaatacaatgatcctgtattcagacagatgaggctttccatgggaccacaactattttcagatgtgaaccattaaccagatctagtcaatcaagtctgtttactgcaaggttcaacttattaacaattaggcagactctttatgcttgcaaaaactacaaccaatggaatgtgatgttcatgggtatagttcatgtctgctatcattattcgtagatattggacaaagaaccttctctatggggcatcctctttttccaacttggctgcaggaatctttaaaagatgcttttaacagagtctgaacctatttcttaaacacttgcaacctacctgttgagcatcacagaatgtgataaggaaatcaacttgcttatcaacttcctaaatattatgagatgctggcttgggcagcatccccttgaactcttcactcttcaaatgcctgactagggagccatgtttcacaaggtctttaaagtgactaatggcatgagaaatacaaaaatactcagataaggtaaaatgccatgatgcctctgtcttctggactggttttcacattagaagacaattgacaacagttacataattcactctgagtgttttatgagaaagccttcttttgggggtcaacagttttcctatgctttgaaacagaaaaatatgtaccaagaatcttggtttgccttccagaaaacaaaactgcatttcactttcccggtgttccccactgtatctaggcaacatagtattcatgactatggataaactaaacacgtgacacaaacacacacaaaagggaacccagctctaatacattccaactcgtatagcatgcatctgtttattctatagttattaagttctttaaaatgtaaagccatgctggaaaataatactgctgagatacatacagaattactgtaactgattacacttggtaattgtactaaagccaaacatatatatactattaaaaaggtttacaga

SEQ ID NO: 318527 - DNA, 4709 bp, Homo sapiens
actgctggccgtggatccatttcacaggcctgccttctctcactaacgctcttcctagtccccgggccaactcggacagtttgctcatttattgcaacggtcaaggctggcttgtgccagaacggcgcgcgcgcgcgcacgcacgcacacacacggggggaaacttttttaaaaatgaaaggctagaagagctcagcggcggcgcgggcgctgcgcgagggctccggagctgactcgccgaggcaggaaatccctccggtcgcgacgcccggccccggctcggcgcccgcgtgggatggtgcagcgctcgccgccgggcccgagagctgctgcactgaaggccggcgacgatggcagcgcgcccgctgcccgtgtcccccgcccgcgccctcctgctcgccctggccggtgctctgctcgcgccctgcgaggcccgaggggtgagcttatggaaccaaggaagagctgatgaagttgtcagtgcctctgttcggagtggggacctctggatcccagtgaagagcttcgactccaagaatcatccagaagtgctgaatattcgactacaacgggaaagcaaagaactgatcataaatctggaaagaaatgaaggtctcattgccagcagtttcacggaaacccactatctgcaagacggtactgatgtctccctcgctcgaaattacacgggtcactgttactaccatggacatgtacggggatattctgattcagcagtcagtctcagcacgtgttctggtctcaggggacttattgtgtttgaaaatgaaagctatgtcttagaaccaatgaaaagtgcaaccaacagatacaaactcttcccagcgaagaagctgaaaagcgtccggggatcatgtggatcacatcacaacacaccaaacctcgctgcaaagaatgtgtttccaccaccctctcagacatgggcaagaaggcataaaagagagaccctcaaggcaactaagtatgtggagctggtgatcgtggcagacaaccgagagtttcagaggcaaggaaaagatctggaaaaagttaagcagcgattaatagagattgctaatcacgttgacaagttttacagaccactgaacattcggatcgtgttggtaggcgtggaagtgtggaatgacatggacaaatgctctgtaagtcaggacccattcaccagcctccatgaatttctggactggaggaagatgaagcttctacctcgcaaatcccatgacaatgcgcagcttgtcagtggggtttatttccaagggaccaccatcggcatggccccaatcatgagcatgtgcacggcagaccagtctgggggaattgtcatggaccattcagacaatccccttggtgcagccgtgaccctggcacatgagctgggccacaatttcgggatgaatcatgacacactggacaggggctgtagctgtcaaatggcggttgagaaaggaggctgcatcatgaacgcttccaccgggtacccatttcccatggtgttcagcagttgcagcaggaaggacttggagaccagcctggagaaaggaatgggggtgtgcctgtttaacctgccggaagtcagggagtctttcgggggccagaagtgtgggaacagatttgtggaagaaggagaggagtgtgactgtggggagccagaggaatgtatgaatcgctgctgcaatgccaccacctgtaccctgaagccggacgctgtgtgcgcacatgggctgtgctgtgaagactgccagctgaagcctgcaggaacagcgtgcagggactccagcaactcctgtgacctcccagagttctgcacaggggccagccctcactgcccagccaacgtgtacctgcacgatgggcactcatgtcaggatgtggacggctactgctacaatggcatctgccagactcacgagcagcagtgtgtcacgctctggggaccaggtgctaaacctgcccctgggatctgctttgagagagtcaattctgcaggtgatccttatggcaactgtggcaaagtctcgaagagttcctttgccaaatgcgagatgagagatgctaaatgtggaaaaatccagtgtcaaggaggtgccagccggccagtcattggtaccaatgccgtttccatagaaacaaacatccccctgcagcaaggaggccggattctgtgccgggggacccacgtgtacttgggcgatgacatgccggacccagggcttgtgcttgcaggcacaaagtgtgcagatggaaaaatctgcctgaatcgtcaatgtcaaaatattagtgtctttggggttcacgagtgtgcaatgcagtgccacggcagaggggtgtgcaacaacaggaagaactgccactgcgaggcccactgggcacctcccttctgtgacaagtttggctttggaggaagcacagacagcggccccatccggcaagcagaagcaaggcaggaagctgcagagtccaacagggagcgcggccagggccaggagcccgtgggatcgcaggagcatgcgtctactgcctcactgacactcatctgagccctcccatgacatggagaccgtgaccagtgctgctgcagaggaggtcacgcgtccccaaggcctcctgtgactggcagcattgactctgtggctttgccatcgtttccatgacaacagacacaacacagttctcggggctcaggaggggaagtccagcctaccaggcacgtctgcagaaacagtgcaaggaagggcagcgacttcctggttgagcttctgctaaaacatggacatgcttcagtgctgctcctgagagagtagcaggttaccactctggcaggccccagccctgcagcaaggaggaagaggactcaaaagtctggcctttcactgagcccccacagcagtgggggagaagcaagggttgggcccagtgtcccctttccccagtgacacctcagccttggcagccctgatgactggtctctggctgcaacttaatgctctgatatggcttttagcatttattatatgaaaatagcagggttttagtttttaatttatcagagaccctgccacccattccatctccatccaagcaaactgaatggcattgaaacaaactggagaagaaggtaggagaaagggcggtgaactctggctctttgctgtggacatgcgtgaccagcagtactcaggtttgagggtttgcagaaagccagggaacccacagagtcaccaacccttcatttaacaagtaagaatgttaaaaagtgaaaacaatgtaagagcctaactccatcccccgtggccattactgcataaaatagagtgcatttgaaataccgctgcctccaccctgttcatacatatataaaatcaaggcaggccatgagcaagcatggctcactgctccctggcctggccatggctcaggggctcattaaacaagtactcgtgtgtctgccacacaccagccactctcctgggtcctggagagacattaagcaagaatgacatggcataagtgaggggtacgactgcagggagagagggcatcatgggaggggagcaacccccacagagcggcagggggttgtcaggaaggctcctggggaccctgcatctgttgaggtctgaagggggcgagggaaacatgcattctgaagccgagatagctggctgtgcgaagatctagaggagtgtggactggcctgggctcagattctagagtgcggactgggccaacaggaggggacacaggacacggtgctcgtgctggtcctggggaagagggaaatggagtcagtcactgcccgggcctctggcttgagcaacctggggagttcagcaggttcagtgtgggggccctgtaaatgttcagtttcatagattgatgtattgaagatttatggattcactttatggaactagaaattatagttcaagatttttgctgttcactttttaaattaactttaattaactttgttatgagacaccagaactctagctagagccccctgtgatcactactaagggtctgaaaagagtgacattttgcccaggaaaccagaagcaatgcttttccagtaacaccaacaagtaagtcaagactgtcatctgttggctgtcttgcttaggctaagacacatccctgataggccttgttagtgggggatggggtccagaaaccaagaaggtgtgaaagacattctttccctggagtaggagctgctgctgcagtgatccacagccagctgagggtccaggtgggaggcagggccgaggagagcccaggtaactgcatcacggcgatcaccagcagccggaaaggactgttgcacacttacctgatgtgaagtacaccctgatccttgctgatgggaagacaaatgaatcaagatccctgtcctctaaaaattcactgtccagttgaaatcacaggtagacctcctctaagtctgagcatttagagtccttcccagacagccgctgaccatagctactgtaagaaaccaacctgatggtttgatttttttccttcctttccctacccttgaggaggctcttaactgtattaaacaaaatggcagcaggtcatagaaaagaagatgttttcatagagaaaatagcttcctcccaggaaaagggtttcccccacaaaggctgtgtttttaagtccccaacataacaaagcaaaaccca

SEQ ID NO: 318528 - DNA, 5958 bp, Homo sapiens
actgctggccgtggatccatttcacaggcctgccttctctcactaacgctcttcctagtccccgggccaactcggacagtttgctcatttattgcaacggtcaaggctggcttgtgccagaacggcgcgcgcgcgcgcacgcacgcacacacacggggggaaacttttttaaaaatgaaaggctagaagagctcagcggcggcgcgggcgctgcgcgagggctccggagctgactcgccgaggcaggaaatccctccggtcgcgacgcccggccccggctcggcgcccgcgtgggatggtgcagcgctcgccgccgggcccgagagctgctgcactgaaggccggcgacgatggcagcgcgcccgctgcccgtgtcccccgcccgcgccctcctgctcgccctggccggtgctctgctcgcgccctgcgaggcccgaggggtgagcttatggaaccaaggaagagctgatgaagttgtcagtgcctctgttcggagtggggacctctggatcccagtgaagagcttcgactccaagaatcatccagaagtgctgaatattcgactacaacgggaaagcaaagaactgatcataaatctggaaagaaatgaaggtctcattgccagcagtttcacggaaacccactatctgcaagacggtactgatgtctccctcgctcgaaattacacgggtcactgttactaccatggacatgtacggggatattctgattcagcagtcagtctcagcacgtgttctggtctcaggggacttattgtgtttgaaaatgaaagctatgtcttagaaccaatgaaaagtgcaaccaacagatacaaactcttcccagcgaagaagctgaaaagcgtccggggatcatgtggatcacatcacaacacaccaaacctcgctgcaaagaatgtgtttccaccaccctctcagacatgggcaagaaggcataaaagagagaccctcaaggcaactaagtatgtggagctggtgatcgtggcagacaaccgagagtttcagaggcaaggaaaagatctggaaaaagttaagcagcgattaatagagattgctaatcacgttgacaagttttacagaccactgaacattcggatcgtgttggtaggcgtggaagtgtggaatgacatggacaaatgctctgtaagtcaggacccattcaccagcctccatgaatttctggactggaggaagatgaagcttctacctcgcaaatcccatgacaatgcgcagcttgtcaggaccattcagacaatccccttggtgcagccgtgaccctggcacatgagctgggccacaatttcgggatgaatcatgacacactggacaggggctgtagctgtcaaatggcggttgagaaaggaggctgcatcatgaacgcttccaccgggtacccatttcccatggtgttcagcagttgcagcaggaaggacttggagaccagcctggagaaaggaatgggggtgtgcctgtttaacctgccggaagtcagggagtctttcgggggccagaagtgtgggaacagatttgtggaagaaggagaggagtgtgactgtggggagccagaggaatgtatgaatcgctgctgcaatgccaccacctgtaccctgaagccggacgctgtgtgcgcacatgggctgtgctgtgaagactgccagctgaagcctgcaggaacagcgtgcagggactccagcaactcctgtgacctcccagagttctgcacaggggccagccctcactgcccagccaacgtgtacctgcacgatgggcactcatgtcaggatgtggacggctactgctacaatggcatctgccagactcacgagcagcagtgtgtcacgctctggggaccaggtgctaaacctgcccctgggatctgctttgagagagtcaattctgcaggtgatccttatggcaactgtggcaaagtctcgaagagttcctttgccaaatgcgagatgagagatgctaaatgtggaaaaatccagtgtcaaggaggtgccagccggccagtcattggtaccaatgccgtttccatagaaacaaacatccccctgcagcaaggaggccggattctgtgccgggggacccacgtgtacttgggcgatgacatgccggacccagggcttgtgcttgcaggcacaaagtgtgcagatggaaaaatctgcctgaatcgtcaatgtcaaaatattagtgtctttggggttcacgagtgtgcaatgcagtgccacggcagaggggtgtgcaacaacaggaagaactgccactgcgaggcccactgggcacctcccttctgtgacaagtttggctttggaggaagcacagacagcggccccatccggcaagcagataaccaaggtttaaccataggaattctggtgaccatcctgtgtcttcttgctgccggatttgtggtttatctcaaaaggaagaccttgatacgactgctgtttacaaataagaagaccaccattgaaaaactaaggtgtgtgcgcccttcccggccaccccgtggcttccaaccctgtcaggctcacctcggccaccttggaaaaggcctgatgaggaagccgccagattcctacccaccgaaggacaatcccaggagattgctgcagtgtcagaatgttgacatcagcagacccctcaacggcctgaatgtccctcagccccagtcaactcagcgagtgcttcctcccctccaccgggctccacgtgcacctagcgtccctgccagacccctgccagccaagcctgcacttaggcaggcccaggggacctgtaagccaaacccccctcagaagcctctgcctgcagatcctctggccagaacaactcggctcactcatgccttggccaggaccccaggacaatgggagactgggctccgcctggcacccctcagacctgctccacaatatccacaccaagtgcccagatccacccacaccgcctatattaagtgagaagccgacaccttttttcaacagtgaagacagaagtttgcactatctttcagctccagttggagttttttgtaccaacttttaggattttttttaatgtttaaaacatcattactataagaactttgagctactgccgtcagtgctgtgctgtgctatggtgctctgtctacttgctcaggtacttgtaaattattaatttatgcagaatgttgattacagtgcagtgcgctgtagtaggcatttttaccatcactgagttttccatggcaggaaggcttgttgtgcttttagtattttagtgaacttgaaatatcctgcttgatgggattctggacaggatgtgtttgctttctgatcaaggccttattggaaagcagtcccccaactacccccagctgtgcttatggtaccagatgcagctcaagagatcccaagtagaacctcagttgattttctggattccccatctcaggccagagccaaggggcttcaggtccaggctgtgtttggctttcagggaggccctgtgccccttgacaactggcaggcaggctcccagggacagctgggagaaatctggcttctggccaggaagctttggtgagaacctgggttgcagacaggaatcttaaggtgtagccacaccaggatagagactggaacactagacaagccagaacttgaccctgagctgaccagccgtgagcatgtttggaaggggtctgtagtgtcactcaaggcggtgcttgatagaaatgccaagcacttctttttctcgctgtcctttctagagcactgccaccagtaggttatttagcttgggaaaggtggtgtttctgtaagaaacctactgcccaggcactgcaaaccgccacctccctatactgcttggagctgagcaaatcaccacaaactgtaatacaatgatcctgtattcagacagatgaggctttccatgggaccacaactattttcagatgtgaaccattaaccagatctagtcaatcaagtctgtttactgcaaggttcaacttattaacaattaggcagactctttatgcttgcaaaaactacaaccaatggaatgtgatgttcatgggtatagttcatgtctgctatcattattcgtagatattggacaaagaaccttctctatggggcatcctctttttccaacttggctgcaggaatctttaaaagatgcttttaacagagtctgaacctatttcttaaacacttgcaacctacctgttgagcatcacagaatgtgataaggaaatcaacttgcttatcaacttcctaaatattatgagatgctggcttgggcagcatccccttgaactcttcactcttcaaatgcctgactagggagccatgtttcacaaggtctttaaagtgactaatggcatgagaaatacaaaaatactcagataaggtaaaatgccatgatgcctctgtcttctggactggttttcacattagaagacaattgacaacagttacataattcactctgagtgttttatgagaaagccttcttttgggggtcaacagttttcctatgctttgaaacagaaaaatatgtaccaagaatcttggtttgccttccagaaaacaaaactgcatttcactttcccggtgttccccactgtatctaggcaacatagtattcatgactatggataaactaaacacgtgacacaaacacacacaaaagggaacccagctctaatacattccaactcgtatagcatgcatctgtttattctatagttattaagttctttaaaatgtaaagccatgctggaaaataatactgctgagatacatacagaattactgtaactgattacacttggtaattgtactaaagccaaacatatatatactattaaaaaggtttacagaattttatggtgcattacgtgggcattgtctttttagatgcccaaatccttagatctggcatgttagcccttcctccaattataagaggatatgaactgagtttttcttttgttgtttgttcttagctgtaattcctatgcttctatttcagagagccaggagagtttgatattaaaggaggttaaaactgtgatcttatgccatgtcatcaatggccacttaggggccatggctgatgacacattcttatctctacagtactaatgtgttattatagagccatgcattttatttctgaataagaacatatttaaactaatattcccttacaatatggacagtattaatccttccaagatgcagtatttatcaagtgaagcatatttagcagcaaattccattttaacataacttaggaaccaataaccagggtgttttgtggttgggggaggcacggggtggagtattcttttttatatcctcaaaacaaaaaaaatcaatacttatatttcaatggcaatctagtatttttttaaaagactgtataggcatgaataatagaggtggtttgagttttgtagggccatcacctggaaagtcaatgtgactagacacaaagtagcccagaggctacttttcttcctacagcttattatagttgtaggttctatgacctcacttcatgggttccaggcaattccgctgaaaggtttgtctcctgaaattttttaagtttgttttcctgacacatgtaatcagatgtgtagcaaccgagggaaacgaagcctaacattctccattgtggaaatacacacaggaggttacacttcacagcgtggatttttccagcttacacatgtgggatgacatcacagaaaccacaaaagcagcaaattaaactgtaggagagtcaatactcctgacgagtctcggggggggcatttttatgccttcttaactttatgagaattctcaggctgaactataggccattgttcccaggcaaatcaatacatcaatgcatcctcaaaaaaaaaaaaaaaaaaaaaaaccggctaaaa

SEQ ID NO: 318529 - DNA, 3652 bp, Homo sapiens
actgctggccgtggatccatttcacaggcctgccttctctcactaacgctcttcctagtccccgggccaactcggacagtttgctcatttattgcaacggtcaaggctggcttgtgccagaacggcgcgcgcgcgcgcacgcacgcacacacacggggggaaacttttttaaaaatgaaaggctagaagagctcagcggcggcgcgggcgctgcgcgagggctccggagctgactcgccgaggcaggaaatccctccggtcgcgacgcccggccccggctcggcgcccgcgtgggatggtgcagcgctcgccgccgggcccgagagctgctgcactgaaggccggcgacgatggcagcgcgcccgctgcccgtgtcccccgcccgcgccctcctgctcgccctggccggtgctctgctcgcgccctgcgaggcccgaggggtgagcttatggaaccaaggaagagctgatgaagttgtcagtgcctctgttcggagtggggacctctggatcccagtgaagagcttcgactccaagaatcatccagaagtgctgaatattcgactacaacgggaaagcaaagaactgatcataaatctggaaagaaatgaaggtctcattgccagcagtttcacggaaacccactatctgcaagacggtactgatgtctccctcgctcgaaattacacgggtcactgttactaccatggacatgtacggggatattctgattcagcagtcagtctcagcacgtgttctggtctcaggggacttattgtgtttgaaaatgaaagctatgtcttagaaccaatgaaaagtgcaaccaacagatacaaactcttcccagcgaagaagctgaaaagcgtccggggatcatgtggatcacatcacaacacaccaaacctcgctgcaaagaatgtgtttccaccaccctctcagacatgggcaagaaggcataaaagagagaccctcaaggcaactaagtatgtggagctggtgatcgtggcagacaaccgagagtttcagaggcaaggaaaagatctggaaaaagttaagcagcgattaatagagattgctaatcacgttgacaagttttacagaccactgaacattcggatcgtgttggtaggcgtggaagtgtggaatgacatggacaaatgctctgtaagtcaggacccattcaccagcctccatgaatttctggactggaggaagatgaagcttctacctcgcaaatcccatgacaatgcgcagcttgtcagtggggtttatttccaagggaccaccatcggcatggccccaatcatgagcatgtgcacggcagaccagtctgggggaattgtcatggaccattcagacaatccccttggtgcagccgtgaccctggcacatgagctgggccacaatttcgggatgaatcatgacacactggacaggggctgtagctgtcaaatggcggttgagaaaggaggctgcatcatgaacgcttccaccgggtacccatttcccatggtgttcagcagttgcagcaggaaggacttggagaccagcctggagaaaggaatgggggtgtgcctgtttaacctgccggaagtcagggagtctttcgggggccagaagtgtgggaacagatttgtggaagaaggagaggagtgtgactgtggggagccagaggaatgtatgaatcgctgctgcaatgccaccacctgtaccctgaagccggacgctgtgtgcgcacatgggctgtgctgtgaagactgccagctgaagcctgcaggaacagcgtgcagggactccagcaactcctgtgacctcccagagttctgcacaggggccagccctcactgcccagccaacgtgtacctgcacgatgggcactcatgtcaggatgtggacggctactgctacaatggcatctgccagactcacgagcagcagtgtgtcacgctctggggaccaggtgctaaacctgcccctgggatctgctttgagagagtcaattctgcaggtgatccttatggcaactgtggcaaagtctcgaagagttcctttgccaaatgcgagatgagagatgctaaatgtggaaaaatccagtgtcaaggaggtgccagccggccagtcattggtaccaatgccgtttccatagaaacaaacatccccctgcagcaaggaggccggattctgtgccgggggacccacgtgtacttgggcgatgacatgccggacccagggcttgtgcttgcaggcacaaagtgtgcagatggaaaaatctgcctgaatcgtcaatgtcaaaatattagtgtctttggggttcacgagtgtgcaatgcagtgccacggcagaggggtgtgcaacaacaggaagaactgccactgcgaggcccactgggcacctcccttctgtgacaagtttggctttggaggaagcacagacagcggccccatccggcaagcagaagcaaggcaggaagctgcagagtccaacagggagcgcggccagggccaggagcccgtgggatcgcaggagcatgcgtctactgcctcactgacactcatctgagccctcccatgacatggagaccgtgaccagtgctgctgcagaggaggtcacgcgtccccaaggcctcctgtgactggcagcattgactctgtggctttgccatcgtttccatgacaacagacacaacacagttctcggggctcaggaggggaagtccagcctaccaggcacgtctgcagaaacagtgcaaggaagggcagcgacttcctggttgagcttctgctaaaacatggacatgcttcagtgctgctcctgagagagtagcaggttaccactctggcaggccccagccctgcagcaaggaggaagaggactcaaaagtctggcctttcactgagcccccacagcagtgggggagaagcaagggttgggcccagtgtcccctttccccagtgacacctcagccttggcagccctgatgactggtctctggctgcaacttaatgctctgatatggcttttagcatttattatatgaaaatagcagggttttagtttttaatttatcagagaccctgccacccattccatctccatccaagcaaactgaatggcattgaaacaaactggagaagaaggtaggagaaagggcggtgaactctggctctttgctgtggacatgcgtgaccagcagtactcaggtttgagggtttgcagaaagccagggaacccacagagtcaccaacccttcatttaacaagtaagaatgttaaaaagtgaaaacaatgtaagagcctaactccatcccccgtggccattactgcataaaatagagtgcatttgaaataccgctgcctccaccctgttcatacatatataaaatcaaggcaggccatgagcaagcatggctcactgctccctggcctggccatggctcaggggctcattaaacaagtactcgtgtgtctgccacacaccagccactctcctgggtcctggagagacattaagcaagaatgacatggcataagtgaggggtacgactgcagggagagagggcatcatgggaggggagcaacccccacagaggaggcggctatggaggagaccgaggaggttggctatggaggagatcgaggatggcggagagggag

SEQ ID NO: 318530 - DNA, 5161 bp, Homo sapiens
gctgtcaccttatcagaactcgactgtcagagaatgtgtttccaccatcctctcagacatggtcctgaaggcataaaagagagaccctcaaggcaactaagtatgtggagctggtgatcgtggcagacaaccgagagtttcagaggcaaggaaaagatctggaaaaagttaagcagcgattaatagagattgctaatcacgttgacaagttttacagaccactgaacattcggatcgtgttggtaggcgtggaagtgtggaatgacatggacaaatgctctgtaagtcaggacccattcaccagcctccatgaatttctggactggaggaagatgaagcttctacctcgcaaatcccatgacaatgcgcagcttgtcagtggggtttatttccaagggaccaccatcggcatggccccaatcatgagcatgtgcacggcagaccagtctgggggaattgtcatggaccattcagacaatccccttggtgcagccgtgaccctggcacatgagctgggccacaatttcgggatgaatcatgacacactggacaggggctgtagctgtcaaatggcggttgagaaaggaggctgcatcatgaacgcttccaccgggtacccatttcccatggtgttcagcagttgcagcaggaaggacttggagaccagcctggagaaaggaatgggggtgtgcctgtttaacctgccggaagtcagggagtctttcgggggccagaagtgtgggaacagatttgtggaagaaggagaggagtgtgactgtggggagccagaggaatgtatgaatcgctgctgcaatgccaccacctgtaccctgaagccggacgctgtgtgcgcacatgggctgtgctgtgaagactgccagctgaagcctgcaggaacagcgtgcagggactccagcaactcctgtgacctcccagagttctgcacaggggccagccctcactgcccagccaacgtgtacctgcacgatgggcactcatgtcaggatgtggacggctactgctacaatggcatctgccagactcacgagcagcagtgtgtcacgctctggggaccaggtgctaaacctgcccctgggatctgctttgagagagtcaattctgcaggtgatccttatggcaactgtggcaaagtctcgaagagttcctttgccaaatgcgagatgagagatgctaaatgtggaaaaatccagtgtcaaggaggtgccagccggccagtcattggtaccaatgccgtttccatagaaacaaacatccccctgcagcaaggaggccggattctgtgccgggggacccacgtgtacttgggcgatgacatgccggacccagggcttgtgcttgcaggcacaaagtgtgcagatggaaaaatctgcctgaatcgtcaatgtcaaaatattagtgtctttggggttcacgagtgtgcaatgcagtgccacggcagaggggtgtgcaacaacaggaagaactgccactgcgaggcccactgggcacctcccttctgtgacaagtttggctttggaggaagcacagacagcggccccatccggcaagcagataaccaaggtttaaccataggaattctggtgaccatcctgtgtcttcttgctgccggatttgtggtttatctcaaaaggaagaccttgatacgactgctgtttacaaataagaagaccaccattgaaaaactaaggtgtgtgcgcccttcccggccaccccgtggcttccaaccctgtcaggctcacctcggccaccttggaaaaggcctgatgaggaagccgccagattcctacccaccgaaggacaatcccaggagattgctgcagtgtcagaatgttgacatcagcagacccctcaacggcctgaatgtccctcagccccagtcaactcagcgagtgcttcctcccctccaccgggctccacgtgcacctagcgtccctgccagacccctgccagccaagcctgcacttaggcaggcccaggggacctgtaagccaaacccccctcagaagcctctgcctgcagatcctctggccagaacaactcggctcactcatgccttggccaggaccccaggacaatgggagactgggctccgcctggcacccctcagacctgctccacaatatccacaccaagtgcccagatccacccacaccgcctatattaagtgagaagccgacaccttttttcaacagtgaagacagaagtttgcactatctttcagctccagttggagttttttgtaccaacttttaggattttttttaatgtttaaaacatcattactataagaactttgagctactgccgtcagtgctgtgctgtgctatggtgctctgtctacttgctcaggtacttgtaaattattaatttatgcagaatgttgattacagtgcagtgcgctgtagtaggcatttttaccatcactgagttttccatggcaggaaggcttgttgtgcttttagtattttagtgaacttgaaatatcctgcttgatgggattctggacaggatgtgtttgctttctgatcaaggccttattggaaagcagtcccccaactacccccagctgtgcttatggtaccagatgcagctcaagagatcccaagtagaacctcagttgattttctggattccccatctcaggccagagccaaggggcttcaggtccaggctgtgtttggctttcagggaggccctgtgccccttgacaactggcaggcaggctcccagggacagctgggagaaatctggcttctggccaggaagctttggtgagaacctgggttgcagacaggaatcttaaggtgtagccacaccaggatagagactggaacactagacaagccagaacttgaccctgagctgaccagccgtgagcatgtttggaaggggtctgtagtgtcactcaaggcggtgcttgatagaaatgccaagcacttctttttctcgctgtcctttctagagcactgccaccagtaggttatttagcttgggaaaggtggtgtttctgtaagaaacctactgcccaggcactgcaaaccgccacctccctatactgcttggagctgagcaaatcaccacaaactgtaatacaatgatcctgtattcagacagatgaggctttccatgggaccacaactattttcagatgtgaaccattaaccagatctagtcaatcaagtctgtttactgcaaggttcaacttattaacaattaggcagactctttatgcttgcaaaaactacaaccaatggaatgtgatgttcatgggtatagttcatgtctgctatcattattcgtagatattggacaaagaaccttctctatggggcatcctctttttccaacttggctgcaggaatctttaaaagatgcttttaacagagtctgaacctatttcttaaacacttgcaacctacctgttgagcatcacagaatgtgataaggaaatcaacttgcttatcaacttcctaaatattatgagatgctggcttgggcagcatccccttgaactcttcactcttcaaatgcctgactagggagccatgtttcacaaggtctttaaagtgactaatggcatgagaaatacaaaaatactcagataaggtaaaatgccatgatgcctctgtcttctggactggttttcacattagaagacaattgacaacagttacataattcactctgagtgttttatgagaaagccttcttttgggggtcaacagttttcctatgctttgaaacagaaaaatatgtaccaagaatcttggtttgccttccagaaaacaaaactgcatttcactttcccggtgttccccactgtatctaggcaacatagtattcatgactatggataaactaaacacgtgacacaaacacacacaaaagggaacccagctctaatacattccaactcgtatagcatgcatctgtttattctatagttattaagttctttaaaatgtaaagccatgctggaaaataatactgctgagatacatacagaattactgtaactgattacacttggtaattgtactaaagccaaacatatatatactattaaaaaggtttacagaattttatggtgcattacgtgggcattgtctttttagatgcccaaatccttagatctggcatgttagcccttcctccaattataagaggatatgaactgagtttttcttttgttgtttgttcttagctgtaattcctatgcttctatttcagagagccaggagagtttgatattaaaggaggttaaaactgtgatcttatgccatgtcatcaatggccacttaggggccatggctgatgacacattcttatctctacagtactaatgtgttattatagagccatgcattttatttctgaataagaacatatttaaactaatattcccttacaatatggacagtattaatccttccaagatgcagtatttatcaagtgaagcatatttagcagcaaattccattttaacataacttaggaaccaataaccagggtgttttgtggttgggggaggcacggggtggagtattcttttttatatcctcaaaacaaaaaaaatcaatacttatatttcaatggcaatctagtatttttttaaaagactgtataggcatgaataatagaggtggtttgagttttgtagggccatcacctggaaagtcaatgtgactagacacaaagtagcccagaggctacttttcttcctacagcttattatagttgtaggttctatgacctcacttcatgggttccaggcaattccgctgaaaggtttgtctcctgaaattttttaagtttgttttcctgacacatgtaatcagatgtgtagcaaccgagggaaacgaagcctaacattctccattgtggaaatacacacaggaggttacacttcacagcgtggatttttccagcttacacatgtgggatgacatcacagaaaccacaaaagcagcaaattaaactgtaggagagtcaatactcctgacgagtctcggggggggcatttttatgccttcttaactttatgagaattctcaggctgaactataggccattgttcccaggcaaatcaatacatcaatgcatcctcaaaaaaaaaaaaaaaaaaaaaaaccggctaaaa

SEQ ID NO: 318531 - DNA, 4789 bp, Homo sapiens
actgctggccgtggatccatttcacaggcctgccttctctcactaacgctcttcctagtccccgggccaactcggacagtttgctcatttattgcaacggtcaaggctggcttgtgccagaacggcgcgcgcgcgcgcacgcacgcacacacacggggggaaacttttttaaaaatgaaaggctagaagagctcagcggcggcgcgggcgctgcgcgagggctccggagctgactcgccgaggcaggaaatccctccggtcgcgacgcccggccccggctcggcgcccgcgtgggatggtgcagcgctcgccgccgggcccgagagctgctgcactgaaggccggcgacgatggcagcgcgcccgctgcccgtgtcccccgcccgcgccctcctgctcgccctggccggtgctctgctcgcgccctgcgaggcccgaggggtgagcttatggaaccaaggaagagctgatgaagttgtcagtgcctctgttcggagtggggacctctggatcccagtgaagagcttcgactccaagaatcatccagaagtgctgaatattcgactacaacgggaaagcaaagaactgatcataaatctggaaagaaatgaaggtctcattgccagcagtttcacggaaacccactatctgcaagacggtactgatgtctccctcgctcgaaattacacgggtcactgttactaccatggacatgtacggggatattctgattcagcagtcagtctcagcacgtgttctggtctcaggggacttattgtgtttgaaaatgaaagctatgtcttagaaccaatgaaaagtgcaaccaacagatacaaactcttcccagcgaagaagctgaaaagcgtccggggatcatgtggatcacatcacaacacaccaaacctcgctgcaaagaatgtgtttccaccaccctctcagacatgggcaagaaggcataaaagagagaccctcaaggcaactaagtatgtggagctggtgatcgtggcagacaaccgagagtttcagaggcaaggaaaagatctggaaaaagttaagcagcgattaatagagattgctaatcacgttgacaagttttacagaccactgaacattcggatcgtgttggtaggcgtggaagtgtggaatgacatggacaaatgctctgtaagtcaggacccattcaccagcctccatgaatttctggactggaggaagatgaagcttctacctcgcaaatcccatgacaatgcgcagcttgtcagtggggtttatttccaagggaccaccatcggcatggccccaatcatgagcatgtgcacggcagaccagtctgggggaattgtcatggaccattcagacaatccccttggtgcagccgtgaccctggcacatgagctgggccacaatttcgggatgaatcatgacacactggacaggggctgtagctgtcaaatggcggttgagaaaggaggctgcatcatgaacgcttccaccgggtacccatttcccatggtgttcagcagttgcagcaggaaggacttggagaccagcctggagaaaggaatgggggtgtgcctgtttaacctgccggaagtcagggagtctttcgggggccagaagtgtgggaacagatttgtggaagaaggagaggagtgtgactgtggggagccagaggaatgtatgaatcgctgctgcaatgccaccacctgtaccctgaagccggacgctgtgtgcgcacatgggctgtgctgtgaagactgccagctgaagcctgcaggaacagcgtgcagggactccagcaactcctgtgacctcccagagttctgcacaggggccagccctcactgcccagccaacgtgtacctgcacgatgggcactcatgtcaggatgtggacggctactgctacaatggcatctgccagactcacgagcagcagtgtgtcacgctctggggaccaggtgctaaacctgcccctgggatctgctttgagagagtcaattctgcaggtgatccttatggcaactgtggcaaagtctcgaagagttcctttgccaaatgcgagatgagagatgctaaatgtggaaaaatccagtgtcaaggaggtgccagccggccagtcattggtaccaatgccgtttccatagaaacaaacatccccctgcagcaaggaggccggattctgtgccgggggacccacgtgtacttgggcgatgacatgccggacccagggcttgtgcttgcaggcacaaagtgtgcagatggaaaaatctgcctgaatcgtcaatgtcaaaatattagtgtctttggggttcacgagtgtgcaatgcagtgccacggcagaggggtgtgcaacaacaggaagaactgccactgcgaggcccactgggcacctcccttctgtgacaagtttggctttggaggaagcacagacagcggccccatccggcaagcagataaccaaggtttaaccataggaattctggtgaccatcctgtgtcttcttgctgccggatttgtggtttatctcaaaaggaagaccttgatacgactgctgtttacaaataagaagaccaccattgaaaaactaaggtaccctgggtttagcttgtcatctgttctagaaatggtggctcagaggctgggtgcggtggctcaagcctgtaatcccagcactttgggaggctgaggcgggcggatcacgaggtcaggagatcgagaccacggtgaaaccccgtctctactaaaaatacaaaatatcagccgggcgcggtggtgggtgcctgtagtcccatctactcgggaggctgaggcatgagaatggcgtgaacccgggaggcggagcttgcagtgagttgcgatcactccactgcactccagcctgggcgagagagcaagactccatctcaaaaaaaaaaaaaaaaaaaaaaaaaagaaatggtgtctcagaaaatgtacagcaaactgcttctcacttcatttttttagcaaaggtcagattttctggatcataaacctgggacttggttcttttttggggggtttcttgttttaaatttctgccagatcagctgcctcctttacttcccttcaaacaacaatgtgctgcttattacataagctagcagggtgtcaggaaattccactgatgtgttttctcccacccttatattagtaatttttatacaacatggagacattgaaatattttcatcagatggggtagcttttgatccaaatatattcaaagacattatcgctgaaatgccagcttcatacaaatcatcttccaggtgtcactacactgcatttctatggagcgtgagaactaatttgacaaaatagaggttttgagggaaaaaccagtatttattttttaatctcctaagagtgttattaggtaatttttcctttgcatgtttagcacactgagttaagtaaactgtcttttgagtgccactatgagcaaagtgtaaaaagtcaagtcagtgagaaggggaaacacgcttggtcagcaggtatgggattctgttgcaggtgtgtgcgcccttcccggccaccccgtggcttccaaccctgtcaggctcacctcggccaccttggaaaaggcctgatgaggaagccgccagattcctacccaccgaaggtgagtcttgagtagatgtgagtgctcagggcacacatgcagacatgaggttttcaatacgagactgaataagaatgggatcctagaggcgctgcctgtgaaatgctgagtcagcctcactaggtcagcaggctctgagggagggtctctgtgatctggggccagagggaggccccacggtgcccccatggaagcccacctagatcctgttggcgcactcagtgccccctgcatgatatggtgcagcatagtgtgagctgtgatcccttcagtcacccagaccagccacatttctggggccccactgggtctgcagcccgagctggctcctgacaccagcccccaatgccagccccaccatggtttccaaatgccaccacctggctttaggtgagctgctttagcccactgttactcttaaaatatttttcaaaagttacatggagctctcagaattgaccattttgctccagccctgagctgaggaagccctgtccaccctgtggtttcagagaactggatccttaacccagagtacctcacggctccctgctgtctcttaaccctcttgctaccctggtgaattacagctagagttcattctaatagttcttccccaccgagtttttctgatgtacccacaagaattcttgaatattgaacttagtcaacaagagtccaaattataacagtgaacaagattggtgtcaaaaaaaataagtgattgaaaaatcattgctgcatatgcagtaggcaataaactgttttaactcccttgatccaaaaaacgcaaagggtggggctccaaggaggaggctgccattcccaataagctttacccctgctcgtccccaaaggtggaaccataagcgagaacggctttgtgtggtagccaaaagcacatcttcattttcgtaaaaaagaaaaatgcagctctattaaaaaaaaaaaaaaagcacagccttatttttgagagccccaaactagaaacaatccaaatatccatcaaccagtaaaaggataaacaatggtatatttgcacaatggaatgaaccattgatgtatacaacattgaggatgaatctctagataattattctgagtaaaagaagaaaagccagagtatatactctgtgatcccactt

SEQ ID NO: 318532 - DNA, 4739 bp, Homo sapiens
cgctcggtacccggtccatgaacagttgggggaattgtcatggaccattcagacaatccccttggtgcagccgtgaccctggcacatgagctgggccacaatttcgggatgaatcatgacacactggacaggggctgtagctgtcaaatggcggttgagaaaggaggctgcatcatgaacgcttccaccgggtacccatttcccatggtgttcagcagttgcagcaggaaggacttggagaccagcctggagaaaggaatgggggtgtgcctgtttaacctgccggaagtcagggagtctttcgggggccagaagtgtgggaacagatttgtggaagaaggagaggagtgtgactgtggggagccagaggaatgtatgaatcgctgctgcaatgccaccacctgtaccctgaagccggacgctgtgtgcgcacatgggctgtgctgtgaagactgccagctgaagcctgcaggaacagcgtgcagggactccagcaactcctgtgacctcccagagttctgcacaggggccagccctcactgcccagccaacgtgtacctgcacgatgggcactcatgtcaggatgtggacggctactgctacaatggcatctgccagactcacgagcagcagtgtgtcacgctctggggaccaggtgctaaacctgcccctgggatctgctttgagagagtcaattctgcaggtgatccttatggcaactgtggcaaagtctcgaagagttcctttgccaaatgcgagatgagagatgctaaatgtggaaaaatccagtgtcaaggaggtgccagccggccagtcattggtaccaatgccgtttccatagaaacaaacatccccctgcagcaaggaggccggattctgtgccgggggacccacgtgtacttgggcgatgacatgccggacccagggcttgtgcttgcaggcacaaagtgtgcagatggaaaaatctgcctgaatcgtcaatgtcaaaatattagtgtctttggggttcacgagtgtgcaatgcagtgccacggcagaggggtgtgcaacaacaggaagaactgccactgcgaggcccactgggcacctcccttctgtgacaagtttggctttggaggaagcacagacagcggccccatccggcaagcagataaccaaggtttaaccataggaattctggtgaccatcctgtgtcttcttgctgccggatttgtggtttatctcaaaaggaagaccttgatacgactgctgtttacaaataagaagaccaccattgaaaaactaaggtgtgtgcgcccttcccggccaccccgtggcttccaaccctgtcaggctcacctcggccaccttggaaaaggcctgatgaggaagccgccagattcctacccaccgaaggacaatcccaggagattgctgcagtgtcagaatgttgacatcagcagacccctcaacggcctgaatgtccctcagccccagtcaactcagcgagtgcttcctcccctccaccgggctccacgtgcacctagcgtccctgccagacccctgccagccaagcctgcacttaggcaggcccaggggacctgtaagccaaacccccctcagaagcctctgcctgcagatcctctggccagaacaactcggctcactcatgccttggccaggaccccaggacaatgggagactgggctccgcctggcacccctcagacctgctccacaatatccacaccaagtgcccagatccacccacaccgcctatattaagtgagaagccgacaccttttttcaacagtgaagacagaagtttgcactatctttcagctccagttggagttttttgtaccaacttttaggattttttttaatgtttaaaacatcattactataagaactttgagctactgccgtcagtgctgtgctgtgctatggtgctctgtctacttgctcaggtacttgtaaattattaatttatgcagaatgttgattacagtgcagtgcgctgtagtaggcatttttaccatcactgagttttccatggcaggaaggcttgttgtgcttttagtattttagtgaacttgaaatatcctgcttgatgggattctggacaggatgtgtttgctttctgatcaaggccttattggaaagcagtcccccaactacccccagctgtgcttatggtaccagatgcagctcaagagatcccaagtagaacctcagttgattttctggattccccatctcaggccagagccaaggggcttcaggtccaggctgtgtttggctttcagggaggccctgtgccccttgacaactggcaggcaggctcccagggacagctgggagaaatctggcttctggccaggaagctttggtgagaacctgggttgcagacaggaatcttaaggtgtagccacaccaggatagagactggaacactagacaagccagaacttgaccctgagctgaccagccgtgagcatgtttggaaggggtctgtagtgtcactcaaggcggtgcttgatagaaatgccaagcacttctttttctcgctgtcctttctagagcactgccaccagtaggttatttagcttgggaaaggtggtgtttctgtaagaaacctactgcccaggcactgcaaaccgccacctccctatactgcttggagctgagcaaatcaccacaaactgtaatacaatgatcctgtattcagacagatgaggctttccatgggaccacaactattttcagatgtgaaccattaaccagatctagtcaatcaagtctgtttactgcaaggttcaacttattaacaattaggcagactctttatgcttgcaaaaactacaaccaatggaatgtgatgttcatgggtatagttcatgtctgctatcattattcgtagatattggacaaagaaccttctctatggggcatcctctttttccaacttggctgcaggaatctttaaaagatgcttttaacagagtctgaacctatttcttaaacacttgcaacctacctgttgagcatcacagaatgtgataaggaaatcaacttgcttatcaacttcctaaatattatgagatgctggcttgggcagcatccccttgaactcttcactcttcaaatgcctgactagggagccatgtttcacaaggtctttaaagtgactaatggcatgagaaatacaaaaatactcagataaggtaaaatgccatgatgcctctgtcttctggactggttttcacattagaagacaattgacaacagttacataattcactctgagtgttttatgagaaagccttcttttgggggtcaacagttttcctatgctttgaaacagaaaaatatgtaccaagaatcttggtttgccttccagaaaacaaaactgcatttcactttcccggtgttccccactgtatctaggcaacatagtattcatgactatggataaactaaacacgtgacacaaacacacacaaaagggaacccagctctaatacattccaactcgtatagcatgcatctgtttattctatagttattaagttctttaaaatgtaaagccatgctggaaaataatactgctgagatacatacagaattactgtaactgattacacttggtaattgtactaaagccaaacatatatatactattaaaaaggtttacagaattttatggtgcattacgtgggcattgtctttttagatgcccaaatccttagatctggcatgttagcccttcctccaattataagaggatatgaactgagtttttcttttgttgtttgttcttagctgtaattcctatgcttctatttcagagagccaggagagtttgatattaaaggaggttaaaactgtgatcttatgccatgtcatcaatggccacttaggggccatggctgatgacacattcttatctctacagtactaatgtgttattatagagccatgcattttatttctgaataagaacatatttaaactaatattcccttacaatatggacagtattaatccttccaagatgcagtatttatcaagtgaagcatatttagcagcaaattccattttaacataacttaggaaccaataaccagggtgttttgtggttgggggaggcacggggtggagtattcttttttatatcctcaaaacaaaaaaaatcaatacttatatttcaatggcaatctagtatttttttaaaagactgtataggcatgaataatagaggtggtttgagttttgtagggccatcacctggaaagtcaatgtgactagacacaaagtagcccagaggctacttttcttcctacagcttattatagttgtaggttctatgacctcacttcatgggttccaggcaattccgctgaaaggtttgtctcctgaaattttttaagtttgttttcctgacacatgtaatcagatgtgtagcaaccgagggaaacgaagcctaacattctccattgtggaaatacacacaggaggttacacttcacagcgtggatttttccagcttacacatgtgggatgacatcacagaaaccacaaaagcagcaaattaaactgtaggagagtcaatactcctgacgagtctcggggggggcatttttatgccttcttaactttatgagaattctcaggctgaactataggccattgttcccaggcaaatcaatacatcaatgcatcctcaaaaaaaaaaaaaaaaaaaaaaaccggctaaaa

SEQ ID NO: 318533 - DNA, 4652 bp, Homo sapiens
aagctgaaatagtagacaagttcaaggcaggcttagctaaattcacagatggacttaatgagggcttaggaagagcatctccaagggctgctctgaaagagggagtttagggtggaggagaaatcgtgttgagactggcgcatccggtatattcctgtgttcatcacacaaacaactggcaaacagaatgttcatcatatccccatcttcaagtctctgaggttttccataccaggaggaatgagcttggtctgacagtttctgcaagaacgctggaagtatgaatgtatgaatcgctgctgcaatgccaccacctgtaccctgaagccggacgctgtgtgcgcacatgggctgtgctgtgaagactgccagctgaagcctgcaggaacagcgtgcagggactccagcaactcctgtgacctcccagagttctgcacaggggccagccctcactgcccagccaacgtgtacctgcacgatgggcactcatgtcaggatgtggacggctactgctacaatggcatctgccagactcacgagcagcagtgtgtcacgctctggggaccaggtgctaaacctgcccctgggatctgctttgagagagtcaattctgcaggtgatccttatggcaactgtggcaaagtctcgaagagttcctttgccaaatgcgagatgagagatgctaaatgtggaaaaatccagtgtcaaggaggtgccagccggccagtcattggtaccaatgccgtttccatagaaacaaacatccccctgcagcaaggaggccggattctgtgccgggggacccacgtgtacttgggcgatgacatgccggacccagggcttgtgcttgcaggcacaaagtgtgcagatggaaaaatctgcctgaatcgtcaatgtcaaaatattagtgtctttggggttcacgagtgtgcaatgcagtgccacggcagaggggtgtgcaacaacaggaagaactgccactgcgaggcccactgggcacctcccttctgtgacaagtttggctttggaggaagcacagacagcggccccatccggcaagcagataaccaaggtttaaccataggaattctggtgaccatcctgtgtcttcttgctgccggatttgtggtttatctcaaaaggaagaccttgatacgactgctgtttacaaataagaagaccaccattgaaaaactaaggtgtgtgcgcccttcccggccaccccgtggcttccaaccctgtcaggctcacctcggccaccttggaaaaggcctgatgaggaagccgccagattcctacccaccgaaggacaatcccaggagattgctgcagtgtcagaatgttgacatcagcagacccctcaacggcctgaatgtccctcagccccagtcaactcagcgagtgcttcctcccctccaccgggctccacgtgcacctagcgtccctgccagacccctgccagccaagcctgcacttaggcaggcccaggggacctgtaagccaaacccccctcagaagcctctgcctgcagatcctctggccagaacaactcggctcactcatgccttggccaggaccccaggacaatgggagactgggctccgcctggcacccctcagacctgctccacaatatccacaccaagtgcccagatccacccacaccgcctatattaagtgagaagccgacaccttttttcaacagtgaagacagaagtttgcactatctttcagctccagttggagttttttgtaccaacttttaggattttttttaatgtttaaaacatcattactataagaactttgagctactgccgtcagtgctgtgctgtgctatggtgctctgtctacttgctcaggtacttgtaaattattaatttatgcagaatgttgattacagtgcagtgcgctgtagtaggcatttttaccatcactgagttttccatggcaggaaggcttgttgtgcttttagtattttagtgaacttgaaatatcctgcttgatgggattctggacaggatgtgtttgctttctgatcaaggccttattggaaagcagtcccccaactacccccagctgtgcttatggtaccagatgcagctcaagagatcccaagtagaacctcagttgattttctggattccccatctcaggccagagccaaggggcttcaggtccaggctgtgtttggctttcagggaggccctgtgccccttgacaactggcaggcaggctcccagggacagctgggagaaatctggcttctggccaggaagctttggtgagaacctgggttgcagacaggaatcttaaggtgtagccacaccaggatagagactggaacactagacaagccagaacttgaccctgagctgaccagccgtgagcatgtttggaaggggtctgtagtgtcactcaaggcggtgcttgatagaaatgccaagcacttctttttctcgctgtcctttctagagcactgccaccagtaggttatttagcttgggaaaggtggtgtttctgtaagaaacctactgcccaggcactgcaaaccgccacctccctatactgcttggagctgagcaaatcaccacaaactgtaatacaatgatcctgtattcagacagatgaggctttccatgggaccacaactattttcagatgtgaaccattaaccagatctagtcaatcaagtctgtttactgcaaggttcaacttattaacaattaggcagactctttatgcttgcaaaaactacaaccaatggaatgtgatgttcatgggtatagttcatgtctgctatcattattcgtagatattggacaaagaaccttctctatggggcatcctctttttccaacttggctgcaggaatctttaaaagatgcttttaacagagtctgaacctatttcttaaacacttgcaacctacctgttgagcatcacagaatgtgataaggaaatcaacttgcttatcaacttcctaaatattatgagatgctggcttgggcagcatccccttgaactcttcactcttcaaatgcctgactagggagccatgtttcacaaggtctttaaagtgactaatggcatgagaaatacaaaaatactcagataaggtaaaatgccatgatgcctctgtcttctggactggttttcacattagaagacaattgacaacagttacataattcactctgagtgttttatgagaaagccttcttttgggggtcaacagttttcctatgctttgaaacagaaaaatatgtaccaagaatcttggtttgccttccagaaaacaaaactgcatttcactttcccggtgttccccactgtatctaggcaacatagtattcatgactatggataaactaaacacgtgacacaaacacacacaaaagggaacccagctctaatacattccaactcgtatagcatgcatctgtttattctatagttattaagttctttaaaatgtaaagccatgctggaaaataatactgctgagatacatacagaattactgtaactgattacacttggtaattgtactaaagccaaacatatatatactattaaaaaggtttacagaattttatggtgcattacgtgggcattgtctttttagatgcccaaatccttagatctggcatgttagcccttcctccaattataagaggatatgaactgagtttttcttttgttgtttgttcttagctgtaattcctatgcttctatttcagagagccaggagagtttgatattaaaggaggttaaaactgtgatcttatgccatgtcatcaatggccacttaggggccatggctgatgacacattcttatctctacagtactaatgtgttattatagagccatgcattttatttctgaataagaacatatttaaactaatattcccttacaatatggacagtattaatccttccaagatgcagtatttatcaagtgaagcatatttagcagcaaattccattttaacataacttaggaaccaataaccagggtgttttgtggttgggggaggcacggggtggagtattcttttttatatcctcaaaacaaaaaaaatcaatacttatatttcaatggcaatctagtatttttttaaaagactgtataggcatgaataatagaggtggtttgagttttgtagggccatcacctggaaagtcaatgtgactagacacaaagtagcccagaggctacttttcttcctacagcttattatagttgtaggttctatgacctcacttcatgggttccaggcaattccgctgaaaggtttgtctcctgaaattttttaagtttgttttcctgacacatgtaatcagatgtgtagcaaccgagggaaacgaagcctaacattctccattgtggaaatacacacaggaggttacacttcacagcgtggatttttccagcttacacatgtgggatgacatcacagaaaccacaaaagcagcaaattaaactgtaggagagtcaatactcctgacgagtctcggggggggcatttttatgccttcttaactttatgagaattctcaggctgaactataggccattgttcccaggcaaatcaatacatcaatgcatcctcaaaaaaaaaaaaaaaaaaaaaaaccggctaaaa

SEQ ID NO: 318534 - DNA, 4635 bp, Homo sapiens
ccaccccgcaattatacccgcgcgcgccgcatgcagtcacagcaaaccacccccagggactcggcatcaccaggtgggggcgccagcgcaggatccttcacgcgacgcagcaaaactgggcagaggggtgggtggagatcggccgctctccacccacccctcttggtctttcttgctttttgcagccatttaaggtgtgatgtttgcattcagtgagtgcatactccataagaccctgtcaaacaaatgccattcccctttccaggaatgtatgaatcgctgctgcaatgccaccacctgtaccctgaagccggacgctgtgtgcgcacatgggctgtgctgtgaagactgccagctgaagcctgcaggaacagcgtgcagggactccagcaactcctgtgacctcccagagttctgcacaggggccagccctcactgcccagccaacgtgtacctgcacgatgggcactcatgtcaggatgtggacggctactgctacaatggcatctgccagactcacgagcagcagtgtgtcacgctctggggaccaggtgctaaacctgcccctgggatctgctttgagagagtcaattctgcaggtgatccttatggcaactgtggcaaagtctcgaagagttcctttgccaaatgcgagatgagagatgctaaatgtggaaaaatccagtgtcaaggaggtgccagccggccagtcattggtaccaatgccgtttccatagaaacaaacatccccctgcagcaaggaggccggattctgtgccgggggacccacgtgtacttgggcgatgacatgccggacccagggcttgtgcttgcaggcacaaagtgtgcagatggaaaaatctgcctgaatcgtcaatgtcaaaatattagtgtctttggggttcacgagtgtgcaatgcagtgccacggcagaggggtgtgcaacaacaggaagaactgccactgcgaggcccactgggcacctcccttctgtgacaagtttggctttggaggaagcacagacagcggccccatccggcaagcagataaccaaggtttaaccataggaattctggtgaccatcctgtgtcttcttgctgccggatttgtggtttatctcaaaaggaagaccttgatacgactgctgtttacaaataagaagaccaccattgaaaaactaaggtgtgtgcgcccttcccggccaccccgtggcttccaaccctgtcaggctcacctcggccaccttggaaaaggcctgatgaggaagccgccagattcctacccaccgaaggacaatcccaggagattgctgcagtgtcagaatgttgacatcagcagacccctcaacggcctgaatgtccctcagccccagtcaactcagcgagtgcttcctcccctccaccgggctccacgtgcacctagcgtccctgccagacccctgccagccaagcctgcacttaggcaggcccaggggacctgtaagccaaacccccctcagaagcctctgcctgcagatcctctggccagaacaactcggctcactcatgccttggccaggaccccaggacaatgggagactgggctccgcctggcacccctcagacctgctccacaatatccacaccaagtgcccagatccacccacaccgcctatattaagtgagaagccgacaccttttttcaacagtgaagacagaagtttgcactatctttcagctccagttggagttttttgtaccaacttttaggattttttttaatgtttaaaacatcattactataagaactttgagctactgccgtcagtgctgtgctgtgctatggtgctctgtctacttgctcaggtacttgtaaattattaatttatgcagaatgttgattacagtgcagtgcgctgtagtaggcatttttaccatcactgagttttccatggcaggaaggcttgttgtgcttttagtattttagtgaacttgaaatatcctgcttgatgggattctggacaggatgtgtttgctttctgatcaaggccttattggaaagcagtcccccaactacccccagctgtgcttatggtaccagatgcagctcaagagatcccaagtagaacctcagttgattttctggattccccatctcaggccagagccaaggggcttcaggtccaggctgtgtttggctttcagggaggccctgtgccccttgacaactggcaggcaggctcccagggacagctgggagaaatctggcttctggccaggaagctttggtgagaacctgggttgcagacaggaatcttaaggtgtagccacaccaggatagagactggaacactagacaagccagaacttgaccctgagctgaccagccgtgagcatgtttggaaggggtctgtagtgtcactcaaggcggtgcttgatagaaatgccaagcacttctttttctcgctgtcctttctagagcactgccaccagtaggttatttagcttgggaaaggtggtgtttctgtaagaaacctactgcccaggcactgcaaaccgccacctccctatactgcttggagctgagcaaatcaccacaaactgtaatacaatgatcctgtattcagacagatgaggctttccatgggaccacaactattttcagatgtgaaccattaaccagatctagtcaatcaagtctgtttactgcaaggttcaacttattaacaattaggcagactctttatgcttgcaaaaactacaaccaatggaatgtgatgttcatgggtatagttcatgtctgctatcattattcgtagatattggacaaagaaccttctctatggggcatcctctttttccaacttggctgcaggaatctttaaaagatgcttttaacagagtctgaacctatttcttaaacacttgcaacctacctgttgagcatcacagaatgtgataaggaaatcaacttgcttatcaacttcctaaatattatgagatgctggcttgggcagcatccccttgaactcttcactcttcaaatgcctgactagggagccatgtttcacaaggtctttaaagtgactaatggcatgagaaatacaaaaatactcagataaggtaaaatgccatgatgcctctgtcttctggactggttttcacattagaagacaattgacaacagttacataattcactctgagtgttttatgagaaagccttcttttgggggtcaacagttttcctatgctttgaaacagaaaaatatgtaccaagaatcttggtttgccttccagaaaacaaaactgcatttcactttcccggtgttccccactgtatctaggcaacatagtattcatgactatggataaactaaacacgtgacacaaacacacacaaaagggaacccagctctaatacattccaactcgtatagcatgcatctgtttattctatagttattaagttctttaaaatgtaaagccatgctggaaaataatactgctgagatacatacagaattactgtaactgattacacttggtaattgtactaaagccaaacatatatatactattaaaaaggtttacagaattttatggtgcattacgtgggcattgtctttttagatgcccaaatccttagatctggcatgttagcccttcctccaattataagaggatatgaactgagtttttcttttgttgtttgttcttagctgtaattcctatgcttctatttcagagagccaggagagtttgatattaaaggaggttaaaactgtgatcttatgccatgtcatcaatggccacttaggggccatggctgatgacacattcttatctctacagtactaatgtgttattatagagccatgcattttatttctgaataagaacatatttaaactaatattcccttacaatatggacagtattaatccttccaagatgcagtatttatcaagtgaagcatatttagcagcaaattccattttaacataacttaggaaccaataaccagggtgttttgtggttgggggaggcacggggtggagtattcttttttatatcctcaaaacaaaaaaaatcaatacttatatttcaatggcaatctagtatttttttaaaagactgtataggcatgaataatagaggtggtttgagttttgtagggccatcacctggaaagtcaatgtgactagacacaaagtagcccagaggctacttttcttcctacagcttattatagttgtaggttctatgacctcacttcatgggttccaggcaattccgctgaaaggtttgtctcctgaaattttttaagtttgttttcctgacacatgtaatcagatgtgtagcaaccgagggaaacgaagcctaacattctccattgtggaaatacacacaggaggttacacttcacagcgtggatttttccagcttacacatgtgggatgacatcacagaaaccacaaaagcagcaaattaaactgtaggagagtcaatactcctgacgagtctcggggggggcatttttatgccttcttaactttatgagaattctcaggctgaactataggccattgttcccaggcaaatcaatacatcaatgcatcctcaaaaaaaaaaaaaaaaaaaaaaaccggctaaaa

SEQ ID NO: 318535 - DNA, 4033 bp, Homo sapiens
agacttagacacccggttattgtggcaagctgaagactccttgtcaatgcgagatgagagatgctaaatgtggaaaaatccagtgtcaaggaggtgccagccggccagtcattggtaccaatgccgtttccatagaaacaaacatccccctgcagcaaggaggccggattctgtgccgggggacccacgtgtacttgggcgatgacatgccggacccagggcttgtgcttgcaggcacaaagtgtgcagatggaaaaatctgcctgaatcgtcaatgtcaaaatattagtgtctttggggttcacgagtgtgcaatgcagtgccacggcagaggggtgtgcaacaacaggaagaactgccactgcgaggcccactgggcacctcccttctgtgacaagtttggctttggaggaagcacagacagcggccccatccggcaagcagataaccaaggtttaaccataggaattctggtgaccatcctgtgtcttcttgctgccggatttgtggtttatctcaaaaggaagaccttgatacgactgctgtttacaaataagaagaccaccattgaaaaactaaggtgtgtgcgcccttcccggccaccccgtggcttccaaccctgtcaggctcacctcggccaccttggaaaaggcctgatgaggaagccgccagattcctacccaccgaaggacaatcccaggagattgctgcagtgtcagaatgttgacatcagcagacccctcaacggcctgaatgtccctcagccccagtcaactcagcgagtgcttcctcccctccaccgggctccacgtgcacctagcgtccctgccagacccctgccagccaagcctgcacttaggcaggcccaggggacctgtaagccaaacccccctcagaagcctctgcctgcagatcctctggccagaacaactcggctcactcatgccttggccaggaccccaggacaatgggagactgggctccgcctggcacccctcagacctgctccacaatatccacaccaagtgcccagatccacccacaccgcctatattaagtgagaagccgacaccttttttcaacagtgaagacagaagtttgcactatctttcagctccagttggagttttttgtaccaacttttaggattttttttaatgtttaaaacatcattactataagaactttgagctactgccgtcagtgctgtgctgtgctatggtgctctgtctacttgctcaggtacttgtaaattattaatttatgcagaatgttgattacagtgcagtgcgctgtagtaggcatttttaccatcactgagttttccatggcaggaaggcttgttgtgcttttagtattttagtgaacttgaaatatcctgcttgatgggattctggacaggatgtgtttgctttctgatcaaggccttattggaaagcagtcccccaactacccccagctgtgcttatggtaccagatgcagctcaagagatcccaagtagaacctcagttgattttctggattccccatctcaggccagagccaaggggcttcaggtccaggctgtgtttggctttcagggaggccctgtgccccttgacaactggcaggcaggctcccagggacagctgggagaaatctggcttctggccaggaagctttggtgagaacctgggttgcagacaggaatcttaaggtgtagccacaccaggatagagactggaacactagacaagccagaacttgaccctgagctgaccagccgtgagcatgtttggaaggggtctgtagtgtcactcaaggcggtgcttgatagaaatgccaagcacttctttttctcgctgtcctttctagagcactgccaccagtaggttatttagcttgggaaaggtggtgtttctgtaagaaacctactgcccaggcactgcaaaccgccacctccctatactgcttggagctgagcaaatcaccacaaactgtaatacaatgatcctgtattcagacagatgaggctttccatgggaccacaactattttcagatgtgaaccattaaccagatctagtcaatcaagtctgtttactgcaaggttcaacttattaacaattaggcagactctttatgcttgcaaaaactacaaccaatggaatgtgatgttcatgggtatagttcatgtctgctatcattattcgtagatattggacaaagaaccttctctatggggcatcctctttttccaacttggctgcaggaatctttaaaagatgcttttaacagagtctgaacctatttcttaaacacttgcaacctacctgttgagcatcacagaatgtgataaggaaatcaacttgcttatcaacttcctaaatattatgagatgctggcttgggcagcatccccttgaactcttcactcttcaaatgcctgactagggagccatgtttcacaaggtctttaaagtgactaatggcatgagaaatacaaaaatactcagataaggtaaaatgccatgatgcctctgtcttctggactggttttcacattagaagacaattgacaacagttacataattcactctgagtgttttatgagaaagccttcttttgggggtcaacagttttcctatgctttgaaacagaaaaatatgtaccaagaatcttggtttgccttccagaaaacaaaactgcatttcactttcccggtgttccccactgtatctaggcaacatagtattcatgactatggataaactaaacacgtgacacaaacacacacaaaagggaacccagctctaatacattccaactcgtatagcatgcatctgtttattctatagttattaagttctttaaaatgtaaagccatgctggaaaataatactgctgagatacatacagaattactgtaactgattacacttggtaattgtactaaagccaaacatatatatactattaaaaaggtttacagaattttatggtgcattacgtgggcattgtctttttagatgcccaaatccttagatctggcatgttagcccttcctccaattataagaggatatgaactgagtttttcttttgttgtttgttcttagctgtaattcctatgcttctatttcagagagccaggagagtttgatattaaaggaggttaaaactgtgatcttatgccatgtcatcaatggccacttaggggccatggctgatgacacattcttatctctacagtactaatgtgttattatagagccatgcattttatttctgaataagaacatatttaaactaatattcccttacaatatggacagtattaatccttccaagatgcagtatttatcaagtgaagcatatttagcagcaaattccattttaacataacttaggaaccaataaccagggtgttttgtggttgggggaggcacggggtggagtattcttttttatatcctcaaaacaaaaaaaatcaatacttatatttcaatggcaatctagtatttttttaaaagactgtataggcatgaataatagaggtggtttgagttttgtagggccatcacctggaaagtcaatgtgactagacacaaagtagcccagaggctacttttcttcctacagcttattatagttgtaggttctatgacctcacttcatgggttccaggcaattccgctgaaaggtttgtctcctgaaattttttaagtttgttttcctgacacatgtaatcagatgtgtagcaaccgagggaaacgaagcctaacattctccattgtggaaatacacacaggaggttacacttcacagcgtggatttttccagcttacacatgtgggatgacatcacagaaaccacaaaagcagcaaattaaactgtaggagagtcaatactcctgacgagtctcggggggggcatttttatgccttcttaactttatgagaattctcaggctgaactataggccattgttcccaggcaaatcaatacatcaatgcatcctcaaaaaaaaaaaaaaaaaaaaaaaccggctaaaa

SEQ ID NO: 318536 - DNA, 4770 bp, Homo sapiens
gactatatattcctgtttagcaagttctagagttgtcagaaatgaatgatggtaacatagattgaacctcaaacatggcatctgaagtaagacagtttattagtacatcactcacgggtgtactctcttcatttctgttgcttcagagttcactttgccataaacgtcacaacttgatacctcccatatttcattgtaactgcctccttctgtgagccccatgtgttttgtttcagataaccaaggtttaaccataggaattctggtgaccatcctgtgtcttcttgctgccggatttgtggtttatctcaaaaggaagaccttgatacgactgctgtttacaaataagaagaccaccattgaaaaactaaggtaccctgggtttagcttgtcatctgttctagaaatggtggctcagaggctgggtgcggtggctcaagcctgtaatcccagcactttgggaggctgaggcgggcggatcacgaggtcaggagatcgagaccacggtgaaaccccgtctctactaaaaatacaaaatatcagccgggcgcggtggtgggtgcctgtagtcccatctactcgggaggctgaggcatgagaatggcgtgaacccgggaggcggagcttgcagtgagttgcgatcactccactgcactccagcctgggcgagagagcaagactccatctcaaaaaaaaaaaaaaaaaaaaaaaaaagaaatggtgtctcagaaaatgtacagcaaactgcttctcacttcatttttttagcaaaggtcagattttctggatcataaacctgggacttggttcttttttggggggtttcttgttttaaatttctgccagatcagctgcctcctttacttcccttcaaacaacaatgtgctgcttattacataagctagcagggtgtcaggaaattccactgatgtgttttctcccacccttatattagtaatttttatacaacatggagacattgaaatattttcatcagatggggtagcttttgatccaaatatattcaaagacattatcgctgaaatgccagcttcatacaaatcatcttccaggtgtcactacactgcatttctatggagcgtgagaactaatttgacaaaatagaggttttgagggaaaaaccagtatttattttttaatctcctaagagtgttattaggtaatttttcctttgcatgtttagcacactgagttaagtaaactgtcttttgagtgccactatgagcaaagtgtaaaaagtcaagtcagtgagaaggggaaacacgcttggtcagcaggtatgggattctgttgcaggtgtgtgcgcccttcccggccaccccgtggcttccaaccctgtcaggctcacctcggccaccttggaaaaggcctgatgaggaagccgccagattcctacccaccgaaggacaatcccaggagattgctgcagtgtcagaatgttgacatcagcagacccctcaacggcctgaatgtccctcagccccagtcaactcagcgagtgcttcctcccctccaccgggctccacgtgcacctagcgtccctgccagacccctgccagccaagcctgcacttaggcaggcccaggggacctgtaagccaaacccccctcagaagcctctgcctgcagatcctctggccagaacaactcggctcactcatgccttggccaggaccccaggacaatgggagactgggctccgcctggcacccctcagacctgctccacaatatccacaccaagtgcccagatccacccacaccgcctatattaagtgagaagccgacaccttttttcaacagtgaagacagaagtttgcactatctttcagctccagttggagttttttgtaccaacttttaggattttttttaatgtttaaaacatcattactataagaactttgagctactgccgtcagtgctgtgctgtgctatggtgctctgtctacttgctcaggtacttgtaaattattaatttatgcagaatgttgattacagtgcagtgcgctgtagtaggcatttttaccatcactgagttttccatggcaggaaggcttgttgtgcttttagtattttagtgaacttgaaatatcctgcttgatgggattctggacaggatgtgtttgctttctgatcaaggccttattggaaagcagtcccccaactacccccagctgtgcttatggtaccagatgcagctcaagagatcccaagtagaacctcagttgattttctggattccccatctcaggccagagccaaggggcttcaggtccaggctgtgtttggctttcagggaggccctgtgccccttgacaactggcaggcaggctcccagggacagctgggagaaatctggcttctggccaggaagctttggtgagaacctgggttgcagacaggaatcttaaggtgtagccacaccaggatagagactggaacactagacaagccagaacttgaccctgagctgaccagccgtgagcatgtttggaaggggtctgtagtgtcactcaaggcggtgcttgatagaaatgccaagcacttctttttctcgctgtcctttctagagcactgccaccagtaggttatttagcttgggaaaggtggtgtttctgtaagaaacctactgcccaggcactgcaaaccgccacctccctatactgcttggagctgagcaaatcaccacaaactgtaatacaatgatcctgtattcagacagatgaggctttccatgggaccacaactattttcagatgtgaaccattaaccagatctagtcaatcaagtctgtttactgcaaggttcaacttattaacaattaggcagactctttatgcttgcaaaaactacaaccaatggaatgtgatgttcatgggtatagttcatgtctgctatcattattcgtagatattggacaaagaaccttctctatggggcatcctctttttccaacttggctgcaggaatctttaaaagatgcttttaacagagtctgaacctatttcttaaacacttgcaacctacctgttgagcatcacagaatgtgataaggaaatcaacttgcttatcaacttcctaaatattatgagatgctggcttgggcagcatccccttgaactcttcactcttcaaatgcctgactagggagccatgtttcacaaggtctttaaagtgactaatggcatgagaaatacaaaaatactcagataaggtaaaatgccatgatgcctctgtcttctggactggttttcacattagaagacaattgacaacagttacataattcactctgagtgttttatgagaaagccttcttttgggggtcaacagttttcctatgctttgaaacagaaaaatatgtaccaagaatcttggtttgccttccagaaaacaaaactgcatttcactttcccggtgttccccactgtatctaggcaacatagtattcatgactatggataaactaaacacgtgacacaaacacacacaaaagggaacccagctctaatacattccaactcgtatagcatgcatctgtttattctatagttattaagttctttaaaatgtaaagccatgctggaaaataatactgctgagatacatacagaattactgtaactgattacacttggtaattgtactaaagccaaacatatatatactattaaaaaggtttacagaattttatggtgcattacgtgggcattgtctttttagatgcccaaatccttagatctggcatgttagcccttcctccaattataagaggatatgaactgagtttttcttttgttgtttgttcttagctgtaattcctatgcttctatttcagagagccaggagagtttgatattaaaggaggttaaaactgtgatcttatgccatgtcatcaatggccacttaggggccatggctgatgacacattcttatctctacagtactaatgtgttattatagagccatgcattttatttctgaataagaacatatttaaactaatattcccttacaatatggacagtattaatccttccaagatgcagtatttatcaagtgaagcatatttagcagcaaattccattttaacataacttaggaaccaataaccagggtgttttgtggttgggggaggcacggggtggagtattcttttttatatcctcaaaacaaaaaaaatcaatacttatatttcaatggcaatctagtatttttttaaaagactgtataggcatgaataatagaggtggtttgagttttgtagggccatcacctggaaagtcaatgtgactagacacaaagtagcccagaggctacttttcttcctacagcttattatagttgtaggttctatgacctcacttcatgggttccaggcaattccgctgaaaggtttgtctcctgaaattttttaagtttgttttcctgacacatgtaatcagatgtgtagcaaccgagggaaacgaagcctaacattctccattgtggaaatacacacaggaggttacacttcacagcgtggatttttccagcttacacatgtgggatgacatcacagaaaccacaaaagcagcaaattaaactgtaggagagtcaatactcctgacgagtctcggggggggcatttttatgccttcttaactttatgagaattctcaggctgaactataggccattgttcccaggcaaatcaatacatcaatgcatcctcaaaaaaaaaaaaaaaaaaaaaaaccggctaaaa

SEQ ID NO: 318537 - DNA, 1845 bp, Homo sapiens
actgctggccgtggatccatttcacaggcctgccttctctcactaacgctcttcctagtccccgggccaactcggacagtttgctcatttattgcaacggtcaaggctggcttgtgccagaacggcgcgcgcgcgcgcacgcacgcacacacacggggggaaacttttttaaaaatgaaaggctagaagagctcagcggcggcgcgggcgctgcgcgagggctccggagctgactcgccgaggcaggaaatccctccggtcgcgacgcccggccccggctcggcgcccgcgtgggatggtgcagcgctcgccgccgggcccgagagctgctgcactgaaggccggcgacgatggcagcgcgcccgctgcccgtgtcccccgcccgcgccctcctgctcgccctggccggtgctctgctcgcgccctgcgaggcccgaggggtgagcttatggaaccaaggaagagctgatgaagttgtcagtgcctctgttcggagtggggacctctggatcccagtgaagagcttcgactccaagaatcatccagaagtgctgaatattcgactacaacgggaaagcaaagaactgatcataaatctggaaagaaatgaaggtctcattgccagcagtttcacggaaacccactatctgcaagacggtactgatgtctccctcgctcgaaattacacgggtcactgttactaccatggacatgtacggggatattctgattcagcagtcagtctcagcacgtgttctggtctcaggggacttattgtgtttgaaaatgaaagctatgtcttagaaccaatgaaaagtgcaaccaacagatacaaactcttcccagcgaagaagctgaaaagcgtccggggatcatgtggatcacatcacaacacaccaaacctcgctgcaaagaatgtgtttccaccaccctctcagacatgggcaagaaggcataaaagagagaccctcaaggcaactaagtatgtggagctggtgatcgtggcagacaaccgagagtttcagaggcaaggaaaagatctggaaaaagttaagcagcgattaatagagattgctaatcacgttgacaagttttacagaccactgaacattcggatcgtgttggtaggcgtggaagtgtggaatgacatggacaaatgctctgtaagtcaggacccattcaccagcctccatgaatttctggactggaggaagatgaagcttctacctcgcaaatcccatgacaatgcgcagcttgtcagtggggtttatttccaagggaccaccatcggcatggccccaatcatgagcatgtgcacggcagaccagtctgggggaattgtcatggaccattcagacaatccccttggtgcagccgtgaccctggcacatgagctgggccacaatttcgggatgaatcatgacacactggacaggggctgtagctgtcaaatggcggttgagaaaggaggctgcatcatgaacgcttccaccgggtacccatttcccatggtgttcagcagttgcagcaggaaggacttggagaccagcctggagaaaggaatgggggtgtgcctgtttaacctgccggaagtcagggagtctttcgggggccagaagtgtgggaacagatttgtggaagaaggagaggagtgtgactgtggggagccagaggtaagaaccattcccagaacaaggatacaagaagacttgtatcctcggctaggcaaagaagagagaacttggaggaactgtacagccagatgaaagtactagaactcaggaaggaagagtcctatctgcccatcctgaacaagccccgtgagctagggtggctttcttgaat

SEQ ID NO: 318538 - DNA, 1180 bp, Homo sapiens
aaaatgatcagcagaataataaggagacaaagaaaaggagtgaaagaaaaataggttgggtagtttggtgagatgagcatatccatagtgtttgttccttccaaattttgaatacgggcttcatagcaagctgttcactactaccaacaccttgtgcaatgcagtgccacggcagaggggtgtgcaacaacaggaagaactgccactgcgaggcccactgggcacctcccttctgtgacaagtttggctttggaggaagcacagacagcggccccatccggcaagcagaagcaaggcaggaagctgcagagtccaacagggagcgcggccagggccaggagcccgtgggatcgcaggagcatgcgtctactgcctcactgacactcatctgagccctcccatgacatggagaccgtgaccagtgctgctgcagaggaggtcacgcgtccccaaggcctcctgtgactggcagcattgactctgtggctttgccatcgtttccatgacaacagacacaacacagttctcggggctcaggaggggaagtccagcctaccaggcacgtctgcagaaacagtgcaaggaagggcagcgacttcctggttgagcttctgctaaaacatggacatgcttcagtgctgctcctgagagagtagcaggttaccactctggcaggccccagccctgcagcaaggaggaagaggactcaaaagtctggcctttcactgagcccccacagcagtgggggagaagcaagggttgggcccagtgtcccctttccccagtgacacctcagccttggcagccctgatgactggtctctggctgcaacttaatgctctgatatggcttttagcatttattatatgaaaatagcagggttttagtttttaatttatcagagaccctgccacccattccatctccatccaagcaaactgaatggcattgaaacaaactggagaagaaggtaggagaaagggcggtgaactctggctctttgctgtggacatgcgtgaccagcagtactcaggtttgagggtttgcagaaagccagggaacccacagagtcaccaacccttcatttaacaagtaagaatgttaaaaagtgaaaacaatgtaagagcctaactccatcccccgtggccattactgcataaaatagagtgcatttgaaata

SEQ ID NO: 318539 - DNA, 1528 bp, Homo sapiens
atccctgcccgatcttctctgaggctccttgctctctgctttgactgagtggctgagtttgccagttccttagcctgcgacacttttcttaactaaggtcatttctatagtgaactgctgaatgggtatgaatgtcatcactgtatcaaagtactttgtaaaggccgacatctgtgtggtagggtgacaaggtgtgaagtttaatgccttttaaaaatcttactggaaagacacccacctcttagtaaaggtgacagtcacggcagcagtgggagtcattgcaacagcttttgcatatggaatgatgtgtgcaggtgctgtgtggtgcattttatgcccatgatgtcatcccctccttatacaactctgaagaaggtggtatgattcttttctcacatacctaggacctgaggctcagggaagttaagtaatttgcctaatgtgatctcgctaagatttacacacacacaggtctgcctgtcccccaagaagctcttagtagcagctgtgcttgaactcgtggccatttctcctcggatgacctttagaaatggtttactggtgcggtgctgttttctctgagttcttattgggcaattcaggggcaagtctaaatgatgcctcttttcgagggaaaagcaaggcaggaagctgcagagtccaacagggagcgcggccagggccaggagcccgtgggatcgcaggagcatgcgtctactgcctcactgacactcatctgagccctcccatgacatggagaccgtgaccagtgctgctgcagaggaggtcacgcgtccccaaggcctcctgtgactggcagcattgactctgtggctttgccatcgtttccatgacaacagacacaacacagttctcggggctcaggaggggaagtccagcctaccaggcacgtctgcagaaacagtgcaaggaagggcagcgacttcctggttgagcttctgctaaaacatggacatgcttcagtgctgctcctgagagagtagcaggttaccactctggcaggccccagccctgcagcaaggaggaagaggactcaaaagtctggcctttcactgagcccccacagcagtgggggagaagcaagggttgggcccagtgtcccctttccccagtgacacctcagccttggcagccctgatgactggtctctggctgcaacttaatgctctgatatggcttttagcatttattatatgaaaatagcagggttttagtttttaatttatcagagaccctgccacccattccatctccatccaagcaaactgaatggcattgaaacaaactggagaagaaggtaggagaaagggcggtgaactctggctctttgctgtggacatgcgtgaccagcagtactcaggtttgagggtttgcagaaagccagggaacccacagagtcaccaacccttcatttaacaagtaagaatgttaaaaagtgaaaacaatgtaagagcctaactccatcccccgtggccattactgcataaaatagagtgcatttgaaata

SEQ ID NO: 318540 - DNA, 764 bp, Homo sapiens
tagaggatccccggtgtttatcgatgccacagatcaaggcctcctgtgactggcagcattgactctgtggctttgccatcgtttccatgacaacagacacaacacagttctcggggctcaggaggggaagtccagcctaccaggcacgtctgcagaaacagtgcaaggaagggcagcgacttcctggttgagcttctgctaaaacatggacatgcttcagtgctgctcctgagagagtagcaggttaccactctggcaggccccagccctgcagcaaggaggaagaggactcaaaagtctggcctttcactgagcccccacagcagtgggggagaagcaagggttgggcccagtgtcccctttccccagtgacacctcagccttggcagccctgatgactggtctctggctgcaacttaatgctctgatatggcttttagcatttattatatgaaaatagcagggttttagtttttaatttatcagagaccctgccacccattccatctccatccaagcaaactgaatggcattgaaacaaactggagaagaaggtaggagaaagggcggtgaactctggctctttgctgtggacatgcgtgaccagcagtactcaggtttgagggtttgcagaaagccagggaacccacagagtcaccaacccttcatttaacaagtaagaatgttaaaaagtgaaaacaatgtaagagcctaactccatcccccgtggccattactgcataaaatagagtgcatttgaaata

SEQ ID NO: 318541 - DNA, 1077 bp, Homo sapiens
actgctggccgtggatccatttcacaggcctgccttctctcactaacgctcttcctagtccccgggccaactcggacagtttgctcatttattgcaacggtcaaggctggcttgtgccagaacggcgcgcgcgcgcgcacgcacgcacacacacggggggaaacttttttaaaaatgaaaggctagaagagctcagcggcggcgcgggcgctgcgcgagggctccggagctgactcgccgaggcaggaaatccctccggtcgcgacgcccggccccggctcggcgcccgcgtgggatggtgcagcgctcgccgccgggcccgagagctgctgcactgaaggccggcgacgatggcagcgcgcccgctgcccgtgtcccccgcccgcgccctcctgctcgccctggccggtgctctgctcgcgccctgcgaggcccgaggggtgagcttatggaaccaaggaagagctgatgaagttgtcagtgcctctgttcggagtggggacctctggatcccagtgaagagcttcgactccaagaatcatccagaagtgctgaatattcgactacaacgggaaagcaaagaactgatcataaatctggaaagaaatgaaggtctcattgccagcagtttcacggaaacccactatctgcaagacggtactgatgtctccctcgctcgaaattacacgggtcactgttactaccatggacatgtacggggatattctgattcagcagtcagtctcagcacgtgttctggtctcaggggacttattgtgtttgaaaatgaaagctatgtcttagaaccaatgaaaagtgcaaccaacagatacaaactcttcccagcgaagaagctgaaaagcgtccggggatcatgtggatcacatcacaacacaccaaacctcgctgcaaagaatgtgtttccaccaccctctcagacatgggcaagaagggaaggggaggaactctcccatctggtactgtggctcaccttgacatggctgcttggtggcagaacactgtatcctaatcccaaggaacagagcttgaaaattacccccccaacctctaccctta

SEQ ID NO: 318542 - DNA, 1278 bp, Homo sapiens
aagctgaaatagtagacaagttcaaggcaggcttagctaaattcacagatggacttaatgagggcttaggaagagcatctccaagggctgctctgaaagagggagtttagggtggaggagaaatcgtgttgagactggcgcatccggtatattcctgtgttcatcacacaaacaactggcaaacagaatgttcatcatatccccatcttcaagtctctgaggttttccataccaggaggaatgagcttggtctgacagtttctgcaagaacgctggaagtatgtaagtattgggtgggagtaaggggggatgtgatgtagaagtggtttcttcaaatgtttttatgcccttgccaaactcagaacttaaccatgataatgacattgtctggaggggtgtctaattttgctcaccatgagcagggaatggttgctgtgtaggagcaagtcctaattatagtgttacagaaactcttctcaagattagcagaggaaaacttaaaaccatcatgggttggggtatgcaaaggggaaattccttgtaggccttgttaatttcttaaaggaaaaaatgaattagtttaagtttctcacctttctcaggagaggccatgttggctgaaaatggtttgtctttgaacttcttatgattgtttgttcatctaaataaatttgacagctcttcatgaagccatgaactctcgggtttggaatgatttcgttagcagtcatttactccatatgccaccagcagcagccacatcactgctacaatcacgaccaccattgctaacatcaccatctccacaatcgccaccaccacctcctccacccaacatcatcaccatttctctcatgaccatcatcaccatatcactgccactgccgccaccgtcatcactacagccctcaccatcaccccactattgtaaccactgccatctccacagctactgccaccaccgtggccacaccagtatccacatcgctaccagcatcactgctaccatccccacccctatcattatccccaccaccaccatcacatcagcaaatgcttgagtgcctaaaatgtgtcagccactcatattctgatcctccctcttttctccatgaaggagtcatgcggcttgacagggtgctgtctcgccaggtggcatgttgcattatagggtagctttgattattacaaactccctccttgtacagagccaaactgcttgcatgcagttaccaactttgtatttctgcggttaaggtccttattttgtaggataac

SEQ ID NO: 318543 - DNA, 906 bp, Homo sapiens
catatctccactactgggtagtttcttcagcaagtcagagcctctgaggtctccccttgggcaacgctgtttacccctttcccttcctccatttgtttagccccctctcaaccccgaacacggatatatccgtgttcggggttggggtatgcaaaggggaaattccttgtaggccttgttaatttcttaaaggaaaaaatgaattagtttaagtttctcacctttctcaggagaggccatgttggctgaaaatggtttgtctttgaacttcttatgattgtttgttcatctaaataaatttgacagctcttcatgaagccatgaactctcgggtttggaatgatttcgttagcagtcatttactccatatgccaccagcagcagccacatcactgctacaatcacgaccaccattgctaacatcaccatctccacaatcgccaccaccacctcctccacccaacatcatcaccatttctctcatgaccatcatcaccatatcactgccactgccgccaccgtcatcactacagccctcaccatcaccccactattgtaaccactgccatctccacagctactgccaccaccgtggccacaccagtatccacatcgctaccagcatcactgctaccatccccacccctatcattatccccaccaccaccatcacatcagcaaatgcttgagtgcctaaaatgtgtcagccactcatattctgatcctccctcttttctccatgaaggagtcatgcggcttgacagggtgctgtctcgccaggtggcatgttgcattatagggtagctttgattattacaaactccctccttgtacagagccaaactgcttgcatgcagttaccaactttgtatttctgcggttaaggtccttattttgtaggataac

SEQ ID NO: 318544 - DNA, 267 bp, Homo sapiens
caggggcctctgctggctcctggtaagtgaccctgcctaaccctatgtttattgcaggggacctgtaagccaaacccccctcagaagcctctgcctgcagatcctctggccagaacaactcggctcactcatgccttggccaggaccccaggacaatgggagactgggctccgcctggcacccctcaggtttgtgtgacatgccatgcccatctctttctctctcaaactcttgtgggaccaaccacgactaatccaagccaggaca

SEQ ID NO: 318545 - DNA, 800 bp, Homo sapiens
  misc_feature (709)..(709): n is a, c, g, or t
  misc_feature (757)..(757): n is a, c, g, or t
  misc_feature (769)..(769): n is a, c, g, or t
actgctggccgtggatccatttcacaggcctgccttctctcactaacgctcttcctagtccccgggccaactcggacagtttgctcatttattgcaacggtcaaggctggcttgtgccagaacggcgcgcgcgcgcgcacgcacgcacacacacggggggaaacttttttaaaaatgaaaggctagaagagctcagcggcggcgcgggcgctgcgcgagggctccggagctgactcgccgaggcaggaaatccctccggtcgcgacgcccggccccggctcggcgcccgcgtgggatggtgcagcgctcgccgccgggcccgagagctgctgcactgaaggccggcgacgatggcagcgcgcccgctgcccgtgtcccccgcccgcgccctcctgctcgccctggccggtgctctgctcgcgccctgcgaggcccgaggggtgagcttatggaaccaaggaagagctgatgaagttgtcagtgcctctgttcggagtggggacctctggatcccagtgaagagcttcgactccaagaatcatccagaagtgctgaatattcgactacaacgggaaagcaaagaactgatcataaatctggaaagaaatgaaggtctcattgccagcagtttcacggaaacccactatctgcaagacggtactgatgtctccctcgctcgaaattacacggtactttactacatgaattncgggaatctattacatcattacactgtctgttaggatattttaataantttaacataatnacaatcaattcacaactaactcggtatgtat

SEQ ID NO: 318546 - DNA, 563 bp, Homo sapiens
gcgttggcactgtacggaatggatgtcgggatggaactgaatgtgcctcacttgacactgcatatctgagttttttgatatgcattgttcattgagaccaccagtgaacacctgggcagatgtggccagtgggtgccttcttgtgggcacaagaagggcagacaaagccattccatgccctgtgacttactgttctgggctctcctttctcaggtacccatttcccatggtgttcagcagttgcagcaggaaggacttggagaccagcctggagaaaggaatgggggtgtgcctgtttaacctgccggaagtcagggagtctttcgggggccagaagtgtgggaacagatttgtggaagaaggagaggagtgtgactgtggggagccagaggtaagaaccattcccagaacaaggatacaagaagacttgtatcctcggctaggcaaagaagagagaacttggaggaactgtacagccagatgaaagtactagaactcaggaaggaagagtcctatctgcccatcctgaacaagccccgtgagctagggtggctttcttgaat

SEQ ID NO: 318547 - DNA, 412 bp, Homo sapiens
tcggtctaccttgtctctgaaactcgtggcagacaaccgaggtttcagaggcaaggaaaagatctggaaaaagttaagcagcgattaatagagattgctaatcacgttgacaagttttacagaccactgaacattcggatcgtgttggtaggcttggggatgtcagttaaattcagtctcagctccaaaggtgattcagagatgaatcagtaactgctttaatgatattaacatctcagaatcaaaaagaaccaagtattgtagatggcttaaaggagaaaagtatatcccttcatataccttgtttattctttatcaaaacattccagaatcctaactctgaaaacattaaccaattgctgtcactgacaaatgggacctgaggcctgtaaatacaaggatagagtcctat

SEQ ID NO: 318548 - DNA, 6988 bp, Homo sapiens
actgctggccgtggatccatttcacaggcctgccttctctcactaacgctcttcctagtccccgggccaactcggacagtttgctcatttattgcaacggtcaaggctggcttgtgccagaacggcgcgcgcgcgcgcacgcacgcacacacacggggggaaacttttttaaaaatgaaaggctagaagagctcagcggcggcgcgggcgctgcgcgagggctccggagctgactcgccgaggcaggaaatccctccggtcgcgacgcccggccccggctcggcgcccgcgtgggatggtgcagcgctcgccgccgggcccgagagctgctgcactgaaggccggcgacgatggcagcgcgcccgctgcccgtgtcccccgcccgcgccctcctgctcgccctggccggtgctctgctcgcgccctgcgaggcccgaggggtgagcttatggaaccaaggaagagctgatgaagttgtcagtgcctctgttcggagtggggacctctggatcccagtgaagagcttcgactccaagaatcatccagaagtgctgaatattcgactacaacgggaaagcaaagaactgatcataaatctggaaagaaatgaaggtctcattgccagcagtttcacggaaacccactatctgcaagacggtactgatgtctccctcgctcgaaattacacgggtcactgttactaccatggacatgtacggggatattctgattcagcagtcagtctcagcacgtgttctggtctcaggggacttattgtgtttgaaaatgaaagctatgtcttagaaccaatgaaaagtgcaaccaacagatacaaactcttcccagcgaagaagctgaaaagcgtccggggatcatgtggatcacatcacaacacaccaaacctcgctgcaaagaatgtgtttccaccaccctctcagacatgggcaagaaggcataaaagagagaccctcaaggcaactaagtatgtggagctggtgatcgtggcagacaaccgagagtttcagaggcaaggaaaagatctggaaaaagttaagcagcgattaatagagattgctaatcacgttgacaagttttacagaccactgaacattcggatcgtgttggtaggcgtggaagtgtggaatgacatggacaaatgctctgtaagtcaggacccattcaccagcctccatgaatttctggactggaggaagatgaagcttctacctcgcaaatcccatgacaatgcgcagcttgtcagtggggtttatttccaagggaccaccatcggcatggccccaatcatgagcatgtgcacggcagaccagtctgggggaattgtcatggaccattcagacaatccccttggtgcagccgtgaccctggcacatgagctgggccacaatttcgggatgaatcatgacacactggacaggggctgtagctgtcaaatggcggttgagaaaggaggctgcatcatgaacgcttccaccgggtacccatttcccatggtgttcagcagttgcagcaggaaggacttggagaccagcctggagaaaggaatgggggtgtgcctgtttaacctgccggaagtcagggagtctttcgggggccagaagtgtgggaacagatttgtggaagaaggagaggagtgtgactgtggggagccagaggaatgtatgaatcgctgctgcaatgccaccacctgtaccctgaagccggacgctgtgtgcgcacatgggctgtgctgtgaagactgccagctgaagcctgcaggaacagcgtgcagggactccagcaactcctgtgacctcccagagttctgcacaggggccagccctcactgcccagccaacgtgtacctgcacgatgggcactcatgtcaggatgtggacggctactgctacaatggcatctgccagactcacgagcagcagtgtgtcacgctctggggaccaggtgctaaacctgcccctgggatctgctttgagagagtcaattctgcaggtgatccttatggcaactgtggcaaagtctcgaagagttcctttgccaaatgcgagatgagagatgctaaatgtggaaaaatccagtgtcaaggaggtgccagccggccagtcattggtaccaatgccgtttccatagaaacaaacatccccctgcagcaaggaggccggattctgtgccgggggacccacgtgtacttgggcgatgacatgccggacccagggcttgtgcttgcaggcacaaagtgtgcagatggaaaaatctgcctgaatcgtcaatgtcaaaatattagtgtctttggggttcacgagtgtgcaatgcagtgccacggcagaggggtgtgcaacaacaggaagaactgccactgcgaggcccactgggcacctcccttctgtgacaagtttggctttggaggaagcacagacagcggccccatccggcaagcagataaccaaggtttaaccataggaattctggtgaccatcctgtgtcttcttgctgccggatttgtggtttatctcaaaaggaagaccttgatacgactgctgtttacaaataagaagaccaccattgaaaaactaaggtaccctgggtttagcttgtcatctgttctagaaatggtggctcagaggctgggtgcggtggctcaagcctgtaatcccagcactttgggaggctgaggcgggcggatcacgaggtcaggagatcgagaccacggtgaaaccccgtctctactaaaaatacaaaatatcagccgggcgcggtggtgggtgcctgtagtcccatctactcgggaggctgaggcatgagaatggcgtgaacccgggaggcggagcttgcagtgagttgcgatcactccactgcactccagcctgggcgagagagcaagactccatctcaaaaaaaaaaaaaaaaaaaaaaaaaagaaatggtgtctcagaaaatgtacagcaaactgcttctcacttcatttttttagcaaaggtcagattttctggatcataaacctgggacttggttcttttttggggggtttcttgttttaaatttctgccagatcagctgcctcctttacttcccttcaaacaacaatgtgctgcttattacataagctagcagggtgtcaggaaattccactgatgtgttttctcccacccttatattagtaatttttatacaacatggagacattgaaatattttcatcagatggggtagcttttgatccaaatatattcaaagacattatcgctgaaatgccagcttcatacaaatcatcttccaggtgtcactacactgcatttctatggagcgtgagaactaatttgacaaaatagaggttttgagggaaaaaccagtatttattttttaatctcctaagagtgttattaggtaatttttcctttgcatgtttagcacactgagttaagtaaactgtcttttgagtgccactatgagcaaagtgtaaaaagtcaagtcagtgagaaggggaaacacgcttggtcagcaggtatgggattctgttgcaggtgtgtgcgcccttcccggccaccccgtggcttccaaccctgtcaggctcacctcggccaccttggaaaaggcctgatgaggaagccgccagattcctacccaccgaaggacaatcccaggagattgctgcagtgtcagaatgttgacatcagcagacccctcaacggcctgaatgtccctcagccccagtcaactcagcgagtgcttcctcccctccaccgggctccacgtgcacctagcgtccctgccagacccctgccagccaagcctgcacttaggcaggcccaggggacctgtaagccaaacccccctcagaagcctctgcctgcagatcctctggccagaacaactcggctcactcatgccttggccaggaccccaggacaatgggagactgggctccgcctggcacccctcagacctgctccacaatatccacaccaagtgcccagatccacccacaccgcctatattaagtgagaagccgacaccttttttcaacagtgaagacagaagtttgcactatctttcagctccagttggagttttttgtaccaacttttaggattttttttaatgtttaaaacatcattactataagaactttgagctactgccgtcagtgctgtgctgtgctatggtgctctgtctacttgctcaggtacttgtaaattattaatttatgcagaatgttgattacagtgcagtgcgctgtagtaggcatttttaccatcactgagttttccatggcaggaaggcttgttgtgcttttagtattttagtgaacttgaaatatcctgcttgatgggattctggacaggatgtgtttgctttctgatcaaggccttattggaaagcagtcccccaactacccccagctgtgcttatggtaccagatgcagctcaagagatcccaagtagaacctcagttgattttctggattccccatctcaggccagagccaaggggcttcaggtccaggctgtgtttggctttcagggaggccctgtgccccttgacaactggcaggcaggctcccagggacagctgggagaaatctggcttctggccaggaagctttggtgagaacctgggttgcagacaggaatcttaaggtgtagccacaccaggatagagactggaacactagacaagccagaacttgaccctgagctgaccagccgtgagcatgtttggaaggggtctgtagtgtcactcaaggcggtgcttgatagaaatgccaagcacttctttttctcgctgtcctttctagagcactgccaccagtaggttatttagcttgggaaaggtggtgtttctgtaagaaacctactgcccaggcactgcaaaccgccacctccctatactgcttggagctgagcaaatcaccacaaactgtaatacaatgatcctgtattcagacagatgaggctttccatgggaccacaactattttcagatgtgaaccattaaccagatctagtcaatcaagtctgtttactgcaaggttcaacttattaacaattaggcagactctttatgcttgcaaaaactacaaccaatggaatgtgatgttcatgggtatagttcatgtctgctatcattattcgtagatattggacaaagaaccttctctatggggcatcctctttttccaacttggctgcaggaatctttaaaagatgcttttaacagagtctgaacctatttcttaaacacttgcaacctacctgttgagcatcacagaatgtgataaggaaatcaacttgcttatcaacttcctaaatattatgagatgctggcttgggcagcatccccttgaactcttcactcttcaaatgcctgactagggagccatgtttcacaaggtctttaaagtgactaatggcatgagaaatacaaaaatactcagataaggtaaaatgccatgatgcctctgtcttctggactggttttcacattagaagacaattgacaacagttacataattcactctgagtgttttatgagaaagccttcttttgggggtcaacagttttcctatgctttgaaacagaaaaatatgtaccaagaatcttggtttgccttccagaaaacaaaactgcatttcactttcccggtgttccccactgtatctaggcaacatagtattcatgactatggataaactaaacacgtgacacaaacacacacaaaagggaacccagctctaatacattccaactcgtatagcatgcatctgtttattctatagttattaagttctttaaaatgtaaagccatgctggaaaataatactgctgagatacatacagaattactgtaactgattacacttggtaattgtactaaagccaaacatatatatactattaaaaaggtttacagaattttatggtgcattacgtgggcattgtctttttagatgcccaaatccttagatctggcatgttagcccttcctccaattataagaggatatgaactgagtttttcttttgttgtttgttcttagctgtaattcctatgcttctatttcagagagccaggagagtttgatattaaaggaggttaaaactgtgatcttatgccatgtcatcaatggccacttaggggccatggctgatgacacattcttatctctacagtactaatgtgttattatagagccatgcattttatttctgaataagaacatatttaaactaatattcccttacaatatggacagtattaatccttccaagatgcagtatttatcaagtgaagcatatttagcagcaaattccattttaacataacttaggaaccaataaccagggtgttttgtggttgggggaggcacggggtggagtattcttttttatatcctcaaaacaaaaaaaatcaatacttatatttcaatggcaatctagtatttttttaaaagactgtataggcatgaataatagaggtggtttgagttttgtagggccatcacctggaaagtcaatgtgactagacacaaagtagcccagaggctacttttcttcctacagcttattatagttgtaggttctatgacctcacttcatgggttccaggcaattccgctgaaaggtttgtctcctgaaattttttaagtttgttttcctgacacatgtaatcagatgtgtagcaaccgagggaaacgaagcctaacattctccattgtggaaatacacacaggaggttacacttcacagcgtggatttttccagcttacacatgtgggatgacatcacagaaaccacaaaagcagcaaattaaactgtaggagagtcaatactcctgacgagtctcggggggggcatttttatgccttcttaactttatgagaattctcaggctgaactataggccattgttcccaggcaaatcaatacatcaatgcatcctcaaaaaaaaaaaaaaaaaaaaaaaccggctaaaa

SEQ ID NO: 318549 - DNA, 3732 bp, Homo sapiens
actgctggccgtggatccatttcacaggcctgccttctctcactaacgctcttcctagtccccgggccaactcggacagtttgctcatttattgcaacggtcaaggctggcttgtgccagaacggcgcgcgcgcgcgcacgcacgcacacacacggggggaaacttttttaaaaatgaaaggctagaagagctcagcggcggcgcgggcgctgcgcgagggctccggagctgactcgccgaggcaggaaatccctccggtcgcgacgcccggccccggctcggcgcccgcgtgggatggtgcagcgctcgccgccgggcccgagagctgctgcactgaaggccggcgacgatggcagcgcgcccgctgcccgtgtcccccgcccgcgccctcctgctcgccctggccggtgctctgctcgcgccctgcgaggcccgaggggtgagcttatggaaccaaggaagagctgatgaagttgtcagtgcctctgttcggagtggggacctctggatcccagtgaagagcttcgactccaagaatcatccagaagtgctgaatattcgactacaacgggaaagcaaagaactgatcataaatctggaaagaaatgaaggtctcattgccagcagtttcacggaaacccactatctgcaagacggtactgatgtctccctcgctcgaaattacacgggtcactgttactaccatggacatgtacggggatattctgattcagcagtcagtctcagcacgtgttctggtctcaggggacttattgtgtttgaaaatgaaagctatgtcttagaaccaatgaaaagtgcaaccaacagatacaaactcttcccagcgaagaagctgaaaagcgtccggggatcatgtggatcacatcacaacacaccaaacctcgctgcaaagaatgtgtttccaccaccctctcagacatgggcaagaaggcataaaagagagaccctcaaggcaactaagtatgtggagctggtgatcgtggcagacaaccgagagtttcagaggcaaggaaaagatctggaaaaagttaagcagcgattaatagagattgctaatcacgttgacaagttttacagaccactgaacattcggatcgtgttggtaggcgtggaagtgtggaatgacatggacaaatgctctgtaagtcaggacccattcaccagcctccatgaatttctggactggaggaagatgaagcttctacctcgcaaatcccatgacaatgcgcagcttgtcagtggggtttatttccaagggaccaccatcggcatggccccaatcatgagcatgtgcacggcagaccagtctgggggaattgtcatggaccattcagacaatccccttggtgcagccgtgaccctggcacatgagctgggccacaatttcgggatgaatcatgacacactggacaggggctgtagctgtcaaatggcggttgagaaaggaggctgcatcatgaacgcttccaccgggtacccatttcccatggtgttcagcagttgcagcaggaaggacttggagaccagcctggagaaaggaatgggggtgtgcctgtttaacctgccggaagtcagggagtctttcgggggccagaagtgtgggaacagatttgtggaagaaggagaggagtgtgactgtggggagccagaggaatgtatgaatcgctgctgcaatgccaccacctgtaccctgaagccggacgctgtgtgcgcacatgggctgtgctgtgaagactgccagctgaagcctgcaggaacagcgtgcagggactccagcaactcctgtgacctcccagagttctgcacaggggccagccctcactgcccagccaacgtgtacctgcacgatgggcactcatgtcaggatgtggacggctactgctacaatggcatctgccagactcacgagcagcagtgtgtcacgctctggggaccaggtgctaaacctgcccctgggatctgctttgagagagtcaattctgcaggtgatccttatggcaactgtggcaaagtctcgaagagttcctttgccaaatgcgagatgagagatgctaaatgtggaaaaatccagtgtcaaggaggtgccagccggccagtcattggtaccaatgccgtttccatagaaacaaacatccccctgcagcaaggaggccggattctgtgccgggggacccacgtgtacttgggcgatgacatgccggacccagggcttgtgcttgcaggcacaaagtgtgcagatggaaaaatctgcctgaatcgtcaatgtcaaaatattagtgtctttggggttcacgagtgtgcaatgcagtgccacggcagaggggtgtgcaacaacaggaagaactgccactgcgaggcccactgggcacctcccttctgtgacaagtttggctttggaggaagcacagacagcggccccatccggcaagcagaagcaaggcaggaagctgcagagtccaacagggagcgcggccagggccaggagcccgtgggatcgcaggagcatgcgtctactgcctcactgacactcatctgagccctcccatgacatggagaccgtgaccagtgctgctgcagaggaggtcacgcgtccccaaggcctcctgtgactggcagcattgactctgtggctttgccatcgtttccatgacaacagacacaacacagttctcggggctcaggaggggaagtccagcctaccaggcacgtctgcagaaacagtgcaaggaagggcagcgacttcctggttgagcttctgctaaaacatggacatgcttcagtgctgctcctgagagagtagcaggttaccactctggcaggccccagccctgcagcaaggaggaagaggactcaaaagtctggcctttcactgagcccccacagcagtgggggagaagcaagggttgggcccagtgtcccctttccccagtgacacctcagccttggcagccctgatgactggtctctggctgcaacttaatgctctgatatggcttttagcatttattatatgaaaatagcagggttttagtttttaatttatcagagaccctgccacccattccatctccatccaagcaaactgaatggcattgaaacaaactggagaagaaggtaggagaaagggcggtgaactctggctctttgctgtggacatgcgtgaccagcagtactcaggtttgagggtttgcagaaagccagggaacccacagagtcaccaacccttcatttaacaagtaagaatgttaaaaagtgaaaacaatgtaagagcctaactccatcccccgtggccattactgcataaaatagagtgcatttgaaataacaaaaaaaaacaaaaaaaaaaaaatttgtgggggggctgcgggccctgagaaaaagtttttaaaaccttcggtgggggggcggggcgcccagtagggatagagggagacactggggccataagccgtggtccccaaagggagaaaccccggcgccactgagacaagggcgctgtggggtttctcctcacccaatttaaaaaaaacgcgccgcgggtggggacaacccaccggaggcggttttcttgagcacaaattctcctaagagggggagcttttcggggggggccacaataagcgggggctttcttttctaacacggggaggggctccaggggagagcctccagaattctataatttacgccgggccggggggggggcagga

SEQ ID NO: 318550 - DNA, 3566 bp, Homo sapiens
actgctggccgtggatccatttcacaggcctgccttctctcactaacgctcttcctagtccccgggccaactcggacagtttgctcatttattgcaacggtcaaggctggcttgtgccagaacggcgcgcgcgcgcgcacgcacgcacacacacggggggaaacttttttaaaaatgaaaggctagaagagctcagcggcggcgcgggcgctgcgcgagggctccggagctgactcgccgaggcaggaaatccctccggtcgcgacgcccggccccggctcggcgcccgcgtgggatggtgcagcgctcgccgccgggcccgagagctgctgcactgaaggccggcgacgatggcagcgcgcccgctgcccgtgtcccccgcccgcgccctcctgctcgccctggccggtgctctgctcgcgccctgcgaggcccgaggggtgagcttatggaaccaaggaagagctgatgaagttgtcagtgcctctgttcggagtggggacctctggatcccagtgaagagcttcgactccaagaatcatccagaagtgctgaatattcgactacaacgggaaagcaaagaactgatcataaatctggaaagaaatgaaggtctcattgccagcagtttcacggaaacccactatctgcaagacggtactgatgtctccctcgctcgaaattacacgggtcactgttactaccatggacatgtacggggatattctgattcagcagtcagtctcagcacgtgttctggtctcaggggacttattgtgtttgaaaatgaaagctatgtcttagaaccaatgaaaagtgcaaccaacagatacaaactcttcccagcgaagaagctgaaaagcgtccggggatcatgtggatcacatcacaacacaccaaacctcgctgcaaagaatgtgtttccaccaccctctcagacatgggcaagaaggcataaaagagagaccctcaaggcaactaagtatgtggagctggtgatcgtggcagacaaccgagagtttcagaggcaaggaaaagatctggaaaaagttaagcagcgattaatagagattgctaatcacgttgacaagttttacagaccactgaacattcggatcgtgttggtaggcgtggaagtgtggaatgacatggacaaatgctctgtaagtcaggacccattcaccagcctccatgaatttctggactggaggaagatgaagcttctacctcgcaaatcccatgacaatgcgcagcttgtcagtggggtttatttccaagggaccaccatcggcatggccccaatcatgagcatgtgcacggcagaccagtctgggggaattgtcatggaccattcagacaatccccttggtgcagccgtgaccctggcacatgagctgggccacaatttcgggatgaatcatgacacactggacaggggctgtagctgtcaaatggcggttgagaaaggaggctgcatcatgaacgcttccaccgggtacccatttcccatggtgttcagcagttgcagcaggaaggacttggagaccagcctggagaaaggaatgggggtgtgcctgtttaacctgccggaagtcagggagtctttcgggggccagaagtgtgggaacagatttgtggaagaaggagaggagtgtgactgtggggagccagaggaatgtatgaatcgctgctgcaatgccaccacctgtaccctgaagccggacgctgtgtgcgcacatgggctgtgctgtgaagactgccagctgaagcctgcaggaacagcgtgcagggactccagcaactcctgtgacctcccagagttctgcacaggggccagccctcactgcccagccaacgtgtacctgcacgatgggcactcatgtcaggatgtggacggctactgctacaatggcatctgccagactcacgagcagcagtgtgtcacgctctggggaccaggtgctaaacctgcccctgggatctgctttgagagagtcaattctgcaggtgatccttatggcaactgtggcaaagtctcgaagagttcctttgccaaatgcgagatgagagatgctaaatgtggaaaaatccagtgtcaaggaggtgccagccggccagtcattggtaccaatgccgtttccatagaaacaaacatccccctgcagcaaggaggccggattctgtgccgggggacccacgtgtacttgggcgatgacatgccggacccagggcttgtgcttgcaggcacaaagtgtgcagatggaaaaatctgcctgaatcgtcaatgtcaaaatattagtgtctttggggttcacgagtgtgcaatgcagtgccacggcagaggggtgtgcaacaacaggaagaactgccactgcgaggcccactgggcacctcccttctgtgacaagtttggctttggaggaagcacagacagcggccccatccggcaagcagaagcaaggcaggaagctgcagagtccaacagggagcgcggccagggccaggagcccgtgggatcgcaggagcatgcgtctactgcctcactgacactcatctgagccctcccatgacatggagaccgtgaccagtgctgctgcagaggaggtcacgcgtccccaaggcctcctgtgactggcagcattgactctgtggctttgccatcgtttccatgacaacagacacaacacagttctcggggctcaggaggggaagtccagcctaccaggcacgtctgcagaaacagtgcaaggaagggcagcgacttcctggttgagcttctgctaaaacatggacatgcttcagtgctgctcctgagagagtagcaggttaccactctggcaggccccagccctgcagcaaggaggaagaggactcaaaagtctggcctttcactgagcccccacagcagtgggggagaagcaagggttgggcccagtgtcccctttccccagtgacacctcagccttggcagccctgatgactggtctctggctgcaacttaatgctctgatatggcttttagcatttattatatgaaaatagcagggttttagtttttaatttatcagagaccctgccacccattccatctccatccaagcaaactgaatggcattgaaacaaactggagaagaaggtaggagaaagggcggtgaactctggctctttgctgtggacatgcgtgaccagcagtactcaggtttgagggtttgcagaaagccagggaacccacagagtcaccaacccttcatttaacaagtaagaatgttaaaaagtgaaaacaatgtaagagcctaactccatcccccgtggccattactgcataaaatagagtgcatttgaaataccgctgcctccaccctgttcatacatatataaaatcaaggcaggccatgagcaagcatggctcactgctccctggcctggccatggctcaggggctcattaaacaagtactcgtgtgtctgccacacaccagccactctcctgggtcctggagagacattaagcaagagcaagaccccaaagagcaagaccccaaagagcaagccccgagatcctctaga

SEQ ID NO: 318551 - DNA, 5147 bp, Homo sapiens
  misc_feature (41)..(42): n is a, c, g, or t
  misc_feature (49)..(51): n is a, c, g, or t
  misc_feature (53)..(53): n is a, c, g, or t
  misc_feature (55)..(55): n is a, c, g, or t
tggcgcctttactaagtacaccgctcttctcttacttgtgnngaacgcnnnananatcataaaagagagaccctcaaggcaactaagtatgtggagctggtgatcgtggcagacaaccgagagtttcagaggcaaggaaaagatctggaaaaagttaagcagcgattaatagagattgctaatcacgttgacaagttttacagaccactgaacattcggatcgtgttggtaggcgtggaagtgtggaatgacatggacaaatgctctgtaagtcaggacccattcaccagcctccatgaatttctggactggaggaagatgaagcttctacctcgcaaatcccatgacaatgcgcagcttgtcagtggggtttatttccaagggaccaccatcggcatggccccaatcatgagcatgtgcacggcagaccagtctgggggaattgtcatggaccattcagacaatccccttggtgcagccgtgaccctggcacatgagctgggccacaatttcgggatgaatcatgacacactggacaggggctgtagctgtcaaatggcggttgagaaaggaggctgcatcatgaacgcttccaccgggtacccatttcccatggtgttcagcagttgcagcaggaaggacttggagaccagcctggagaaaggaatgggggtgtgcctgtttaacctgccggaagtcagggagtctttcgggggccagaagtgtgggaacagatttgtggaagaaggagaggagtgtgactgtggggagccagaggaatgtatgaatcgctgctgcaatgccaccacctgtaccctgaagccggacgctgtgtgcgcacatgggctgtgctgtgaagactgccagctgaagcctgcaggaacagcgtgcagggactccagcaactcctgtgacctcccagagttctgcacaggggccagccctcactgcccagccaacgtgtacctgcacgatgggcactcatgtcaggatgtggacggctactgctacaatggcatctgccagactcacgagcagcagtgtgtcacgctctggggaccaggtgctaaacctgcccctgggatctgctttgagagagtcaattctgcaggtgatccttatggcaactgtggcaaagtctcgaagagttcctttgccaaatgcgagatgagagatgctaaatgtggaaaaatccagtgtcaaggaggtgccagccggccagtcattggtaccaatgccgtttccatagaaacaaacatccccctgcagcaaggaggccggattctgtgccgggggacccacgtgtacttgggcgatgacatgccggacccagggcttgtgcttgcaggcacaaagtgtgcagatggaaaaatctgcctgaatcgtcaatgtcaaaatattagtgtctttggggttcacgagtgtgcaatgcagtgccacggcagaggggtgtgcaacaacaggaagaactgccactgcgaggcccactgggcacctcccttctgtgacaagtttggctttggaggaagcacagacagcggccccatccggcaagcagataaccaaggtttaaccataggaattctggtgaccatcctgtgtcttcttgctgccggatttgtggtttatctcaaaaggaagaccttgatacgactgctgtttacaaataagaagaccaccattgaaaaactaaggtgtgtgcgcccttcccggccaccccgtggcttccaaccctgtcaggctcacctcggccaccttggaaaaggcctgatgaggaagccgccagattcctacccaccgaaggacaatcccaggagattgctgcagtgtcagaatgttgacatcagcagacccctcaacggcctgaatgtccctcagccccagtcaactcagcgagtgcttcctcccctccaccgggctccacgtgcacctagcgtccctgccagacccctgccagccaagcctgcacttaggcaggcccaggggacctgtaagccaaacccccctcagaagcctctgcctgcagatcctctggccagaacaactcggctcactcatgccttggccaggaccccaggacaatgggagactgggctccgcctggcacccctcagacctgctccacaatatccacaccaagtgcccagatccacccacaccgcctatattaagtgagaagccgacaccttttttcaacagtgaagacagaagtttgcactatctttcagctccagttggagttttttgtaccaacttttaggattttttttaatgtttaaaacatcattactataagaactttgagctactgccgtcagtgctgtgctgtgctatggtgctctgtctacttgctcaggtacttgtaaattattaatttatgcagaatgttgattacagtgcagtgcgctgtagtaggcatttttaccatcactgagttttccatggcaggaaggcttgttgtgcttttagtattttagtgaacttgaaatatcctgcttgatgggattctggacaggatgtgtttgctttctgatcaaggccttattggaaagcagtcccccaactacccccagctgtgcttatggtaccagatgcagctcaagagatcccaagtagaacctcagttgattttctggattccccatctcaggccagagccaaggggcttcaggtccaggctgtgtttggctttcagggaggccctgtgccccttgacaactggcaggcaggctcccagggacagctgggagaaatctggcttctggccaggaagctttggtgagaacctgggttgcagacaggaatcttaaggtgtagccacaccaggatagagactggaacactagacaagccagaacttgaccctgagctgaccagccgtgagcatgtttggaaggggtctgtagtgtcactcaaggcggtgcttgatagaaatgccaagcacttctttttctcgctgtcctttctagagcactgccaccagtaggttatttagcttgggaaaggtggtgtttctgtaagaaacctactgcccaggcactgcaaaccgccacctccctatactgcttggagctgagcaaatcaccacaaactgtaatacaatgatcctgtattcagacagatgaggctttccatgggaccacaactattttcagatgtgaaccattaaccagatctagtcaatcaagtctgtttactgcaaggttcaacttattaacaattaggcagactctttatgcttgcaaaaactacaaccaatggaatgtgatgttcatgggtatagttcatgtctgctatcattattcgtagatattggacaaagaaccttctctatggggcatcctctttttccaacttggctgcaggaatctttaaaagatgcttttaacagagtctgaacctatttcttaaacacttgcaacctacctgttgagcatcacagaatgtgataaggaaatcaacttgcttatcaacttcctaaatattatgagatgctggcttgggcagcatccccttgaactcttcactcttcaaatgcctgactagggagccatgtttcacaaggtctttaaagtgactaatggcatgagaaatacaaaaatactcagataaggtaaaatgccatgatgcctctgtcttctggactggttttcacattagaagacaattgacaacagttacataattcactctgagtgttttatgagaaagccttcttttgggggtcaacagttttcctatgctttgaaacagaaaaatatgtaccaagaatcttggtttgccttccagaaaacaaaactgcatttcactttcccggtgttccccactgtatctaggcaacatagtattcatgactatggataaactaaacacgtgacacaaacacacacaaaagggaacccagctctaatacattccaactcgtatagcatgcatctgtttattctatagttattaagttctttaaaatgtaaagccatgctggaaaataatactgctgagatacatacagaattactgtaactgattacacttggtaattgtactaaagccaaacatatatatactattaaaaaggtttacagaattttatggtgcattacgtgggcattgtctttttagatgcccaaatccttagatctggcatgttagcccttcctccaattataagaggatatgaactgagtttttcttttgttgtttgttcttagctgtaattcctatgcttctatttcagagagccaggagagtttgatattaaaggaggttaaaactgtgatcttatgccatgtcatcaatggccacttaggggccatggctgatgacacattcttatctctacagtactaatgtgttattatagagccatgcattttatttctgaataagaacatatttaaactaatattcccttacaatatggacagtattaatccttccaagatgcagtatttatcaagtgaagcatatttagcagcaaattccattttaacataacttaggaaccaataaccagggtgttttgtggttgggggaggcacggggtggagtattcttttttatatcctcaaaacaaaaaaaatcaatacttatatttcaatggcaatctagtatttttttaaaagactgtataggcatgaataatagaggtggtttgagttttgtagggccatcacctggaaagtcaatgtgactagacacaaagtagcccagaggctacttttcttcctacagcttattatagttgtaggttctatgacctcacttcatgggttccaggcaattccgctgaaaggtttgtctcctgaaattttttaagtttgttttcctgacacatgtaatcagatgtgtagcaaccgagggaaacgaagcctaacattctccattgtggaaatacacacaggaggttacacttcacagcgtggatttttccagcttacacatgtgggatgacatcacagaaaccacaaaagcagcaaattaaactgtaggagagtcaatactcctgacgagtctcggggggggcatttttatgccttcttaactttatgagaattctcaggctgaactataggccattgttcccaggcaaatcaatacatcaatgcatcctcaaaaaaaaaaaaaaaaaaaaaaaccggctaaaa

SEQ ID NO: 318552 - DNA, 5412 bp, Homo sapiens
gattcattttcagtaactaataagcagaacattttgctcaaaatgaacaagttattgtccttggcagaagtgtctgaaagatcctaattcacttattgtttcacttgcagtggatattaactggccatctttagctataatacacatctgtatgtacattttaaatcaccagtgagtcatttgaaatgtatgcttccatacaaatgcaagtagacagtaaaaaagctgataacttcagcatctaattggtcaatcttcgagaacctagttaacacatcactttgcattaggcactgcaaatatttcttaaattccaacaccacaggaaccaaagagcacagagatatttttctcacctgtgtcagtgaccctcaaataacgcaaatctgttctaattttcatttcgagtttttattaacgtgatcccaactccaatgccagttttgcctgttttgcccagttttacagaccactgaacattcggatcgtgttggtaggcgtggaagtgtggaatgacatggacaaatgctctgtaagtcaggacccattcaccagcctccatgaatttctggactggaggaagatgaagcttctacctcgcaaatcccatgacaatgcgcagcttgtcagtggggtttatttccaagggaccaccatcggcatggccccaatcatgagcatgtgcacggcagaccagtctgggggaattgtcatggaccattcagacaatccccttggtgcagccgtgaccctggcacatgagctgggccacaatttcgggatgaatcatgacacactggacaggggctgtagctgtcaaatggcggttgagaaaggaggctgcatcatgaacgcttccaccgggtacccatttcccatggtgttcagcagttgcagcaggaaggacttggagaccagcctggagaaaggaatgggggtgtgcctgtttaacctgccggaagtcagggagtctttcgggggccagaagtgtgggaacagatttgtggaagaaggagaggagtgtgactgtggggagccagaggaatgtatgaatcgctgctgcaatgccaccacctgtaccctgaagccggacgctgtgtgcgcacatgggctgtgctgtgaagactgccagctgaagcctgcaggaacagcgtgcagggactccagcaactcctgtgacctcccagagttctgcacaggggccagccctcactgcccagccaacgtgtacctgcacgatgggcactcatgtcaggatgtggacggctactgctacaatggcatctgccagactcacgagcagcagtgtgtcacgctctggggaccaggtgctaaacctgcccctgggatctgctttgagagagtcaattctgcaggtgatccttatggcaactgtggcaaagtctcgaagagttcctttgccaaatgcgagatgagagatgctaaatgtggaaaaatccagtgtcaaggaggtgccagccggccagtcattggtaccaatgccgtttccatagaaacaaacatccccctgcagcaaggaggccggattctgtgccgggggacccacgtgtacttgggcgatgacatgccggacccagggcttgtgcttgcaggcacaaagtgtgcagatggaaaaatctgcctgaatcgtcaatgtcaaaatattagtgtctttggggttcacgagtgtgcaatgcagtgccacggcagaggggtgtgcaacaacaggaagaactgccactgcgaggcccactgggcacctcccttctgtgacaagtttggctttggaggaagcacagacagcggccccatccggcaagcagataaccaaggtttaaccataggaattctggtgaccatcctgtgtcttcttgctgccggatttgtggtttatctcaaaaggaagaccttgatacgactgctgtttacaaataagaagaccaccattgaaaaactaaggtgtgtgcgcccttcccggccaccccgtggcttccaaccctgtcaggctcacctcggccaccttggaaaaggcctgatgaggaagccgccagattcctacccaccgaaggacaatcccaggagattgctgcagtgtcagaatgttgacatcagcagacccctcaacggcctgaatgtccctcagccccagtcaactcagcgagtgcttcctcccctccaccgggctccacgtgcacctagcgtccctgccagacccctgccagccaagcctgcacttaggcaggcccaggggacctgtaagccaaacccccctcagaagcctctgcctgcagatcctctggccagaacaactcggctcactcatgccttggccaggaccccaggacaatgggagactgggctccgcctggcacccctcagacctgctccacaatatccacaccaagtgcccagatccacccacaccgcctatattaagtgagaagccgacaccttttttcaacagtgaagacagaagtttgcactatctttcagctccagttggagttttttgtaccaacttttaggattttttttaatgtttaaaacatcattactataagaactttgagctactgccgtcagtgctgtgctgtgctatggtgctctgtctacttgctcaggtacttgtaaattattaatttatgcagaatgttgattacagtgcagtgcgctgtagtaggcatttttaccatcactgagttttccatggcaggaaggcttgttgtgcttttagtattttagtgaacttgaaatatcctgcttgatgggattctggacaggatgtgtttgctttctgatcaaggccttattggaaagcagtcccccaactacccccagctgtgcttatggtaccagatgcagctcaagagatcccaagtagaacctcagttgattttctggattccccatctcaggccagagccaaggggcttcaggtccaggctgtgtttggctttcagggaggccctgtgccccttgacaactggcaggcaggctcccagggacagctgggagaaatctggcttctggccaggaagctttggtgagaacctgggttgcagacaggaatcttaaggtgtagccacaccaggatagagactggaacactagacaagccagaacttgaccctgagctgaccagccgtgagcatgtttggaaggggtctgtagtgtcactcaaggcggtgcttgatagaaatgccaagcacttctttttctcgctgtcctttctagagcactgccaccagtaggttatttagcttgggaaaggtggtgtttctgtaagaaacctactgcccaggcactgcaaaccgccacctccctatactgcttggagctgagcaaatcaccacaaactgtaatacaatgatcctgtattcagacagatgaggctttccatgggaccacaactattttcagatgtgaaccattaaccagatctagtcaatcaagtctgtttactgcaaggttcaacttattaacaattaggcagactctttatgcttgcaaaaactacaaccaatggaatgtgatgttcatgggtatagttcatgtctgctatcattattcgtagatattggacaaagaaccttctctatggggcatcctctttttccaacttggctgcaggaatctttaaaagatgcttttaacagagtctgaacctatttcttaaacacttgcaacctacctgttgagcatcacagaatgtgataaggaaatcaacttgcttatcaacttcctaaatattatgagatgctggcttgggcagcatccccttgaactcttcactcttcaaatgcctgactagggagccatgtttcacaaggtctttaaagtgactaatggcatgagaaatacaaaaatactcagataaggtaaaatgccatgatgcctctgtcttctggactggttttcacattagaagacaattgacaacagttacataattcactctgagtgttttatgagaaagccttcttttgggggtcaacagttttcctatgctttgaaacagaaaaatatgtaccaagaatcttggtttgccttccagaaaacaaaactgcatttcactttcccggtgttccccactgtatctaggcaacatagtattcatgactatggataaactaaacacgtgacacaaacacacacaaaagggaacccagctctaatacattccaactcgtatagcatgcatctgtttattctatagttattaagttctttaaaatgtaaagccatgctggaaaataatactgctgagatacatacagaattactgtaactgattacacttggtaattgtactaaagccaaacatatatatactattaaaaaggtttacagaattttatggtgcattacgtgggcattgtctttttagatgcccaaatccttagatctggcatgttagcccttcctccaattataagaggatatgaactgagtttttcttttgttgtttgttcttagctgtaattcctatgcttctatttcagagagccaggagagtttgatattaaaggaggttaaaactgtgatcttatgccatgtcatcaatggccacttaggggccatggctgatgacacattcttatctctacagtactaatgtgttattatagagccatgcattttatttctgaataagaacatatttaaactaatattcccttacaatatggacagtattaatccttccaagatgcagtatttatcaagtgaagcatatttagcagcaaattccattttaacataacttaggaaccaataaccagggtgttttgtggttgggggaggcacggggtggagtattcttttttatatcctcaaaacaaaaaaaatcaatacttatatttcaatggcaatctagtatttttttaaaagactgtataggcatgaataatagaggtggtttgagttttgtagggccatcacctggaaagtcaatgtgactagacacaaagtagcccagaggctacttttcttcctacagcttattatagttgtaggttctatgacctcacttcatgggttccaggcaattccgctgaaaggtttgtctcctgaaattttttaagtttgttttcctgacacatgtaatcagatgtgtagcaaccgagggaaacgaagcctaacattctccattgtggaaatacacacaggaggttacacttcacagcgtggatttttccagcttacacatgtgggatgacatcacagaaaccacaaaagcagcaaattaaactgtaggagagtcaatactcctgacgagtctcggggggggcatttttatgccttcttaactttatgagaattctcaggctgaactataggccattgttcccaggcaaatcaatacatcaatgcatcctcaaaaaaaaaaaaaaaaaaaaaaaccggctaaaa

SEQ ID NO: 318553 - DNA, 4672 bp, Homo sapiens
aagacaacgtaagcctcaccgacaagttagaaatgcagaatcagcttggtgtggtggctcacgcctgtaatctcagcactttgggaggctaaggtgggcagatcaattgaggcccggagttcgagaccagtctggccaacatgacgaaaccttgcagcaggaaggacttggagaccagcctggagaaaggaatgggggtgtgcctgtttaacctgccggaagtcagggagtctttcgggggccagaagtgtgggaacagatttgtggaagaaggagaggagtgtgactgtggggagccagaggaatgtatgaatcgctgctgcaatgccaccacctgtaccctgaagccggacgctgtgtgcgcacatgggctgtgctgtgaagactgccagctgaagcctgcaggaacagcgtgcagggactccagcaactcctgtgacctcccagagttctgcacaggggccagccctcactgcccagccaacgtgtacctgcacgatgggcactcatgtcaggatgtggacggctactgctacaatggcatctgccagactcacgagcagcagtgtgtcacgctctggggaccaggtgctaaacctgcccctgggatctgctttgagagagtcaattctgcaggtgatccttatggcaactgtggcaaagtctcgaagagttcctttgccaaatgcgagatgagagatgctaaatgtggaaaaatccagtgtcaaggaggtgccagccggccagtcattggtaccaatgccgtttccatagaaacaaacatccccctgcagcaaggaggccggattctgtgccgggggacccacgtgtacttgggcgatgacatgccggacccagggcttgtgcttgcaggcacaaagtgtgcagatggaaaaatctgcctgaatcgtcaatgtcaaaatattagtgtctttggggttcacgagtgtgcaatgcagtgccacggcagaggggtgtgcaacaacaggaagaactgccactgcgaggcccactgggcacctcccttctgtgacaagtttggctttggaggaagcacagacagcggccccatccggcaagcagataaccaaggtttaaccataggaattctggtgaccatcctgtgtcttcttgctgccggatttgtggtttatctcaaaaggaagaccttgatacgactgctgtttacaaataagaagaccaccattgaaaaactaaggtgtgtgcgcccttcccggccaccccgtggcttccaaccctgtcaggctcacctcggccaccttggaaaaggcctgatgaggaagccgccagattcctacccaccgaaggacaatcccaggagattgctgcagtgtcagaatgttgacatcagcagacccctcaacggcctgaatgtccctcagccccagtcaactcagcgagtgcttcctcccctccaccgggctccacgtgcacctagcgtccctgccagacccctgccagccaagcctgcacttaggcaggcccaggggacctgtaagccaaacccccctcagaagcctctgcctgcagatcctctggccagaacaactcggctcactcatgccttggccaggaccccaggacaatgggagactgggctccgcctggcacccctcagacctgctccacaatatccacaccaagtgcccagatccacccacaccgcctatattaagtgagaagccgacaccttttttcaacagtgaagacagaagtttgcactatctttcagctccagttggagttttttgtaccaacttttaggattttttttaatgtttaaaacatcattactataagaactttgagctactgccgtcagtgctgtgctgtgctatggtgctctgtctacttgctcaggtacttgtaaattattaatttatgcagaatgttgattacagtgcagtgcgctgtagtaggcatttttaccatcactgagttttccatggcaggaaggcttgttgtgcttttagtattttagtgaacttgaaatatcctgcttgatgggattctggacaggatgtgtttgctttctgatcaaggccttattggaaagcagtcccccaactacccccagctgtgcttatggtaccagatgcagctcaagagatcccaagtagaacctcagttgattttctggattccccatctcaggccagagccaaggggcttcaggtccaggctgtgtttggctttcagggaggccctgtgccccttgacaactggcaggcaggctcccagggacagctgggagaaatctggcttctggccaggaagctttggtgagaacctgggttgcagacaggaatcttaaggtgtagccacaccaggatagagactggaacactagacaagccagaacttgaccctgagctgaccagccgtgagcatgtttggaaggggtctgtagtgtcactcaaggcggtgcttgatagaaatgccaagcacttctttttctcgctgtcctttctagagcactgccaccagtaggttatttagcttgggaaaggtggtgtttctgtaagaaacctactgcccaggcactgcaaaccgccacctccctatactgcttggagctgagcaaatcaccacaaactgtaatacaatgatcctgtattcagacagatgaggctttccatgggaccacaactattttcagatgtgaaccattaaccagatctagtcaatcaagtctgtttactgcaaggttcaacttattaacaattaggcagactctttatgcttgcaaaaactacaaccaatggaatgtgatgttcatgggtatagttcatgtctgctatcattattcgtagatattggacaaagaaccttctctatggggcatcctctttttccaacttggctgcaggaatctttaaaagatgcttttaacagagtctgaacctatttcttaaacacttgcaacctacctgttgagcatcacagaatgtgataaggaaatcaacttgcttatcaacttcctaaatattatgagatgctggcttgggcagcatccccttgaactcttcactcttcaaatgcctgactagggagccatgtttcacaaggtctttaaagtgactaatggcatgagaaatacaaaaatactcagataaggtaaaatgccatgatgcctctgtcttctggactggttttcacattagaagacaattgacaacagttacataattcactctgagtgttttatgagaaagccttcttttgggggtcaacagttttcctatgctttgaaacagaaaaatatgtaccaagaatcttggtttgccttccagaaaacaaaactgcatttcactttcccggtgttccccactgtatctaggcaacatagtattcatgactatggataaactaaacacgtgacacaaacacacacaaaagggaacccagctctaatacattccaactcgtatagcatgcatctgtttattctatagttattaagttctttaaaatgtaaagccatgctggaaaataatactgctgagatacatacagaattactgtaactgattacacttggtaattgtactaaagccaaacatatatatactattaaaaaggtttacagaattttatggtgcattacgtgggcattgtctttttagatgcccaaatccttagatctggcatgttagcccttcctccaattataagaggatatgaactgagtttttcttttgttgtttgttcttagctgtaattcctatgcttctatttcagagagccaggagagtttgatattaaaggaggttaaaactgtgatcttatgccatgtcatcaatggccacttaggggccatggctgatgacacattcttatctctacagtactaatgtgttattatagagccatgcattttatttctgaataagaacatatttaaactaatattcccttacaatatggacagtattaatccttccaagatgcagtatttatcaagtgaagcatatttagcagcaaattccattttaacataacttaggaaccaataaccagggtgttttgtggttgggggaggcacggggtggagtattcttttttatatcctcaaaacaaaaaaaatcaatacttatatttcaatggcaatctagtatttttttaaaagactgtataggcatgaataatagaggtggtttgagttttgtagggccatcacctggaaagtcaatgtgactagacacaaagtagcccagaggctacttttcttcctacagcttattatagttgtaggttctatgacctcacttcatgggttccaggcaattccgctgaaaggtttgtctcctgaaattttttaagtttgttttcctgacacatgtaatcagatgtgtagcaaccgagggaaacgaagcctaacattctccattgtggaaatacacacaggaggttacacttcacagcgtggatttttccagcttacacatgtgggatgacatcacagaaaccacaaaagcagcaaattaaactgtaggagagtcaatactcctgacgagtctcggggggggcatttttatgccttcttaactttatgagaattctcaggctgaactataggccattgttcccaggcaaatcaatacatcaatgcatcctcaaaaaaaaaaaaaaaaaaaaaaaccggctaaaa

SEQ ID NO: 318554 - DNA, 4570 bp, Homo sapiens
cagggactcgtagacccagttggatcataaaaagcagaagctttgctttcctaacagacggaaacaggcaggtgtgcagttcaggagctgggccctcttggtctttcttgctttttgcagccatttaaggtgtgatgtttgcattcagtgagtgcatactccataagaccctgtcaaacaaatgccattcccctttccaggaatgtatgaatcgctgctgcaatgccaccacctgtaccctgaagccggacgctgtgtgcgcacatgggctgtgctgtgaagactgccagctgaagcctgcaggaacagcgtgcagggactccagcaactcctgtgacctcccagagttctgcacaggggccagccctcactgcccagccaacgtgtacctgcacgatgggcactcatgtcaggatgtggacggctactgctacaatggcatctgccagactcacgagcagcagtgtgtcacgctctggggaccaggtgctaaacctgcccctgggatctgctttgagagagtcaattctgcaggtgatccttatggcaactgtggcaaagtctcgaagagttcctttgccaaatgcgagatgagagatgctaaatgtggaaaaatccagtgtcaaggaggtgccagccggccagtcattggtaccaatgccgtttccatagaaacaaacatccccctgcagcaaggaggccggattctgtgccgggggacccacgtgtacttgggcgatgacatgccggacccagggcttgtgcttgcaggcacaaagtgtgcagatggaaaaatctgcctgaatcgtcaatgtcaaaatattagtgtctttggggttcacgagtgtgcaatgcagtgccacggcagaggggtgtgcaacaacaggaagaactgccactgcgaggcccactgggcacctcccttctgtgacaagtttggctttggaggaagcacagacagcggccccatccggcaagcagataaccaaggtttaaccataggaattctggtgaccatcctgtgtcttcttgctgccggatttgtggtttatctcaaaaggaagaccttgatacgactgctgtttacaaataagaagaccaccattgaaaaactaaggtgtgtgcgcccttcccggccaccccgtggcttccaaccctgtcaggctcacctcggccaccttggaaaaggcctgatgaggaagccgccagattcctacccaccgaaggacaatcccaggagattgctgcagtgtcagaatgttgacatcagcagacccctcaacggcctgaatgtccctcagccccagtcaactcagcgagtgcttcctcccctccaccgggctccacgtgcacctagcgtccctgccagacccctgccagccaagcctgcacttaggcaggcccaggggacctgtaagccaaacccccctcagaagcctctgcctgcagatcctctggccagaacaactcggctcactcatgccttggccaggaccccaggacaatgggagactgggctccgcctggcacccctcagacctgctccacaatatccacaccaagtgcccagatccacccacaccgcctatattaagtgagaagccgacaccttttttcaacagtgaagacagaagtttgcactatctttcagctccagttggagttttttgtaccaacttttaggattttttttaatgtttaaaacatcattactataagaactttgagctactgccgtcagtgctgtgctgtgctatggtgctctgtctacttgctcaggtacttgtaaattattaatttatgcagaatgttgattacagtgcagtgcgctgtagtaggcatttttaccatcactgagttttccatggcaggaaggcttgttgtgcttttagtattttagtgaacttgaaatatcctgcttgatgggattctggacaggatgtgtttgctttctgatcaaggccttattggaaagcagtcccccaactacccccagctgtgcttatggtaccagatgcagctcaagagatcccaagtagaacctcagttgattttctggattccccatctcaggccagagccaaggggcttcaggtccaggctgtgtttggctttcagggaggccctgtgccccttgacaactggcaggcaggctcccagggacagctgggagaaatctggcttctggccaggaagctttggtgagaacctgggttgcagacaggaatcttaaggtgtagccacaccaggatagagactggaacactagacaagccagaacttgaccctgagctgaccagccgtgagcatgtttggaaggggtctgtagtgtcactcaaggcggtgcttgatagaaatgccaagcacttctttttctcgctgtcctttctagagcactgccaccagtaggttatttagcttgggaaaggtggtgtttctgtaagaaacctactgcccaggcactgcaaaccgccacctccctatactgcttggagctgagcaaatcaccacaaactgtaatacaatgatcctgtattcagacagatgaggctttccatgggaccacaactattttcagatgtgaaccattaaccagatctagtcaatcaagtctgtttactgcaaggttcaacttattaacaattaggcagactctttatgcttgcaaaaactacaaccaatggaatgtgatgttcatgggtatagttcatgtctgctatcattattcgtagatattggacaaagaaccttctctatggggcatcctctttttccaacttggctgcaggaatctttaaaagatgcttttaacagagtctgaacctatttcttaaacacttgcaacctacctgttgagcatcacagaatgtgataaggaaatcaacttgcttatcaacttcctaaatattatgagatgctggcttgggcagcatccccttgaactcttcactcttcaaatgcctgactagggagccatgtttcacaaggtctttaaagtgactaatggcatgagaaatacaaaaatactcagataaggtaaaatgccatgatgcctctgtcttctggactggttttcacattagaagacaattgacaacagttacataattcactctgagtgttttatgagaaagccttcttttgggggtcaacagttttcctatgctttgaaacagaaaaatatgtaccaagaatcttggtttgccttccagaaaacaaaactgcatttcactttcccggtgttccccactgtatctaggcaacatagtattcatgactatggataaactaaacacgtgacacaaacacacacaaaagggaacccagctctaatacattccaactcgtatagcatgcatctgtttattctatagttattaagttctttaaaatgtaaagccatgctggaaaataatactgctgagatacatacagaattactgtaactgattacacttggtaattgtactaaagccaaacatatatatactattaaaaaggtttacagaattttatggtgcattacgtgggcattgtctttttagatgcccaaatccttagatctggcatgttagcccttcctccaattataagaggatatgaactgagtttttcttttgttgtttgttcttagctgtaattcctatgcttctatttcagagagccaggagagtttgatattaaaggaggttaaaactgtgatcttatgccatgtcatcaatggccacttaggggccatggctgatgacacattcttatctctacagtactaatgtgttattatagagccatgcattttatttctgaataagaacatatttaaactaatattcccttacaatatggacagtattaatccttccaagatgcagtatttatcaagtgaagcatatttagcagcaaattccattttaacataacttaggaaccaataaccagggtgttttgtggttgggggaggcacggggtggagtattcttttttatatcctcaaaacaaaaaaaatcaatacttatatttcaatggcaatctagtatttttttaaaagactgtataggcatgaataatagaggtggtttgagttttgtagggccatcacctggaaagtcaatgtgactagacacaaagtagcccagaggctacttttcttcctacagcttattatagttgtaggttctatgacctcacttcatgggttccaggcaattccgctgaaaggtttgtctcctgaaattttttaagtttgttttcctgacacatgtaatcagatgtgtagcaaccgagggaaacgaagcctaacattctccattgtggaaatacacacaggaggttacacttcacagcgtggatttttccagcttacacatgtgggatgacatcacagaaaccacaaaagcagcaaattaaactgtaggagagtcaatactcctgacgagtctcggggggggcatttttatgccttcttaactttatgagaattctcaggctgaactataggccattgttcccaggcaaatcaatacatcaatgcatcctcaaaaaaaaaaaaaaaaaaaaaaaccggctaaaa

SEQ ID NO: 318555 - DNA, 4432 bp, Homo sapiens
tgccactcctccagagagaattctatggccacatctctaaattgcaatggccccatttctaggcttccagggggtcctggcgtcttagctgtggatctcccaatacctgcaggacacagggccacagaggctgggcctctaggagaagaagactgaagcctgcaggaacagcgtgcagggactccagcaactcctgtgacctcccagagttctgcacaggggccagccctcactgcccagccaacgtgtacctgcacgatgggcactcatgtcaggatgtggacggctactgctacaatggcatctgccagactcacgagcagcagtgtgtcacgctctggggaccaggtgctaaacctgcccctgggatctgctttgagagagtcaattctgcaggtgatccttatggcaactgtggcaaagtctcgaagagttcctttgccaaatgcgagatgagagatgctaaatgtggaaaaatccagtgtcaaggaggtgccagccggccagtcattggtaccaatgccgtttccatagaaacaaacatccccctgcagcaaggaggccggattctgtgccgggggacccacgtgtacttgggcgatgacatgccggacccagggcttgtgcttgcaggcacaaagtgtgcagatggaaaaatctgcctgaatcgtcaatgtcaaaatattagtgtctttggggttcacgagtgtgcaatgcagtgccacggcagaggggtgtgcaacaacaggaagaactgccactgcgaggcccactgggcacctcccttctgtgacaagtttggctttggaggaagcacagacagcggccccatccggcaagcagataaccaaggtttaaccataggaattctggtgaccatcctgtgtcttcttgctgccggatttgtggtttatctcaaaaggaagaccttgatacgactgctgtttacaaataagaagaccaccattgaaaaactaaggtgtgtgcgcccttcccggccaccccgtggcttccaaccctgtcaggctcacctcggccaccttggaaaaggcctgatgaggaagccgccagattcctacccaccgaaggacaatcccaggagattgctgcagtgtcagaatgttgacatcagcagacccctcaacggcctgaatgtccctcagccccagtcaactcagcgagtgcttcctcccctccaccgggctccacgtgcacctagcgtccctgccagacccctgccagccaagcctgcacttaggcaggcccaggggacctgtaagccaaacccccctcagaagcctctgcctgcagatcctctggccagaacaactcggctcactcatgccttggccaggaccccaggacaatgggagactgggctccgcctggcacccctcagacctgctccacaatatccacaccaagtgcccagatccacccacaccgcctatattaagtgagaagccgacaccttttttcaacagtgaagacagaagtttgcactatctttcagctccagttggagttttttgtaccaacttttaggattttttttaatgtttaaaacatcattactataagaactttgagctactgccgtcagtgctgtgctgtgctatggtgctctgtctacttgctcaggtacttgtaaattattaatttatgcagaatgttgattacagtgcagtgcgctgtagtaggcatttttaccatcactgagttttccatggcaggaaggcttgttgtgcttttagtattttagtgaacttgaaatatcctgcttgatgggattctggacaggatgtgtttgctttctgatcaaggccttattggaaagcagtcccccaactacccccagctgtgcttatggtaccagatgcagctcaagagatcccaagtagaacctcagttgattttctggattccccatctcaggccagagccaaggggcttcaggtccaggctgtgtttggctttcagggaggccctgtgccccttgacaactggcaggcaggctcccagggacagctgggagaaatctggcttctggccaggaagctttggtgagaacctgggttgcagacaggaatcttaaggtgtagccacaccaggatagagactggaacactagacaagccagaacttgaccctgagctgaccagccgtgagcatgtttggaaggggtctgtagtgtcactcaaggcggtgcttgatagaaatgccaagcacttctttttctcgctgtcctttctagagcactgccaccagtaggttatttagcttgggaaaggtggtgtttctgtaagaaacctactgcccaggcactgcaaaccgccacctccctatactgcttggagctgagcaaatcaccacaaactgtaatacaatgatcctgtattcagacagatgaggctttccatgggaccacaactattttcagatgtgaaccattaaccagatctagtcaatcaagtctgtttactgcaaggttcaacttattaacaattaggcagactctttatgcttgcaaaaactacaaccaatggaatgtgatgttcatgggtatagttcatgtctgctatcattattcgtagatattggacaaagaaccttctctatggggcatcctctttttccaacttggctgcaggaatctttaaaagatgcttttaacagagtctgaacctatttcttaaacacttgcaacctacctgttgagcatcacagaatgtgataaggaaatcaacttgcttatcaacttcctaaatattatgagatgctggcttgggcagcatccccttgaactcttcactcttcaaatgcctgactagggagccatgtttcacaaggtctttaaagtgactaatggcatgagaaatacaaaaatactcagataaggtaaaatgccatgatgcctctgtcttctggactggttttcacattagaagacaattgacaacagttacataattcactctgagtgttttatgagaaagccttcttttgggggtcaacagttttcctatgctttgaaacagaaaaatatgtaccaagaatcttggtttgccttccagaaaacaaaactgcatttcactttcccggtgttccccactgtatctaggcaacatagtattcatgactatggataaactaaacacgtgacacaaacacacacaaaagggaacccagctctaatacattccaactcgtatagcatgcatctgtttattctatagttattaagttctttaaaatgtaaagccatgctggaaaataatactgctgagatacatacagaattactgtaactgattacacttggtaattgtactaaagccaaacatatatatactattaaaaaggtttacagaattttatggtgcattacgtgggcattgtctttttagatgcccaaatccttagatctggcatgttagcccttcctccaattataagaggatatgaactgagtttttcttttgttgtttgttcttagctgtaattcctatgcttctatttcagagagccaggagagtttgatattaaaggaggttaaaactgtgatcttatgccatgtcatcaatggccacttaggggccatggctgatgacacattcttatctctacagtactaatgtgttattatagagccatgcattttatttctgaataagaacatatttaaactaatattcccttacaatatggacagtattaatccttccaagatgcagtatttatcaagtgaagcatatttagcagcaaattccattttaacataacttaggaaccaataaccagggtgttttgtggttgggggaggcacggggtggagtattcttttttatatcctcaaaacaaaaaaaatcaatacttatatttcaatggcaatctagtatttttttaaaagactgtataggcatgaataatagaggtggtttgagttttgtagggccatcacctggaaagtcaatgtgactagacacaaagtagcccagaggctacttttcttcctacagcttattatagttgtaggttctatgacctcacttcatgggttccaggcaattccgctgaaaggtttgtctcctgaaattttttaagtttgttttcctgacacatgtaatcagatgtgtagcaaccgagggaaacgaagcctaacattctccattgtggaaatacacacaggaggttacacttcacagcgtggatttttccagcttacacatgtgggatgacatcacagaaaccacaaaagcagcaaattaaactgtaggagagtcaatactcctgacgagtctcggggggggcatttttatgccttcttaactttatgagaattctcaggctgaactataggccattgttcccaggcaaatcaatacatcaatgcatcctcaaaaaaaaaaaaaaaaaaaaaaaccggctaaaa

SEQ ID NO: 318556 - DNA, 1717 bp, Homo sapiens
actgctggccgtggatccatttcacaggcctgccttctctcactaacgctcttcctagtccccgggccaactcggacagtttgctcatttattgcaacggtcaaggctggcttgtgccagaacggcgcgcgcgcgcgcacgcacgcacacacacggggggaaacttttttaaaaatgaaaggctagaagagctcagcggcggcgcgggcgctgcgcgagggctccggagctgactcgccgaggcaggaaatccctccggtcgcgacgcccggccccggctcggcgcccgcgtgggatggtgcagcgctcgccgccgggcccgagagctgctgcactgaaggccggcgacgatggcagcgcgcccgctgcccgtgtcccccgcccgcgccctcctgctcgccctggccggtgctctgctcgcgccctgcgaggcccgaggggtgagcttatggaaccaaggaagagctgatgaagttgtcagtgcctctgttcggagtggggacctctggatcccagtgaagagcttcgactccaagaatcatccagaagtgctgaatattcgactacaacgggaaagcaaagaactgatcataaatctggaaagaaatgaaggtctcattgccagcagtttcacggaaacccactatctgcaagacggtactgatgtctccctcgctcgaaattacacgggtcactgttactaccatggacatgtacggggatattctgattcagcagtcagtctcagcacgtgttctggtctcaggggacttattgtgtttgaaaatgaaagctatgtcttagaaccaatgaaaagtgcaaccaacagatacaaactcttcccagcgaagaagctgaaaagcgtccggggatcatgtggatcacatcacaacacaccaaacctcgctgcaaagaatgtgtttccaccaccctctcagacatgggcaagaaggcataaaagagagaccctcaaggcaactaagtatgtggagctggtgatcgtggcagacaaccgagagtttcagaggcaaggaaaagatctggaaaaagttaagcagcgattaatagagattgctaatcacgttgacaagttttacagaccactgaacattcggatcgtgttggtaggcgtggaagtgtggaatgacatggacaaatgctctgtaagtcaggacccattcaccagcctccatgaatttctggactggaggaagatgaagcttctacctcgcaaatcccatgacaatgcgcagcttgtcagtggggtttatttccaagggaccaccatcggcatggccccaatcatgagcatgtgcacggcagaccagtctgggggaattgtcatggaccattcagacaatccccttggtgcagccgtgaccctggcacatgagctgggccacaatttcgggatgaatcatgacacactggacaggggctgtagctgtcaaatggcggttgagaaaggaggctgcatcatgaacgcttccaccgggtacccatttcccatggtgttcagcagttgcagcaggaaggacttggagaccagcctggagaaaggaatgggggtgtgcctgtttaacctgccggaagtcagggagtctttcgggggccagaagtgcgcctgggtgcgcacccaggcgcacttctagatcacaaaagaatcaggtatggatgcagtgtccgaactttctttgggaggttgtaatcatgctct

SEQ ID NO: 318557 - DNA, 1389 bp, Homo sapiens
actgctggccgtggatccatttcacaggcctgccttctctcactaacgctcttcctagtccccgggccaactcggacagtttgctcatttattgcaacggtcaaggctggcttgtgccagaacggcgcgcgcgcgcgcacgcacgcacacacacggggggaaacttttttaaaaatgaaaggctagaagagctcagcggcggcgcgggcgctgcgcgagggctccggagctgactcgccgaggcaggaaatccctccggtcgcgacgcccggccccggctcggcgcccgcgtgggatggtgcagcgctcgccgccgggcccgagagctgctgcactgaaggccggcgacgatggcagcgcgcccgctgcccgtgtcccccgcccgcgccctcctgctcgccctggccggtgctctgctcgcgccctgcgaggcccgaggggtgagcttatggaaccaaggaagagctgatgaagttgtcagtgcctctgttcggagtggggacctctggatcccagtgaagagcttcgactccaagaatcatccagaagtgctgaatattcgactacaacgggaaagcaaagaactgatcataaatctggaaagaaatgaaggtctcattgccagcagtttcacggaaacccactatctgcaagacggtactgatgtctccctcgctcgaaattacacgggtcactgttactaccatggacatgtacggggatattctgattcagcagtcagtctcagcacgtgttctggtctcaggggacttattgtgtttgaaaatgaaagctatgtcttagaaccaatgaaaagtgcaaccaacagatacaaactcttcccagcgaagaagctgaaaagcgtccggggatcatgtggatcacatcacaacacaccaaacctcgctgcaaagaatgtgtttccaccaccctctcagacatgggcaagaaggcataaaagagagaccctcaaggcaactaagtatgtggagctggtgatcgtggcagacaaccgagagtttcagaggcaaggaaaagatctggaaaaagttaagcagcgattaatagagattgctaatcacgttgacaagttttacagaccactgaacattcggatcgtgttggtaggcgtggaagtgtggaatgacatggacaaatgctctgtaagtcaggacccattcaccagcctccatgaatttctggactggaggaagatgaagcttctacctcgcaaatcccatgacaatgcgcagcttgtcagtggggtttatttccaagggaccaccatcggcatggccccaatcatgagccagtggtcacgtgctgcaccaatggggatttgtctgaatggtccatgcacaattcccccatgactggtctgccgtgcag

SEQ ID NO: 318558 - DNA, 1073 bp, Homo sapiens
aagctgaaatagtagacaagttcaaggcaggcttagctaaattcacagatggacttaatgagggcttaggaagagcatctccaagggctgctctgaaagagggagtttagggtggaggagaaatcgtgttgagactggcgcatccggtatattcctgtgttcatcacacaaacaactggcaaacagaatgttcatcatatccccatcttcaagtctctgaggttttccataccaggaggaatgagcttggtctgacagtttctgcaagaacgctggaagtatgtaagtattgggtgggagtaaggggggatgtgatgtagaagtggtttcttcaaatgtttttatgcccttgccaaactcagaacttaaccatgataatgacattgtctggaggggtgtctaattttgctcaccatgagcagggaatggttgctgtgtaggagcaagtcctaattatagtgttacagaaactcttctcaagattagcagaggaaaacttaaaaccatcatgggttggggtatgcaaaggggaaattccttgtaggccttgttaatttcttaaaggaaaaaatgaattagtttaagtttctcacctttctcaggagaggccatgttggctgaaaatggtttgtctttgaacttcttatgattgtttgttcatctaaataaatttgacagctcttcatgaagccatgaactctcgggtttggaatgatttcgttagcagtcatttactccatatgccaccagcagcagccacatcactgctacaatcacgaccaccattgctaacatcaccatctccacaatcgccaccaccacctcctccacccaacatcatcaccatttctctcatgaccatcatcaccatatcactgccactgccgccaccgtcatcactacagccctcaccatcaccccactattgtaaccactgccatctccacagctactgccaccaccgtggccacaccagtatccacatcgctaccagcatcactgctaccatccccacccctatcattatccccaccaccaccccgtcggtggagcgggatcctctagatctaacc

SEQ ID NO: 318559 - DNA, 789 bp, Homo sapiens
atagcaaatgtaaataggagctagataatataagaatcctaatagatacccaaaagactctgttggctgggtgtggtggctcatgcttgtaatcctagcatttcaggaggctgaggcaggagaatcatttgaacccaggtgtttgagaccaacctggctaacataaggagaccctgtctctataaaaaataaaaaattagccaggcatggtggcatgcgcacagctatggccctagctacttgggaggctgaggtggaaagatcagttgagtctggaggtcactacagtgagctgttattgtgccactgtattccagcctgggtgacggagcaagtaccttgtctcaaaaaaagaaaagactgttgaatgacttggttacttcctttattactgttgaagtacttgatggataaattgtagacagctaaaactttttctgggtcttcatggccagtgagtgaagaaagaaatgttactgtggtattcagtagattctgttggttctgaaaagggaggagggttacctgaagatgactgagtgcttgctctgaaagggctcacatggatccagaatgactcagagactaaaaagttaataaaaggaaagtattcctatttcattttagttaattaaaaattgagcttaaaaactttaaaaggaacagtgctgaattagtttttgaaaactttagccttttaaattctttttaggtcctaagttaaattgatcttgaaatgaagatatttcctgtttcttagataaaccagtgttttcgattcgtggtctg

SEQ ID NO: 318560 - DNA, 517 bp, Homo sapiens
tggagtggttttcccggttgcgcctcactcacgcccatttttccctcaccccccctaaaaaaaaaaaaaaaaaaaaaaaaagaaaagactgttgaatgacttggttacttcctttattactgttgaagtacttgatggataaattgtagacagctaaaactttttctgggtcttcatggccagtgagtgaagaaagaaatgttactgtggtattcagtagattctgttggttctgaaaagggaggagggttacctgaagatgactgagtgcttgctctgaaagggctcacatggatccagaatgactcagagactaaaaagttaataaaaggaaagtattcctatttcattttagttaattaaaaattgagcttaaaaactttaaaaggaacagtgctgaattagtttttgaaaactttagccttttaaattctttttaggtcctaagttaaattgatcttgaaatgaagatatttcctgtttcttagataaaccagtgttttcgattcgtggtctg

SEQ ID NO: 318561 - DNA, 423 bp, Homo sapiens
tgactttgtggcacctgaattgtattatgtatgagaaactgatatatttgcaagatagcaaatgtaaataggagctagataatataagaatcctaatagatacccaaaagactctgttggctgggtgtggtggctcatgcttgtaatcctagcatttcaggaggctgaggcaggagaatcatttgaacccaggtgtttgagaccaacctggctaacataaggagaccctgtctctataaaaaataaaaaattagccaggcatggtggcatgcgcacagctatggccctagctacttgggaggctgaggtggaaagatcagttgagtctggaggtcactacagtgagctgttattgtgccactgtattccagcctgggtgacggagcaagtaccttgtctcaaaaaaagaaaagactgttgaat

SEQ ID NO: 318562 - DNA, 397 bp, Homo sapiens
ataaaaaataaaaaattagccaggcatggtggcatgcgcacagctatggccctagctacttgggaggctgaggtggaaagatcagttgagtctggaggtcactacagtgagctgttattgtgccactgtattccagcctgggtgacggagcaagtaccttgtctcaaaaaaagaaaagactgttgaatgacttggttacttcctttattactgttgaagtacttgatggataaattgtagacagctaaaactttttctgggtcttcatggccagtgagtgaagaaagaaatgttactgtggtattcagtagattctgttggttctgaaaagggaggagggttacctgaagatgactgagtgcttgctctgaaagggctcacatggatccagaatgac

SEQ ID NO: 318563 - DNA, 979 bp, Homo sapiens
ataaatgtaagacatgtgggaaaggcttttattctcccacgtcatttcaaagacatgaaaaaactcacactgcagagaaaccctatgaatgcaagcaatgtggtaaagccttcagtagttccagttccttttggtaccatgaaaggactcacactggagagaaaccctatgagtgtaagcaatgtgggaaagccttcagatctgcctcaatccttcaaatgcatgctgggactcaccctgaagagaagccctacgagtgtaagcaatgtgggaaagccttcagatctgccccacaccttcgaatccatgggtagaactcacactggagagaaaccctatgagtgtaaggaatgtgggaaagccttcagatctgccaagaaccttcgaattcatgaaaggacacaaacacacgtaagaatgcactctgtagaaagaccttataaatgtaagatatgtgggaaaggcttttattctgccaagtcatttcaaatacatgaaaaatcttacactggagagaaaccctatgagtgtaagcaatgtgggaaagcctttatttctttcacttcttttcgataacatgaaaggactcacactggagagaaaccctatgagtgtaagcaatgtggaaaaaccttcagatctacctcacaccttcgaaaacatggtaggactcacactggatagaaaccaaagcaggtgaatcacctgaggtcaggagttcaagactggcctgatcaatatgatgaaacccctgtctctactaaaactacaaaaattggccaggcgtggtggcctgcttctgtaatcctagctagttgggaggctggcacaggagaatcgcttgaatctggggggcagaggttgcagtgagccaagattgtgccattgcactctagcctgggcaacaggagcaaaactccgtctcaaaaaaagtcgaccggccgcgaatttagtagtagtagtagtagtaggcggccgc

SEQ ID NO: 318564 - DNA, 604 bp, Homo sapiens
  misc_feature (160)..(160): n is a, c, g, or t
  misc_feature (248)..(248): n is a, c, g, or t
  misc_feature (473)..(473): n is a, c, g, or t
ttttttgccgcagccagatacgattcgagccggtacctgagaggggtgtttcccgcattagccaacatgtgacgggtgcctgtattccagctactcaggaggctgaggcaggagaatcgcttgacccgggaggtggaggttgcagtgagctgagatcgtnccactgcactccagcctggatgacagagcgagactccatctgaaagaaaagatagatgagaggtgggtggaggggtgtgagtgaccgnccgtcctgatgagattgctccttgcagaggaatgaaggtgatagaaaaccgggccatgaaggatgaggagaagatggagattcaggagatgcagctcaaagaggccaagcacattgcggaagaggctgaccgcaaatacgaggaggtgagtggggctggcagatggcgcagcagcaggaagtgggaggaaatgcatctgctgagatagggaggacgccggggccnacggaaggaagctctcggttaggtcagctgtcctcctgcgtgaacatatgtttgtccagagacaaccacttggctaggaaactatctcccacgatgccagtaagtgctgcggacgcttgtctaacgtaact

SEQ ID NO: 318565 - DNA, 512 bp, Homo sapiens
ctcccagaccccacctcagagttcactccccaataggcagccccacactttgaagaatacagaccccagtatctagtcgtggatataattaaaacgctgaagaccataaccttttgggtcaactgttggtcaaactataggagagaccagggaccatcacatgggtagggatttccatccagagccaataatggtctggtgggggccgagggtggctattgtgggaagtcataacccacagatagattaacttaagaatcctggcccttctccacactccaccatgcagaacaaacatcctctcaagcagtcaacgtacaacgcttgggaaatagtcataattacccacatatagtaattaatagatggtaagtaatagatccttgatgtgatgttcttttgcatatttccctggccggctttcaccggtggctttcgtctgtaaggaaaggtggcttttgcctgtaatcccaacactttgggaggccaggacagatcacttgaggtcagga

SEQ ID NO: 318566 - DNA, 578 bp, Homo sapiens
aatacctgcctacttaggaataaatgtacttaaggtaggcagggtatttcctagtaagcatactttcttaagacggaggccatttggttcctgggagaataggcagccccacactttgaagaatacagaccccagtatctagtcgtggatataattaaaacgctgaagaccataaccttttgggtcaactgttggtcaaactataggagagaccagggaccatcacatgggtagggatttccatccagagccaataatggtctggtgggggccgagggtggctattgtgggaagtcataacccacagatagattaacttaagaatcctggcccttctccacactccaccatgcagaacaaacatcctctcaagcagtcaacgtacaacgcttgggaaatagtcataattacccacatatagtaattaatagatggtaagtaatagatccttgatgtgatgttcttttgcatatttccctggccggctttcaccggtggctttcgtctgtaaggaaaggtggcttttgcctgtaatcccaacactttgggaggccaggacagatcacttgaggtcagga

SEQ ID NO: 318567 - DNA, 1797 bp, Homo sapiens
agcggactttccagcagctgtggccagcggtgccgacgtcaggccctcccccagcggtgctgacgtcggcggtccggccgggtgacctcatcgccccgacggcagccggcccggggggcggggagaggcgggggaagccccctcataggcaaaggcttggggggccggggcgcggctgtgcagctctcgccggagccgagcccagccgagcgtccgccgctgcccgtgcgcctctgcgcctccgcgccatggccggcctcaactccctggaggcggtgaaacgcaagatccaggccctgcagcagcaggcggacgaggcggaagaccgcgcgcagggcctgcagcgggagctggacggcgagcgcgagcggcgcgagaaagctgaaggtgatgtggccgccctcaaccgacgcatccagctcgttgaggaggagttggacagggctcaggaacgactggccacggccctgcagaagctggaggaggcagaaaaagctgcagatgagagtgagagaggaatgaaggtgatagaaaaccgggccatgaaggatgaggagaagatggagattcaggagatgcagctcaaagaggccaagcacattgcggaagaggctgaccgcaaatacgaggaggtagctcgtaagctggtcatcctggagggtgagctggagagggcagaggagcgtgcggagcgtggtctgaactaaaatgtggtgacctggaagaagaactcaagaatgttactaaccatctgaaatctctggaggctgcatctgaaaagtattctgaaaaggaggacaaatatgaagaagaaattaaacttctgtctgacaaactgaaagaggctgagacccgtgctgaatttgcagagagaacggttgcaaaactggaaaagacaattgatgacctggaagagaaacttgcccaggccaaagaagagaacgtgggcttacatcagacactggatcagacactaaacgaacttaactgtatataagcaaaacagaagagtcttgttccaacagaaactctggagctccgtgggtctttctcttctcttgtaagaagttccttttgttattgccatcttcgctttgctggaaatgtcaagcaaattatgaatacatgaccaaatattttgtatcggagaagctttgagcaccagttaaatctcattccttccctttttttttcaaatggcaccagctttttcagctctcttattttttccttaagtagcatttattcctaaggtaggcagggtatttcctagtaagcatactttcttaagacggaggccatttggttcctgggagaataggcagccccacactttgaagaatacagaccccagtatctagtcgtggatataattaaaacgctgaagaccataaccttttgggtcaactgttggtcaaactataggagagaccagggaccatcacatgggtagggatttccatccagagccaataatggtctggtgggggccgagggtggctattgtgggaagtcataacccacagatagattaacttaagaatcctggcccttctccacactccaccatgcagaacaaacatcctctcaagcagtcaacgtacaacgcttgggaaatagtcataattacccacatatagtaattaatagatggtaagtaatagatccttgatgtgatgttcttttgcatatttccctggccggctttcaccggtggctttcgtctgtaaggaaaggtggcttttgcctgtaatcccaacactttgggaggccaggacagatcacttgaggtcagga

SEQ ID NO: 318568 - DNA, 1797 bp, Homo sapiens
  misc_feature (35)..(35): n is a, c, g, or t
  misc_feature (291)..(291): n is a, c, g, or t
  misc_feature (294)..(294): n is a, c, g, or t
  misc_feature (299)..(300): n is a, c, g, or t
  misc_feature (305)..(305): n is a, c, g, or t
  misc_feature (315)..(315): n is a, c, g, or t
  misc_feature (320)..(320): n is a, c, g, or t
  misc_feature (325)..(325): n is a, c, g, or t
  misc_feature (330)..(330): n is a, c, g, or t
  misc_feature (377)..(377): n is a, c, g, or t
ccactatcgctagaaacctcaatcgctgtgcctgnaagtatggaaatgaagttgggccagtttttaatctctgctgccagagaggccctttctgctaatagataaaaactcttttgctcaacttagtaatgacttgtggtcttttggatatggcagacctgaattggactgaactccaccatattcctgctgagtgggtcattactggaatgagacatttgctcttcagagaacaactttatttttattttttcttgagatggagtctcactctgtcgaccaggctggagngcngtggnncgatntcggctcacngcagnctccnctccngggttcaagtgattcttctgcctcagcctcctgagcatgtggaactncaggctgaaggtgatgtggccgccctcaaccgacgcatccagctcgttgaggaggagttggacagggctcaggaacgactggccacggccctgcagaagctggaggaggcagaaaaagctgcagatgagagtgagagaggaatgaaggtgatagaaaaccgggccatgaaggatgaggagaagatggagattcaggagatgcagctcaaagaggccaagcacattgcggaagaggctgaccgcaaatacgaggaggtagctcgtaagctggtcatcctggagggtgagctggagagggcagaggagcgtgcggagcgtggtctgaactaaaatgtggtgacctggaagaagaactcaagaatgttactaaccatctgaaatctctggaggctgcatctgaaaagtattctgaaaaggaggacaaatatgaagaagaaattaaacttctgtctgacaaactgaaagaggctgagacccgtgctgaatttgcagagagaacggttgcaaaactggaaaagacaattgatgacctggaagagaaacttgcccaggccaaagaagagaacgtgggcttacatcagacactggatcagacactaaacgaacttaactgtatataagcaaaacagaagagtcttgttccaacagaaactctggagctccgtgggtctttctcttctcttgtaagaagttccttttgttattgccatcttcgctttgctggaaatgtcaagcaaattatgaatacatgaccaaatattttgtatcggagaagctttgagcaccagttaaatctcattccttccctttttttttcaaatggcaccagctttttcagctctcttattttttccttaagtagcatttattcctaaggtaggcagggtatttcctagtaagcatactttcttaagacggaggccatttggttcctgggagaataggcagccccacactttgaagaatacagaccccagtatctagtcgtggatataattaaaacgctgaagaccataaccttttgggtcaactgttggtcaaactataggagagaccagggaccatcacatgggtagggatttccatccagagccaataatggtctggtgggggccgagggtggctattgtgggaagtcataacccacagatagattaacttaagaatcctggcccttctccacactccaccatgcagaacaaacatcctctcaagcagtcaacgtacaacgcttgggaaatagtcataattacccacatatagtaattaatagatggtaagtaatagatccttgatgtgatgttcttttgcatatttccctggccggctttcaccggtggctttcgtctgtaaggaaaggtggcttttgcctgtaatcccaacactttgggaggccaggacagatcacttgaggtcagga

SEQ ID NO: 318569 - DNA, 1703 bp, Homo sapiens
ggcggcgtctagaggatcccagttccatttcacctgctgggattacaggcatgagcaccacgcttggcgatgctcatctttgctatggagtggtagatgtttttcccagacattttccgggaagatcatactgaaatttggtatgagtgtaaattccctatggcctggactcctgggtgggctttgacagggaagatcaggttaacagagggcaggacatgggggaggctcccactggtggctggcctgatacttcttaacatggctgcacctccgacctccccaggctgaaggtgatgtggccgccctcaaccgacgcatccagctcgttgaggaggagttggacagggctcaggaacgactggccacggccctgcagaagctggaggaggcagaaaaagctgcagatgagagtgagagaggaatgaaggtgatagaaaaccgggccatgaaggatgaggagaagatggagattcaggagatgcagctcaaagaggccaagcacattgcggaagaggctgaccgcaaatacgaggaggtagctcgtaagctggtcatcctggagggtgagctggagagggcagaggagcgtgcggagcgtggtctgaactaaaatgtggtgacctggaagaagaactcaagaatgttactaaccatctgaaatctctggaggctgcatctgaaaagtattctgaaaaggaggacaaatatgaagaagaaattaaacttctgtctgacaaactgaaagaggctgagacccgtgctgaatttgcagagagaacggttgcaaaactggaaaagacaattgatgacctggaagagaaacttgcccaggccaaagaagagaacgtgggcttacatcagacactggatcagacactaaacgaacttaactgtatataagcaaaacagaagagtcttgttccaacagaaactctggagctccgtgggtctttctcttctcttgtaagaagttccttttgttattgccatcttcgctttgctggaaatgtcaagcaaattatgaatacatgaccaaatattttgtatcggagaagctttgagcaccagttaaatctcattccttccctttttttttcaaatggcaccagctttttcagctctcttattttttccttaagtagcatttattcctaaggtaggcagggtatttcctagtaagcatactttcttaagacggaggccatttggttcctgggagaataggcagccccacactttgaagaatacagaccccagtatctagtcgtggatataattaaaacgctgaagaccataaccttttgggtcaactgttggtcaaactataggagagaccagggaccatcacatgggtagggatttccatccagagccaataatggtctggtgggggccgagggtggctattgtgggaagtcataacccacagatagattaacttaagaatcctggcccttctccacactccaccatgcagaacaaacatcctctcaagcagtcaacgtacaacgcttgggaaatagtcataattacccacatatagtaattaatagatggtaagtaatagatccttgatgtgatgttcttttgcatatttccctggccggctttcaccggtggctttcgtctgtaaggaaaggtggcttttgcctgtaatcccaacactttgggaggccaggacagatcacttgaggtcagga

SEQ ID NO: 318570 - DNA, 1324 bp, Homo sapiens
cgcgcctccgcgcctccgtgcctccgcgcctccgcgccacctcaactccctggaggcggtgaaacgcaagatccaggccctgcagcagcaggcggacgaggcggaagaccgcgcgcagggcctgcagcgggagctggacggcgagcgcgagcggcgcgagaaagctgaaggtgatgtggccgccctcaaccgacgcatccagctcgttgaggaggagttggacagggctcaggaacgactggccacggccctgcagaagctggaggaggcagaaaaagctgcagatgagagtgagagcatctgaaaagtattctgaaaaggaggacaaatatgaagaagaaattaaacttctgtctgacaaactgaaagaggctgagacccgtgctgaatttgcagagagaacggttgcaaaactggaaaagacaattgatgacctggaagagaaacttgcccaggccaaagaagagaacgtgggcttacatcagacactggatcagacactaaacgaacttaactgtatataagcaaaacagaagagtcttgttccaacagaaactctggagctccgtgggtctttctcttctcttgtaagaagttccttttgttattgccatcttcgctttgctggaaatgtcaagcaaattatgaatacatgaccaaatattttgtatcggagaagctttgagcaccagttaaatctcattccttccctttttttttcaaatggcaccagctttttcagctctcttattttttccttaagtagcatttattcctaaggtaggcagggtatttcctagtaagcatactttcttaagacggaggccatttggttcctgggagaataggcagccccacactttgaagaatacagaccccagtatctagtcgtggatataattaaaacgctgaagaccataaccttttgggtcaactgttggtcaaactataggagagaccagggaccatcacatgggtagggatttccatccagagccaataatggtctggtgggggccgagggtggctattgtgggaagtcataacccacagatagattaacttaagaatcctggcccttctccacactccaccatgcagaacaaacatcctctcaagcagtcaacgtacaacgcttgggaaatagtcataattacccacatatagtaattaatagatggtaagtaatagatccttgatgtgatgttcttttgcatatttccctggccggctttcaccggtggctttcgtctgtaaggaaaggtggcttttgcctgtaatcccaacactttgggaggccaggacagatcacttgaggtcagga

SEQ ID NO: 318571 - DNA, 1212 bp, Homo sapiens
gggtgcagtgttgtttatacttcattgctccttcaggacatggacttaaaccattggatattgagtttatgaagcgtttgcatgaaaaagtgaatatcatcccacttattgccaaagcagacacactcacaccagaggaatgccaacagtttaaaaaacagataatgaaagaaatccaagaacataaaattaaaatatacgaatttccagagacaaatatgaagaagaaattaaacttctgtctgacaaactgaaagaggctgagacccgtgctgaatttgcagagagaacggttgcaaaactggaaaagacaattgatgacctggaagagaaacttgcccaggccaaagaagagaacgtgggcttacatcagacactggatcagacactaaacgaacttaactgtatataagcaaaacagaagagtcttgttccaacagaaactctggagctccgtgggtctttctcttctcttgtaagaagttccttttgttattgccatcttcgctttgctggaaatgtcaagcaaattatgaatacatgaccaaatattttgtatcggagaagctttgagcaccagttaaatctcattccttccctttttttttcaaatggcaccagctttttcagctctcttattttttccttaagtagcatttattcctaaggtaggcagggtatttcctagtaagcatactttcttaagacggaggccatttggttcctgggagaataggcagccccacactttgaagaatacagaccccagtatctagtcgtggatataattaaaacgctgaagaccataaccttttgggtcaactgttggtcaaactataggagagaccagggaccatcacatgggtagggatttccatccagagccaataatggtctggtgggggccgagggtggctattgtgggaagtcataacccacagatagattaacttaagaatcctggcccttctccacactccaccatgcagaacaaacatcctctcaagcagtcaacgtacaacgcttgggaaatagtcataattacccacatatagtaattaatagatggtaagtaatagatccttgatgtgatgttcttttgcatatttccctggccggctttcaccggtggctttcgtctgtaaggaaaggtggcttttgcctgtaatcccaacactttgggaggccaggacagatcacttgaggtcagga

SEQ ID NO: 318572 - DNA, 1023 bp, Homo sapiens
actctgccccacagccacagcccctgactgccgcagcccccacagagcccgccgcgcaccccacgtccccacgccagcgcccagccatggaggccatcaagaagaaaatgcagatgctgaagttggacaaggagaatgccatcgaccgcgcggagcaggcggaggcggataagaaagccgctgaggacaagtgcaagcaggtggaggaggagctgacgcacctccagaagaaactaaaagggacagaggacgagctggataaatattccgaggacctgaaggacgcgcaggagaagctggagctcacggagaagaaggcctccgacgctgaaggtgatgtggccgccctcaaccgacgcatccagctcgttgaggaggagttggacagggctcaggaacgactggccacggccctgcagaagctggaggaggcagaaaaagctgcagatgagagtgagagaggaatgaaggtgatagaaaaccgggccatgaaggatgaggagaagatggagattcaggagatgcagctcaaagaggccaagcacattgcggaagaggctgaccgcaaatacgaggaggtagctcgtaagctggtcatcctggagggtgagctggagagggcagaggagcgtgcggagcgtggtctgaactaaaatgtggtgacctggaagaagaactcaagaatgttactaaccatctgaaatctctggaggctgcatctgaaaagtattctgaaaaggaggacaaatatgaagaagaaattaaacttctgtctgacaaactgaaagaggctgagacccgtgctgaatttgcagagagaacggttgcaaaactggaaaagacaattgatgacctggtgagttatacgctcagaagctcaagtacaaagctatcagcgaggaactggaccacgctctcaacgacatgacctctctctgagaggcagccaggtcgctgccctctgtccttctcacatggtgcctcctacggccctgtggctttctaggagctccgctggcctcc

SEQ ID NO: 318573 - DNA, 1743 bp, Homo sapiens
actctgccccacagccacagcccctgactgccgcagcccccacagagcccgccgcgcaccccacgtccccacgccagcgcccagccatggaggccatcaagaagaaaatgcagatgctgaagttggacaaggagaatgccatcgaccgcgcggagcaggcggaggcggataagaaagccgctgaggacaagtgcaagcaggtggaggaggagctgacgcacctccagaagaaactaaaagggacagaggacgagctggataaatattccgaggacctgaaggacgcgcaggagaagctggagctcacggagaagaaggcctccgacgctgaaggtgatgtggccgccctcaaccgacgcatccagctcgttgaggaggagttggacagggctcaggaacgactggccacggccctgcagaagctggaggaggcagaaaaagctgcagatgagagtgagagaggaatgaaggtgatagaaaaccgggccatgaaggatgaggagaagatggagattcaggagatgcagctcaaagaggccaagcacattgcggaagaggctgaccgcaaatacgaggaggtagctcgtaagctggtcatcctggagggtgagctggagagggcagaggagcgtgcggagcgtggtctgaactaaaatgtggtgacctggaagaagaactcaagaatgttactaaccatctgaaatctctggaggctgcatctgaaaagtattctgaaaaggaggacaaatatgaagaagaaattaaacttctgtctgacaaactgaaagaggctgagacccgtgctgaatttgcagagagaacggttgcaaaactggaaaagacaattgatgacctggaagagaaacttgcccaggccaaagaagagaacgtgggcttacatcagacactggatcagacactaaacgaacttaactgtatataagcaaaacagaagagtcttgttccaacagaaactctggagctccgtgggtctttctcttctcttgtaagaagttccttttgttattgccatcttcgctttgctggaaatgtcaagcaaattatgaatacatgaccaaatattttgtatcggagaagctttgagcaccagttaaatctcattccttccctttttttttcaaatggcaccagctttttcagctctcttattttttccttaagtagcatttattcctaaggtaggcagggtatttcctagtaagcatactttcttaagacggaggccatttggttcctgggagaataggcagccccacactttgaagaatacagaccccagtatctagtcgtggatataattaaaacgctgaagaccataaccttttgggtcaactgttggtcaaactataggagagaccagggaccatcacatgggtagggatttccatccagagccaataatggtctggtgggggccgagggtggctattgtgggaagtcataacccacagatagattaacttaagaatcctggcccttctccacactccaccatgcagaacaaacatcctctcaagcagtcaacgtacaacgcttgggaaatagtcataattacccacatatagtaattaatagatggtaagtaatagatccttgatgtgatgttcttttgcatatttccctggccggctttcaccggtggctttcgtctgtaaggaaaggtggcttttgcctgtaatcccaacactttgggaggccaggacagatcacttgaggtcagga

SEQ ID NO: 318574 - DNA, 2029 bp, Homo sapiens
  misc_feature (523)..(523): n is a, c, g, or t
  misc_feature (526)..(526): n is a, c, g, or t
  misc_feature (531)..(532): n is a, c, g, or t
  misc_feature (537)..(537): n is a, c, g, or t
  misc_feature (547)..(547): n is a, c, g, or t
  misc_feature (552)..(552): n is a, c, g, or t
  misc_feature (557)..(557): n is a, c, g, or t
  misc_feature (562)..(562): n is a, c, g, or t
  misc_feature (609)..(609): n is a, c, g, or t
gaaaatgacaaagcggggattccagcccagcacttgtggccctggagttcctggtttaatgcttcccatgtacttcctttcttgtaggtaaaaacaccttgaaaagccaataacactatggggtatgtcttccatgcctgcaaccaagttttctttccctttccatatctttttgtcctgccatctctcagccaggcggattgaaggatggaattccaacgaggctcccccgcctcgtcccaccttggtaattgcatggccaacatttaactgagggctccatagtcttgcatttatcttgccattcaggtgaatgggagcggaactcacaggacacaatgagccgggtcactgatggccttgctttctaagaatctcacagtgagccctagaactctctacgtggtaacactgtgtgcctttttcagagaagagcctatcttagatcttagcctaacgttgggtctattgtgttgctggagagaccagcactgacattcatctcaaagcacatggctggagngcngtggnncgatntcggctcacngcagnctccnctccngggttcaagtgattcttctgcctcagcctcctgagcatgtggaactncaggctgaaggtgatgtggccgccctcaaccgacgcatccagctcgttgaggaggagttggacagggctcaggaacgactggccacggccctgcagaagctggaggaggcagaaaaagctgcagatgagagtgagagaggaatgaaggtgatagaaaaccgggccatgaaggatgaggagaagatggagattcaggagatgcagctcaaagaggccaagcacattgcggaagaggctgaccgcaaatacgaggaggtagctcgtaagctggtcatcctggagggtgagctggagagggcagaggagcgtgcggagcgtggtctgaactaaaatgtggtgacctggaagaagaactcaagaatgttactaaccatctgaaatctctggaggctgcatctgaaaagtattctgaaaaggaggacaaatatgaagaagaaattaaacttctgtctgacaaactgaaagaggctgagacccgtgctgaatttgcagagagaacggttgcaaaactggaaaagacaattgatgacctggaagagaaacttgcccaggccaaagaagagaacgtgggcttacatcagacactggatcagacactaaacgaacttaactgtatataagcaaaacagaagagtcttgttccaacagaaactctggagctccgtgggtctttctcttctcttgtaagaagttccttttgttattgccatcttcgctttgctggaaatgtcaagcaaattatgaatacatgaccaaatattttgtatcggagaagctttgagcaccagttaaatctcattccttccctttttttttcaaatggcaccagctttttcagctctcttattttttccttaagtagcatttattcctaaggtaggcagggtatttcctagtaagcatactttcttaagacggaggccatttggttcctgggagaataggcagccccacactttgaagaatacagaccccagtatctagtcgtggatataattaaaacgctgaagaccataaccttttgggtcaactgttggtcaaactataggagagaccagggaccatcacatgggtagggatttccatccagagccaataatggtctggtgggggccgagggtggctattgtgggaagtcataacccacagatagattaacttaagaatcctggcccttctccacactccaccatgcagaacaaacatcctctcaagcagtcaacgtacaacgcttgggaaatagtcataattacccacatatagtaattaatagatggtaagtaatagatccttgatgtgatgttcttttgcatatttccctggccggctttcaccggtggctttcgtctgtaaggaaaggtggcttttgcctgtaatcccaacactttgggaggccaggacagatcacttgaggtcagga

SEQ ID NO: 318575 - DNA, 1610 bp, Homo sapiens
actctgccccacagccacagcccctgactgccgcagcccccacagagcccgccgcgcaccccacgtccccacgccagcgcccagccatggaggccatcaagaagaaaatgcagatgctgaagttggacaaggagaatgccatcgaccgcgcggagcaggcggaggcggataagaaagccgctgaggacaagtgcaagcaggtggaggaggagctgacgcacctccagaagaaactaaaagggacagaggacgagctggataaatattccgaggacctgaaggacgcgcaggagaagctggagctcacggagaagaaggcctccgacgaggaatgaaggtgatagaaaaccgggccatgaaggatgaggagaagatggagattcaggagatgcagctcaaagaggccaagcacattgcggaagaggctgaccgcaaatacgaggaggtagctcgtaagctggtcatcctggagggtgagctggagagggcagaggagcgtgcggagcgtggtctgaactaaaatgtggtgacctggaagaagaactcaagaatgttactaaccatctgaaatctctggaggctgcatctgaaaagtattctgaaaaggaggacaaatatgaagaagaaattaaacttctgtctgacaaactgaaagaggctgagacccgtgctgaatttgcagagagaacggttgcaaaactggaaaagacaattgatgacctggaagagaaacttgcccaggccaaagaagagaacgtgggcttacatcagacactggatcagacactaaacgaacttaactgtatataagcaaaacagaagagtcttgttccaacagaaactctggagctccgtgggtctttctcttctcttgtaagaagttccttttgttattgccatcttcgctttgctggaaatgtcaagcaaattatgaatacatgaccaaatattttgtatcggagaagctttgagcaccagttaaatctcattccttccctttttttttcaaatggcaccagctttttcagctctcttattttttccttaagtagcatttattcctaaggtaggcagggtatttcctagtaagcatactttcttaagacggaggccatttggttcctgggagaataggcagccccacactttgaagaatacagaccccagtatctagtcgtggatataattaaaacgctgaagaccataaccttttgggtcaactgttggtcaaactataggagagaccagggaccatcacatgggtagggatttccatccagagccaataatggtctggtgggggccgagggtggctattgtgggaagtcataacccacagatagattaacttaagaatcctggcccttctccacactccaccatgcagaacaaacatcctctcaagcagtcaacgtacaacgcttgggaaatagtcataattacccacatatagtaattaatagatggtaagtaatagatccttgatgtgatgttcttttgcatatttccctggccggctttcaccggtggctttcgtctgtaaggaaaggtggcttttgcctgtaatcccaacactttgggaggccaggacagatcacttgaggtcagga

SEQ ID NO: 318576 - DNA, 1303 bp, Homo sapiens
actctgccccacagccacagcccctgactgccgcagcccccacagagcccgccgcgcaccccacgtccccacgccagcgcccagccatggaggccatcaagaagaaaatgcagatgctgaagttggacaaggagaatgccatcgaccgcgcggagcaggcggaggcggataagaaagccgctgaggacaagtgcaagcaggtggaggaggagctgacgcacctccagaagaaactaaaagggacagaggacgagctggataaatattccgaggacctgaaggacgcgcaggagaagctggagctcacggagaagaaggcctccgacgctgaaggtgatgtggccgccctcaaccgacgcatccagctcgttgaggaggagttggacagggctcaggaacgactggccacggccctgcagaagctggaggaggcagaaaaagctgcagatgagagtgagagaggaatgaaggtgatagaaaaccgggccatgaaggatgaggagaagatggagattcaggagatgcagctcaaagaggccaagcacattgcggaagaggctgaccgcaaatacgaggaggtagctcgtaagctggtcatcctggagggtgagctggagagggcagaggagcgtgcggagcgtggtctgaactaaaatgtggtgacctggaagaagaactcaagaatgttactaaccatctgaaatctctggaggctgcatctgaaaagtattctgaaaaggaggacaaatatgaagaagaaattaaacttctgtctgacaaactgaaagaggctgagacccgtgctgaatttgcagagagaacggttgcaaaactggaaaagacaattgatgacctggaagagaaacttgcccaggccaaagaagagaacgtgggcttacatcagacactggatcagacactaaacgaacttaactgtatataagcaaaacagaagagtcttgttccaacagaaactctggagctccgtgggtctttctcttctcttgtaagaagttccttttctcctggccattctcactctcctcgttatgtcacgccgaccatggacacgcgtaccatagtcactgcagatccgagatgataacagtagtcccccagtcatatctcacgcattccgagtctgtagtacatgaatggcaacagcattgacagctctattatcgtacccttaaatagcaataattccgtaagtaggacaggtatctatccatagtgaatcatactttgaaacgacggaggccacttggatccatgggagaatagtcagctccacacagtgcag

SEQ ID NO: 318577 - DNA, 1002 bp, Homo sapiens
  misc_feature (975)..(975): n is a, c, g, or t
  misc_feature (992)..(992): n is a, c, g, or t
actctgccccacagccacagcccctgactgccgcagcccccacagagcccgccgcgcaccccacgtccccacgccagcgcccagccatggaggccatcaagaagaaaatgcagatgctgaagttggacaaggagaatgccatcgaccgcgcggagcaggcggaggcggataagaaagccgctgaggacaagtgcaagcaggtggaggaggagctgacgcacctccagaagaaactaaaagggacagaggacgagctggataaatattccgaggacctgaaggacgcgcaggagaagctggagctcacggagaagaaggcctccgacgctgaaggtgatgtggccgccctcaaccgacgcatccagctcgttgaggaggagttggacagggctcaggaacgactggccacggccctgcagaagctggaggaggcagaaaaagctgcagatgagagtgagagaggaatgaaggtgatagaaaaccgggccatgaaggatgaggagaagatggagattcaggagatgcagctcaaagaggccaagcacattgcggaagaggctgaccgcaaatacgaggaggtagctcgtaagctggtcatcctggagggtgagctggagagggcagaggagcgtgcgggtgtctgaactgtgagtggcagaacaggactgagcgaggctggctcgattcctggggcggagtgggaaggagctggctgtgttgggaattggctctgaccggggtctctgctcaagtggacgggcgtcaggggctcatggctcatcttttctcttggcttctgtgacaaagaggtggtgacttgttcttactgccatgggaagcactgcccacgtgttgaccctttctgcaaagatatgaggaaataggagtgagacaggaggcagcagggaagcccagaagtcccattttcccatagaggatatctcagggggctgtgccatcttaacagaacactgnacctgctcagaaggcangctcccccgg

SEQ ID NO: 318578 - DNA, 489 bp, Homo sapiens
tcaggaactgtcttttttatagctgtatccagtcagctagtgtggcacacagtaggtgcttaataaaaacatagctactttctaattgctctggcgctcacatggaagtggcttgaacagtagacgcatgggagagagctgttcctggcatcctgatggcctggtgtgcatctcgggtaattcatacagtatcttacgtttgccctctccttattaatgtcacccagccctacctattctaggcagctgcgttcactctggtgaaggggataagttctctgggaaccttcatttgctgagtcagtgtggccacctagggtttctgcttggatgtgttcctgacacatccgccccggtctccagccctgggtggacagctctgcgtaagtgttcccattgctcctaggaattcgctctagtctcagacccaacacattcatccatccatccatccatccatccatccatccatccattcaacaatctgtg

SEQ ID NO: 318579 - DNA, 415 bp, Homo sapiens
ccaacaacatggacagagagacacaaagaggcaacggggacagggggtggggaggatggctggaggaggaagtaggcccagcagagtagggaaagagacacgcctctgtaggatcctattttactaaacccacaaagaccagccatggaaagtgccaggagagttcccgtgccaagttaatcagtaactggaaactgggcatcttgagactctaaggccttacaaaggtggcaacagggattcacaagctcttcccacaaagtcatatgcccaaagggacaccttcagttcaacctaggaaggggcccaagctaacccaaacatctactttgctttgcttttggcctgagtgacatcacctctcatggggagttgtgtcactttgactctcactgccaagcgccctgcaccatta

SEQ ID NO: 318580 - DNA, 2631 bp, Homo sapiens
caggtgctccgctccagagttgagcgcaggtgagctcctgcgcgttccgggggcgttcctccagtcaccctcccgccgttacccgcggcgcgcccgagggagtctcctccagaccctccctcccgttgctccaaactaatacggactgaacggatcgctgcgagggtgggagagaaaattagggggagaaaggacagagagagcaactaccatccatagccagatagattatcttacactgaactgatcaagtactttgaaaatgacttcgaaatttctcttggtgtccttcatacttgctgcactgagtctttcaaccaccttttctctccaaccagaccagcaaaaggttctactagtttcttttgatggattccgttgggattacttatataaagttccaacgccccattttcattatattatgaaatatggtgttcacgtgaagcaagttactaatgtttttattacaaaaacctaccctaaccattatactttggtaactggcctctttgcagagaatcatgggattgttgcaaatgatatgtttgatcctattcggaacaaatctttctccttggatcacatgaatatttatgattccaagttttgggaagaagcgacaccaatatggatcacaaaccagagggcaggacatactagtggtgcagccatgtggcccggaacagatgtaaaaatacataagcgctttcctactcattacatgccttacaatgagtcagtttcatttgaagatagagttgccaaaattattgaatggtttacgtcaaaagagcccataaatcttggtcttctctattgggaagaccctgatgacatgggccaccatttgggacctgacagtccgctcatggggcctgtcatttcagatattgacaagaagttaggatatctcatacaaatgctgaaaaaggcaaagttgtggaacactctgaacctaatcatcacaagtgatcatggaatgacgcagtgctctgaggaaaggttaatagaacttgaccagtacctggataaagaccactataccctgattgatcaatctccagtagcagccatcttgccaaaagaaggtaaatttgatgaagtctatgaagcactaactcacgctcatcctaatcttactgtttacaaaaaagaagacgttccagaaaggtggcattacaaatacaacagtcgaattcaaccaatcatagcagtggctgatgaagggtggcacattttacagaataagtcagatgactttctgttaggcaaccacggttacgataatgcgttagcagatatgcatccaatatttttagcccatggtcctgccttcagaaagaatttctcaaaagaagccatgaactccacagatttgtacccactactatgccacctcctcaatatcaccgccatgccacacaatggatcattctggaatgtccaggatctgctcaattcagcaatgccaagggtggtcccttatacacagagtactatactcctccctggtagtgttaaaccagcagaatatgaccaagaggggtcatacccttatttcataggggtctctcttggcagcattatagtgattgtattttttgtaattttcattaagcatttaattcacagtcaaatacctgccttacaagatatgcatgctgaaatagctcaaccattattacaagcctaatgttactttgaagtggatttgcatattgaagtggagattccataattatgtcagtgtttaaaggtttcaaattctgggaaaccagttccaaacatttgcagaaaccattaagcagttacatatttaggtatacacacacacacacacacacatacacacacacggaccaaaatacttacacctgcaaaggaataaagatgtgagagtatgtctccattgttcactgtagcatagggatagataagatcctgctttatttggacttggcgcagataatgtatatatttagcaactttgcactatgtaaagtaccttatgtattgcactttaaatttctctcctgatgggtactttaatttgaaatgcactttatgcacagttatgtcttataacttgattgaaaatgacaactttttgcacccatgtcacagaatacttgttacgcattgttcaaactgaaggaaatttctaataatcccgaataatgaacgtagaaatctatctccataaattgagagaagaagaaggtgataagtgttgaaaattaaatgtgataacctttgaaccttgaattttggagatgtattcccaacagcagaatgcaactgtgggcatttcttgtcttatttctttccagagaacgtggttttcatttatttttccctcaaaagagagtcaaatactgacagattcgttctaaatatattgtttctgtcataaaattattgtgatttcctgatgagtcatattactgtgattttcataataatgaagacaccatgaatatactttttttctatatagttcagcaatggcctgaatagaagcaaccaggcaccatctcagcaatgttttctcttgtttgtaattatttgctcctttgaaaattaaatcactattaattacattaaaaatcaaattggataaaaaaaaat

SEQ ID NO: 318581 - DNA, 1638 bp, Homo sapiens
caggtgctccgctccagagttgagcgcaggtgagctcctgcgcgttccgggggcgttcctccagtcaccctcccgccgttacccgcggcgcgcccgagggagtctcctccagaccctccctcccgttgctccaaactaatacggactgaacggatcgctgcgaggattatcttacactgaactgatcaagtactttgaaaatgacttcgaaatttctcttggtgtccttcatacttgctgcactgagtctttcaaccaccttttctctccaaccagaccagcaaaaggttctactagtttcttttgatggattccgttgggattacttatataaagttccaacgccccattttcattatattatgaaatatggtgttcacgtgaagcaagttactaatgtttttattacaaaaacctaccctaaccattatactttggtaactggcctctttgcagagaatcatgggattgttgcaaatgatatgtttgatcctattcggaacaaatctttctccttggatcacatgaatatttatgattccaagttttgggaagaagcgacaccaatatggatcacaaaccagagggcaggacatactagtggtgcagccatgtggcccggaacagatgtaaaaatacataagcgctttcctactcattacatgccttacaatgagtcagtttcatttgaagatagagttgccaaaattattgaatggtttacgtcaaaagagcccataaatcttggtcttctctattgggaagaccctgatgacatgggccaccatttgggacctgacagtccgctcatggggcctgtcatttcagatattgacaagaagttaggatatctcatacaaatgctgaaaaaggcaaagttgtggaacactctgaacctaatcatcacaagtgatcatggaatgacgcagtgctctgaggaaaggttaatagaacttgaccagtacctggataaagaccactataccctgattgatcaatctccagtagcagccatcttgccaaaagaaggtaaatttgatgaagtctatgaagcactaactcacgctcatcctaatcttactgtttacaaaaaagaagacgttccagaaaggtggcattacaaatacaacagtcgaattcaaccaatcatagcagtggctgatgaagggtggcacattttacagaataagtcagatgactttctgtgtgagtatgttacagtatttctttccattctgcattactttttgctaaaatacaacagtttaaatacataatacagcagtttattgattgatatttttactgtctgttacttgaatattaaggaactacaatgttttcgtacttatctaaaaatgctttttttagatattggtccttgatatgtaaaagatatatacaaaatgtccctttaggtagaattgggtttctatcatgtttattgattaaaagaaaagcagatgcctgaacaatggcatttgtagtgtgctcgtgactcatagtggcagatgtatacagatacatggtttctggttcttaaaacggtttttggccaggtgcggtggctctcgcctgtaatcccagcactttgggaggctgaggcgggtggatcacgaggtcaggagatcgagacca

SEQ ID NO: 318582 - DNA, 267 bp, Homo sapiens
ataaaatgcccttccttaattctataaggtgaacttacaacagaagattatttcctagtttcccctcccaaaattgttttccccaaggggaaaaagaattttttcttatgttcagctctctggtttttcacctccgtagcaagtctgttgcccatggctgatggtagctatgagtattttgttctgagtgcctctcctcccttctctttaggtaaatttgatgaagtctatgaagcactaactcacgctcatcctaatcttactgtt

SEQ ID NO: 318583 - DNA, 2569 bp, Homo sapiens
caggtgctccgctccagagttgagcgcaggtgagctcctgcgcgttccgggggcgttcctccagtcaccctcccgccgttacccgcggcgcgcccgagggagtctcctccagaccctccctcccgttgctccaaactaatacggactgaacggatcgctgcgaggattatcttacactgaactgatcaagtactttgaaaatgacttcgaaatttctcttggtgtccttcatacttgctgcactgagtctttcaaccaccttttctctccaaccagaccagcaaaaggttctactagtttcttttgatggattccgttgggattacttatataaagttccaacgccccattttcattatattatgaaatatggtgttcacgtgaagcaagttactaatgtttttattacaaaaacctaccctaaccattatactttggtaactggcctctttgcagagaatcatgggattgttgcaaatgatatgtttgatcctattcggaacaaatctttctccttggatcacatgaatatttatgattccaagttttgggaagaagcgacaccaatatggatcacaaaccagagggcaggacatactagtggtgcagccatgtggcccggaacagatgtaaaaatacataagcgctttcctactcattacatgccttacaatgagtcagtttcatttgaagatagagttgccaaaattattgaatggtttacgtcaaaagagcccataaatcttggtcttctctattgggaagaccctgatgacatgggccaccatttgggacctgacagtccgctcatggggcctgtcatttcagatattgacaagaagttaggatatctcatacaaatgctgaaaaaggcaaagttgtggaacactctgaacctaatcatcacaagtgatcatggaatgacgcagtgctctgaggaaaggttaatagaacttgaccagtacctggataaagaccactataccctgattgatcaatctccagtagcagccatcttgccaaaagaaggtaaatttgatgaagtctatgaagcactaactcacgctcatcctaatcttactgtttacaaaaaagaagacgttccagaaaggtggcattacaaatacaacagtcgaattcaaccaatcatagcagtggctgatgaagggtggcacattttacagaataagtcagatgactttctgttaggcaaccacggttacgataatgcgttagcagatatgcatccaatatttttagcccatggtcctgccttcagaaagaatttctcaaaagaagccatgaactccacagatttgtacccactactatgccacctcctcaatatcaccgccatgccacacaatggatcattctggaatgtccaggatctgctcaattcagcaatgccaagggtggtcccttatacacagagtactatactcctccctggtagtgttaaaccagcagaatatgaccaagaggggtcatacccttatttcataggggtctctcttggcagcattatagtgattgtattttttgtaattttcattaagcatttaattcacagtcaaatacctgccttacaagatatgcatgctgaaatagctcaaccattattacaagcctaatgttactttgaagtggatttgcatattgaagtggagattccataattatgtcagtgtttaaaggtttcaaattctgggaaaccagttccaaacatttgcagaaaccattaagcagttacatatttaggtatacacacacacacacacacacatacacacacacggaccaaaatacttacacctgcaaaggaataaagatgtgagagtatgtctccattgttcactgtagcatagggatagataagatcctgctttatttggacttggcgcagataatgtatatatttagcaactttgcactatgtaaagtaccttatgtattgcactttaaatttctctcctgatgggtactttaatttgaaatgcactttatgcacagttatgtcttataacttgattgaaaatgacaactttttgcacccatgtcacagaatacttgttacgcattgttcaaactgaaggaaatttctaataatcccgaataatgaacgtagaaatctatctccataaattgagagaagaagaaggtgataagtgttgaaaattaaatgtgataacctttgaaccttgaattttggagatgtattcccaacagcagaatgcaactgtgggcatttcttgtcttatttctttccagagaacgtggttttcatttatttttccctcaaaagagagtcaaatactgacagattcgttctaaatatattgtttctgtcataaaattattgtgatttcctgatgagtcatattactgtgattttcataataatgaagacaccatgaatatactttttttctatatagttcagcaatggcctgaatagaagcaaccaggcaccatctcagcaatgttttctcttgtttgtaattatttgctcctttgaaaattaaatcactattaattacattaaaaatcaaattggataaaaaaaaat

SEQ ID NO: 318584 - DNA, 965 bp, Homo sapiens
gccgtgattgtgccactgcactccagactgggtggcagagtgagaccctgtctcaaaaaagaaattgtgtgacttgagccctgaatctgtaggttaccagaccccagtagcagtgagcttcccctgcctatttctgtatctgctgtcctggtacttaagtcccgaaagggaaggcagagacttcagcatggtggcactgaggccctcgccagcccaggaggtgacaggagccagactggcggatggggtcctgtgtttgttgccacagtgagtcactggactccactgtaaagaggagcagtctcgtggtcccatcagccatttattcagtcatttatttctaccagcatccactcgaggacattttttctttttccttttttttttttttgaaacagagtctcgatctgtcgcccaggctggagtgcagtggcgcgatctcagctcactgcaacctctgcctcccaggttcaagcgattctcctgcctcagcctcccgagtagctgggactacaggcgcccgccaccaagcccagctaattttttgtattttttagtagacacggggtttcaccgtgttagccaggatggtctctatctcctgacctcatgatccacccgccttggcctcccaaagtgctgggattacaggcatgagccaccacacccggccttgatgacattttttctacagactataaatcctttataaactttaattttgttgctcaagttgtcctctctgtttggccatcgtgaccccttccaaatgggctcctgtgtgcacatgatatgtcccgggtcactttttttgttattgaggtgaaattcacataacataaaattaaccattttcaggtgtgcaatgcagtgctttaatacattcacactggtatgcagccactgcgcccagcctggaattggccattttaaagactattttattgacttacttattttagaca

SEQ ID NO: 318585 - DNA, 2067 bp, Homo sapiens
ctcactggggaaaggagagaccaagggctgcttcatgaaggctgtttctgagctgagctttgaacaatagcatgacgagggtaggtggaggtgggagtcagggaagaggactcacctctgctggagctgacagctgaggagtcatgggaagaaagggaggatagaacagaaggccatgaagtagtggcggatgagactggaaagctgagctggtgagagtgaggaagagccttcaagggagggtgtgactttattttctatggcgcaattcaggtaatgggagtctctccagatgcaacacatgttacagcacaactttaatatgattcgtttggcaatagtataaagattccctctctgccctgcaccagtggacagaaatttcaatgataaaaaaggatgaaaacctcaatatgtgacccatgggaaagatagagatggaatcatactcaggagagatgtgttaagctcaatgcacaacacagaaattaaaagcagtctctattttgatgttcattcttgaccaccttcacatccatttcagctattccaaactgtggcggttacctggataccttggaaggatccttcaccagccccaattacccaaagccgcatcctgagctggcttattgtgtgtggcacatacaagtggagaaagattacaagataaaactaaacttcaaagagattttaggccctcattctctagcctagaaatagacaaacagtgcaaatttgattttcttgccatctatgatggcccctccaccaactctggcctgattggacaagtctgtggccgtgtgactcccacctttcgaaattggtcatcaaactctctgactgtcggtgttgtcttacagattatgccaattcttaccgggggattttctgcttcctacacctcaatttatgcagaaaacatcaacactacatctttaacttgctcttctgacaggatgagagttattataagcaaatcctacctagaggcttttaactctaatgggaataacttgcaactaaaagacccaacttgcagaccaaaattatcaaatgttgtggaattttctgtccctcttaatggatgtggtacaatcagaaaggtagaagatcagtcaattacttacaccaatataatcaccttttctgcatcctcaacttctgaagtgatcacccgtcagaaacaactccagattattgtgaagtgtgaaatgggacataattctacagtggagataatatacataacagaagatgatgtaatacaaagtcaaaatgcactgggcaaatataacaccagcatggctctttttgaatccaattcatttgaaaagactatacttgaatcaccatattatgtggatttgaaccaaactctttttgttcaagttagtctgcacacctcagatccaaatttggtggtgtttcttgatacctgtagagcctctcccacctctgactttgcatctccaacctacgacctaatcaagagtggatgtagtcgagatgaaacttgtaaggtgtatcccttatttggacactatgggagattccagtttaatgcctttaaattcttgagaagtatgagctctgtgtatctgcagtgtaaagttttgatatgtgatagcagtgaccaccagtctcgctgcaatcaaggttgtgtctccagaagcaaacgagacatttcttcatataaatggaaaacagattccatcataggacccattcgtctgaaaagggatcgaagtgcaagtggcaattcaggatttcagcatgaaacacatgcggaagaaactccaaaccagcctttcaacagtgtgcatctgttttccttcatggttctagctctgaatgtggtgactgtagcgacaatcacagtgaggcattttgtaaatcaacgggcagactacaaataccagaagctgcagaactattaactaacaggtccaaccctaagtgagacatgtttctccaggatgccaaaggaaatgctacctcgtggctacacatattatgaataaatgaggaagggcctgaaagtgacacacaggcctgcatgtc

SEQ ID NO: 318586 - DNA, 1978 bp, Homo sapiens
tgccaaaatggagcttgtaagaaggctcatgccattgaccctcttaattctctcctgtttggcggagctgacaatggcggaggctgaaggcaatgcaagctgcacagtcagtctagggggtgccaatatggcagagacccacaaagccatgatcctgcaactcaatcccagtgagaactgcacctggacaatagaaagaccagaaaacaaaagcatcagaattatcttttcctatgtccagcttgatccagatggaagctgtgaaagtgaaaacattaaagtctttgacggaacctccagcaatgggcctctgctagggcaagtctgcagtaaaaacgactatgttcctgtatttgaatcatcatccagtacattgacgtttcaaatagttactgactcagcaagaattcaaagaactgtctttgtcttctactacttcttctctcctaacatctctattccaaactgtggcggttacctggataccttggaaggatccttcaccagccccaattacccaaagccgcatcctgagctggcttattgtgtgtggcacatacaagtggagaaagattacaagataaaactaaacttcaaagagattttaggccctcattctctagcctagaaatagacaaacagtgcaaatttgattttcttgccatctatgatggcccctccaccaactctggcctgattggacaagtctgtggccgtgtgactcccacctttcgaaattggtcatcaaactctctgactgtcggtgttgtcttacagattatgccaattcttaccgggggattttctgcttcctacacctcaatttatgcagaaaacatcaacactacatctttaacttgctcttctgacaggatgagagttattataagcaaatcctacctagaggcttttaactctaatgggaataacttgcaactaaaagacccaacttgcagaccaaaattatcaaatgttgtggaattttctgtccctcttaatggatgtggtacaatcagaaaggtagaagatcagtcaattacttacaccaatataatcaccttttctgcatcctcaacttctgaagtgatcacccgtcagaaacaactccagattattgtgaagtgtgaaatgggacataattctacagtggagataatatacataacagaagatgatgtaatacaaagtcaaaatgcactgggcaaatataacaccagcatggctctttttgaatccaattcatttgaaaagactatacttgaatcaccatattatgtggatttgaaccaaactctttttgttcaagttagtctgcacacctcagatccaaatttggtggtgtttcttgatacctgtagagcctctcccacctctgactttgcatctccaacctacgacctaatcaagagtggatgtagtcgagatgaaacttgtaaggtgtatcccttatttggacactatgggagattccagtttaatgcctttaaattcttgagaagtatgagctctgtgtatctgcagtgtaaagttttgatatgtgatagcagtgaccaccagtctcgctgcaatcaaggttgtgtctccagaagcaaacgagacatttcttcatataaatggaaaacagattccatcataggacccattcgtctgaaaagggatcgaagtgcaagtggcaattcaggatttcagcatgaaacacatgcggaagaaactccaaaccagcctttcaacagtgtgcatctgttttccttcatggttctagctctgaatgtggtgactgtagcgacaatcacagtgaggcattttgtaaatcaacgggcagactacaaataccagaagctgcagaactattaactaacaggtccaaccctaagtgagacatgtttctccaggatgccaaaggaaatgctacctcgtggctacacatattatgaataaatgaggaagggcctgaaagtgacacacaggcctgcatgtc

SEQ ID NO: 318587 - DNA, 490 bp, Homo sapiens
gatctttattttgttagataatctggaatatttgtcaataaagattgggtaaagtgaaaagagggtaaagtgaaaagttgatattctcatatttttgtaccatttttcatagtttgcttgaggggataggttataaccaatctggaaagcattcacagttgtcatgacaaacaaatacaatgaaggtgtagtgtgtattgaatagtcccctagcaaaatcagtggggcaaacctctgggatacaaggtggttgaagttaataaatcatactcaaaggcttccaggacagaaaaacaaaaatgggagattttaagtcagtaagggaaagcttcctcaaaaaaccctcgtgagagaaatgaagatagccacacctgactgagaaattaagtggaggtgaactttgaaatctgtaaataatccatgtgtatgtaattgagaattgacattgtgaccttatgataattggatagctatttttattttcaatgtg

SEQ ID NO: 318588 - DNA, 1876 bp, Homo sapiens
agtttcggaaccccagccagctcacctctgcgccgctgaacccgatccgagcctccggcaaaggtttttccctcctcccccggccgagggcttctgccgcccgggcacccccgccccgcggcgccccacattcccccagcccggggcccttggcgcgtgcgctccgtgcggctgtgctccgcgggactttgtttgtttcctcctcgtccctctttgttgggctgaacaccagcctcgtcaaagccccccactccggagggagttcggcttctccagcagggcggctgcagcgcgctgccccgaccccgcctgcggcccctcacgccgctagtgctcccaccccgccctcctggcaccccgcctgcgtccgttcgcccgaggaagccaaccgcgacttcattgatgcacccattccagtggtgtaacgggtgtttctgtggcctgggactggttagcaccaacaagtcctgctcgatgccacccatcagtttccaagaccttccgctcaacatctatatggtcatctttggcacaggcatctttgtcttcatgctcagccttatcttctgctgctattttatcagcaaactgcggaaccaggcacagagtgagcgatacggatataaggaggtggtgcttaaaggtgatgccaagaagttacaattatatgggcagacctgcgcagtctgtctggaagacttcaaggggaaggatgagttaggcgtgctcccgtgccaacacgcctttcaccgcaagtgtctggtgaaatggctggaagttcgctgtgtctgccccatgtgtaacaagcccattgctagtccctcagaggccacgcagaacattgggattctattggatgagctggtgtgagtgctgccgctacaccgagacctggagaagacctcttgcctcatggatgtctggtccctctgcacagctccaaccaacaggactgtagggtgatgacgatcactttcccagtgatgagaagggtggtctaggactgggcttctaccctcagtgcaagaccagtgccagatgtgcccccacttcctgcctcctgaagccttcttccctgctactccatgctggtggcctcacccatcaagaccactgtctcctggtactggactatctacctgccttgtccctgttctgggggaaggtgtccaccccgatcaagaacatggagaaagtcctctttcaaggctcccattaggaggatgagctgccttgacccagaagggatgagacgggctcttacctctctacaaccttccctccccttcccactccttccggagtaaggttagaagggaaggaaggaaagatcaaggaaccaagcgcctccacgggaggcgagggaggctctgtatgaaacagaagagcagggacataaaggaaaatgtcagtgtttacatgggacctatggaaacaaaggctggcgggcgccagctgactccagagtaagagagggcccttcccctgccaggacccacggtgctatccattcagtctcttcctcagttaatctcggagcttcctattccatgttgaggtttgtgggcccctctagaggagggctagttctatacttaaattgattcccaggggcctttttttttttttttttttttttttttgatcaaaaggggtgtggggatgggggtgtctacggttaagcaacagatacctccttccctttgtaaatagtatttttatacttcatcctcgcctctcaggctttagatacgaaatctccagaatggaagggggtggggattttctgttcctccctggagtgggtgagggtgggagaaagttacatatttaaagaaaaataaatttaataacaagtttctctaacctacttttg

SEQ ID NO: 318589 - DNA, 1814 bp, Homo sapiens
tcaatggtaaggcagtgctgtggaaatctgtctgtgtaactggggtgctatgcaggcctgtctgggtgactgtcagggacaactgtcctaccacaccaaggacacagccctgggggtgcttttcttcatagccaaagaagctgcaggaaacccaccctagtgggacaaagaccaatgcagggtcagtccccacagccaggtgatgcaaacaggctggacgtgggccgcctcccctccagcttgacttgtgacagggaaaccaatgcagcagcagcagggccaccagagtcctgtcctggggacaggcttccttccagcgggcggggagtgggtgctcctgccagaccagcctggcttccacggttccagagaccctgttctccctcagcccagtccccgcccccactccttggctttatgagttcattggctgaagtcacccggagacaatgctgagtgttccacccctgagtcgaagcccagcccagggcagcccagccagacgcctccggtagtgtaaatgaggacaatgcctgctggcccacatgacggggggatgtagacggcagcggcgccagtcgctcctggcaccatggacgatgccacagtcctaaggaagaagggttacatcgtaggcatcaatcttggcaagggttcctacgcaaaagtcaaatctgcctactctgagcgcctcaagttcaatgtggctgtcaagatcatcgaccgcaagaaaacacctactgactttgtggagagattccttcctcgggagatggacatcctggcaactgtcaaccacggctccatcatcaagacttacgagatctttgagacctctgacggacggatctacatcatcatggagcttggcgtccagggcgacctcctcgagttcatcaagtgccagggagccctgcatgaggacgtggcacgcaagatgttccgacagctctcctccgccgtcaagtactgccacgacctggacatcgtccaccgggacctcaagtgcgagaaccttctcctcgacaaggacttcaacatcaagctgtctgactttggcttctccaagcgctgcctgcgggacagcaatgggcgcatcatcctcagcaagaccttctgcgggtcggcagcatatgcagcccccgaggtgctgcagagcatcccctaccagcccaaggtgtatgacatctggagcctgggcgtgatcctgtacatcatggtctgcggctccatgccctatgacgactccgacatcaggaagatgctgcgtatccagaaggagcaccgtgtggacttcccgcgctccaagaacctgacctgcgagtgcaaggacctcatctaccgcatgctgcagcccgacgtcagtcagcggctccacatcgatgagatcctcagccactcgtggctgcagccccccaagcccaaagccacgtcttctgcctccttcaagagggagggggagggcaagtaccgcgctgagtgcaaactggacaccaagacaggcttgaggcccgaccaccggcccgaccacaagcttggagccaaaacccagcacatcccccacattggacagaatgtagattgaatccctgggggcacatccgtcagcagcacagcaacagtatttccctcggcttggggagggttgtgttgggaatgagcgcccagtgcccatggatgaagtgaaggaaatggccatggttttctcccaggtggaaggggagaccgggcagtaacggtgaaattctagctatttggtttctaacaatggcacgtcaacaaatttgaataatcaatacacactatattaatgt

SEQ ID NO: 318590 - DNA, 2891 bp, Homo sapiens
tcaatggtaaggcagtgctgtggaaatctgtctgtgtaactggggtgctatgcaggcctgtctgggtgactgtcagggacaactgtcctaccacaccaaggacacagccctgggggtgcttttcttcatagccaaagaagctgcaggaaacccaccctagtgggacaaagaccaatgcagggtcagtccccacagccaggtgatgcaaacaggctggacgtgggccgcctcccctccagcttgacttgtgacagggaaaccaatgcagcagcagcagggccaccagagtcctgtcctggggacaggcttccttccagcgggcggggagtgggtgctcctgccagaccagcctggcttccacggttccagagaccctgttctccctcagcccagtccccgcccccactccttggctttatgagttcattggctgaagtcacccggagacaatgctgagtgttccacccctgagtcgaagcccagcccagggcagcccagccagacgcctccggtagtgtaaatgaggacaatgcctgctggcccacatgacggggggatgtagacggcagcggcgccagtcgctcctggcaccatggacgatgccacagtcctaaggaagaagggttacatcgtaggcatcaatcttggcaagggttcctacgcaaaagtcaaatctgcctactctgagcgcctcaagttcaatgtggctgtcaagatcatcgaccgcaagaaaacacctactgactttgtggagagattccttcctcgggagatggacatcctggcaactgtcaaccacggctccatcatcaagacttacgagatctttgagacctctgacggacggatctacatcatcatggagcttggcgtccagggcgacctcctcgagttcatcaagtgccagggagccctgcatgaggacgtggcacgcaagatgttccgacagctctcctccgccgtcaagtactgccacgacctggacatcgtccaccgggacctcaagtgcgagaaccttctcctcgacaaggacttcaacatcaagctgtctgactttggcttctccaagcgctgcctgcgggacagcaatgggcgcatcatcctcagcaagaccttctgcgggtcggcagcatatgcagcccccgaggtgctgcagagcatcccctaccagcccaaggtgtatgacatctggagcctgggcgtgatcctgtacatcatggtctgcggctccatgccctatgacgactccgacatcaggaagatgctgcgtatccagaaggagcaccgtgtggacttcccgcgctccaagaacctgacctgcgagtgcaaggacctcatctaccgcatgctgcagcccgacgtcagtcagcggctccacatcgatgagatcctcagccactcgtggctgcagccccccaagcccaaagccacgtcttctgcctccttcaagagggagggggagggcaagtaccgcgctgagtgcaaactggacaccaagacaggcttgaggcccgaccaccggcccgaccacaagcttggagccaaaacccagcaccggctgctggtggtgcccgagaacgagaacaggatggaggacaggctggccgagacctccagggccaaagaccatcacatctccggagctgaggtggggaaagcaagcacctagcatgacaatggccccgttgtgtgtggtgggggtcggggttggggggcatggtgcagtcggccttcacgtaaactaagtaggcaggtaggatctgaagaaggcacaggtgcaagtaaaattcgtcaattaaaccactattttgattacgttccattagctttcttccacttagcagcaaagacgttccttactgaccaccaaataaaccacagggtgtgtgcaagcatcaagagtgcccagtgaggagtgtttttctctgggactcagccaaccgccccacctgacacacagtggtctccggcctaggagcacaggacagatgctcaggtacaggcagaatcacagtgtggcctggccttgtgggggacaagagggcctctgccagggtccacccaccaggcccacactgtctccctctgacctggccttgtccccaatgccctggggctggccagctccagtggtccacgactccccctggcttcctgcagttcagccccctctgacctacccccactccctcacaatccctcgctcagcatcctcctcttcctctatttcctggagtcatgtgagatttctgtcctcagccctcaagttccctgccctgtcctccaggggcagccccagctgagacctccccgtgtgccctccccacccagtggctcttcaagctgctcagcagcccttgatgatggcacactggccggtcttttgtgcttcctgctgggtcacccattgctcccaaagcatgcggcccacttgctggccaagtgctccaggtggtcagcacctagacatgctcctcccccctccctccccacttcctgggggctcccttgggataacgtgcaccctttcctaggggataaagcactgaaggccccacgtcccccaccccttaagagtcccagcctgatctgtccagcaacccactgttatctgggagctcctgttggtggaagtgaccaggtgaggccagggccagcagcataagatgggcagtgcctatagcagaggggtgagtgggatagtcccaccccatgagctggaagccaggtgctgggagaaggtgatagctgagatcacctgatatgcagcccccacacagtcctataaccagcgcacctcacagccggcaagcccagagtggaggctgcagacctgggcccagaaccgcaggggaacctaagggtacaacttccaagggctccgtttctcc

SEQ ID NO: 318591 - DNA, 307 bp, Homo sapiens
  misc_feature (80)..(80): n is a, c, g, or t
tttttaatttaaaacttacaataaaaagaaaaaaacctatatgccaccaattctaatgcttgtaagctgaaaccatttanggaatgggactttgatctgaagaaattaccaaacattaaaatgagaaaaatttgcgctaatgatgcaattcccaagacgtgcaagaggaaaactactataactgtagaccaagatttgggggaattggaactaaacgatgaatcaagtgattcagatgaggaaatgactgcagtggcctaattgtcttcacttgaattgaaaataaataatttgagagcttcaaatt

SEQ ID NO: 318592 - DNA, 2470 bp, Homo sapiens
gtgtagcgtctccacccgggctccaatccccagcctcgcactcagcaccaggcagagttcagcctcccgccgcaagctcccttccgccgctcccggcgagcacgcaggtctggctgtccgttgggctagagcttaaaagcccaacacgggcgaaaaagacgcggtctcagttaacggggacgctttagagaaacgcactcgcctctcctgttccggttgggtcggcgcgggcttctcaggcgccacgtgggattcggcccgggtgctcttgtgagctgctgctcctgcggttggtgagattacctgggtctagagtgcggagctgctccgtggccacgaggacgtcaccatgcccaaagcaccaaagggaaaaagtgcaggacgggaaaaaaaagtcatccatccatatagtagaaaagcagctcaaattacgagagaggcccacaaacaagaaaaaaaggaaaaattgaagaatgaaaaggccttgcgtctcaaccttgttggtgaaaaactgcaatggtttcaaaatcatcttgatcccccaaaaaagagatattcaaagaaagatgcttgtgaactaattgaaaggtacttaaatcgattcagcagtgagctggagcagattgagttacataacagtatcagggacaggcaggggaggcggcactgttcccgggagaccgtcatcaagcagacgatggagcgggagcgacagcagtttgagggatatggccttgagattccagacattctaaatgcaagtaatctgaaaacatttagggaatgggactttgatctgaagaaattaccaaacattaaaatgagaaaaatttgcgctaatgatgcaattcccaagacgtgcaagaggaaaactactataactgtagaccaagatttgggggaattggaactaaacgatgaatcaagtgattcagatgaggaaatgactgcagtggcctaattgtcttcacttgaattgaaaataaataatttgagagcttcaaattatattcattgattatggtacctaattgtcatgatacaaaaatttgatactgacattctcttatatgatgagagtttcatttgcgtttcaaaaatggtgttatgatacttattttaaaatgaagattgcttttcatttccattaagttgctaaaatagatagatgtgatctgcagaagttgtttagtcttcatctgaatttcaggctgggagggagcaatataactaaggacaaaaaatgttttgtttttcttgtgtatttatgatcacctaatttcacgttttgtgaaatggacagtaacctgtttcctgaaagattcctgtgggtactttttgagctgtgataatagcaaaattgtttttcggtaataatatcacactaatgcttcttttaaacattaaacctattttccttttttacagaataagggaaaatgtgataagaagtttgtatacatttctggattatagattattatttatcttttgaaccagagctaaatggtaaaagaaaaaaaatcagtgatgattgttatgttgatctcccacaattaatttatcttttgacaaaggggataaagagtttcagtttagctccttttgattgtatattattttttgcttttttattgtgaaaagaggtaggttttatttgtggagagagagttgaagattagggaaccagtgattttaattatgctactttttcttctaagagataaattgatatatcattcagtgtcatgaaaaacatgaatgttgtacaattttcttcctcaaaaaactttttaaatgtaagtatccttattttttttttaaaagagcacaatgtaggtgtatttgagtattttcaagaaaagaataaaaacattaatgcagtattaggttaactggatatcaactaagccttgttaacagttaaagtattataactttttttacttctgaaaattaaaaataaaatttatttctgcaatttcaaaaaaaaaaaaaaaaaaaaaaaaaaaaaaaaaaaaaaaaaaaaaaaaaaaaaaaaaacacaaacaaaaaaataataaacaaaaagagaagagaaaacacaaaaaaacaaaaacaaaaaaaaaaaacattaaaagataaaaacaaaaagaaaacacaagaggagggaggccataaatataaaaacacctacgagaggagggggaaacataacacaagcaccgacggtattgtaaaaaacaggagacccccatatattcagtgtatcatgaaacataaaatccgctgcacgcttacaacaattgagcagttacaaactgaacggaacttaacaagtgctgacagcatgaagaacaaccactctcgggacggtggatgatacaggacccaaatccctaagaataatacttgtcggtattcttttttttcggtctttataggagaacctgctaattcgcaaagataatttcgacatttaaaaaaatac

SEQ ID NO: 318593 - DNA, 1741 bp, Homo sapiens
gtgtagcgtctccacccgggctccaatccccagcctcgcactcagcaccaggcagagttcagcctcccgccgcaagctcccttccgccgctcccggcgagcacgcagcccaaagcaccaaagggaaaaagtgcaggacgggaaaaaaaagtcatccatccatatagtagaaaagcagctcaaattacgagagaggcccacaaacaagaaaaaaaggaaaaattgaagaatgaaaaggccttgcgtctcaaccttgttggtgaaaaactgcaatggtttcaaaatcatcttgatcccccaaaaaagagatattcaaagaaagatgcttgtgaactaattgaaaggtacttaaatcgattcagcagtgagctggagcagattgagttacataacagtatcagggacaggcaggggaggcggcactgttcccgggagaccgtcatcaagcagacgatggagcgggagcgacagcagtttgagggatatggccttgagattccagacattctaaatgcaagtaatctgaaaacatttagggaatgggactttgatctgaagaaattaccaaacattaaaatgagaaaaatttgcgctaatgatgcaattcccaagacgtgcaagaggaaaactactataactgtagaccaagatttgggggaattggaactaaacgatgaatcaagtgattcagatgaggaaatgactgcagtggcctaattgtcttcacttgaattgaaaataaataatttgagagcttcaaattatattcattgattatggtacctaattgtcatgatacaaaaatttgatactgacattctcttatatgatgagagtttcatttgcgtttcaaaaatggtgttatgatacttattttaaaatgaagattgcttttcatttccattaagttgctaaaatagatagatgtgatctgcagaagttgtttagtcttcatctgaatttcaggctgggagggagcaatataactaaggacaaaaaatgttttgtttttcttgtgtatttatgatcacctaatttcacgttttgtgaaatggacagtaacctgtttcctgaaagattcctgtgggtactttttgagctgtgataatagcaaaattgtttttcggtaataatatcacactaatgcttcttttaaacattaaacctattttccttttttacagaataagggaaaatgtgataagaagtttgtatacatttctggattatagattattatttatcttttgaaccagagctaaatggtaaaagaaaaaaaatcagtgatgattgttatgttgatctcccacaattaatttatcttttgacaaaggggataaagagtttcagtttagctccttttgattgtatattattttttgcttttttattgtgaaaagaggtaggttttatttgtggagagagagttgaagattagggaaccagtgattttaattatgctactttttcttctaagagataaattgatatatcattcagtgtcatgaaaaacatgaatgttgtacaattttcttcctcaaaaaactttttaaatgtaagtatccttattttttttttaaaagagcacaatgtaggtgtatttgagtattttcaagaaaagaataaaaacattaatgcagtattaggttaactggatatcaactaagccttgttaacagttaaagtattataactttttttacttctgaaaattaaaaataaaatttatttctgcaatttca

SEQ ID NO: 318594 - DNA, 2018 bp, Homo sapiens
gtgtagcgtctccacccgggctccaatccccagcctcgcactcagcaccaggcagagttcagcctcccgccgcaagctcccttccgccgctcccggcgagcacgcaggtctggctgtccgttgggctagagcttaaaagcccaacacgggcgaaaaagacgcggtctcagttaacggggacgctttagagaaacgcactcgcctctcctgttccggttgggtcggcgcgggcttctcaggcgccacgtgggattcggcccgggtgctcttgtgagctgctgctcctgcggttggtgagattacctgggtctagagtgcggagctgctccgtggccacgaggacgtcaccatggtgggccccctcctgctcccccgaaccgctcgcccaaagcaccaaagggaaaaagtgcaggacgggaaaaaaaagtcatccatccatatagtagaaaagcagctcaaattacgagagaggcccacaaacaagaaaaaaaggaaaaattgaagaatgaaaaggccttgcgtctcaaccttgttggtgaaaaactgcaatggtttcaaaatcatcttgatcccccaaaaaagagatattcaaagaaagatgcttgtgaactaattgaaaggtacttaaatcgattcagcagtgagctggagcagattgagttacataacagtatcagggacaggcaggggaggcggcactgttcccgggagaccgtcatcaagcagacgatggagcgggagcgacagcagtttgagggatatggccttgagattccagacattctaaatgcaagtaatctgaaaacatttagggaatgggactttgatctgaagaaattaccaaacattaaaatgagaaaaatttgcgctaatgatgcaattcccaagacgtgcaagaggaaaactactataactgtagaccaagatttgggggaattggaactaaacgatgaatcaagtgattcagatgaggaaatgactgcagtggcctaattgtcttcacttgaattgaaaataaataatttgagagcttcaaattatattcattgattatggtacctaattgtcatgatacaaaaatttgatactgacattctcttatatgatgagagtttcatttgcgtttcaaaaatggtgttatgatacttattttaaaatgaagattgcttttcatttccattaagttgctaaaatagatagatgtgatctgcagaagttgtttagtcttcatctgaatttcaggctgggagggagcaatataactaaggacaaaaaatgttttgtttttcttgtgtatttatgatcacctaatttcacgttttgtgaaatggacagtaacctgtttcctgaaagattcctgtgggtactttttgagctgtgataatagcaaaattgtttttcggtaataatatcacactaatgcttcttttaaacattaaacctattttccttttttacagaataagggaaaatgtgataagaagtttgtatacatttctggattatagattattatttatcttttgaaccagagctaaatggtaaaagaaaaaaaatcagtgatgattgttatgttgatctcccacaattaatttatcttttgacaaaggggataaagagtttcagtttagctccttttgattgtatattattttttgcttttttattgtgaaaagaggtaggttttatttgtggagagagagttgaagattagggaaccagtgattttaattatgctactttttcttctaagagataaattgatatatcattcagtgtcatgaaaaacatgaatgttgtacaattttcttcctcaaaaaactttttaaatgtaagtatccttattttttttttaaaagagcacaatgtaggtgtatttgagtattttcaagaaaagaataaaaacattaatgcagtattaggttaactggatatcaactaagccttgttaacagttaaagtattataactttttttacttctgaaaattaaaaataaaatttatttctgcaatttca

SEQ ID NO: 318595 - DNA, 1837 bp, Homo sapiens
gtgtagcgtctccacccgggctccaatccccagcctcgcactcagcaccaggcagagttcagcctcccgccgcaagctcccttccgccgctcccggcgagcacgcaggtctggctgtccgttgggctagagcttaaaagcccaacacgggcgaaaaagacgcggtctcagttaacggggacgctttagagaaacgcactcgcctctcctgttccggttgggtcggcgcgggcttctcaggcgccacgtgggattcggcccgggtgctcttgtgagctgctgctcctgcggttggtgagattacctgggtctagagtgcggagctgctccgtggccacgaggacgtcaccatgcccaaagcaccaaagggaaaaagtgcaggacgggaaaaaaaagtcatccatccatatagtagaaaagcagctcaaattacgagagaggcccacaaacaagaaaaaaaggaaaaattgaagaatgaaaaggccttgcgtctcaaccttgttggtgaaaaactgcaatggtttcaaaatcatcttgatcccccaaaaaagagatattcaaagaaagatgcttgtgaactaattgaaagagattccagacattctaaatgcaagtaatctgaaaacatttagggaatgggactttgatctgaagaaattaccaaacattaaaatgagaaaaatttgcgctaatgatgcaattcccaagacgtgcaagaggaaaactactataactgtagaccaagatttgggggaattggaactaaacgatgaatcaagtgattcagatgaggaaatgactgcagtggcctaattgtcttcacttgaattgaaaataaataatttgagagcttcaaattatattcattgattatggtacctaattgtcatgatacaaaaatttgatactgacattctcttatatgatgagagtttcatttgcgtttcaaaaatggtgttatgatacttattttaaaatgaagattgcttttcatttccattaagttgctaaaatagatagatgtgatctgcagaagttgtttagtcttcatctgaatttcaggctgggagggagcaatataactaaggacaaaaaatgttttgtttttcttgtgtatttatgatcacctaatttcacgttttgtgaaatggacagtaacctgtttcctgaaagattcctgtgggtactttttgagctgtgataatagcaaaattgtttttcggtaataatatcacactaatgcttcttttaaacattaaacctattttccttttttacagaataagggaaaatgtgataagaagtttgtatacatttctggattatagattattatttatcttttgaaccagagctaaatggtaaaagaaaaaaaatcagtgatgattgttatgttgatctcccacaattaatttatcttttgacaaaggggataaagagtttcagtttagctccttttgattgtatattattttttgcttttttattgtgaaaagaggtaggttttatttgtggagagagagttgaagattagggaaccagtgattttaattatgctactttttcttctaagagataaattgatatatcattcagtgtcatgaaaaacatgaatgttgtacaattttcttcctcaaaaaactttttaaatgtaagtatccttattttttttttaaaagagcacaatgtaggtgtatttgagtattttcaagaaaagaataaaaacattaatgcagtattaggttaactggatatcaactaagccttgttaacagttaaagtattataactttttttacttctgaaaattaaaaataaaatttatttctgcaatttca

SEQ ID NO: 318596 - DNA, 1869 bp, Homo sapiens
gtgtagcgtctccacccgggctccaatccccagcctcgcactcagcaccaggcagagttcagcctcccgccgcaagctcccttccgccgctcccggcgagcacgcaggtctggctgtccgttgggctagagcttaaaagcccaacacgggcgaaaaagacgcggtctcagttaacggggacgctttagagaaacgcactcgcctctcctgttccggttgggtcggcgcgggcttctcaggcgccacgtgggattcggcccgggtgctcttgtgagctgctgctcctgcggttggtgagattacctgggtctagagtgcggagctgctccgtggccacgaggacgtcaccatggtgggccccctcctgctcccccgaaccgctcgcccaaagcaccaaagggaaaaagtgcaggacgggaaaaaaaagtcatccatccatatagtagaaaagcagctcaaattacgagagaggcccacaaacaagaaaaaaaggaaaaattgaagaatgaaaaggccttgcgtctcaaccttgttggtgaaaaactgcaatggtttcaaaatcatcttgatcccccaaaaaagagatattcaaagaaagatgcttgtgaactaattgaaagagattccagacattctaaatgcaagtaatctgaaaacatttagggaatgggactttgatctgaagaaattaccaaacattaaaatgagaaaaatttgcgctaatgatgcaattcccaagacgtgcaagaggaaaactactataactgtagaccaagatttgggggaattggaactaaacgatgaatcaagtgattcagatgaggaaatgactgcagtggcctaattgtcttcacttgaattgaaaataaataatttgagagcttcaaattatattcattgattatggtacctaattgtcatgatacaaaaatttgatactgacattctcttatatgatgagagtttcatttgcgtttcaaaaatggtgttatgatacttattttaaaatgaagattgcttttcatttccattaagttgctaaaatagatagatgtgatctgcagaagttgtttagtcttcatctgaatttcaggctgggagggagcaatataactaaggacaaaaaatgttttgtttttcttgtgtatttatgatcacctaatttcacgttttgtgaaatggacagtaacctgtttcctgaaagattcctgtgggtactttttgagctgtgataatagcaaaattgtttttcggtaataatatcacactaatgcttcttttaaacattaaacctattttccttttttacagaataagggaaaatgtgataagaagtttgtatacatttctggattatagattattatttatcttttgaaccagagctaaatggtaaaagaaaaaaaatcagtgatgattgttatgttgatctcccacaattaatttatcttttgacaaaggggataaagagtttcagtttagctccttttgattgtatattattttttgcttttttattgtgaaaagaggtaggttttatttgtggagagagagttgaagattagggaaccagtgattttaattatgctactttttcttctaagagataaattgatatatcattcagtgtcatgaaaaacatgaatgttgtacaattttcttcctcaaaaaactttttaaatgtaagtatccttattttttttttaaaagagcacaatgtaggtgtatttgagtattttcaagaaaagaataaaaacattaatgcagtattaggttaactggatatcaactaagccttgttaacagttaaagtattataactttttttacttctgaaaattaaaaataaaatttatttctgcaatttca

SEQ ID NO: 318597 - DNA, 1943 bp, Homo sapiens
gtgtagcgtctccacccgggctccaatccccagcctcgcactcagcaccaggcagagttcagcctcccgccgcaagctcccttccgccgctcccggcgagcacgcaggtctggctgtccgttgggctagagcttaaaagcccaacacgggcgaaaaagacgcggtctcagttaacggggacgctttagagaaacgcactcgcctctcctgttccggttgggtcggcgcgggcttctcaggcgccacgtgggattcggcccgggtgctcttgtgagctgctgctcctgcggttggtgagattacctgggtctagagtgcggagctgctccgtggccacgaggacgtcaccatgcccaaagcaccaaagggaaaaagtgcaggacgggaaaaaaaagtcatccatccatatagtagaaaagcagctcaaattacgagagaggcccacaaacaagaaaaaaaggaaaaattgaagaatgaaaaggccttgcgtctcaaccttgttggtgaaaaactgcaatggtttcaaaatcatcttgatcccccaagtacttaaatcgattcagcagtgagctggagcagattgagttacataacagtatcagggacaggcaggggaggcggcactgttcccgggagaccgtcatcaagcagacgatggagcgggagcgacagcagtttgagggatatggccttgagattccagacattctaaatgcaagtaatctgaaaacatttagggaatgggactttgatctgaagaaattaccaaacattaaaatgagaaaaatttgcgctaatgatgcaattcccaagacgtgcaagaggaaaactactataactgtagaccaagatttgggggaattggaactaaacgatgaatcaagtgattcagatgaggaaatgactgcagtggcctaattgtcttcacttgaattgaaaataaataatttgagagcttcaaattatattcattgattatggtacctaattgtcatgatacaaaaatttgatactgacattctcttatatgatgagagtttcatttgcgtttcaaaaatggtgttatgatacttattttaaaatgaagattgcttttcatttccattaagttgctaaaatagatagatgtgatctgcagaagttgtttagtcttcatctgaatttcaggctgggagggagcaatataactaaggacaaaaaatgttttgtttttcttgtgtatttatgatcacctaatttcacgttttgtgaaatggacagtaacctgtttcctgaaagattcctgtgggtactttttgagctgtgataatagcaaaattgtttttcggtaataatatcacactaatgcttcttttaaacattaaacctattttccttttttacagaataagggaaaatgtgataagaagtttgtatacatttctggattatagattattatttatcttttgaaccagagctaaatggtaaaagaaaaaaaatcagtgatgattgttatgttgatctcccacaattaatttatcttttgacaaaggggataaagagtttcagtttagctccttttgattgtatattattttttgcttttttattgtgaaaagaggtaggttttatttgtggagagagagttgaagattagggaaccagtgattttaattatgctactttttcttctaagagataaattgatatatcattcagtgtcatgaaaaacatgaatgttgtacaattttcttcctcaaaaaactttttaaatgtaagtatccttattttttttttaaaagagcacaatgtaggtgtatttgagtattttcaagaaaagaataaaaacattaatgcagtattaggttaactggatatcaactaagccttgttaacagttaaagtattataactttttttacttctgaaaattaaaaataaaatttatttctgcaatttca

SEQ ID NO: 318598 - DNA, 953 bp, Homo sapiens
gtgtagcgtctccacccgggctccaatccccagcctcgcactcagcaccaggcagagttcagcctcccgccgcaagctcccttccgccgctcccggcgagcacgcaggtctggctgtccgttgggctagagcttaaaagcccaacacgggcgaaaaagacgcggtctcagttaacggggacgctttagagaaacgcactcgcctctcctgttccggttgggtcggcgcgggcttctcaggcgccacgtgggattcggcccgggtgctcttgtgagctgctgctcctgcggttggtgagattacctgggtctagagtgcggagctgctccgtggccacgaggacgtcaccatgcccaaagcaccaaagggaaaaagtgcaggacgggaaaaaaaagtcatccatccatatagtagaaaagcagctcaaattacgagagaggcccacaaacaagaaaaaaaggaaaaattgaagaatgaaaaggccttgcgtctcaaccttgttggtgaaaaactgcaatggtttcaaaatcatcttgatcccccaaaaaagagatattcaaagaaagatgcttgtgaactaattgaaaggtacttaaatcgattcagcagtgagctggagcagattgagttacataacagtatcagggacaggcaggggaggcggcactgttcccgggagaccgtcatcaagcagacgatggagcgggagcgacagcagtttgagggatatggccttgagattccagacattctaaatgcaagtaatctgaaaacatttagggaatgggactttgatctgaagaaattaccaaacattaaaatgagaaaaatttgcgctaatgatgcaattcccaagacgtgcaagaggtcaagtgattcagatgaggaaatgactgcagtggcctaattgtcttcacttgaattgaaaataaataatttgagagcttcaaatt

SEQ ID NO: 318599 - DNA, 858 bp, Homo sapiens
gtgtagcgtctccacccgggctccaatccccagcctcgcactcagcaccaggcagagttcagcctcccgccgcaagctcccttccgccgctcccggcgagcacgcaggtctggctgtccgttgggctagagcttaaaagcccaacacgggcgaaaaagacgcggtctcagttaacggggacgctttagagaaacgcactcgcctctcctgttccggttgggtcggcgcgggcttctcaggcgccacgtgggattcggcccgggtgctcttgtgagctgctgctcctgcggttggtgagattacctgggtctagagtgcggagctgctccgtggccacgaggacgtcaccatgcccaaagcaccaaagggaaaaagtgcaggacgggaaaaaaaagtcatccatccatatagtagaaaagcagctcaaattacgagagaggcccacaaacaagaaaaaaaggaaaaattgaagaatgaaaaggccttgcgtctcaaccttgttggtgaaaaactgcaatggtttcaaaatcatcttgatcccccaaaaaagagatattcaaagaaagatgcttgtgaactaattgaaagagattccagacattctaaatgcaagtaatctgaaaacatttagggaatgggactttgatctgaagaaattaccaaacattaaaatgagaaaaatttgcgctaatgatgcaattcccaagacgtgcaagaggaaaactactataactgtagaccaagatttgggggaattggaactaaacgatgaatcaagtgattcagatgaggaaatgactgcagtggcctaattgtcttcacttgaattgaaaataaataatttgagagcttcaaatt

SEQ ID NO: 318600 - DNA, 140 bp, Homo sapiens
gtaagtatcttttcatcatttgtattactcgttggtaaaaagcccctttatacttttatctttcaaacatatatcctttcacagtattgtctccctttcataaatatttattaagtgtgttctgtatgcagagggtgaaa

SEQ ID NO: 318601 - DNA, 1986 bp, Homo sapiens
gtgtagcgtctccacccgggctccaatccccagcctcgcactcagcaccaggcagagttcagcctcccgccgcaagctcccttccgccgctcccggcgagcacgcaggtctggctgtccgttgggctagagcttaaaagcccaacacgggcgaaaaagacgcggtctcagttaacggggacgctttagagaaacgcactcgcctctcctgttccggttgggtcggcgcgggcttctcaggcgccacgtgggattcggcccgggtgctcttgtgagctgctgctcctgcggttggtgagattacctgggtctagagtgcggagctgctccgtggccacgaggacgtcaccatgcccaaagcaccaaagggaaaaagtgcaggacgggaaaaaaaagtcatccatccatatagtagaaaagcagctcaaattacgagagaggcccacaaacaagaaaaaaaggaaaaattgaagaatgaaaaggccttgcgtctcaaccttgttggtgaaaaactgcaatggtttcaaaatcatcttgatcccccaaaaaagagatattcaaagaaagatgcttgtgaactaattgaaaggtacttaaatcgattcagcagtgagctggagcagattgagttacataacagtatcagggacaggcaggggaggcggcactgttcccgggagaccgtcatcaagcagacgatggagcgggagcgacagcagtttgagggatatggccttgagattccagacattctaaatgcaagtaatctgaaaacatttagggaatgggactttgatctgaagaaattaccaaacattaaaatgagaaaaatttgcgctaatgatgcaattcccaagacgtgcaagaggaaaactactataactgtagaccaagatttgggggaattggaactaaacgatgaatcaagtgattcagatgaggaaatgactgcagtggcctaattgtcttcacttgaattgaaaataaataatttgagagcttcaaattatattcattgattatggtacctaattgtcatgatacaaaaatttgatactgacattctcttatatgatgagagtttcatttgcgtttcaaaaatggtgttatgatacttattttaaaatgaagattgcttttcatttccattaagttgctaaaatagatagatgtgatctgcagaagttgtttagtcttcatctgaatttcaggctgggagggagcaatataactaaggacaaaaaatgttttgtttttcttgtgtatttatgatcacctaatttcacgttttgtgaaatggacagtaacctgtttcctgaaagattcctgtgggtactttttgagctgtgataatagcaaaattgtttttcggtaataatatcacactaatgcttcttttaaacattaaacctattttccttttttacagaataagggaaaatgtgataagaagtttgtatacatttctggattatagattattatttatcttttgaaccagagctaaatggtaaaagaaaaaaaatcagtgatgattgttatgttgatctcccacaattaatttatcttttgacaaaggggataaagagtttcagtttagctccttttgattgtatattattttttgcttttttattgtgaaaagaggtaggttttatttgtggagagagagttgaagattagggaaccagtgattttaattatgctactttttcttctaagagataaattgatatatcattcagtgtcatgaaaaacatgaatgttgtacaattttcttcctcaaaaaactttttaaatgtaagtatccttattttttttttaaaagagcacaatgtaggtgtatttgagtattttcaagaaaagaataaaaacattaatgcagtattaggttaactggatatcaactaagccttgttaacagttaaagtattataactttttttacttctgaaaattaaaaataaaatttatttctgcaatttca

SEQ ID NO: 318602 - DNA, 1007 bp, Homo sapiens
gtgtagcgtctccacccgggctccaatccccagcctcgcactcagcaccaggcagagttcagcctcccgccgcaagctcccttccgccgctcccggcgagcacgcaggtctggctgtccgttgggctagagcttaaaagcccaacacgggcgaaaaagacgcggtctcagttaacggggacgctttagagaaacgcactcgcctctcctgttccggttgggtcggcgcgggcttctcaggcgccacgtgggattcggcccgggtgctcttgtgagctgctgctcctgcggttggtgagattacctgggtctagagtgcggagctgctccgtggccacgaggacgtcaccatgcccaaagcaccaaagggaaaaagtgcaggacgggaaaaaaaagtcatccatccatatagtagaaaagcagctcaaattacgagagaggcccacaaacaagaaaaaaaggaaaaattgaagaatgaaaaggccttgcgtctcaaccttgttggtgaaaaactgcaatggtttcaaaatcatcttgatcccccaaaaaagagatattcaaagaaagatgcttgtgaactaattgaaaggtacttaaatcgattcagcagtgagctggagcagattgagttacataacagtatcagggacaggcaggggaggcggcactgttcccgggagaccgtcatcaagcagacgatggagcgggagcgacagcagtttgagggatatggccttgagattccagacattctaaatgcaagtaatctgaaaacatttagggaatgggactttgatctgaagaaattaccaaacattaaaatgagaaaaatttgcgctaatgatgcaattcccaagacgtgcaagaggaaaactactataactgtagaccaagatttgggggaattggaactaaacgatgaatcaagtgattcagatgaggaaatgactgcagtggcctaattgtcttcacttgaattgaaaataaataatttgagagcttcaaatt

SEQ ID NO: 318603 - DNA, 1719 bp, Homo sapiens
gctggtcgattctagatggatcccagttctgacggagactttcgttaatttgagctgctccgtggccacgaggacgtcaccattgcccaaagcaccaaagggaaaaagtgcaggacgggaaaaaaaagtcatccatccatatagtagaaaagcagctcaaattacgagagaggcccacaaacaagaaaaaaaggaaaaattgaagaatgaaaaggccttgcgtctcaaccttgttggtgaaaaactgcaatggtttcaaaatcatcttgatcccccaaaaaagagatattcaaagaaagatgcttgtgaactaattgaaaggtacttaaatcgattcagcagtgagctggagcagattgagttacataacagtatcagggacaggcaggggaggcggcactgttcccgggagaccgtcatcaagcagacgatggagcgggagcgacagcagtttgagggatatggccttgagattccagacattctaaatgcaagtaatctgaaaacatttagggaatgggactttgatctgaagaaattaccaaacattaaaatgagaaaaatttgcgctaatgatgcaattcccaagacgtgcaagaggaaaactactataactgtagaccaagatttgggggaattggaactaaacgatgaatcaagtgattcagatgaggaaatgactgcagtggcctaattgtcttcacttgaattgaaaataaataatttgagagcttcaaattatattcattgattatggtacctaattgtcatgatacaaaaatttgatactgacattctcttatatgatgagagtttcatttgcgtttcaaaaatggtgttatgatacttattttaaaatgaagattgcttttcatttccattaagttgctaaaatagatagatgtgatctgcagaagttgtttagtcttcatctgaatttcaggctgggagggagcaatataactaaggacaaaaaatgttttgtttttcttgtgtatttatgatcacctaatttcacgttttgtgaaatggacagtaacctgtttcctgaaagattcctgtgggtactttttgagctgtgataatagcaaaattgtttttcggtaataatatcacactaatgcttcttttaaacattaaacctattttccttttttacagaataagggaaaatgtgataagaagtttgtatacatttctggattatagattattatttatcttttgaaccagagctaaatggtaaaagaaaaaaaatcagtgatgattgttatgttgatctcccacaattaatttatcttttgacaaaggggataaagagtttcagtttagctccttttgattgtatattattttttgcttttttattgtgaaaagaggtaggttttatttgtggagagagagttgaagattagggaaccagtgattttaattatgctactttttcttctaagagataaattgatatatcattcagtgtcatgaaaaacatgaatgttgtacaattttcttcctcaaaaaactttttaaatgtaagtatccttattttttttttaaaagagcacaatgtaggtgtatttgagtattttcaagaaaagaataaaaacattaatgcagtattaggttaactggatatcaactaagccttgttaacagttaaagtattataactttttttacttctgaaaattaaaaataaaatttatttctgcaatttca

SEQ ID NO: 318604 - DNA, 524 bp, Homo sapiens
ttcagcaacccgtctgaacagatctggcgtcctggagaattctagaatgaaggggaagagaggcagggaagagctgggaaatacgcaaagcgcctttttctccactttcggagatgccaagccgcgcgtccagttgcttggagaagcccgttcaccgcctccagctgctgctctcctcgacatggaccctgagacctgcccctgcccttctggtggctcctgcacctgcgcggactcctgcaagtgcgagggatgcaaatgcacctcctgcaagaagagctgctgctcctgctgccctgcggagtgtgagaagtgtgccaaggactgtgtgtgcaaaggcggagaggcagctgaggcagaagcagagaagtgcagctgctgccagtgagaaggcacccctccgtgtggagcacgtggagatagtgccaggtggctcagtgccacctatgcctgtggtgaagtgtggctggtgtccccttcccctgctgaccttggaggaatgacaataaatcccatgaacagca

SEQ ID NO: 318605 - DNA, 789 bp, Homo sapiens
ggcagtgcgcgcacagcggcggcgagtgggtcgtgcacgcggatgcggggtgggagtgggggcgcacgcgcgggcgtgggcgagcgggccccggcagtgcacacacacggcaggggcgggcgacagatgcagtgcgtgcgccggagcccaagcgcacaaacggaaagagcgggcgcggtgcgcaggggcgggcgcccagcgggcttggcatgcgcgcccccgcccgaggctataaaagcatcgccacctgctgccactagccaagccgcgcgtccagttgcttggagaagcccgttcaccgcctccagctgctgctctcctcgacatggaccctgagacctgcccctgcccttctggtggctcctgcacctgcgcggactcctgcaagtgcgagggatgcaaatgcacctcctgcaagaagagctgctgctcctgctgccctgcggagtgtgagaagtgtgccaaggactgtgtgtgcaaaggcggagaggcagctgaggcagaagcagagaagtgcagctgctgccagtgagaaggcacccctccgtgtggagcacgtggagatagtgccaggtggctcagtgccacctatgcctgtggtgaagtgtggctggtgtccccttcccctgctgaccttggaggaatgacaataaatcccatgaacagcaaaaaaaaaaaaaaaactcctccatctatctcctaccaccccctcactctacccaccaccacctcactccccctctctcactcctccaaacaatcacggcgcggtttttacaacgcgggaat

SEQ ID NO: 318606 - DNA, 481 bp, Homo sapiens
ttcagcaacccgtctgaacagatctggcgtcctggagaattctagaatgaaggggaagagaggcagggaagagctgggaaatacgcaaagcgcctttttctccactttcggagatggtggctcctgcacctgcgcggactcctgcaagtgcgagggatgcaaatgcacctcctgcaagaagagctgctgctcctgctgccctgcggagtgtgagaagtgtgccaaggactgtgtgtgcaaaggcggagaggcagctgaggcagaagcagagaagtgcagctgctgccagtgagaaggcacccctccgtgtggagcacgtggagatagtgccaggtggctcagtgccacctatgcctgtggtgaagtgtggctggtgtccccttcccctgctgaccttggaggaatgacaataaatcccatgaacagcagatgcggcggaaacaaaatcccgggccgctattaatcggggcggggaaggaat

SEQ ID NO: 318607 - DNA, 491 bp, Homo sapiens
caccaggcgcacttctgcaggcctcaggacccacacgaactaacctcaaattaattcattggtctttctgctagacgatgccaagtgagattgagacttccctctaacctcttgctgtcactccatgtcatcctctgctctgagaagtgcgcctgggtgcgcacccaggcgcacttctggtggctcctgcacctgcgcggactcctgcaagtgcgagggatgcaaatgcacctcctgcaagaagagctgctgctcctgctgccctgcggagtgtgagaagtgtgccaaggactgtgtgtgcaaaggcggagaggcagctgaggcagaagcagagaagtgcagctgctgccagtgagaaggcacccctccgtgtggagcacgtggagatagtgccaggtggctcagtgccacctatgcctgtggtgaagtgtggctggtgtccccttcccctgctgaccttggaggaatgacaataaatcccatgaacagca

SEQ ID NO: 318608 - DNA, 543 bp, Homo sapiens
tcagtagtaccccatgttcacctgccgccctgtagttgctcaaggtgtctgaaaaggaaagcgtcctggggcagcaccacgattcgaggtcccagagtagcccagtatgacggcagaattggaatgaaaagataaatgactagaagtgcgcctgggtgcgcacccaggcgcacttctggtggctcctgcacctgcgcggactcctgcaagtgcgagggatgcaaatgcacctcctgcaagaagagctgctgctcctgctgccctgcggagtgtgagaagtgtgccaaggactgtgtgtgcaaaggcggagaggcagctgaggcagaagcagagaagtgcagctgctgccagtgagaaggcacccctccgtgtggagcacgtggagatagtgccaggtggctcagtgccacctatgcctgtggtgaagtgtggctggtgtccccttcccctgctgaccttggaggaatgacaataaatcccatgaacagcagatgcggcggaaacaaaatcccgggccgctattaatcggggcggggaaggaat

SEQ ID NO: 318609 - DNA, 675 bp, Homo sapiens
  misc_feature (531)..(531): n is a, c, g, or t
ttcagcaacccgtctgaacagatctggcgtcctggagaattctagaatgaaggggaagagaggcagggaagagctgggaaatacgcaaagcgcctttttctccactttcggagatgccaagccgcgcgtccagttgcttggagaagcccgttcaccgcctccagctgctgctctcctcgacatggaccctgagacctgcccctgcccttctggtggctcctgcacctgcgcggactcctgcaagtgcgagggatgcaaatgcacctcctgcaagaagagctgctgctcctgctgccctgcggagtgtgagaagtgtgccaaggactgtgtgtgcaaaggcggagaggcagctgaggcagaagcagagaagtgcagctgctgccagtgagaaggcacccctccgtgtggagcacgtggagatagtgccaggtggctcagtgccacctatgcctgtggtgaagtgtggctggtgtccccttcccctgctgaccttggaggaatgacaataaatcccatgaacagcatccgctnattaaaaaaaatatataatttaatattattaaattatattaataaatattcctcgtgggggggcgccgggccccaattcgcccttaagtgagggggtttacaattcactggccggcggttaacaacgcggggccgggaaaaccc

SEQ ID NO: 318610 - DNA, 668 bp, Homo sapiens
ggcagtgcgcgcacagcggcggcgagtgggtcgtgcacgcggatgcggggtgggagtgggggcgcacgcgcgggcgtgggcgagcgggccccggcagtgcacacacacggcaggggcgggcgacagatgcagtgcgtgcgccggagcccaagcgcacaaacggaaagagcgggcgcggtgcgcaggggcgggcgcccagcgggcttggcatgcgcgcccccgcccgaggctataaaagcatcgccacctgctgccactagccaagccgcgcgtccagttgcttggagaagcccgttcaccgcctccagctgctgctctcctcgacatggaccctgagacctgcccctgcccttctggtggctcctgcacctgcgcggactcctgcaagtgcgagggatgcaaatgcacctcctgcaagaagagctgctgctcctgctgccctgcggagtgtgagaagtgtgccaaggactgtgtgtgcaaaggcggagaggcagctgaggcagaagcagagaagtgcagctgctgccagtgagaaggcacccctccgtgtggagcacgtggagatagtgccaggtggctcagtgccacctatgcctgtggtgaagtgtggctggtgtccccttcccctgctgaccttggaggaatgacaataaatcccatgaacagca

SEQ ID NO: 318611 - DNA, 1016 bp, Homo sapiens
  misc_feature (816)..(816): n is a, c, g, or t
  misc_feature (1016)..(1016): n is a, c, g, or t
ggcagtgcgcgcacagcggcggcgagtgggtcgtgcacgcggatgcggggtgggagtgggggcgcacgcgcgggcgtgggcgagcgggccccggcagtgcacacacacggcaggggcgggcgacagatgcagtgcgtgcgccggagcccaagcgcacaaacggaaagagcgggcgcggtgcgcaggggcgggcgcccagcgggcttggcatgcgcgcccccgcccgaggctataaaagcatcgccacctgctgccactagccaagccgcgcgtccagttgcttggagaagcccgttcaccgcctccagctgctgctctcctcgacatggaccctgagacctgcccctgcccttctggtggctcctgcacctgcgcggactcctgcaagtgcgagggatgcaaatgcacctcctgcaagaagagctgctgctcctgctgccctgcggagtgtgagaagtgtgccaaggactgtgtgtgcaaaggcggagaggcagctgaggcagaagcagagaagtgcagctgctgccagtgagaaggcacccctccgtgtggagcacgtggagatagtgccaggtggctcagtgccacctatgcctgtggtgaagtgtggctggtgtccccttcccctgctgaccttggaggaatgacaataaatcccatgaacagcaaaaaaaaaaaaaaaaaaaaaaaaaaaaaaaaaaaaaaaaaaaaaaaaaaataaaaaaaaaaaaattaaaatattaaaaataaaaaatattaataaaataaataaaatatttatttgtatatttttaataatattcacttatattattntatttaaaataattattacatttttttaaatcattattttttaaaaatctttgaatttccaaacataactccctttctaacatttccctttctctactattcttttatagtataaatcccctaacccttctcccacacacccattaattctccctaaattcctttacccatttaacaattatatttttttaaaaaatccn

SEQ ID NO: 318612 - DNA, 490 bp, Homo sapiens
tcagtagtaccccatgttcacctgccgccctgtagttgctcaaggtgtctgaaaaggaaagcgtcctggggcagcaccacgattcgaggtcccagagtagcccagtatgacggcagaattggaatgaaaagataaatgactagaagtgcgcctgggtgcgcacccaggcgcacttctggtggctcctgcacctgcgcggactcctgcaagtgcgagggatgcaaatgcacctcctgcaagaagagctgctgctcctgctgccctgcggagtgtgagaagtgtgccaaggactgtgtgtgcaaaggcggagaggcagctgaggcagaagcagagaagtgcagctgctgccagtgagaaggcacccctccgtgtggagcacgtggagatagtgccaggtggctcagtgccacctatgcctgtggtgaagtgtggctggtgtccccttcccctgctgaccttggaggaatgacaataaatcccatgaacagca

SEQ ID NO: 318613 - DNA, 452 bp, Homo sapiens
gaatgtcagataaaagttggccagctaaaccatcctcctcctcctcctcttcctcctcctggtcctcccacatatcatgggagtcatcttgactccactctgcagaagtgcgcctgggtgcgcacccaggcgcacttctggtggctcctgcacctgcgcggactcctgcaagtgcgagggatgcaaatgcacctcctgcaagaagagctgctgctcctgctgccctgcggagtgtgagaagtgtgccaaggactgtgtgtgcaaaggcggagaggcagctgaggcagaagcagagaagtgcagctgctgccagtgagaaggcacccctccgtgtggagcacgtggagatagtgccaggtggctcagtgccacctatgcctgtggtgaagtgtggctggtgtccccttcccctgctgaccttggaggaatgacaataaatcccatgaacagca

SEQ ID NO: 318614 - DNA, 1819 bp, Homo sapiens
ggcagtgcgcgcacagcggcggcgagtgggtcgtgcacgcggatgcggggtgggagtgggggcgcacgcgcgggcgtgggcgagcgggccccggcagtgcacacacacggcaggggcgggcgacagatgcagtgcgtgcgccggagcccaagcgcacaaacggaaagagcgggcgcggtgcgcaggggcgggcgcccagcgggcttggcatgcgcgcccccgcccgaggctataaaagcatcgccacctgctgccactagccaagccgcgcgtccagttgcttggagaagcccgttcaccgcctccagctgctgctctcctcgacatggaccctgagacctgcccctgcccttctggtgagcccccgcccccgctcgcatcctgcgcactgcgcgcccttgtacctgcaaagaaacccacgccctgcgccttcgctcaaggacacttgggggaagggcccctgattccctattcttcacctcgtgaagggcgggcatgcctgtgtcgcggagaacagggagacttggcaccccatctcctcgtgacaggcgtggggacccgagttcgtccacattaacccttcctgtggcgtcgccctctctaggtggctcctgcacctgcgcggactcctgcaagtgcgagggatgcaaatgcacctcctgcaagaagagtgagtgcggggacccttcccctctgccgccgcccctctgctctgcggagtcggtgtctcaccacgcaggatgtggagagacagccaggccccgatcccgtggtttctgactcttgctggaatagaaccacccgggcagacattaaaatacagatgcccctgccccacacccaggaattgatggcctaggcgtgggacgagaggtttttgtaaatccccagaagactccagtggcagctgggattgaggactgccacactggtccaacctttcccgacccatccctcaaaaactccccaaaacctggggaagccattagtgaggctgcggctcagctctggagttccggtcccttggcctctctccggccttacggatcctctcagtttgatctcaaaatctccccagctcacggcagtgtaatatgcatagggagtaagaggtgggaggaaggctcccttcttccctaggtatgaaaccaggcacaggtccccaccgcctccccacggctttcctgggccccttacatctgcaccatatctgcccctcccaagtttatcctttgaggcccctttcaaggtcgtttaccctgtgatgctttctccttaaggcctagtacccacctaagctgggcttaagcccaccagcccccaggacttcctggcatccacccaaggggctctggtcatttcctgggtacctcactcctgtggaggtgcaggatgccactgccgcgacatagatgctgagtcaaagcaggtgtgagactaagaagggggctgcgactagccctggctgaatgaaccaggatgactccccacccagcacccttccctcccctttgatggggacgaattgggggagtgtgcatcagagagtggtcatcttccattttatctgcaggctgctgctcctgctgccctgcggagtgtgagaagtgtgccaaggactgtgtgtgcaaaggcggagaggcagctgaggcagaagcagagaagtgcagctgctgccagtgagaaggcacccctccgtgtggagcacgtggagatagtgccaggtggctcagtgccacctatgcctgtggtgaagtgtggctggtgtccccttcccctgctgaccttggaggaatgacaataaatcccatgaacagca

SEQ ID NO: 318615 - DNA, 556 bp, Homo sapiens
acatttgaagaaaacatcaaatatgaatgagatcaaaatgaacaatcaataaaaaagaacccagacaggacgaggaaatacaaacagtagagaaagtatcaaagaatatatcattggtgctttcaaagattaagagactgcatcaatggaagaaacacagacactggaaacagggaggggagtgcaatagaggatgagataaagcaccagaaaattaaaaataagataactgtaatttaaagtttagtacaactttggaagataaagtcaatgaaattctccagacagtagttttttaaaaaggattttaaaaaagagttagagaatcgatccagaaagttcaaaagcttatttcagaatgagtttccagaaggaagaatacagaaaatagtgaagaaaaaattaacattgtatggagaagtttcaacaactgaaggacgtgagtctccgaacataaagaatcaaaaggacctggaaaatatatatattttaaacccaggcacattatgaaattttagaataccaagagtaaaaagaaaatgctaagaacttccag

SEQ ID NO: 318616 - DNA, 410 bp, Homo sapiens
ttggcttagcagctaattggcagaggaagagaaaatcctgggaataaaactggctaggaagtaactgagggtactgcggggtgaggtggcctctggagagggaaaaagacaggcaagctgcctggaggaagcaaagagaaaaaagaaaaagtttatgcaaatcataggtccacctggctgcctcctttccactttcagtttctatatggctctctggaggtttctccagggcttctgcacaaaaattcacggtggcagcctagagctggtcaatttcctccagaggcttgactctaactgagaggagccaggatcactgaaaaagcaatagctaaatctagaatacagggttagggaaggaatcttaatgtctcagtggagataaacacacccaggggaatgccaggcca

SEQ ID NO: 318617 - DNA, 109 bp, Homo sapiens
ggcccactgctggataaaaggtgcagcacccactggccacttccacggtttacatcttgcttcaaggccttgtgcccgatcagctgagcccctgtgccaaccctcaggt

SEQ ID NO: 318618 - DNA, 2655 bp, Homo sapiens
gcctggaatagcctggctactacccctgcacctgttcccctgctgtccccaggcctctctgcctgaatctgcctctctctgcctcttttctcctgtccctccaggagtctctctgcctcaaccactctctctgccccttcatctctctgagctggtgtgtctggtcctaccctctgtttggggagctgtctggctctgtcccccacctcttggccagcctgtgtctcctgtctatgactgagcccaattgcctgttgcctttctgcaggtgtttccacgagcctatccctacccacctgtttgtttctgagtctgcctgtgtgtccctttctccctgtctctgcctgtcttccaagctcccctagcatcccctcctcccgcccatctgtctttctgtcccttctgtggtctgtctgttcctgtgctgtttctcatgcctgctttctttgtaacttcagttctcctactctctctctgtctcctctctgcacctttttctgccatccatcccatcctgctgtccgtctgctctgtgagtccatcccctctgtctgcctgtcactctctctagctgtgggtctacaccctcaatctttcaggccatttcccccaccatcaacacacaaacaaaccgctgtctccctccaagtgggtccagatagggggcgccccttctccacctcttcccccgcccagggccagaaggagggaaacgaaattaaaattaacatttcttctcaggaaaaaaaaaaaagtaccgctccagagcaggagcctaggcagccgagagggtgcccgaacctgagtctgagttgcggccacttcaggagctgagaggagcaggatggaactgcaggatccaaagatgaatggagccctcccttcggatgctgtgggctacaggcaagaacgtgagggcttcctgcccagtcgtggtcctgctcctgggagcaagccggtccagttcatggatttcgaggggaagacatcgtttggaatgtcagtgttcaacctcagcaacgccatcatgggcagcggcatcctggggctggcctatgccatggcccacacgggggtcatcttcttcctggccctgctgctgtgcattgcgcttctgtcgtcctactccatccacctcctgctgacctgtgctggtattgcaggcatccgagcctatgagcagctgggacagagggcattcgggcctgcggggaaggtagtggtggccacagtcatctgtctgcacaatgttggggccatgtccagttacctgttcatcatcaaatctgagctccccctggttatcggcaccttcctgtacatggaccccgagggggactggttcttgaagggaaacctcctcatcatcatcgtcagtgtgttaatcatcctgcccctcgccctcatgaaacacttgggctacctggggtacaccagtggtctctctctgacctgcatgctgtttttccttgtttcggtcatctacaagaagttccaacttggctgtgctataggccacaatgaaacagcaatggagagtgaagctctcgtgggactccccagccaaggactcaacagcagctgtgaggcccagatgttcacagttgactcacagatgtcctacacagtgcccattatggcttttgcttttgtctgccaccctgaggtgctgcccatctatacggagctctgccggccctccaagcgcaggatgcaggccgtggccaacgtgtccattggggccatgttctgcatgtatgggctcacagcaacctttggatacctcaccttctacagcagtgtgaaggcggagatgctgcacatgtacagccagaaggacccgctcatcctctgtgtgcgcctggccgtgctgctcgcggtgaccctcactgtgccagtcgtgctgttccctatccgccgggccctgcagcagctgcttttcccaggcaaggccttcagctggccacgacatgtggccatagctctgatcctgcttgttttggtcaatgtccttgtcatctgtgtgccaaccatccgggatatctttggagttatcgggtccacctcagcccccagcctcatcttcatcctccccagcatcttctacctccgcattgtaccctctgaggtggagcctttcttatcctggcccaagatccaggccctgtgctttggagtcctgggagtcctcttcatggccgtcagtctaggctttatgtttgccaactgggccacaggccagagccgcatgtctggacactgatcaggccctgctggcccaggtccctgtgcgcatgcacatggaggggtcagggccgctccctagggtccctcctgcccaacatgtggaggtggctggttcccatgaacgtggttgtcagaggcgggggacagcagaggctgcagactggcccacttccctcctccccagggatgccaagcttggatcatggccctaatcccaaccccaaccccatgggaggaggaggaggaggaagaagaggaggaggaggaggaggaggaggaggaggaggaggaggccaggtcctggtggagcctttgcccagcccagtcctctctgcctcctcctggctgaagctgtttgtcaggattaccctcgggctaaagaggaaaaataaagatgttgagctacca

SEQ ID NO: 318619 - DNA, 895 bp, Homo sapiens
ggctggggctagggctggggggagggggaaggcctggggcaggagcctctgagctctttccttctgtgaccacggacctgtcagtttccaaacagaaggtgtgcctcacttgtgtggattttgtcactgtgcatgtatgtatgggtttctggggcattggtcctggtgctctctccacatcctgcatcccgtaccctctgtctcatggcccaggcagtgtgaaggcggagatgctgcacatgtacagccagaaggacccgctcatcctctgtgtgcgcctggccgtgctgctcgcggtgaccctcactgtgccagtcgtgctgttccctatccgccgggccctgcagcagctgcttttcccaggcaaggccttcagctggccacgacatgtggccatagctctgatcctgcttgttttggtcaatgtccttgtcatctgtgtgccaaccatccgggatatctttggagttatcgggtccacctcagcccccagcctcatcttcatcctccccagcatcttctacctccgcattgtaccctctgaggtggagcctttcttatcctggcccaagatccaggtaagcattccagggcagagctagggagagagggagcactccaaggagggagtgctcactccaggatggctggaggtgaaagggacatgcataggagggggctgggagagcatctgaaagaatggtctggaagaatgaaggtgattgtctaggaaggggcagaggagacagagcaccagcagggtccaggaagacagggagcactcaaacagaggctggcatagagggagcattctccagacagatggaaagagcactattgggaagagagctggaagcactttgaagaaggaggatggaggaacgtattctgtcat

SEQ ID NO: 318620 - DNA, 2134 bp, Homo sapiens
gcctggaatagcctggctactacccctgcacctgttcccctgctgtccccaggcctctctgcctgaatctgcctctctctgcctcttttctcctgtccctccaggagtctctctgcctcaaccactctctctgccccttcatctctctgagctggtgtgtctggtcctaccctctgtttggggagctgtctggctctgtcccccacctcttggccagcctgtgtctcctgtctatgactgagcccaattgcctgttgcctttctgcaggtgtttccacgagcctatccctacccacctgtttgtttctgagtctgcctgtgtgtccctttctccctgtctctgcctgtcttccaagctcccctagcatcccctcctcccgcccatctgtctttctgtcccttctgtggtctgtctgttcctgtgctgtttctcatgcctgctttctttgtaacttcagttctcctactctctctctgtctcctctctgcacctttttctgccatccatcccatcctgctgtccgtctgctctgtgagtccatcccctctgtctgcctgtcactctctctagctgtgggtctacaccctcaatctttcaggccatttcccccaccatcaacacacaaacaaaccgctgtctccctccaagtgggtccagatagggggcgccccttctccacctcttcccccgcccagggccagaaggagggaaacgaaattaaaattaacatttcttctcaggaaaaaaaaaaaagtaccgctccagagcaggagcctaggcagccgagagggtgcccgaacctgagtctgagttgcggccacttcaggagctgagaggagcaggatggaactgcaggatccaaagatgaatggagccctcccttcggatgctgtgggctacaggcaagaacgtgagggcttcctgcccagtcgtggtcctgctcctgggagcaagccggtccagttcatggatttcgaggggaagacatcgtttggaatgtcagtgttcaacctcagcaacgccatcatgggcagcggcatcctggggctggcctatgccatggcccacacgggggtcatcttcttcctggccctgctgctgtgcattgcgcttctgtcgtcctactccatccacctcctgctgacctgtgctggtattgcaggcatccgagcctatgagcagctgggacagagggcattcgggcctgcggggaaggtagtggtggccacagtcatctgtctgcacaatgttggggccatgtccagttacctgttcatcatcaaatctgagctccccctggttatcggcaccttcctgtacatggaccccgagggggactggttcttgaagggaaacctcctcatcatcatcgtcagtgtgttaatcatcctgcccctcgccctcatgaaacacttgggctacctggggtacaccagtggtctctctctgacctgcatgctgtttttccttgtttcggtcatctacaagaagttccaacttggctgtgctataggccacaatgaaacagcaatggagagtgaagctctcgtgggactccccagccaaggactcaacagcagctgtgaggcccagatgttcacagttgactcacagatgtcctacacagtgcccattatggcttttgcttttgtctgccaccctgaggtgctgcccatctatacggagctctgccggccctccaagcgcaggatgcaggccgtggccaacgtgtccattggggccatgttctgcatgtatgggctcacagcaacctttggatacctcaccttctacagcagtgtgaaggcggagatgctgcacatgtacagccagaaggacccgctcatcctctgtgtgcgcctggccgtgctgctcgcggtgaccctcactgtgccagtcgtgctgttccctatccgccgggccctgcagcagctgcttttcccaggcaaggccttcagctggccacgacatgtggccatagctctgatcctgcttgttttggtcaatgtccttgtcatctgtgtgccaaccatccgggatatctttggagttatcgggtccacctcagcccccagcctcatcttcatcctccccagcatctccgctttggaaagggatcctatagatcgacct

SEQ ID NO: 318621 - DNA, 1459 bp, Homo sapiens
ctccctgcctccctctgggggcccccaagatctagggtcctctcgtgcctaggctgtctgcctgaggaaaaaaaaaaaagtaccgctccagagcaggagcctaggcagccgagagggtgcccgaacctgagtctgagttgcggccacttcaggagctgagaggagcaggatggaactgcaggatccaaagatgaatggagccctcccttcggatgctgtgggctacaggcaagaacgtgagggcttcctgcccagtcgtggtcctgctcctgggagcaagccggtccagttcatggatttcgaggggaagacatcgtttggaatgtcagtgttcaacctcagcaacgccatcatgggcagcggcatcctggggctggcctatgccatggcccacacgggggtcatcttcttcctggccctgctgctgtgcattgcgcttctgtcgtcctactccatccacctcctgctgacctgtgctggtattgcaggcatccgagcctatgagcagctgggacagagggcattcgggcctgcggggaaggtagtggtggccacagtcatctgtctgcacaatgttggggccatgtccagttacctgttcatcatcaaatctgagctccccctggttatcggcaccttcctgtacatggaccccgagggggactggttcttgaagggaaacctcctcatcatcatcgtcagtgtgttaatcatcctgcccctcgccctcatgaaacacttgggctacctggggtacaccagtggtctctctctgacctgcatgctgtttttccttgtttcggtcatctacaagaagttccaacttggctgtgctataggccacaatgaaacagcaatggagagtgaagctctcgtgggactccccagccaaggactcaacagcagctgtgaggcccagatgttcacagttgactcacagatgtcctacacagtgcccattatggcttttgcttttgtctgccaccctgaggtgctgcccatctatacggagctctgccggccctccaagcgcaggatgcaggccgtggccaacgtgtccattggggccatgttctgcatgtatgggctcacagcaacctttggatacctcaccttctacagcagtgtgaaggcggagatgctgcacatgtacagccagaaggacccgctcatcctctgtgtgcgcctggccgtgctgctcgcggtgaccctcactgtgccagtcgtgctgttccctatccgccgggccctgcagcagctgcttttcccaggcaaggccttcagctggccacgacatgtggccatagctctgatcctgcttgttttggtcaatgtccttgtcatctgtgtgccaaccatccgggatatctttggagttatcgggtccacctcagcccccagcctcatcttcatcctccccagcatctccgctttggaaagggatcctatagatcgacct

SEQ ID NO: 318622 - DNA, 1348 bp, Homo sapiens
gcagcgtctggggcaggggtctccgagtctgtccccaaccctcagctcactcaacaggatggaactgcaggatccaaagatgaatggagccctcccttcggatgctgtgggctacaggcaagaacgtgagggcttcctgcccagtcgtggtcctgctcctgggagcaagccggtccagttcatggatttcgaggggaagacatcgtttggaatgtcagtgttcaacctcagcaacgccatcatgggcagcggcatcctggggctggcctatgccatggcccacacgggggtcatcttcttcctggccctgctgctgtgcattgcgcttctgtcgtcctactccatccacctcctgctgacctgtgctggtattgcaggcatccgagcctatgagcagctgggacagagggcattcgggcctgcggggaaggtagtggtggccacagtcatctgtctgcacaatgttggggccatgtccagttacctgttcatcatcaaatctgagctccccctggttatcggcaccttcctgtacatggaccccgagggggactggttcttgaagggaaacctcctcatcatcatcgtcagtgtgttaatcatcctgcccctcgccctcatgaaacacttgggctacctggggtacaccagtggtctctctctgacctgcatgctgtttttccttgtttcggtcatctacaagaagttccaacttggctgtgctataggccacaatgaaacagcaatggagagtgaagctctcgtgggactccccagccaaggactcaacagcagctgtgaggcccagatgttcacagttgactcacagatgtcctacacagtgcccattatggcttttgcttttgtctgccaccctgaggtgctgcccatctatacggagctctgccggccctccaagcgcaggatgcaggccgtggccaacgtgtccattggggccatgttctgcatgtatgggctcacagcaacctttggatacctcaccttctacagcagtgtgaaggcggagatgctgcacatgtacagccagaaggacccgctcatcctctgtgtgcgcctggccgtgctgctcgcggtgaccctcactgtgccagtcgtgctgttccctatccgccgggccctgcagcagctgcttttcccaggcaaggccttcagctggccacgacatgtggccatagctctgatcctgcttgttttggtcaatgtccttgtcatctgtgtgccaaccatccgggatatctttggagttatcgggtccacctcagcccccagcctcatcttcatcctccccagcatctccgctttggaaagggatcctatagatcgacct

SEQ ID NO: 318623 - DNA, 3196 bp, Homo sapiens
  misc_feature (3196)..(3196): n is a, c, g, or t
gcctggaatagcctggctactacccctgcacctgttcccctgctgtccccaggcctctctgcctgaatctgcctctctctgcctcttttctcctgtccctccaggagtctctctgcctcaaccactctctctgccccttcatctctctgagctggtgtgtctggtcctaccctctgtttggggagctgtctggctctgtcccccacctcttggccagcctgtgtctcctgtctatgactgagcccaattgcctgttgcctttctgcaggtgtttccacgagcctatccctacccacctgtttgtttctgagtctgcctgtgtgtccctttctccctgtctctgcctgtcttccaagctcccctagcatcccctcctcccgcccatctgtctttctgtcccttctgtggtctgtctgttcctgtgctgtttctcatgcctgctttctttgtaacttcagttctcctactctctctctgtctcctctctgcacctttttctgccatccatcccatcctgctgtccgtctgctctgtgagtccatcccctctgtctgcctgtcactctctctagctgtgggtctacaccctcaatctttcaggccatttcccccaccatcaacacacaaacaaaccgctgtctccctccaagtgggtccagatagggggcgccccttctccacctcttcccccgcccagggccagaaggagggaaacgaaattaaaattaacatttcttctcaggaaaaaaaaaaaagtaccgctccagagcaggagcctaggcagccgagagggtgcccgaacctgagtctgagttgcggccacttcaggagctgagaggagcaggatggaactgcaggatccaaagatgaatggagccctcccttcggatgctgtgggctacaggcaagaacgtgagggcttcctgcccagtcgtggtcctgctcctgggagcaagccggtccagttcatggatttcgaggggaagacatcgtttggaatgtcagtgttcaacctcagcaacgccatcatgggcagcggcatcctggggctggcctatgccatggcccacacgggggtcatcttcttcctggccctgctgctgtgcattgcgcttctgtcgtcctactccatccacctcctgctgacctgtgctggtattgcaggcatccgagcctatgagcagctgggacagagggcattcgggcctgcggggaaggtagtggtggccacagtcatctgtctgcacaatgttggggccatgtccagttacctgttcatcatcaaatctgagctccccctggttatcggcaccttcctgtacatggaccccgagggggactggttcttgaagggaaacctcctcatcatcatcgtcagtgtgttaatcatcctgcccctcgccctcatgaaacacttgggctacctggggtacaccagtggtctctctctgacctgcatgctgtttttccttgtttcggtcatctacaagaagttccaacttggctgtgctataggccacaatgaaacagcaatggagagtgaagctctcgtgggactccccagccaaggactcaacagcagctgtgaggcccagatgttcacagttgactcacagatgtcctacacagtgcccattatggcttttgcttttgtctgccaccctgaggtgctgcccatctatacggagctctgccggccctccaagcgcaggatgcaggccgtggccaacgtgtccattggggccatgttctgcatgtatgggctcacagcaacctttggatacctcaccttctacagcagtgtgaaggcggagatgctgcacatgtacagccagaaggacccgctcatcctctgtgtgcgcctggccgtgctgctcgcggtgaccctcactgtgccagtcgtgctgttccctatccgccgggccctgcagcagctgcttttcccaggcaaggccttcagctggccacgacatgtggccatagctctgatcctgcttgttttggtcaatgtccttgtcatctgtgtgccaaccatccgggatatctttggagttatcgggtccacctcagcccccagcctcatcttcatcctccccagcatcttctacctccgcattgtaccctctgaggtggagcctttcttatcctggcccaagatccaggccctgtgctttggagtcctgggagtcctcttcatggccgtcagtctaggctttatgtttgccaactgggccacaggccagagccgcatgtctggacactgatcaggccctgctggcccaggtccctgtgcgcatgcacatggaggggtcagggccgctccctagggtccctcctgcccaacatgtggaggtggctggttcccatgaacgtggttgtcagaggcgggggacagcagaggctgcagactggcccacttccctcctccccagggatgccaagcttggatcatggccctaatcccaaccccaaccccatgggaggaggaggaggaggaagaagaggaggaggaggaggaggaggaggaggaggaggaggaggccaggtcctggtggagcctttgcccagcccagtcctctctgcctcctcctggctgaagctgtttgtcaggattaccctcgggctaaagaggaaaaataaagatgttgagctaccaaaaaaaacactgaaaacaacacaaaaaaaaacccggggacacaccaacttcggggggcgcacaaaaacggttacaaacagcgcccactcgcaacacaaggttccggaaccacctccctgtcaccacggggggaaaactgcgcgggaccccccaaaggaacaccacataatcgaaaacaccgggaaaccgggataagtaaccgcaacgaggcccacgacagtaacaccgcagacagacggggcataagacgacgacacaacacagacgagcagccacgatacagaaaacatcacgctgcacaacaagacacccaaaaccgggaacggagaagacaaaagaaacaacagatccaaacgaacggtgcaagaacgcaacacaaacgacatactcgcgcgaacaacgaaaaaataagcaacgaacaaaacgaacacaacacgcggaacaaatactgcacaaacaaaaaagacgacgagggatacagagaagacaatcacacagagccgtcgtcatctggcctccgatggactgcggccgactcagn

SEQ ID NO: 318624 - DNA, 2948 bp, Homo sapiens
gcctggaatagcctggctactacccctgcacctgttcccctgctgtccccaggcctctctgcctgaatctgcctctctctgcctcttttctcctgtccctccaggagtctctctgcctcaaccactctctctgccccttcatctctctgagctggtgtgtctggtcctaccctctgtttggggagctgtctggctctgtcccccacctcttggccagcctgtgtctcctgtctatgactgagcccaattgcctgttgcctttctgcaggtgtttccacgagcctatccctacccacctgtttgtttctgagtctgcctgtgtgtccctttctccctgtctctgcctgtcttccaagctcccctagcatcccctcctcccgcccatctgtctttctgtcccttctgtggtctgtctgttcctgtgctgtttctcatgcctgctttctttgtaacttcagttctcctactctctctctgtctcctctctgcacctttttctgccatccatcccatcctgctgtccgtctgctctgtgagtccatcccctctgtctgcctgtcactctctctagctgtgggtctacaccctcaatctttcaggccatttcccccaccatcaacacacaaacaaaccgctgtctccctccaagtgggtccagatagggggcgccccttctccacctcttcccccgcccagggccagaaggagggaaacgaaattaaaattaacatttcttctcaggaaaaaaaaaaaagtaccgctccagagcaggagcctaggcagccgagagggtgcccgaacctgagtctgagttgcggccacttcaggagctgagaggagcaggatggaactgcaggatccaaagatgaatggagccctcccttcggatgctgtgggctacaggcaagaacgtgagggcttcctgcccagtcgtggtcctgctcctgggagcaagccggtccagttcatggatttcgaggggaagacatcgtttggaatgtcagtgttcaacctcagcaacgccatcatgggcagcggcatcctggggctggcctatgccatggcccacacgggggtcatcttcttcctggccctgctgctgtgcattgcgcttctgtcgtcctactccatccacctcctgctgacctgtgctggtattgcaggcatccgagcctatgagcagctgggacagagggcattcgggcctgcggggaaggtagtggtggccacagtcatctgtctgcacaatgttggggccatgtccagttacctgttcatcatcaaatctgagctccccctggttatcggcaccttcctgtacatggaccccgagggggactggttcttgaagggaaacctcctcatcatcatcgtcagtgtgttaatcatcctgcccctcgccctcatgaaacacttgggctacctggggtacaccagtggtctctctctgacctgcatgctgtttttccttgtttcggtcatctacaagaagttccaacttggctgtgctataggccacaatgaaacagcaatggagagtgaagctctcgtgggactccccagccaaggactcaacagcagctgtgaggcccagatgttcacagttgactcacagatgtcctacacagtgcccattatggcttttgcttttgtctgccaccctgaggtgctgcccatctatacggagctctgccggccctccaagcgcaggatgcaggccgtggccaacgtgtccattggggccatgttctgcatgtatgggctcacagcaacctttggatacctcaccttctacagcagtgtgaaggcggagatgctgcacatgtacagccagaaggacccgctcatcctctgtgtgcgcctggccgtgctgctcgcggtgaccctcactgtgccagtcgtgctgttccctatccgccgggccctgcagcagctgcttttcccaggcaaggccttcagctggccacgacatgtggccatagctctgatcctgcttgttttggtcaatgtccttgtcatctgtgtgccaaccatccgggatatctttggagttatcgggtccacctcagcccccagcctcatcttcatcctccccagcatcttctacctccgcattgtaccctctgaggtggagcctttcttatcctggcccaagatccaggccctgtgctttggagtcctgggagtcctcttcatggccgtcagtctaggctttatgtttgccaactgggccacaggccagagccgcatgtctggacactgatcaggccctgctggcccaggtccctgtgcgcatgcacatggaggggtcagggccgctccctagggtccctcctgcccaacatgtggaggtggctggttcccatgaacgtggttgtcagaggcgggggacagcagaggctgcagactggcccacttccctcctccccagggatgccaagcttggaatgtcagtgttcacctcagccacgccattcatgggcagcggcatcctggggctggcctatgccatggcccacacgggggtcatcttcttcctggccctgctgctgtgcattgcgcttctgtcgtcctactccatccacctcctgctgacctgtgctggtattgcaggcatccgagcctatgagcagctgggacagagggcattcgggcctgcggggaaggtagtggtggccacagtcatctgtctgcacaatgttggggccatgtccagttacctgttcatcatcaaatctgagctccccctggttatcggcaccttcctgtacatggaccccgagggggactggttcttgaaaggaggaggaggaggaggaggaggaggaggaggccaggtcctggtggagcctttgcccagcccagtcctctctgcctcctcctggctgaagctgtttgtcaggattaccctcgggctaaagaggaaaaataaagatgttgagctacca

SEQ ID NO: 318625 - DNA, 1350 bp, Homo sapiens
ctccccattcgcagcctcttccatcttcaactcttcttccctgctagcctcttccctcctccgatggtctctccttggcttctctccaccccgcttgcttcttctctagtctttccctggccctggcattagtctccttaccctgtgccctgtcccaatgtgtgcccgggctttgctccttgcgtgcagttcgaggggaagacatcgtttggaatgtcagtgttcaacctcagcaacgccatcatgggcagcggcatcctggggctggcctatgccatggcccacacgggggtcatcttcttcctggccctgctgctgtgcattgcgcttctgtcgtcctactccatccacctcctgctgacctgtgctggtattgcaggcatccgagcctatgagcagctgggacagagggcattcgggcctgcggggaaggtagtggtggccacagtcatctgtctgcacaatgttggggccatgtccagttacctgttcatcatcaaatctgagctccccctggttatcggcaccttcctgtacatggaccccgagggggactggttcttgaagggaaacctcctcatcatcatcgtcagtgtgttaatcatcctgcccctcgccctcatgaaacacttgggctacctggggtacaccagtggtctctctctgacctgcatgctgtttttccttgtttcggtcatctacaagaagttccaacttggctgtgctataggccacaatgaaacagcaatggagagtgaagctctcgtgggactccccagccaaggactcaacagcagctgtgaggcccagatgttcacagttgactcacagatgtcctacacagtgcccattatggcttttgcttttgtctgccaccctgaggtgctgcccatctatacggagctctgccggccctccaagcgcaggatgcaggccgtggccaacgtgtccattggggccatgttctgcatgtatgggctcacagcaacctttggatacctcaccttctacagcagtgtgaaggcggagatgctgcacatgtacagccagaaggacccgctcatcctctgtgtgcgcctggccgtgctgctcgcggtgaccctcactgtgccagtcgtgctgttccctatccgccgggccctgcagcagctgcttttcccaggcaaggccttcagctggccacgacatgtggccatagctctgatcctgcttgttttggtcaatgtccttgtcatctgtgtgccaaccatccgggatatctttggagttatcgggtccacctcagcccccagcctcatcttcatcctccccagcatctccgctttggaaagggatcctatagatcgacct

SEQ ID NO: 318626 - DNA, 2208 bp, Homo sapiens
gcctggaatagcctggctactacccctgcacctgttcccctgctgtccccaggcctctctgcctgaatctgcctctctctgcctcttttctcctgtccctccaggagtctctctgcctcaaccactctctctgccccttcatctctctgagctggtgtgtctggtcctaccctctgtttggggagctgtctggctctgtcccccacctcttggccagcctgtgtctcctgtctatgactgagcccaattgcctgttgcctttctgcaggtgtttccacgagcctatccctacccacctgtttgtttctgagtctgcctgtgtgtccctttctccctgtctctgcctgtcttccaagctcccctagcatcccctcctcccgcccatctgtctttctgtcccttctgtggtctgtctgttcctgtgctgtttctcatgcctgctttctttgtaacttcagttctcctactctctctctgtctcctctctgcacctttttctgccatccatcccatcctgctgtccgtctgctctgtgagtccatcccctctgtctgcctgtcactctctctagctgtgggtctacaccctcaatctttcaggccatttcccccaccatcaacacacaaacaaaccgctgtctccctccaagtgggtccagatagggggcgccccttctccacctcttcccccgcccagggccagaaggagggaaacgaaattaaaattaacatttcttctcaggaaaaaaaaaaaagtaccgctccagagcaggagcctaggcagccgagagggtgcccgaacctgagtctgagttgcggccacttcaggagctgagaggagcaggatggaactgcaggatccaaagatgaatggagccctcccttcggatgctgtgggctacaggcaagaacgtgagggcttcctgcccagtcgtggtcctgctcctgggagcaagccggtccagttcatggatttcgaggggaagacatcgtttggaatgtcagtgttcaacctcagcaacgccatcatgggcagcggcatcctggggctggcctatgccatggcccacacgggggtcatcttcttcctggccctgctgctgtgcattgcgcttctgtcgtcctactccatccacctcctgctgacctgtgctggtattgcaggcatccgagcctatgagcagctgggacagagggcattcgggcctgcggggaaggtagtggtggccacagtcatctgtctgcacaatgttggggccatgtccagttacctgttcatcatcaaatctgagctccccctggttatcggcaccttcctgtacatggaccccgagggggactggttcttgaagggaaacctcctcatcatcatcgtcagtgtgttaatcatcctgcccctcgccctcatgaaacacttgggctacctggggtacaccagtggtctctctctgacctgcatgctgtttttccttgtttcggtcatctacaagaagttccaacttggctgtgctataggccacaatgaaacagcaatggagagtgaagctctcgtgggactccccagccaaggactcaacagcagctgtgaggcccagatgttcacagttgactcacagatgtcctacacagtgcccattatggcttttgcttttgtctgccaccctgaggtgctgcccatctatacggagctctgccggccctccaagcgcaggatgcaggccgtggccaacgtgtccattggggccatgttctgcatgtatgggctcacagcaacctttggatacctcaccttctacagcagtgtgaaggcggagatgctgcacatgtacagccagaaggacccgctcatcctctgtgtgcgcctggccgtgctgctcgcggtgaccctcactgtgccagtcgtgctgttccctatccgccgggccctgcagcagctgcttttcccaggcaaggccttcagctggccacgacatgtggccatagctctgatcctgcttgttttggtcaatgtccttgtcatctgtgtgccaaccatccgggatatctttggagttatcgggtccacctcagcccccagcctcatcttcatcctccccagcatctccgctttggatttccaaagcggagatgctgccaacgtcttgatatttgtcaacccagaacctggggccctaacgcggaccctcagagccagcatctccgcttggaa

SEQ ID NO: 318627 - DNA, 2115 bp, Homo sapiens
gcctggaatagcctggctactacccctgcacctgttcccctgctgtccccaggcctctctgcctgaatctgcctctctctgcctcttttctcctgtccctccaggagtctctctgcctcaaccactctctctgccccttcatctctctgagctggtgtgtctggtcctaccctctgtttggggagctgtctggctctgtcccccacctcttggccagcctgtgtctcctgtctatgactgagcccaattgcctgttgcctttctgcaggtgtttccacgagcctatccctacccacctgtttgtttctgagtctgcctgtgtgtccctttctccctgtctctgcctgtcttccaagctcccctagcatcccctcctcccgcccatctgtctttctgtcccttctgtggtctgtctgttcctgtgctgtttctcatgcctgctttctttgtaacttcagttctcctactctctctctgtctcctctctgcacctttttctgccatccatcccatcctgctgtccgtctgctctgtgagtccatcccctctgtctgcctgtcactctctctagctgtgggtctacaccctcaatctttcaggccatttcccccaccatcaacacacaaacaaaccgctgtctccctccaagtgggtccagatagggggcgccccttctccacctcttcccccgcccagggccagaaggagggaaacgaaattaaaattaacatttcttctcaggaaaaaaaaaaaagtaccgctccagagcaggagcctaggcagccgagagggtgcccgaacctgagtctgagttgcggccacttcaggagctgagaggagcaggatggaactgcaggatccaaagatgaatggagccctcccttcggatgctgtgggctacaggcaagaacgtgagggcttcctgcccagtcgtggtcctgctcctgggagcaagccggtccagttcatggatttcgaggggaagacatcgtttggaatgtcagtgttcaacctcagcaacgccatcatgggcagcggcatcctggggctggcctatgccatggcccacacgggggtcatcttcttcctggccctgctgctgtgcattgcgcttctgtcgtcctactccatccacctcctgctgacctgtgctggtattgcaggcatccgagcctatgagcagctgggacagagggcattcgggcctgcggggaaggtagtggtggccacagtcatctgtctgcacaatgttggggccatgtccagttacctgttcatcatcaaatctgagctccccctggttatcggcaccttcctgtacatggaccccgagggggactggttcttgaagggaaacctcctcatcatcatcgtcagtgtgttaatcatcctgcccctcgccctcatgaaacacttgggctacctggggtacaccagtggtctctctctgacctgcatgctgtttttccttgtttcggtcatctacaagaagttccaacttggctgtgctataggccacaatgaaacagcaatggagagtgaagctctcgtgggactccccagccaaggactcaacagcagctgtgaggcccagatgttcacagttgactcacagatgtcctacacagtgcccattatggcttttgcttttgtctgccaccctgaggtgctgcccatctatacggagctctgccggccctccaagcgcaggatgcaggccgtggccaacgtgtccattggggccatgttctgcatgtatgggctcacagcaacctttggatacctcaccttctacagcagtgtgaaggcggagatgctgcacatgtacagccagaaggacccgctcatcctctgtgtgcgcctggccgtgctgctcgcggtgaccctcactgtgccagtcgtgctgttccctatccgccgggccctgcagcagctgcttttcccaggcaaggccttcagctggccacgacatgtggccatagctctgatcctgcttgttttggtcaatgtccttgtcatctgtgtgccaaccatccgggatatctttggagttatcgggtccacttgcagccgacagcgtatgatatcactacacagatgaaacgcgaaagagtg

SEQ ID NO: 318628 - DNA, 1613 bp, Homo sapiens
  misc_feature (1613)..(1613): n is a, c, g, or t
ggctggggctagggctggggggagggggaaggcctggggcaggagcctctgagctctttccttctgtgaccacggacctgtcagtttccaaacagaaggtgtgcctcacttgtgtggattttgtcactgtgcatgtatgtatgggtttctggggcattggtcctggtgctctctccacatcctgcatcccgtaccctctgtctcatggcccaggcagtgtgaaggcggagatgctgcacatgtacagccagaaggacccgctcatcctctgtgtgcgcctggccgtgctgctcgcggtgaccctcactgtgccagtcgtgctgttccctatccgccgggccctgcagcagctgcttttcccaggcaaggccttcagctggccacgacatgtggccatagctctgatcctgcttgttttggtcaatgtccttgtcatctgtgtgccaaccatccgggatatctttggagttatcgggtccacctcagcccccagcctcatcttcatcctccccagcatcttctacctccgcattgtaccctctgaggtggagcctttcttatcctggcccaagatccaggccctgtgctttggagtcctgggagtcctcttcatggccgtcagtctaggctttatgtttgccaactgggccacaggccagagccgcatgtctggacactgatcaggccctgctggcccaggtccctgtgcgcatgcacatggaggggtcagggccgctccctagggtccctcctgcccaacatgtggaggtggctggttcccatgaacgtggttgtcagaggcgggggacagcagaggctgcagactggcccacttccctcctccccagggatgccaagcttggatcatggccctaatcccaaccccaaccccatgggaggaggaggaggaggaagaagaggaggaggaggaggaggaggaggaggaggaggaggaggccaggtcctggtggagcctttgcccagcccagtcctctctgcctcctcctggctgaagctgtttgtcaggattaccctcgggctaaagaggaaaaataaagatgttgagctaccaaaaaaaacactgaaaacaacacaaaaaaaaacccggggacacaccaacttcggggggcgcacaaaaacggttacaaacagcgcccactcgcaacacaaggttccggaaccacctccctgtcaccacggggggaaaactgcgcgggaccccccaaaggaacaccacataatcgaaaacaccgggaaaccgggataagtaaccgcaacgaggcccacgacagtaacaccgcagacagacggggcataagacgacgacacaacacagacgagcagccacgatacagaaaacatcacgctgcacaacaagacacccaaaaccgggaacggagaagacaaaagaaacaacagatccaaacgaacggtgcaagaacgcaacacaaacgacatactcgcgcgaacaacgaaaaaataagcaacgaacaaaacgaacacaacacgcggaacaaatactgcacaaacaaaaaagacgacgagggatacagagaagacaatcacacagagccgtcgtcatctggcctccgatggactgcggccgactcagn

SEQ ID NO: 318629 - DNA, 943 bp, Homo sapiens
  misc_feature (807)..(807): n is a, c, g, or t
ctccctgcctccctctgggggcccccaagatctagggtcctctcgtgcctaggctgtctgcctgaggaaaaaaaaaaaagtaccgctccagagcaggagcctaggcagccgagagggtgcccgaacctgagtctgagttgcggccacttcaggagctgagaggagcaggatggaactgcaggatccaaagatgaatggagccctcccttcggatgctgtgggctacaggcaagaacgtgagggcttcctgcccagtcgtggtcctgctcctgggagcaagccggtccagttcatggatttcgaggggaagacatcgtttggaatgtcagtgttcaacctcagcaacgccatcatgggcagcggcatcctggggctggcctatgccatggcccacacgggggtcatcttcttcctggccctgctgctgtgcattgcgcttctgtcgtcctactccatccacctcctgctgacctgtgctggtattgcaggcatccgagcctatgagcagctgggacagagggcattcgggcctgcggggaaggtagtggtggccacagtcatctgtctgcacaatgttggggccatgtccagttacctgttcatcatcaaatctgagctccccctggttatcggcaccttcctgtacatggaccccgagggggactggttcttgaagggaaacctcctcatcatcatcgtcagtgtgttaatcatcctgcccctcgccctcatgaaacacttgggctacctggggtacaccagtggtctctctctgacctgcatgctgtttttccttgtttcggtcanctacaggagttcaattgggttgtgctataggccgcatgggacaggatggaagggaactctcgtggatcccagccatgattaaagagtgggagccaatttccgttggccgattctacgggcctatggtgttgttccc

SEQ ID NO: 318630 - DNA, 1370 bp, Homo sapiens
  misc_feature (1370)..(1370): n is a, c, g, or t
ccgcatagagacgatctcatacacttatgcgcatgcctctgaccgtcgcagcgttgaccctcactgtgccagtcgtgacttgcaaaatccgccgggccctgcagcagctgcttttcccaggcaaggccttcagctggccacgacatgtggccatagctctgatcctgcttgttttggtcaatgtccttgtcatctgtgtgccaaccatccgggatatctttggagttatcgggtccacctcagcccccagcctcatcttcatcctccccagcatcttctacctccgcattgtaccctctgaggtggagcctttcttatcctggcccaagatccaggccctgtgctttggagtcctgggagtcctcttcatggccgtcagtctaggctttatgtttgccaactgggccacaggccagagccgcatgtctggacactgatcaggccctgctggcccaggtccctgtgcgcatgcacatggaggggtcagggccgctccctagggtccctcctgcccaacatgtggaggtggctggttcccatgaacgtggttgtcagaggcgggggacagcagaggctgcagactggcccacttccctcctccccagggatgccaagcttggatcatggccctaatcccaaccccaaccccatgggaggaggaggaggaggaagaagaggaggaggaggaggaggaggaggaggaggaggaggaggccaggtcctggtggagcctttgcccagcccagtcctctctgcctcctcctggctgaagctgtttgtcaggattaccctcgggctaaagaggaaaaataaagatgttgagctaccaaaaaaaacactgaaaacaacacaaaaaaaaacccggggacacaccaacttcggggggcgcacaaaaacggttacaaacagcgcccactcgcaacacaaggttccggaaccacctccctgtcaccacggggggaaaactgcgcgggaccccccaaaggaacaccacataatcgaaaacaccgggaaaccgggataagtaaccgcaacgaggcccacgacagtaacaccgcagacagacggggcataagacgacgacacaacacagacgagcagccacgatacagaaaacatcacgctgcacaacaagacacccaaaaccgggaacggagaagacaaaagaaacaacagatccaaacgaacggtgcaagaacgcaacacaaacgacatactcgcgcgaacaacgaaaaaataagcaacgaacaaaacgaacacaacacgcggaacaaatactgcacaaacaaaaaagacgacgagggatacagagaagacaatcacacagagccgtcgtcatctggcctccgatggactgcggccgactcagn

SEQ ID NO: 318631 - DNA, 347 bp, Homo sapiens
gctggtctcgaactcctgacctcaggtgatccacccgcttaggcctcccaaagcgctaggattataggtgtgagccaccacgcctggctgatttctgagactctgtgttttgcccctcttaggctacctggggtacaccagtggtctctctctgacctgcatgctgtttttccttgtttcggtgagtcacagagaagcggggagagagtttgggacattgggacatagcttcctccatgacctggcttccctgctgcccccatcctcaggtcatctacaagaagttccaacttggctgtgctataggccacaatgaaacagcaatggagagtgaagctctcgtggga

SEQ ID NO: 318632 - DNA, 638 bp, Homo sapiens
atgaactaaaaggatggatgcatggataatgcatggatggaaagatgaatggagaatggatggatggatggacaggtgcattaacggatggataaaggaatgggacgacggatggatggatggatggatggataaatggatggatggatgcacccatggatggatggatgcatggatgaatggatggatgggtaaatgaatgggaggatgggttgatggaagcgtcgcagtgtgaaggcggagatgctgcacatgtacagccagaaggacccgctcatcctctgtgtgcgcctggccgtgctgctcgcggtgaccctcactgtgccagtcgtgctgttccctatccgccgggccctgcagcagctgcttttcccaggcaaggccttcagctggccacgacatgtggccatagctctgatcctgcttgttttggtcaatgtccttgtcatctgtgtgccaaccatccgggatatctttggagttatcgggtccacctcagcccccagcctcatcttcatcctccccagcatctccgctttggatttccaaagcggagatgctgccaacgtcttgatatttgtcaacccagaacctggggccctaacgcggaccctcagagccagcatctccgcttggaa

SEQ ID NO: 318633 - DNA, 860 bp, Homo sapiens
  misc_feature (724)..(724): n is a, c, g, or t
tggccacgcggtgagggtggagggaaggagagggggtggcgcgggggaccggggaatgaaagacacagatggcaagagagacagcgatggaactgcaggatccaaagatgaatggagccctcccttcggatgctgtgggctacaggcaagaacgtgagggcttcctgcccagtcgtggtcctgctcctgggagcaagccggtccagttcatggatttcgaggggaagacatcgtttggaatgtcagtgttcaacctcagcaacgccatcatgggcagcggcatcctggggctggcctatgccatggcccacacgggggtcatcttcttcctggccctgctgctgtgcattgcgcttctgtcgtcctactccatccacctcctgctgacctgtgctggtattgcaggcatccgagcctatgagcagctgggacagagggcattcgggcctgcggggaaggtagtggtggccacagtcatctgtctgcacaatgttggggccatgtccagttacctgttcatcatcaaatctgagctccccctggttatcggcaccttcctgtacatggaccccgagggggactggttcttgaagggaaacctcctcatcatcatcgtcagtgtgttaatcatcctgcccctcgccctcatgaaacacttgggctacctggggtacaccagtggtctctctctgacctgcatgctgtttttccttgtttcggtcanctacaggagttcaattgggttgtgctataggccgcatgggacaggatggaagggaactctcgtggatcccagccatgattaaagagtgggagccaatttccgttggccgattctacgggcctatggtgttgttccc

SEQ ID NO: 318634 - DNA, 1440 bp, Homo sapiens
tggccacgcggtgagggtggagggaaggagagggggtggcgcgggggaccggggaatgaaagacacagatggcaagagagacagcgtgagtctggggtctgggaggagaggctatcccttctccacgtggtcggctcatctgcgctggggatggaactgcaggatccaaagatgaatggagccctcccttcggatgctgtgggctacaggcaagaacgtgagggcttcctgcccagtcgtggtcctgctcctgggagcaagccggtccagttcatggatttcgaggggaagacatcgtttggaatgtcagtgttcaacctcagcaacgccatcatgggcagcggcatcctggggctggcctatgccatggcccacacgggggtcatcttcttcctggccctgctgctgtgcattgcgcttctgtcgtcctactccatccacctcctgctgacctgtgctggtattgcaggcatccgagcctatgagcagctgggacagagggcattcgggcctgcggggaaggtagtggtggccacagtcatctgtctgcacaatgttggggccatgtccagttacctgttcatcatcaaatctgagctccccctggttatcggcaccttcctgtacatggaccccgagggggactggttcttgaagggaaacctcctcatcatcatcgtcagtgtgttaatcatcctgcccctcgccctcatgaaacacttgggctacctggggtacaccagtggtctctctctgacctgcatgctgtttttccttgtttcggtcatctacaagaagttccaacttggctgtgctataggccacaatgaaacagcaatggagagtgaagctctcgtgggactccccagccaaggactcaacagcagctgtgaggcccagatgttcacagttgactcacagatgtcctacacagtgcccattatggcttttgcttttgtctgccaccctgaggtgctgcccatctatacggagctctgccggccctccaagcgcaggatgcaggccgtggccaacgtgtccattggggccatgttctgcatgtatgggctcacagcaacctttggatacctcaccttctacagcagtgtgaaggcggagatgctgcacatgtacagccagaaggacccgctcatcctctgtgtgcgcctggccgtgctgctcgcggtgaccctcactgtgccagtcgtgctgttccctatccgccgggccctgcagcagctgcttttcccaggcaaggccttcagctggccacgacatgtggccatagctctgatcctgcttgttttggtcaatgtccttgtcatctgtgtgccaaccatccgggatatctttggagttatcgggtccacctcagcccccagcctcatcttcatcctccccagcatctccgctttggaaagggatcctatagatcgacct

SEQ ID NO: 318635 - DNA, 1376 bp, Homo sapiens
tggccacgcggtgagggtggagggaaggagagggggtggcgcgggggaccggggaatgaaagacacagatggcaagagagacagcgatggaactgcaggatccaaagatgaatggagccctcccttcggatgctgtgggctacaggcaagaacgtgagggcttcctgcccagtcgtggtcctgctcctgggagcaagccggtccagttcatggatttcgaggggaagacatcgtttggaatgtcagtgttcaacctcagcaacgccatcatgggcagcggcatcctggggctggcctatgccatggcccacacgggggtcatcttcttcctggccctgctgctgtgcattgcgcttctgtcgtcctactccatccacctcctgctgacctgtgctggtattgcaggcatccgagcctatgagcagctgggacagagggcattcgggcctgcggggaaggtagtggtggccacagtcatctgtctgcacaatgttggggccatgtccagttacctgttcatcatcaaatctgagctccccctggttatcggcaccttcctgtacatggaccccgagggggactggttcttgaagggaaacctcctcatcatcatcgtcagtgtgttaatcatcctgcccctcgccctcatgaaacacttgggctacctggggtacaccagtggtctctctctgacctgcatgctgtttttccttgtttcggtcatctacaagaagttccaacttggctgtgctataggccacaatgaaacagcaatggagagtgaagctctcgtgggactccccagccaaggactcaacagcagctgtgaggcccagatgttcacagttgactcacagatgtcctacacagtgcccattatggcttttgcttttgtctgccaccctgaggtgctgcccatctatacggagctctgccggccctccaagcgcaggatgcaggccgtggccaacgtgtccattggggccatgttctgcatgtatgggctcacagcaacctttggatacctcaccttctacagcagtgtgaaggcggagatgctgcacatgtacagccagaaggacccgctcatcctctgtgtgcgcctggccgtgctgctcgcggtgaccctcactgtgccagtcgtgctgttccctatccgccgggccctgcagcagctgcttttcccaggcaaggccttcagctggccacgacatgtggccatagctctgatcctgcttgttttggtcaatgtccttgtcatctgtgtgccaaccatccgggatatctttggagttatcgggtccacctcagcccccagcctcatcttcatcctccccagcatctccgctttggaaagggatcctatagatcgacct

SEQ ID NO: 318636 - DNA, 1424 bp, Homo sapiens
tttctgagatacctccttcccaaggagtaagcgcgggagggagctggggtttcttcagagacgctgtacctacaagacaggggctccaggctcgggtggggattgcagagacacccccaccccaggaaactcggatggaactgcaggatccaaagatgaatggagccctcccttcggatgctgtgggctacaggcaagaacgtgagggcttcctgcccagtcgtggtcctgctcctgggagcaagccggtccagttcatggatttcgaggggaagacatcgtttggaatgtcagtgttcaacctcagcaacgccatcatgggcagcggcatcctggggctggcctatgccatggcccacacgggggtcatcttcttcctggccctgctgctgtgcattgcgcttctgtcgtcctactccatccacctcctgctgacctgtgctggtattgcaggcatccgagcctatgagcagctgggacagagggcattcgggcctgcggggaaggtagtggtggccacagtcatctgtctgcacaatgttggggccatgtccagttacctgttcatcatcaaatctgagctccccctggttatcggcaccttcctgtacatggaccccgagggggactggttcttgaagggaaacctcctcatcatcatcgtcagtgtgttaatcatcctgcccctcgccctcatgaaacacttgggctacctggggtacaccagtggtctctctctgacctgcatgctgtttttccttgtttcggtcatctacaagaagttccaacttggctgtgctataggccacaatgaaacagcaatggagagtgaagctctcgtgggactccccagccaaggactcaacagcagctgtgaggcccagatgttcacagttgactcacagatgtcctacacagtgcccattatggcttttgcttttgtctgccaccctgaggtgctgcccatctatacggagctctgccggccctccaagcgcaggatgcaggccgtggccaacgtgtccattggggccatgttctgcatgtatgggctcacagcaacctttggatacctcaccttctacagcagtgtgaaggcggagatgctgcacatgtacagccagaaggacccgctcatcctctgtgtgcgcctggccgtgctgctcgcggtgaccctcactgtgccagtcgtgctgttccctatccgccgggccctgcagcagctgcttttcccaggcaaggccttcagctggccacgacatgtggccatagctctgatcctgcttgttttggtcaatgtccttgtcatctgtgtgccaaccatccgggatatctttggagttatcgggtccacctcagcccccagcctcatcttcatcctccccagcatctccgctttggaaagggatcctatagatcgacct

SEQ ID NO: 318637 - DNA, 1962 bp, Homo sapiens
gcctggaatagcctggctactacccctgcacctgttcccctgctgtccccaggcctctctgcctgaatctgcctctctctgcctcttttctcctgtccctccaggagtctctctgcctcaaccactctctctgccccttcatctctctgagctggtgtgtctggtcctaccctctgtttggggagctgtctggctctgtcccccacctcttggccagcctgtgtctcctgtctatgactgagcccaattgcctgttgcctttctgcaggtgtttccacgagcctatccctacccacctgtttgtttctgagtctgcctgtgtgtccctttctccctgtctctgcctgtcttccaagctcccctagcatcccctcctcccgcccatctgtctttctgtcccttctgtggtctgtctgttcctgtgctgtttctcatgcctgctttctttgtaacttcagttctcctactctctctctgtctcctctctgcacctttttctgccatccatcccatcctgctgtccgtctgctctgtgagtccatcccctctgtctgcctgtcactctctctagctgtgggtctacaccctcaatctttcaggccatttcccccaccatcaacacacaaacaaaccgctgtctccctccaagtgggtccagatagggggcgccccttctccacctcttcccccgcccagggccagaaggagggaaacgaaattaaaattaacatttcttctcaggaaaaaaaaaaaagtaccgctccagagcaggagcctaggcagccgagagggtgcccgaacctgagtctgagttgcggccacttcaggagctgagaggagcaggatggaactgcaggatccaaagatgaatggagccctcccttcggatgctgtgggctacaggcaagaacgtgagggcttcctgcccagtcgtggtcctgctcctgggagcaagccggtccagttcatggatttcgaggggaagacatcgtttggaatgtcagtgttcaacctcagcaacgccatcatgggcagcggcatcctggggctggcctatgccatggcccacacgggggtcatcttcttcctggccctgctgctgtgcattgcgcttctgtcgtcctactccatccacctcctgctgacctgtgctggtattgcagggactggttcttgaagggaaacctcctcatcatcatcgtcagtgtgttaatcatcctgcccctcgccctcatgaaacacttgggctacctggggtacaccagtggtctctctctgacctgcatgctgtttttccttgtttcggtcatctacaagaagttccaacttggctgtgctataggccacaatgaaacagcaatggagagtgaagctctcgtgggactccccagccaaggactcaacagcagctgtgaggcccagatgttcacagttgactcacagatgtcctacacagtgcccattatggcttttgcttttgtctgccaccctgaggtgctgcccatctatacggagctctgccggccctccaagcgcaggatgcaggccgtggccaacgtgtccattggggccatgttctgcatgtatgggctcacagcaacctttggatacctcaccttctacagcagtgtgaaggcggagatgctgcacatgtacagccagaaggacccgctcatcctctgtgtgcgcctggccgtgctgctcgcggtgaccctcactgtgccagtcgtgctgttccctatccgccgggccctgcagcagctgcttttcccaggcaaggccttcagctggccacgacatgtggccatagctctgatcctgcttgttttggtcaatgtccttgtcatctgtgtgccaaccatccgggatatctttggagttatcgggtccacctcagcccccagcctcatcttcatcctccccagcatctccgctttggaaagggatcctatagatcgacct

SEQ ID NO: 318638 - DNA, 1008 bp, Homo sapiens
gacaatctcataatcagcttgactgtttttgtcaaccctattgtgccgtttgtcactgtgaccacctgaatgacttctcaagctgaggttgtcagcttaactctcctgacttagggcagaaagctgcctgtccagctgtcttctgtgagtgtctgcctgacagtttcctttggctggcagctaggcactgtgtcttcctgtctctctagggactggttcttgaagggaaacctcctcatcatcatcgtcagtgtgttaatcatcctgcccctcgccctcatgaaacacttgggctacctggggtacaccagtggtctctctctgacctgcatgctgtttttccttgtttcggtcatctacaagaagttccaacttggctgtgctataggccacaatgaaacagcaatggagagtgaagctctcgtgggactccccagccaaggactcaacagcagctgtgaggcccagatgttcacagttgactcacagatgtcctacacagtgcccattatggcttttgcttttgtctgccaccctgaggtgctgcccatctatacggagctctgccggccctccaagcgcaggatgcaggccgtggccaacgtgtccattggggccatgttctgcatgtatgggctcacagcaacctttggatacctcaccttctacagcagtgtgaaggcggagatgctgcacatgtacagccagaaggacccgctcatcctctgtgtgcgcctggccgtgctgctcgcggtgaccctcactgtgccagtcgtgctgttccctatccgccgggccctgcagcagctgcttttcccaggcaaggccttcagctggccacgacatgtggccatagctctgatcctgcttgttttggtcaatgtccttgtcatctgtgtgccaaccatccgggatatctttggagttatcgggtccacctcagcccccagcctcatcttcatcctccccagcatctccgctttggaaagggatcctatagatcgacct

SEQ ID NO: 318639 - DNA, 1810 bp, Homo sapiens
  misc_feature (1810)..(1810): n is a, c, g, or t
caggctggtacccccggaggtatggatatcgtcgacccacggcgctccgagtggtctctctctgacctgcatgctgtttttccttgtttcggtcatctacaagaagttccaacttggctgtgctataggccacaatgaaacagcaatggagagtgaagctctcgtgggactccccagccaaggactcaacagcagctgtgaggcccagatgttcacagttgactcacagatgtcctacacagtgcccattatggcttttgcttttgtctgccaccctgaggtgctgcccatctatacggagctctgccggccctccaagcgcaggatgcaggccgtggccaacgtgtccattggggccatgttctgcatgtatgggctcacagcaacctttggatacctcaccttctacagcagtgtgaaggcggagatgctgcacatgtacagccagaaggacccgctcatcctctgtgtgcgcctggccgtgctgctcgcggtgaccctcactgtgccagtcgtgctgttccctatccgccgggccctgcagcagctgcttttcccaggcaaggccttcagctggccacgacatgtggccatagctctgatcctgcttgttttggtcaatgtccttgtcatctgtgtgccaaccatccgggatatctttggagttatcgggtccacctcagcccccagcctcatcttcatcctccccagcatcttctacctccgcattgtaccctctgaggtggagcctttcttatcctggcccaagatccaggccctgtgctttggagtcctgggagtcctcttcatggccgtcagtctaggctttatgtttgccaactgggccacaggccagagccgcatgtctggacactgatcaggccctgctggcccaggtccctgtgcgcatgcacatggaggggtcagggccgctccctagggtccctcctgcccaacatgtggaggtggctggttcccatgaacgtggttgtcagaggcgggggacagcagaggctgcagactggcccacttccctcctccccagggatgccaagcttggatcatggccctaatcccaaccccaaccccatgggaggaggaggaggaggaagaagaggaggaggaggaggaggaggaggaggaggaggaggaggccaggtcctggtggagcctttgcccagcccagtcctctctgcctcctcctggctgaagctgtttgtcaggattaccctcgggctaaagaggaaaaataaagatgttgagctaccaaaaaaaacactgaaaacaacacaaaaaaaaacccggggacacaccaacttcggggggcgcacaaaaacggttacaaacagcgcccactcgcaacacaaggttccggaaccacctccctgtcaccacggggggaaaactgcgcgggaccccccaaaggaacaccacataatcgaaaacaccgggaaaccgggataagtaaccgcaacgaggcccacgacagtaacaccgcagacagacggggcataagacgacgacacaacacagacgagcagccacgatacagaaaacatcacgctgcacaacaagacacccaaaaccgggaacggagaagacaaaagaaacaacagatccaaacgaacggtgcaagaacgcaacacaaacgacatactcgcgcgaacaacgaaaaaataagcaacgaacaaaacgaacacaacacgcggaacaaatactgcacaaacaaaaaagacgacgagggatacagagaagacaatcacacagagccgtcgtcatctggcctccgatggactgcggccgactcagn

SEQ ID NO: 318640 - DNA, 821 bp, Homo sapiens
ctccctgcctccctctgggggcccccaagatctagggtcctctcgtgcctaggctgtctgcctgaggaaaaaaaaaaaagtaccgctccagagcaggagcctaggcagccgagagggtgcccgaacctgagtctgagttgcggccacttcaggagctgagaggagcaggatggaactgcaggatccaaagatgaatggagccctcccttcggatgctgtgggctacaggcaagaacgtgagggcttcctgcccagtcgtggtcctgctcctgggagcaagccggtccagttcatggatttcgaggggaagacatcgtttggaatgtcagtgttcaacctcagcaacgccatcatgggcagcggcatcctggggctggcctatgccatggcccacacgggggtcatcttcttcctggccctgctgctgtgcattgcgcttctgtcgtcctactccatccacctcctgctgacctgtgctggtattgcaggcatccgagcctatgagcagctgggacagagggcattcgggcctgcggggaaggtagtggtggccacagtcatctgtctgcacaatgttggggccatgtccagttacctgttcatcatcaaatctgagctccccctggttatcggcaccttcctgtacatggaccccgagggggactggttcttgaagggaaacctcctcatcatcatcgtcagtgtgttaatcatcctgcccctcgccctcatgaaacacttgggctacctggggtacaccagtggtctctctctgacctgcatgctgtttttccttgtttcggtgagtcacagagaagcgg

SEQ ID NO: 318641 - DNA, 619 bp, Homo sapiens
gcggtggtggctgggaccagttggggaagtgagaatggtaagaagtggcctgcccctggccttatgtggatgctggagctggaaggatttccaggaacacgggctgtgaggtgtgagtgagagcagtaccagatgcctccagggcattgtcctgagcagccagaaggatgtggagggaggctgctaaccaggatggggatggctttgtgggggccgagcaggagcttgggtacaggcatgttgagtgtgagctatctgaacatctacggagagacagaaggaacgtgggtatcaagagttcagttagtatgccggggcccacaataccgaatggaacacattgagggtattgaaagccccaaaactggataacgtttctgagagagtgagtgtaggtgggccaggactgagctctgtggccctcccacattaagatgtggaaaaaaggagataccagcaaaagagatggagaaggaggccaggcgcagtggctcacgcctgtaatgcagcactttgggaggccaaggcgggcagatcacttggggtcaggagtttgagaccagcctggccatccccgtctctactgaaaatacgaaaaatgagtcaggcgtggtggtgc

SEQ ID NO: 318642 - DNA, 917 bp, Homo sapiens
ggcgtgtgtccctctctttcggaaataatgatatcatccatgtgtaattaattatgtggggcccatgttggaagactgtgtagccagctcttggctgtcgaagcactgactacatggatttaacctgccattgacagtggcgccatttttctggtcctccagaggaacataaacctgtccattttactcatcttgaaggagttttggcaaaacatgtattagggcagaaaatgaaacctcactagagctccctttgcactggaaggctggaggaatttcgtggacttggaggctctgccctgtgctccacggccacaagcccttaagtgttgtctccacagcatttgcatttgctgtcctcaaagccccgctcctccctctcccgtcgctgtcctcaaagccccgctcctccctctcccgtcgctgtcctcaaagacccactcctccctctcccatacacgattttgagctatatccttaatatccaggttcctttgtgtttcctggtaatgggtagaagtgcaaggggatttcagctcccaagagacagggtttccccgtgcctaagaccccagggttgatgctactctgtcatcaagtggtgactgtgactcttccccccgcaacctcaggaggtttttttggacttcatcccagatcctgagctggagctggtcctgggatgcagagcgtgcctgtcctagtgaactgaagtgtctccaaaagggttcctgaaaacagaacaaagttgcccagccaggcacgcaggccagggcaggaaactggccttggggccacctccgctcaggatggggtggaggcaaacagacttgtgcgtcatccttcacaaagaaggttctctcagatatttggatttccttgaggagccctcaaagcaataaaataatatgtccttc

SEQ ID NO: 318643 - DNA, 549 bp, Homo sapiens
ggaagtgggtcgcaggaagaggaagtcccgcctctctctcctcaggcagagcagcaacgcggaggaaacgggagtgaacggagagcgtagtgaccatcatgagcctcctcaacaagcccaagagtgagatgaccccagaggagctgcagaagcgagaggaggaggaatttaacaccggtccactctctgtgctcacacagtcagtcaagaacaatacccaagtgctcatcaactgccgcaacaataagaaactcctgggccgcgtgaaggccttcgataggcactgcaacatggtgctggagaacgtgaaggagatgtggactgaggtacccaagagtggcaagggcaagaagaagtccaagccagtcaacaaagaccgctacatctccaagatgttcctgcgcggggactcagtcatcgtggtcctgcggaacccgctcatcgccggcaagtaggggccgcctgtctgttgacagaactcactcctctgtcctatgaagaccgctgccattggtgttgagaataataaagctctgtgtttttttctat

SEQ ID NO: 318644 - DNA, 730 bp, Homo sapiens
  misc_feature (92)..(92): n is a, c, g, or t
ccatctggcaccaacatagcgcatatgtgaggattcatctcggtctgccgtgacccttcatcccaccagtcacacgcagatggtttccttgncccgaaagatcagtgacatggacacaagtgtcattgaaggatgcaagatatgcagacccccaatacattctctccttcagccacctgaggtccgaggctgatgacctgttcttccttcttttcccggacgcgtgggcgagcagcaacgcggaggaaacgggagtgaacggagagcgtagtgaccatcatgagcctcctcaacaagcccaagagtgagatgaccccagaggagctgcagaagcgagaggaggaggaatttaacaccggtccactctctgtgctcacacagtcagtcaagaacaatacccaagtgctcatcaactgccgcaacaataagaaactcctgggccgcgtgaaggccttcgataggcactgcaacatggtgctggagaacgtgaaggagatgtggactgaggtacccaagagtggcaagggcaagaagaagtccaagccagtcaacaaagaccgctacatctccaagatgttcctgcgcggggactcagtcatcgtggtcctgcggaacccgctcatcgccggcaagtaggggccgcctgtctgttgacagaactcactcctctgtcctatgaagaccgctgccattggtgttgagaataataaagctctgtgtttttttctat

SEQ ID NO: 318645 - DNA, 539 bp, Homo sapiens
aattcgcggccgcgtcgaccgagaagacgacagaaggggagcagcaacgcggaggaaacgggagtgaacggagagcgtagtgaccatcatgagcctcctcaacaagcccaagagtgagatgaccccagaggagctgcagaagcgagaggaggaggaatttaacaccggtccactctctgtgctcacacagtcagtcaagaacaatacccaagtgctcatcaactgccgcaacaataagaaactcctgggccgcgtgaaggccttcgataggcactgcaacatggtgctggagaacgtgaaggagatgtggactgaggtacccaagagtggcaagggcaagaagaagtccaagccagtcaacaaagaccgctacatctccaagatgttcctgcgcggggactcagtcatcgtggtcctgcggaacccgctcatcgccggcaagtaggggccgcctgtctgttgacagaactcactcctctgtcctatgaagaccgctgccattggtgttgagaataataaagctctgtgtttttttctat

SEQ ID NO: 318646 - DNA, 941 bp, Homo sapiens
ctcccgcgggtttctcctcttctcgcgtgtatattgtgccccgccttggggcctccttacccgggcgaggcccttcttcttgggggcccgcggggtgtctccccctccgtcttccggggggcaactcctatagagcgctctggcgaccagagggcttattctgtcatccgggggaaccgggcgtggtgggccaccatcagttcccggctctcaccactggccctgtgcccgccaccagaaatcctgtctgtgattagggtcagccttgtcagtcactcgatggcgaagtgtaggcccctgggtgttgctggggtccgcccccggtcccgcccccgtctatctgccggcccatgataggtggtccccaggggaacttctcggctttccactctggaggtgatgcctccggccccccaacccggtgctggcccggctccccgagcagcttgttaggtaacccccatctttttcctccggcgtagtgaccctcatgagcctcctcaacaagcccaagagtgagatgaccccagaggagctgcagaagcgagaggaggaggaatttaacaccggtccactctctgtgctcacacagtcagtcaagaacaatacccaagtgctcatcaactgccgcaacaataagaaactcctgggccgcgtgaaggccttcgataggcactgcaacatggtgctggagaacgtgaaggagatgtggactgaggtacccaagagtggcaagggcaagaagaagtccaagccagtcaacaaagaccgctacatctccaagatgttcctgcgcggggactcagtcatcgtggtcctgcggaacccgctcatcgccggcaagtaggggccgcctgtctgttgacagaactcactcctctgtcctatgaagaccgctgccattggtgttgagaataataaagctctgtgtttttttctat

SEQ ID NO: 318647 - DNA, 699 bp, Homo sapiens
ggagtgaacggagagcgtagtgaccatcatgagcctcctcaacaagcccaagagtgagatgaccccagaggagctgcagaagcgagaggaggaggaatttaacaccggtccactctctgtgctcacacagtcagtcaagaacaatacccaagtgctcatcaactgccgcaacaataagaaactcctgggccgcgtgaaggccttcgataggcactgcaacatggtgctggagaacgtgaaggagatgtggactgaggtacccaagagtggcaagggcaagaagaagtccaagccagtcaacaaagaccgctacatctccaagatgttcctgcgcggggactcagtcatcgtggtcctgcggaacccgctcatcgccggcaagtaggggccgcctgtctgttgacagaactcactcctctgtcctatgaagaccgctgccattggtgttgagaataataaagctctgtgtttttttctataagaagatactcagtaaaacagatcccaacactcacacgattctttacctttcacttcatcgttgcccttcaattattgcaggccctaaacaacagtccagctcctattgattgccgaaacgggatcaaagtaaggccctaggaatcactcacattcgatgagaacaactttccacccgttatacacaatgaaagaaggccacgggataatgtcattcca

SEQ ID NO: 318648 - DNA, 523 bp, Homo sapiens
atccgagctcggtacccctctcgagcagcaacgcggaggaaacgggagtgaacggagagcgtagtgaccatcatgagcctcctcaacaagcccaagagtgagatgaccccagaggagctgcagaagcgagaggaggaggaatttaacaccggtccactctctgtgctcacacagtcagtcaagaacaatacccaagtgctcatcaactgccgcaacaataagaaactcctgggccgcgtgaaggccttcgataggcactgcaacatggtgctggagaacgtgaaggagatgtggactgaggtacccaagagtggcaagggcaagaagaagtccaagccagtcaacaaagaccgctacatctccaagatgttcctgcgcggggactcagtcatcgtggtcctgcggaacccgctcatcgccggcaagtaggggccgcctgtctgttgacagaactcactcctctgtcctatgaagaccgctgccattggtgttgagaataataaagctctgtgtttttttctat

SEQ ID NO: 318649 - DNA, 939 bp, Homo sapiens
  misc_feature (931)..(931): n is a, c, g, or t
ggaagtgggtcgcaggaagaggaagtcccgcctctctctcctcaggcagagcagcaacgcggaggaaacgggagtgaacggagagcgtagtgaccatcatgagcctcctcaacaagcccaagagtgagatgaccccagaggagctgcagaagcgagaggaggaggaatttaacaccggtccactctctgtgctcacacagtcagtcaagaacaatacccaagtgctcatcaactgccgcaacaataagaaactcctgggccgcgtgaaggccttcgataggcactgcaacatggtgctggagaacgtgaaggagatgtggactgaggtacccaagagtggcaagggcaagaagaagtccaagccagtcaacaaagaccgctacatctccaagatgttcctgcgcggggactcagtcatcgtggtcctgcggaacccgctcatcgccggcaagtaggggccgcctgtctgttgacagaactcactcctctgtcctatgaagaccgctgccattggtgttgagaataataaagctctgtgtttttttctataaaaaaaaaaaaaaaaaaaaaaaaaaacaaaaaaaaaaaaaaaaaaaaaaaaaaaaaaaggggggggggccaaaaaattcccccgggggggcccattttcgccccctctttttgtgtaactagagggccccccttatgggggcgcctcttacatatagcccagccacccggcccctgctttaacacacgttctggctgtgcgggaacaccggtccctcgtgcggcctcgtggggagggccccctcttccggggggtggcgcacttcatatggagcacaccccccaacgaaatttataggccccggggaaatattaacctgtccgctactagctgtgtacacccagccggatatctgtccggcggcaaattgtcacggatgtnttgaatgt

SEQ ID NO: 318650 - DNA, 724 bp, Homo sapiens
ggaagtgggtcgcaggaagaggaagtcccgcctctctctcctcaggcagagcagcaacgcggaggaaacgggagtgaacggagagcgtagtgaccatcatgagcctcctcaacaagcccaagagtgagatgaccccagaggagctgcagaagcgagaggaggaggaatttaacaccggtccactctctgtgctcacacagtcagtcaagaacaatacccaagtgctcatcaactgccgcaacaataagaaactcctgggccgcgtgaaggccttcgataggcactgcaacatggtgctggagaacgtgaaggagatgtggactgaggtacccaagagtggcaagggcaagaagaagtccaagccagtcaacaaagaccgctacatctccaagatgttcctgcgcggggactcagtcatcgtggtcctgcggaacccgctcatcgccggcaagtaggggccgcctgtctgttgacagaactcactcctctgtcctatgaagaccgctgccattggtgttgagaataataaagctctgtgtttttttctataaaaaaaaaaaaaaaaaaaaaaaaaaacaaaaaaaaaaaaaaaaaaaaaaaaaaaaaaagatctttattattctcaacaccaatggccgcctgtctgttgacagaactcactcctctgtcctatgaagaccgctccattggtgttgagaataataaagctctgtgtttttttcta

SEQ ID NO: 318651 - DNA, 900 bp, Homo sapiens
  misc_feature (611)..(612): n is a, c, g, or t
ggaagtgggtcgcaggaagaggaagtcccgcctctctctcctcaggcagagcagcaacgcggaggaaacgggagtgaacggagagcgtagtgaccatcatgagcctcctcaacaagcccaagagtgagatgaccccagaggagctgcagaagcgagaggaggaggaatttaacaccggtccactctctgtgctcacacagtcagtcaagaacaatacccaagtgctcatcaactgccgcaacaataagaaactcctgggccgcgtgaaggccttcgataggcactgcaacatggtgctggagaacgtgaaggagatgtggactgaggtacccaagagtggcaagggcaagaagaagtccaagccagtcaacaaagaccgctacatctccaagatgttcctgcgcggggactcagtcatcgtggtcctgcggaacccgctcatcgccggcaagtaggggccgcctgtctgttgacagaactcactcctctgtcctatgaagaccgctgccattggtgttgagaataataaagctctgtgtttttttctatcaaaaaaaaaaaaaaaaaaaaaaaaaaaaaaataaaaaaaaaaaaaaaaagggggggggggnnaaaattttccctggggggcccaatgtttaggggatacccaggtttttttttggaaaagggggggcccaatgagggagagcaattaataaaaaaggcacgaggccgagtgttaaaccagggtctgcagggggaaaaagcggcgtacttggggaaatttggaaaggaacctatttttggtgggggacaactgcgcacacatcctagagaataacggtcaggggaaaatacattgaggtgtatgtgtgtaccacgcgatgtgtcgcgaaattggtacggatgttgaattaa

SEQ ID NO: 318652 - DNA, 697 bp, Homo sapiens
ggaagtgggtcgcaggaagaggaagtcccgcctctctctcctcaggcagagcagcaacgcggaggaaacgggagtgaacggagagcgtagtgaccatcatgagcctcctcaacaagcccaagagtgagatgaccccagaggagctgcagaagcgagaggaggaggaatttaacaccggtccactctctgtgctcacacagtcagtcaagaacaatacccaagtgctcatcaactgccgcaacaataagaaactcctgggccgcgtgaaggccttcgataggcactgcaacatggtgctggagaacgtgaaggagatgtggactgaggtacccaagagtggcaagggcaagaagaagtccaagccagtcaacaaagaccgctacatctccaagatgttcctgcgcggggactcagtcatcgtggtcctgcggaacccgctcatcgccggcaagtaggggccgcctgtctgttgacagaactcactcctctgtcctatgaagaccgctgccattggtgttgagaataataaagctctgtgtttttttctatcaaaaaaaaaaaaaaaaaaaaaaaaaaaaaaagatctttattattctcaacaccaatggccgcctgtctgttgacagaactcactcctctgtcctatgaagaccgctccattggtgttgagaataataaagctctgtgtttttttcta

SEQ ID NO: 318653 - DNA, 515 bp, Homo sapiens
  misc_feature (14)..(14): n is a, c, g, or t
tattattttagtgngttctgtgttatttcttcgccgccccccccttccctcccgatcccccttcctttctgataccacccccaccccgtttgagatgaccccagaggagctgcagaagcgagaggaggaggaatttaacaccggtccactctctgtgctcacacagtcagtcaagaacaatacccaagtgctcatcaactgccgcaacaataagaaactcctgggccgcgtgaaggccttcgataggcactgcaacatggtgctggagaacgtgaaggagatgtggactgaggtacccaagagtggcaagggcaagaagaagtccaagccagtcaacaaagaccgctacatctccaagatgttcctgcgcggggactcagtcatcgtggtcctgcggaacccgctcatcgccggcaagtaggggccgcctgtctgttgacagaactcactcctctgtcctatgaagaccgctgccattggtgttgagaataataaagctctgtgtttttttctat

SEQ ID NO: 318654 - DNA, 1030 bp, Homo sapiens
ggaagtgggtcgcaggaagaggaagtcccgcctctctctcctcaggcagagcagcaacgcggaggaaacgggagtgaacggagagcgtagtgaccatcatgagcctcctcaacaagcccaagagtgagatgaccccagaggagctgcagaagcgagaggaggaggaatttaacaccggtccactctctgtgctcacacagtcagtcaagaacaatacccaagtgctcatcaactgccgcaacaataagaaactcctgggccgcgtgaaggccttcgataggcactgcaacatggtgctggagaacgtgaaggagatgtggactgaggtacccaagagtggcaagggcaagaagaagtccaagccagtcaacaaagaccgctacatctccaagatgttcctgcgcggggactcagtcatcgtggtcctgcggaacccgctcatcgccggcaagtaggggccgcctgtctgttgacagaactcactcctctgtcctatgaagaccgctgccattggtgttgagaataataaagctctgtgtttttttctattaaaaaaaaaaaaaaaaaggggggccgtcgggatctaaaactacgggaagataaatgaaatggcaccaaataggagcacctctggtacacaaagggatgctgggaccagaccctgtgtgacctgaatgagatgtagaaggccccagtcccaccctggtgtgtcctccctctgagccagactccgctgaggccagcctgggggaagctgacctttaactgagggctgatcttaactggaaggctgtttctcctttaaccaccccctccttcgctgtgtcttttcggcaaagtgtctctggctcttcccggagaattcaggtgggtaaaggctgagcccttgtggagcaacatttagggagtggagcccatgctaatgtcttaaaacgctgtggtgtgtacccttctgaataccttttgtgttgggcacacattgtaacatcaagaattccagtctgaagagaatgatccttcacctcggagg

SEQ ID NO: 318655 - DNA, 753 bp, Homo sapiens
ggaagtgggtcgcaggaagaggaagtcccgcctctctctcctcaggcagagcagcaacgcggaggaaacgggagtgaacggagagcgtagtgaccatcatgagcctcctcaacaagcccaagagtgagatgaccccagaggagctgcagaagcgagaggaggaggaatttaacaccggtccactctctgtgctcacacagtcagtcaagaacaatacccaagtgctcatcaactgccgcaacaataagaaactcctgggccgcgtgaaggccttcgataggcactgcaacatggtgctggagaacgtgaaggagatgtggactgaggtacccaagagtggcaagggcaagaagaagtccaagccagtcaacaaagaccgctacatctccaagatgttcctgcgcggggactcagtcatcgtggtcctgcggaacccgctcatcgccggcaagtaggggccgcctgtctgttgacagaactcactcctctgtcctatgaagaccgctgccattggtgttgagaataataaagctctgtgtttttttctataaaaaaaaaacatcccaaatcaaattctattctttctctctcacctcaaactacaatttatctccataatatcaaaaaaacctttgtgccgtttgggccaagcgaattttagaattggcaggcttatcaatgggcccgaaattggggctaattggccaaattcccctaaggggagccgattacttatgggccgctttcggcggc

SEQ ID NO: 318656 - DNA, 623 bp, Homo sapiens
ggaagtgggtcgcaggaagaggaagtcccgcctctctctcctcaggcagagcagcaacgcggaggaaacgggagtgaacggagagcgtagtgaccatcatgagcctcctcaacaagcccaagagtgagatgaccccagaggagctgcagaagcgagaggaggaggaatttaacaccggtccactctctgtgctcacacagtcagtcaagaacaatacccaagtgctcatcaactgccgcaacaataagaaactcctgggccgcgtgaaggccttcgataggcactgcaacatggtgctggagaacgtgaaggagatgtggactgaggtacccaagagtggcaagggcaagaagaagtccaagccagtcaacaaagaccgctacatctccaagatgttcctgcgcggggactcagtcatcgtggtcctgcggaacccgctcatcgccggcaagtaggggccgcctgtctgttgacagaactcactcctctgtcctatgaagaccgctgccattggtgttgagaataataaagctctgtgtttttttctataaaaaaaaaaaaaaaaaaaaaaaaaaaaaaacaaaaaaaaacaaaaaacaacacaaaaaaaaaaaaaaaaaaga

SEQ ID NO: 318657 - DNA, 769 bp, Homo sapiens
ggaagtgggtcgcaggaagaggaagtcccgcctctctctcctcaggcagagcagcaacgcggaggaaacgggagtgaacggagagcgtagtgaccatcatgagcctcctcaacaagcccaagagtgagatgaccccagaggagctgcagaagcgagaggaggaggaatttaacaccggtccactctctgtgctcacacagtcagtcaagaacaatacccaagtgctcatcaactgccgcaacaataagaaactcctgggccgcgtgaaggccttcgataggcactgcaacatggtgctggagaacgtgaaggagatgtggactgaggtacccaagagtggcaagggcaagaagaagtccaagccagtcaacaaagaccgctacatctccaagatgttcctgcgcggggactcagtcatcgtggtcctgcggaacccgctcatcgccggcaagtaggggccgcctgtctgttgacagaactcactcctctgtcctatgaagaccgctgccattggtgttgagaataataaagctctgtgtttttttctataagaagatactcagtaaaacagatcccaacactcacacgattctttacctttcacttcatcgttgcccttcaattattgcaggccctaaacaacagtccagctcctattgattgccgaaacgggatcaaagtaaggccctaggaatcactcacattcgatgagaacaactttccacccgttatacacaatgaaagaaggccacgggataatgtcattcca

SEQ ID NO: 318658 - DNA, 536 bp, Homo sapiens
ggaagtgggtcgcaggaagaggaagtcccgcctctctctcctcaggcagagcagcaacgcggaggaaacgggagtgaacggagagcgtagtgaccatcatgagcctcctcaacaagcccaagagtgagatgaccccagaggagctgcagaagcgagaggaggaggaatttaacaccggtccactctctgtgctcacacagtcagtcaagaacaatacccaagtgctcatcaactgccgcaacaataagaaactcctgggccgcgtgaaggccttcgataggcactgcaacatggtgctggagaacgtgaaggagatgtggactgaggtacccaagagtggcaagggcaagaagaagtccaagccagtcaacaaagaccgctacatctccaagatgttcctgcgcggggactcagtcatcgtggtcctgcggaacccgctcatcgccggcaagtaggggccgcctgtctgttgacagaactaacaaacatcattcctttggacctataacaacaacacatcctatttctacgcgcca

SEQ ID NO: 318659 - DNA, 548 bp, Homo sapiens
  misc_feature (412)..(412): n is a, c, g, or t
ggaagtgggtcgcaggaagaggaagtcccgcctctctctcctcaggcagagcagcaacgcggaggaaacgggagtgaacggagagcgtagtgaccatcatgagcctcctcaacaagcccaagagtgagatgaccccagaggagctgcagaagcgagaggaggaggaatttaacaccggtccactctctgtgctcacacagtcagtcaagaacaatacccaagtgctcatcaactgccgcaacaataagaaactcctgggccgcgtgaaggccttcgataggcactgcaacatggtgctggagaacgtgaaggagatgtggactgaggtacccaagagtggcaagggcaagaagaagtccaagccagtcaacaaagaccgctacatctccaagatgttcctgcgcgggggggnaaaacccctttttttcccccaaaaagggggtttttccccccccggggccgcctgtctgttgacagaactcactcctctgtcctatgaagaccgctccattggtgttgagaataataaagctctgtgtttttttcta

SEQ ID NO: 318660 - DNA, 885 bp, Homo sapiens
aattcgcggccgcgtcgaccgagaagacgacagaaggggagcagcaacgcggaggaaacgggagtgaacggagagcgtagtgaccatcatgttttagcacaaccccctcagaccactctgtggagaacagactgtcagggaacgtgggtggaggcagagagaccagaaagattccaggacagagatgacagaggcttaggccatggagcctcctcaacaagcccaagagtgagatgaccccagaggagctgcagaagcgagaggaggaggaatttaacaccggtccactctctgtgctcacacagtcagtcaagaacaatacccaagtgctcatcaactgccgcaacaataagaaactcctgggccgcgtgaaggccttcgataggcactgcaacatggtgctggagaacgtgaaggagatgtggactgaggtacccaagagtggcaagggcaagaagaagtccaagccagtcaacaaagaccgctacatctccaagatgttcctgcgcggggactcagtcatcgtggtcctgcggaacccgctcatcgccggcaagtaggggccgcctgtctgttgacagaactcactcctctgtcctatgaagaccgctgccattggtgttgagaataataaagctctgtgtttttttctatagtacaaaaaaaagaaaagaaaaaaagaagaatttgtggggggttttggcctggaaaagtttttaagaacaatggttggcgagcgggggccccagatgtgataaaaacccgtggaaagagggtgcactacagagaaacccgtgacgagaaaaggcgcgggaattccccaaataaaaggccgcgggaacaagggtttcaaacaaatcgaagggacgagggcacaggggctaa

SEQ ID NO: 318661 - DNA, 383 bp, Homo sapiens
ggaagtgggtcgcaggaagaggaagtcccgcctctctctcctcaggcagagcagcaacgcggaggaaacgggagtgaacggagagcgtagtgaccatcatgagcctcctcaacaagcccaagagtgagatgaccccagaggagctgcagaagcgagaggaggaggaatttaacaccggtccactctctgtgctcacacagtcagtcaagaacaatacccaaaggcctataacaatcttatattggatggtcgactgagatctgagatttacaccggggaataaatttaaacctatagacgtacagactgattacttcctttatactcttcttctcttccaaagaaaagcaggaatccccaatgaagaaagtatattggggggt

SEQ ID NO: 318662 - DNA, 517 bp, Homo sapiens
  misc_feature (14)..(14): n is a, c, g, or t
  misc_feature (53)..(53): n is a, c, g, or t
cctagttttagaantttcaatagcaacgccgaggaaacgggagtgaacagagngcgtagttacatcatgagcctcctcaacaagcccaagagtgagatgaccccagaggagctgcagaagcgagaggaggaggaatttaacaccggtccactctctgtgctcacacagtcagtcaagaacaatacccaagtgctcatcaactgccgcaacaataagaaactcctgggccgcgtgaaggccttcgataggcactgcaacatggtgctggagaacgtgaaggagatgtggactgaggtacccaagagtggcaagggcaagaagaagtccaagccagtcaacaaagaccgctacatctccaagatgttcctgcgcggggactcagtcatcgtggtcctgcggaacccgctcatcgccggcaagtaggggccgcctgtctgttgacagaactcactcctctgtcctatgaagaccgctgccattggtgttgagaataataaagctctgtgtttttttctat

SEQ ID NO: 318663 - DNA, 479 bp, Homo sapiens
ggagtgaacggagagcgtagtgaccatcatgagcctcctcaacaagcccaagagtgagatgaccccagaggagctgcagaagcgagaggaggaggaatttaacaccggtccactctctgtgctcacacagtcagtcaagaacaatacccaagtgctcatcaactgccgcaacaataagaaactcctgggccgcgtgaaggccttcgataggcactgcaacatggtgctggagaacgtgaaggagatgtggactgaggtacccaagagtggcaagggcaagaagaagtccaagccagtcaacaaagaccgctacatctccaagatgttcctgcgcggggactcagtcatcgtggtcctgcggaacccgctcatcgccggcaagtaggggccgcctgtctgttgacagaactcactcctctgtcctatgaagaccgctgccattggtgttgagaataataaagctctgtgtttttttctat

SEQ ID NO: 318664 - DNA, 619 bp, Homo sapiens
  misc_feature (619)..(619): n is a, c, g, or t
ggagtgaacggagagcgtagtgaccatcatgagcctcctcaacaagcccaagagtgagatgaccccagaggagctgcagaagcgagaggaggaggaatttaacaccggtccactctctgtgctcacacagtcagtcaagaacaatacccaagtgctcatcaactgccgcaacaataagaaactcctgggccgcgtgaaggccttcgataggcactgcctagttttagaagtttcaatagcacccccaggcagcaatggttttaaccaatgacttaatttaacttagtgggtatactgttcccagtcccattactgatttttattcctctgtgataacatacacccaaataaagactgctatggaaacttctggctagagatttcaccgtttctacccccaaaataacgcttgctatcaagactttggagggggatgggggacaagaatttaagaggcagataatttttttttcataaaaagtaaaagtgctattgaaacttctaaaactaggaggtgctattgaaagttctaaaactaggtgctattgagagttctagaactaggcctgtatttccagctattcagaagctaatgaacttctaaactagggagagattn

SEQ ID NO: 318665 - DNA, 635 bp, Homo sapiens
aattcgcggccgcgtcgaccgagaagacgacagaaggggagcagcaacgcggaggaaacgggagtgaacggagagcgtagtgaccatcattagagaccaggtttcaccatgttggccaagctggtctcaaactcctgacctcaaatgatccacccgcctcgaccttccaaagtgctgggattacaggagcctcctcaacaagcccaagagtgagatgaccccagaggagctgcagaagcgagaggaggaggaatttaacaccggtccactctctgtgctcacacagtcagtcaagaacaatacccaagtgctcatcaactgccgcaacaataagaaactcctgggccgcgtgaaggccttcgataggcactgcaacatggtgctggagaacgtgaaggagatgtggactgaggtacccaagagtggcaagggcaagaagaagtccaagccagtcaacaaagaccgctacatctccaagatgttcctgcgcggggactcagtcatcgtggtcctgcggaacccgctcatcgccggcaagtaggggccgcctgtctgttgacagaactcactcctctgtcctatgaagaccgctgccattggtgttgagaataataaagctctgtgtttttttctat

SEQ ID NO: 318666 - DNA, 654 bp, Homo sapiens
aattcgcggccgcgtcgaccgagaagacgacagaaggggagcagcaacgcggaggaaacgggagtgaacggagagcgtagtgaccatcatgttttagcacaaccccctcagaccactctgtggagaacagactgtcagggaacgtgggtggaggcagagagaccagaaagattccaggacagagatgacagaggcttaggccatggagcctcctcaacaagcccaagagtgagatgaccccagaggagctgcagaagcgagaggaggaggaatttaacaccggtccactctctgtgctcacacagtcagtcaagaacaatacccaagtgctcatcaactgccgcaacaataagaaactcctgggccgcgtgaaggccttcgataggcactgcaacatggtgctggagaacgtgaaggagatgtggactgaggtacccaagagtggcaagggcaagaagaagtccaagccagtcaacaaagaccgctacatctccaagatgttcctgcgcggggactcagtcatcgtggtcctgcggaacccgctcatcgccggcaagtaggggccgcctgtctgttgacagaactcactcctctgtcctatgaagaccgctgccattggtgttgagaataataaagctctgtgtttttttctat

SEQ ID NO: 318667 - DNA, 633 bp, Homo sapiens
  misc_feature (592)..(592): n is a, c, g, or t
  misc_feature (595)..(596): n is a, c, g, or t
  misc_feature (618)..(619): n is a, c, g, or t
  misc_feature (628)..(628): n is a, c, g, or t
ggaagtgggtcgcaggaagaggaagtcccgcctctctctcctcaggcagagcagcaacgcggaggaaacgggagtgaacggagagcgtagtgaccatcatgagcctcctcaacaagcccaagagtgagatgaccccagaggagctgcagaagcgagaggaggaggaatttaacaccggtccactctctgtgctcacacagtcagtcaagaacaatacccaagtgctcatcaactgccgcaacaataagaaactcctgggccgcgtgaaggccttcgataggcactgcaacatggtgctggagaacgtgaaggagatgtggactgaggtacccaagagtggcaagggcaagaagaagtccaagccagtcaacaaagaccgctacatctccaagatgttcctgcgcggggactcagtcatcgtggtcctgcggaacccgctcatcgccggcaagtaggggccgcctgtctgttgacagaactcactcctctgtcctatgaagaccgctgccattggtgttgagaataataaagctctgtgtttttttctatcaaaaaaaaaaaaaaaaaaaaaaaaaaaaaaacccggggcttnttnngggggggggaaaaaaggggttnnaaggggccnggggc

SEQ ID NO: 318668 - DNA, 741 bp, Homo sapiens
ggaagtgggtcgcaggaagaggaagtcccgcctctctctcctcaggcagagcagcaacgcggaggaaacgggagtgaacggagagcgtagtgaccatcatgagcctcctcaacaagcccaagagtgagatgaccccagaggagctgcagaagcgagaggaggaggaatttaacaccggtccactctctgtgctcacacagtcagtcaagaacaatacccaagtgctcatcaactgccgcaacaataagaaactcctgggccgcgtgaaggccttcgataggcactgcaacatggtgctggagaacgtgaaggagatgtggactgaggtacccaagagtggcaagggcaagaagaagtccaagccagtcaacaaagaccgctacatctccaagatgttcctgcgcggggactcagtcatcgtggtcctgcggaacccgctcatcgccggcaagtaggggccgcctgtctgttgacagaactcactcctctgtcctatgaagaccgctgccattggtgttgagaataataaagctctgtgtttttttctataaaaaaaatccctcttcgacctctcctctctcctatacaatttgtggcccgctttgcccaagtcgacttttagactcgatcaagtttattgatggcgccgcaaattctgggtttacttgggccaatttgcccatatagggaggccgtttaacaattaagtggccgggcttttaacaacggcttgctttggga

SEQ ID NO: 318669 - DNA, 654 bp, Homo sapiens
ggaagtgggtcgcaggaagaggaagtcccgcctctctctcctcaggcagagcagcaacgcggaggaaacgggagtgaacggagagcgtagtgaccatcatgagcctcctcaacaagcccaagagtgagatgaccccagaggagctgcagaagcgagaggaggaggaatttaacaccggtccactctctgtgctcacacagtcagtcaagaacaatacccaagtgctcatcaactgccgcaacaataagaaactcctgggccgcgtgaaggccttcgataggcactgcaacatggtgctggagaacgtgaaggagatgtggactgaggtacccaagagtggcaagggcaagaagaagtccaagccagtcaacaaagaccgctacatctccaagatgttcctgcgcggggactcagtcatcgtggtcctgcggaacccgctcatcgccggcaagtaggggccgcctgtctgttgacagaactcactcctctgtcctatgaagaccgctgccattggtgttgagaataataaagctctgtgtttttttctatagactcgagcaagcttttgcttggggccggaatttcgagctaatttggccaattccccctttaggggaggcgataacaattcactgggccggggtttccgggggg

SEQ ID NO: 318670 - DNA, 780 bp, Homo sapiens
ggaagtgggtcgcaggaagaggaagtcccgcctctctctcctcaggcagagcagcaacgcggaggaaacgggagtgaacggagagcgtagtgaccatcatgagcctcctcaacaagcccaagagtgagatgaccccagaggagctgcagaagcgagaggaggaggaatttaacaccggtccactctctgtgctcacacagtcagtcaagaacaatacccaagtgctcatcaactgccgcaacaataagaaactcctgggccgcgtgaaggccttcgataggcactgcaacatggtgctggagaacgtgaaggagatgtggactgaggtacccaagagtggcaagggcaagaagaagtccaagccagtcaacaaagaccgctacatctccaagatgttcctgcgcggggactcagtcatcgtggtcctgcggaacccgctcatcgccggcaagtaggggccgcctgtctgttgacagaactcactcctctgtcctatgaagaccgctgccattggtgttgagaataataaagctctgtgtttttttctatagtacaaaaaaaagaaaagaaaaaaagaagaatttgtggggggttttggcctggaaaagtttttaagaacaatggttggcgagcgggggccccagatgtgataaaaacccgtggaaagagggtgcactacagagaaacccgtgacgagaaaaggcgcgggaattccccaaataaaaggccgcgggaacaagggtttcaaacaaatcgaagggacgagggcacaggggctaa

SEQ ID NO: 318671 - DNA, 644 bp, Homo sapiens
ggaagtgggtcgcaggaagaggaagtcccgcctctctctcctcaggcagagcagcaacgcggaggaaacgggagtgaacggagagcgtagtgaccatcatgagcctcctcaacaagcccaagagtgagatgaccccagaggagctgcagaagcgagaggaggaggaatttaacaccggtccactctctgtgctcacacagtcagtcaagaacaatacccaagtgctcatcaactgccgcaacaataagaaactcctgggccgcgtgaaggccttcgataggcactgcaacatggtgctggagaacgtgaaggagatgtggactgaggtacccaagagtggcaagggcaagaagaagtccaagccagtcaacaaagaccgctacatctccaagatgttcctgcgcggggactcagtcatcgtggtcctgcggaacccgctcatcgccggcaagtaggggccgcctgtctgttgacagaactcactcctctgtcctatgaagaccgctgccattggtgttgagaataataaagctctgtgtttttttctatcataaaaaacaaaacaaacaaaaaaaaaaaaaaaaaaaaaaaaaaaaaaaaacaaaaaaaaacaaaaaacaacacaaaaaaaaaaaaaaaaaaga

SEQ ID NO: 318672 - DNA, 530 bp, Homo sapiens
ggaagtgggtcgcaggaagaggaagtcccgcctctctctcctcaggcagagcagcaacgcggaggaaacgggagtgaacggagagcgtagtgaccatcatgagcctcctcaacaagcccaagagtgagatgaccccagaggagctgcagaagcgagaggaggaggaatttaacaccggtccactctctgtgctcacacagtcagtcaagaacaatacccaagtgctcatcaactgccgcaacaataagaaactcctgggccgcgtgaaggccttcgataggcactgcaacatggtgctggagaacgtgaaggagatgtggactgaggtacccaagagtggcaagggcaagaagaagtccaagccagtcaacaaagaccgctacatctccaagatgttcctgcgcggggactcagtcatcgtggtcctgcggaacccgctcatcgccggcaagtaggggccgcctgtctgttgacagaacttcacccaagctatcactcctcacccaaactaggtgaccgagctcgatgta

SEQ ID NO: 318673 - DNA, 484 bp, Homo sapiens
atccgagctcggtacccctctcgagcagcaacgcggaggaaacgggagtgaacggagagcgtagtgaccatcatgagcctcctcaacaagcccaagagtgagatgaccccagaggagctgcagaagcgagaggaggaggaatttaacaccggtccactctctgtgctcacacagtcagtcaagaacaatacccaagtgctcatcaactgccgcaacaataagaaactcctgggccgcgtgaaggccttcgataggcactgcaacatggtgctggagaacgtgaaggagatgtggactgaggtcaacaaagaccgctacatctccaagatgttcctgcgcggggactcagtcatcgtggtcctgcggaacccgctcatcgccggcaagtaggggccgcctgtctgttgacagaactcactcctctgtcctatgaagaccgctgccattggtgttgagaataataaagctctgtgtttttttctat

SEQ ID NO: 318674 - DNA, 419 bp, Homo sapiens
tggcagagttgctttggcagcttggtcatcccggcctagcacctgcacccttccccaagccatgctgctggagggggcgagcagcaggcagtagggggcactgtcagaggcacgcccctcacgcccagtgcctcccctccctgttccccaccaggcactgcaacatggtgctggagaacgtgaaggagatgtggactgaggtacccaagagtggcaagggcaagaagaagtccaagccagtcaacaaagaccgctacatctccaagatgttcctgcgcggggactcagtcatcgtggtcctgcggaacccgctcatcgccggcaagtaggggccgcctgtctgttgacagaactcactcctctgtcctatgaagaccgctgccattggtgttgagaataataaagctctgtgttttttt

SEQ ID NO: 318675 - DNA, 1391 bp, Homo sapiens
  misc_feature (1)..(2): n is a, c, g, or t
  misc_feature (4)..(4): n is a, c, g, or t
  misc_feature (6)..(6): n is a, c, g, or t
  misc_feature (8)..(8): n is a, c, g, or t
  misc_feature (13)..(14): n is a, c, g, or t
nncncngnccttnngcctgcaggcatctacaccagtaataaggaccccatctcccacagtggcgggatgctgcgggctgtctgcagcacccctctctcctccagcctcctggggcccccagggacctcggccctgccccgcctcagccgctccccgttcaccagcaccctcccctcctcttctgcttctatctccaccactcaggtgttttctctggctggctctacctttagcctcccttctacccacatctttggaacccccatgggtgccgttaatcccctcctctcccaagctgagagcagccacacagagccagacctggaggactgcagcttccggtgtcgggggacctcccctcaggagagtctgtcttccatgtcccccatcagcagcctccccgcactcttcgaccagacagcctctgcaccctgtgggggcggccagttagacccggcggccccagggacgactaacatggagcagcttctggagaagcagggcgacggggaggccggcgtcaacatcgtggagatgctgaaggcgctgcacgcgctgcagaaggagaaccagcggctgcaagagcagatcctgagcctgacggccaaaaaggagcggctgcagattctcaacgtgcagctctctgtgcccttccctgccctgcctgctgccctgcctgccgccaacggccctgtccctgggccctatggcctgcctccccaagccggcagcagcgactccttgagcaccagcaagagccctccgggaaagagcagcctcggcctggacaactcgctgtccacttcttctgaggtgggcgctacgaggagtggggcaggaaggagggggagactcaaggctctcctggtcccatctcttccccgcagctattggaggctgggcaatgaagtgactgactgagcaattgattgatccattcagtcctcccttaatcaagtaatatttatgaggtgcccacttagtgccagccattggctaagcaatcagtgagcaaaaccggcacagcgctgcttcttaagataggctaccccaagcaaagaaggagtaatcacaaactgggagatatgttagtgtggagagaaattgagggctgtgagagagagaacgggggagggctgcttctgtggatagaaagtggttagggaaggcctctttgagaagtatttgtgaagggtttattatagcgcctcacacaaaataattcctgtgtaactggtggcggttcgaatagcagttgctattgtgttgtggttattactggaatccaacaaactgggttcttgttctctctctgccatttattaactgtgtgacttgggcagtaataatcataataataaccagcattaattgcacacttgccctttgtc

SEQ ID NO: 318676 - DNA, 292 bp, Homo sapiens
ctcatgggagtatgaaggagatggtaggaggctgctgcgtatgttcggacgagaggggctgggccgagaacccgctggtctactgcgatgggcacgcgtgcagcgtggccgtccaccaagcttgctatggcatcgttcaggtgccaacgggaccctggttctgccggaaatgtgaatctcaggagcgagcagccagggtgaggtgtgagctgtgcccacacaaagacggggcattgaagaggactgataatggaggtgaggcgggctcatctgctgaggtcagcagggcccc

SEQ ID NO: 318677 - DNA, 7378 bp, Homo sapiens
ctcatgggagtatgaaggagatggtaggaggctgctgcgtatgttcggacgagaggggctgggccgagaacccgctggtctactgcgatgggcacgcgtgcagcgtggccgtccaccaagcttgctatggcatcgttcaggtgccaacgggaccctggttctgccggaaatgtgaatctcaggagcgagcagccagggtgaggtgtgagctgtgcccacacaaagacggggcattgaagaggactgataatggaggctgggcacacgtggtgtgtgccctctacatccccgaggtgcaatttgccaacgtgctcaccatggagcccatcgtgctgcagtacgtgcctcatgatcgcttcaacaagacctgttacatctgcgaggagcagggccgggagagcaaggcggcctcgggagcctgcatgacctgtaaccgccatggatgtcgacaagctttccacgtcacctgtgcccaaatggcaggcttgctgtgtgaggaagaagtgctggaggtggacaacgtcaagtactgcggctactgcaaataccacttcagcaagatgaagacatcccggcacagcagcgggggaggcggaggaggcgctggaggaggaggtggcagcatggggggaggtggcagtggtttcatctctgggaggagaagccggtcagcctcaccatccacgcagcaggagaagcaccccacccaccacgagaggggccagaagaagagtcgaaaggacaaagaacgccttaagcagaagcacaagaagcggcctgagtcgccccccagcatcctcaccccgcccgtggtccccactgctgacaaggtctcctcctcggcttcctcttcctcccaccacgaggccagcacgcaggagacctctgagagcagcagggagtcaaaggggaaaaagtcttccagccatagcctgagtcataaagggaagaaactgagcagtgggaaaggtgtgagcagttttacctccgcctcctcttcttcctcctcctcttcctcctcctctggggggcccttccagcctgcagtctcgtccctgcagagctcccctgacttctctgcattccccaagctggagcagccagaggaggacaagtactccaagcccacagcccccgccccttcagcccctccttctccctcagctcccgagccccccaaggctgacctttttgagcagaaggtggtcttctctggctttgggcccatcatgcgcttctccaccaccacctccagctcaggccgggcccgggcgccctcccctggggactataagtctccccacgtcacggggtctggggcctcggcaggcacccacaaacggatgcccgcactgagtgccacccctgtgcctgctgatgagacccctgagacaggcctgaaggagaagaagcacaaagccagcaagaggagccgccatgggccaggccgtcccaagggcagccggaacaaggagggcactgggggcccagctgccccatccttgcccagtgcccagctggctggctttaccgccactgctgcctcacccttctctggaggttccctggtcagctccggcctgggaggtctgtcctcccgaacctttgggccttctgggagcttgcccagcttgagcctggagtcccccttactaggggcaggcatctacaccagtaataaggaccccatctcccacagtggcgggatgctgcgggctgtctgcagcacccctctctcctccagcctcctggggcccccagggacctcggccctgccccgcctcagccgctccccgttcaccagcaccctcccctcctcttctgcttctatctccaccactcaggtgttttctctggctggctctacctttagcctcccttctacccacatctttggaacccccatgggtgccgttaatcccctcctctcccaagctgagagcagccacacagagccagacctggaggactgcagcttccggtgtcgggggacctcccctcaggagagtctgtcttccatgtcccccatcagcagcctccccgcactcttcgaccagacagcctctgcaccctgtgggggcggccagttagacccggcggccccagggacgactaacatggagcagcttctggagaagcagggcgacggggaggccggcgtcaacatcgtggagatgctgaaggcgctgcacgcgctgcagaaggagaaccagcggctgcaagagcagatcctgagcctgacggccaaaaaggagcggctgcagattctcaacgtgcagctctctgtgcccttccctgccctgcctgctgccctgcctgccgccaacggccctgtccctgggccctatggcctgcctccccaagccggcagcagcgactccttgagcaccagcaagagccctccgggaaagagcagcctcggcctggacaactcgctgtccacttcttctgaggacccacactcaggctgcccgagccgcagcagctcgtcgctgtccttccacagcacgcccccaccgctgcccctcctccagcagagccctgccactctgcccctggccctgcctggggcccctgccccactcccgccccagccgcagaacgggttgggccgggcacccggggcagcggggctgggggccatgcccatggctgaggggctgttgggggggctggcaggcagtgggggcctgcccctcaatgggctccttggggggttgaatggggccgctgcccccaaccccgcaagcttgagccaggctggcggggcccccacgctgcagctgccaggctgtctcaacagccttacagagcagcagagacatctccttcagcagcaagagcagcagctccagcaactccagcagctcctggcctccccgcagctgaccccggaacaccagactgttgtctaccagatgatccagcagatccagcagaaacgggagctgcagcgcctgcagatggctgggggctcccagctgcccatggccagcctgctggcaggaagctccaccccgctgctgtctgcgggtacccctggcctgctgcccacagcgtctgctccacccctgctgcccgctggagccctagtggctccctcgcttggcaacaacacaagtctcatggccgcagcagctgcagctgcagcagtagcagcagcaggcggacctccagtcctcactgcccagaccaaccccttcctcagcctgtcgggagcagagggcagtggcggtggccccaaaggagggaccgctgacaaaggagcctcagccaaccaggaaaaaggctaaatccacccttacccctcctgacccccccaagtggagggaacagatcctggcctgaggggtcctagcctggagcaggcgcctgcgcccagaccctggagagccttgacccagagcctgtgctgaggtccagggagtgtggagagctcctggtgtcgaggactgagactgagaggggagccccctccatctggcccccttccctttccgcactgtccgctttgtgaggctcagaggaaggacagtctgcaagcccgcctaggaggtccatccccagcaaatgttttggaggtccccccagagagcagagtgggccatggcagaagtagggggttggttggacctgtcacatgaaatggatcagcacttgaatggggagaagtggagggagaggccctgggcctgtccctgcggggaaatcttttatggaagaagggctggacccactttacctgcagtttcttcccagctcgggcagatggcagaagggaccccttggactttttctcgccatccctccccccagcgcaggggcacaagctgagcttgtaaaagcccacagatgttgggggctggagaaggggcaggagagcatcacactcagccccagcctcctcaacctcttggggccccgtgatggggaggagagggcaggtgcggggaggctctggccttccttggtgccccgccctttgtttgcactattggacttaggagtgccgagggtggggagatggagctgcccgtctcagtgtgtgtgtgtgtctgtctgcctgtctctctcctcctggacccagggcagccaagggcagggataggcgcagtggtcagatgaagcagcgccagagaggggacctcccagctcttatttgcaccctccccacctcaccaactttggtccctctctgggggcatgaatggttaacaaacaccagagcagtactccaatattggagagtcgctgggggcacagggctttgaatcagggtagtatcctgccttccctcccctgaccccacatggtctcagggcccccttagggccccctaccccactgatagcttcctccttctctggcacaaggggagccccagggcttgggggagggcgtaaggtggggggaaatgccactgcttttagcaaaagcctccctcccagaattagccagcttgcctcctgcaccccacccccaccaaccaggggagccactaagctgactaacaactgtcccctcacccaccagctatttccccagggtagagtgggcaattctcaccttcaaagagtccccgcctgcccaggcctttggcacagaggctgagtggacagtcaggagagaggcgagaggcaaggcgaagcctgtgtccctgtttcagttgcactggggttggagcccagggtaggggtttccagcttccccaggctccggccttgtcagtctctttgcatgtgtggatttttctgtgtgtgtttctgtttgggtttttgttgttgggttttttttttttttttaataaagaaaagaagatgtgtatatttttggcaacgacagaaacgtagtgcagatatatttttgcctgtgctgctcaactgttttttttttctgatactgtaatggaggggggtgggaatccttcaaaggcaatttcttaggcacttgcaagggcttgggggagggggaggcagttgtgatgacctcagaaatactcactttttattaatgctaaatatgttagaaagaaatgatagcattcagcattttattcttcttaatctattaagctgtgtaactccctgccccaaaccactgaaaagaaaagtaaccttcaggccaggcgcggtggctcacgcctgtaatcccaacactttgggaggctgaggcgggcggatcacttaaggtcaggagttcaagaccagcctggccaacatggtgaaaccccgtctctatcaaaaattagccgggcatggtggcacgtgcctgtaatcccagctacttgggaggctgaggcacgagaattgcttgaacccaggaggctgaggctgcagtgagccaagattgtgccactgcactccagcctgtgtgagagagtgagactctgtctcaaaagagaaaaaaaaagaaaagtaaccttcagagattcttagaagagttgctcattcacacccacgcccttgcccaaggctggcccacttagagcgaaacttaacttttgtctggatgggaagagaagtaagtctaccccgaggttgccatgttgaagagtgagaggtccaagtgattctgtgcattgaaaccaagacaccccacccagaacacttcttccctccctcagcccaaaccaaaggctggggttctcatctccaagtggctgttctccaactttcccaagccgcttgcattccccagactggactactgtggcggttaggttagatttgaagacggggcccaggctgggtatgaacgggtgcagccctcttctcctcttcccccccacatctctcatgagagaggtagtggcatttccttctcagggagcttcaatgggaaaggtctcgaaagcttcaggaggagcagaataccaacgcagggggatggctgtaacgatctcaccgtctcctaacctcagtcccttttttgagagtgaatggtggagggtgggaagggacccagatttgtagatctctttgtctgggggaggggaaggatgtggtttgcagagcggaagcagagtttggaaacgcatgagagcagagcttcgtgtgttcccaccctcagtgaggaggtgtgagtgggtgagcatgtggagttgggtgttcccaccctcagtgaggaggtgtgagtgggggtgcatatagaggcagtgcctgctgtggggtcacaactggtgcatgccagcgccaaagggacctgtctttaggggtcatttcagccagctcctcccatcacagatgacagctccaagcctagaaggggctcagtgacagggccaggacaagccctcaggactgtggcctcctggcccttggttcccctgccccacaacatggtctccacatggctggctggctggctgtccctgtgtgtgtgtgacacacggtgtgagtgcagggctgtgcccggggtgggagggtgtctatgtggcactgactgtcttagctcagagctggtggatcctctccatggacaatgacactttaaggattgtcttggtttgtttttcctatttgtggggtattttccccctcaggctcctgggtctgctgctgcctcaaggtgtcctgaccttgaggctgatgaggggacccctgcctgtttcccccatactgagttctagggaggtgctcaccccagactcttaggaagggtctagagaaatgagaggagcccaagccaggggccagctccgagaaagggtaacctccacgcttctctctcccaaattggaaatgaagacaggttttcaaaggcacaggctccccctgccagcttctaggatcttccttggtgtgcaatgggccagttaggggtaggcagcttgcacccagttctcctttatctcaacttattttcctggggagaggtgcctagagggattgaggtaacttcaactgggaattccaaggaaggtgggcaagtagccttggctctctcccaccatgtccatcaggattgagagtgtgtctagctcccgaccactttgtcttgacctactgaaaagttgggaactgaggggtgccttcattcccctttgttcactttctccagctcaacttgggacttgggtggtgggactggagacctcacccctgctcccgtcccgccccctttctatcccaacctgtttccatgtagcagacccttcctagggagcagggaggggaagccacagattgcaaacccaggggctcctttttcattctttctaaaaccttgatatcctcagcccaaaggcgatgcccccctgccacctccaagcctggaattgtgcataacccggatcttgtatctttgtataacggatgttatttgtacgaagggcagttcgtaaacagcacttgttcttttaataaaagaatgttttgca

SEQ ID NO: 318678 - DNA, 7474 bp, Homo sapiens
ctcatgggagtatgaaggagatggtaggaggctgctgcgtatgttcggacgagaggggctgggccgagaacccgctggtctactgcgatgggcacgcgtgcagcgtggccgtccaccaagcttgctatggcatcgttcaggtgccaacgggaccctggttctgccggaaatgtgaatctcaggagcgagcagccagggtgaggtgtgagctgtgcccacacaaagacggggcattgaagaggactgataatggaggctgggcacacgtggtgtgtgccctctacatccccgaggtgcaatttgccaacgtgctcaccatggagcccatcgtgctgcagtacgtgcctcatgatcgcttcaacaagacctgttacatctgcgaggagcagggccgggagagcaaggcggcctcgggagcctgcatgacctgtaaccgccatggatgtcgacaagctttccacgtcacctgtgcccaaatggcaggcttgctgtgtgaggaagaagtgctggaggtggacaacgtcaagtactgcggctactgcaaataccacttcagcaagatgaagacatcccggcacagcagcgggggaggcggaggaggcgctggaggaggaggtggcagcatggggggaggtggcagtggtttcatctctgggaggagaagccggtcagcctcaccatccacgcagcaggagaagcaccccacccaccacgagaggggccagaagaagagtcgaaaggacaaagaacgccttaagcagaagcacaagaagcggcctgagtcgccccccagcatcctcaccccgcccgtggtccccactgctgacaaggtctcctcctcggcttcctcttcctcccaccacgaggccagcacgcaggagacctctgagagcagcagggagtcaaaggggaaaaagtcttccagccatagcctgagtcataaagggaagaaactgagcagtgggaaaggtgtgagcagttttacctccgcctcctcttcttcctcctcctcttcctcctcctctggggggcccttccagcctgcagtctcgtccctgcagagctcccctgacttctctgcattccccaagctggagcagccagaggaggacaagtactccaagcccacagcccccgccccttcagcccctccttctccctcagctcccgagccccccaaggctgacctttttgagcagaaggtggtcttctctggctttgggcccatcatgcgcttctccaccaccacctccagctcaggccgggcccgggcgccctcccctggggactataagtctccccacgtcacggggtctggggcctcggcaggcacccacaaacggatgcccgcactgagtgccacccctgtgcctgctgatgagacccctgagacaggcctgaaggagaagaagcacaaagccagcaagaggagccgccatgggccaggccgtcccaagggcagccggaacaaggagggcactgggggcccagctgccccatccttgcccagtgcccagctggctggctttaccgccactgctgcctcacccttctctggaggttccctggtcagctccggcctgggaggtctgtcctcccgaacctttgggccttctgggagcttgcccagcttgagcctggagtcccccttactaggggcaggcatctacaccagtaataaggaccccatctcccacagtggcgggatgctgcgggctgtctgcagcacccctctctcctccagcctcctggggcccccagggacctcggccctgccccgcctcagccgctccccgttcaccagcaccctcccctcctcttctgcttctatctccaccactcaggtgttttctctggctggctctacctttagcctcccttctacccacatctttggaacccccatgggtgccgttaatcccctcctctcccaagctgagagcagccacacagagccagacctggaggactgcagcttccggtgtcgggggacctcccctcaggagagtctgtcttccatgtcccccatcagcagcctccccgcactcttcgaccagacagcctctgcaccctgtgggggcggccagttagacccggcggccccagggacgactaacatggagcagcttctggagaagcagggcgacggggaggccggcgtcaacatcgtggagatgctgaaggcgctgcacgcgctgcagaaggagaaccagcggctgcaagagcagatcctgagcctgacggccaaaaaggagcggctgcagattctcaacgtgcagctctctgtgcccttccctgccctgcctgctgccctgcctgccgccaacggccctgtccctgggccctatggcctgcctccccaagccggcagcagcgactccttgagcaccagcaagagccctccgggaaagagcagcctcggcctggacaactcgctgtccacttcttctgaggacccacactcaggctgcccgagccgcagcagctcgtcgctgtccttccacagcacgcccccaccgctgcccctcctccagcagagccctgccactctgcccctggccctgcctggggcccctgccccactcccgccccagccgcagaacgggttgggccgggcacccggggcagcggggctgggggccatgcccatggctgaggggctgttgggggggctggcaggcagtgggggcctgcccctcaatgggctccttggggggttgaatggggccgctgcccccaaccccgcaagcttgagccaggctggcggggcccccacgctgcagctgccaggctgtctcaacagccttacagagcagcagagacatctccttcagcagcaagagcagcagctccagcaactccagcagctcctggcctccccgcagctgaccccggaacaccagactgttgtctaccagatgatccagcagatccagcagaaacgggagctgcagcgcctgcagatggctgggggctcccagctgcccatggccagcctgctggcaggaagctccaccccgctgctgtctgcgggtacccctggcctgctgcccacagcgtctgctccacccctgctgcccgctggagccctagtggctccctcgcttggcaacaacacaagtctcatggccgcagcagctgcagctgcagcagtagcagcagcaggcggacctccagtcctcactgcccagaccaaccccttcctcagcctgtcgggagcagagggcagtggcggtggccccaaaggagggaccgctgacaaaggagcctcagccaaccaggaaaaaggctaaatccacccttacccctcctgacccccccaagtggagggaacagatcctggcctgaggggtcctagcctggagcaggcgcctgcgcccagaccctggagagccttgacccagagcctgtgctgaggtccagggagtgtggagagctcctggtgtcgaggactgagactgagaggggagccccctccatctggcccccttccctttccgcactgtccgctttgtgaggctcagaggaaggacagtctgcaagcccgcctaggaggtccatccccagcaaatgttttggaggtccccccagagagcagagtgggccatggcagaagtagggggttggttggacctgtcacatgaaatggatcagcacttgaatggggagaagtggagggagaggccctgggcctgtccctgcggggaaatcttttatggaagaagggctggacccactttacctgcagtttcttcccagctcgggcagatggcagaagggaccccttggactttttctcgccatccctccccccagcgcaggggcacaagctgagcttgtaaaagcccacagatgttgggggctggagaaggggcaggagagcatcacactcagccccagcctcctcaacctcttggggccccgtgatggggaggagagggcaggtgcggggaggctctggccttccttggtgccccgccctttgtttgcactattggacttaggagtgccgagggtggggagatggagctgcccgtctcagtgtgtgagtgtgtgtgtgcgtgcatgtgtgtgtgtgtgtgtgtgtgtgtgtgtgtctgtctgcctgtctctctcctcctggacccagggcagccaagggcagggataggcgcagtggtcagatgaagcagcgccagagaggggacctcccagctcttatttgcaccctccccacctcaccaactttggtccctctctgggggcatgaatggttaacaaacaccagagcagtactccaatattggagagtcgctgggggcacagggctttgaatcagggtagtatcctgccttccctcccctgaccccacatggtctcagggcccccttagggccccctaccccactgatagcttcctccttctctggcacaaggggagccccagggcttgggggagggcgtaaggtggggggaaatgccactgcttttagcaaaagcctccctcccagaattagccagcttgcctcctgcaccccacccccaccaaccaggggagccactaagctgactaacaactgtcccctcacccaccagctatttccccagggtagagtgggcaattctcaccttcaaagagtccccgcctgcccaggcctttggcacagaggctgagtggacagtcaggagagaggcgagaggcaaggcgaagcctgtgtccctgtttcagttgcactggggttggagcccagggtaggggtttccagcttccccaggctccggccttgtcagtctctttgcatgtgtggatttttctgtgtgtgtttctgtttgggtttttgttgttgggttttttttttttttttaataaagaaaagaagatgtgtatatttttggcaacgacagaaacgtagtgcagatatatttttgcctgtgctgctcaactgttttttttttctgatactgaaaataatattaatattcctgttgataagactttgtaagatgttagggagctgataatggaggggggtgggaatccttcaaaggcaatttcttaggcacttgcaagggcttgggggagggggaggcagttgtgatgacctcagaaatactcactttttattaatgctaaatatgttagaaagaaatgatagcattcagcattttattcttcttaatctattaagctgtgtaactccctgccccaaaccactgaaaagaaaagtaaccttcaggccaggcgcggtggctcacgcctgtaatcccaacactttgggaggctgaggcgggcggatcacttaaggtcaggagttcaagaccagcctggccaacatggtgaaaccccgtctctatcaaaaattagccgggcatggtggcacgtgcctgtaatcccagctacttgggaggctgaggcacgagaattgcttgaacccaggaggctgaggctgcagtgagccaagattgtgccactgcactccagcctgtgtgagagagtgagactctgtctcaaaagagaaaaaaaaagaaaagtaaccttcagagattcttagaagagttgctcattcacacccacgcccttgcccaaggctggcccacttagagcgaaacttaacttttgtctggatgggaagagaagtaagtctaccccgaggttgccatgttgaagagtgagaggtccaagtgattctgtgcattgaaaccaagacaccccacccagaacacttcttccctccctcagcccaaaccaaaggctggggttctcatctccaagtggctgttctccaactttcccaagccgcttgcattccccagactggactactgtggcggttaggttagatttgaagacggggcccaggctgggtatgaacgggtgcagccctcttctcctcttcccccccacatctctcatgagagaggtagtggcatttccttctcagggagcttcaatgggaaaggtctcgaaagcttcaggaggagcagaataccaacgcagggggatggctgtaacgatctcaccgtctcctaacctcagtcccttttttgagagtgaatggtggagggtgggaagggacccagatttgtagatctctttgtctgggggaggggaaggatgtggtttgcagagcggaagcagagtttggaaacgcatgagagcagagcttcgtgtgttcccaccctcagtgaggaggtgtgagtgggtgagcatgtggagttgggtgttcccaccctcagtgaggaggtgtgagtgggggtgcatatagaggcagtgcctgctgtggggtcacaactggtgcatgccagcgccaaagggacctgtctttaggggtcatttcagccagctcctcccatcacagatgacagctccaagcctagaaggggctcagtgacagggccaggacaagccctcaggactgtggcctcctggcccttggttcccctgccccacaacatggtctccacatggctggctggctggctgtccctgtgtgtgtgtgacacacggtgtgagtgcagggctgtgcccggggtgggagggtgtctatgtggcactgactgtcttagctcagagctggtggatcctctccatggacaatgacactttaaggattgtcttggtttgtttttcctatttgtggggtattttccccctcaggctcctgggtctgctgctgcctcaaggtgtcctgaccttgaggctgatgaggggacccctgcctgtttcccccatactgagttctagggaggtgctcaccccagactcttaggaagggtctagagaaatgagaggagcccaagccaggggccagctccgagaaagggtaacctccacgcttctctctcccaaattggaaatgaagacaggttttcaaaggcacaggctccccctgccagcttctaggatcttccttggtgtgcaatgggccagttaggggtaggcagcttgcacccagttctcctttatctcaacttattttcctggggagaggtgcctagagggattgaggtaacttcaactgggaattccaaggaaggtgggcaagtagccttggctctctcccaccatgtccatcaggattgagagtgtgtctagctcccgaccactttgtcttgacctactgaaaagttgggaactgaggggtgccttcattcccctttgttcactttctccagctcaacttgggacttgggtggtgggactggagacctcacccctgctcccgtcccgccccctttctatcccaacctgtttccatgtagcagacccttcctagggagcagggaggggaagccacagattgcaaacccaggggctcctttttcattctttctaaaaccttgatatcctcagcccaaaggcgatgcccccctgccacctccaagcctggaattgtgcataacccggatcttgtatctttgtataacggatgttatttgtacgaagggcagttcgtaaacagcacttgttcttttaataaaagaatgttttgca

SEQ ID NO: 318679 - DNA, 6455 bp, Homo sapiens
ggaagacttgctcaaggcaggaaatggcagacctaaagctcagattctgttctcctgactccaagcccagtgctttcaccggtgtagcgtgcttccccttggcttcgtagtgtgtcttgggatcagcgcttacggaggtctcaacctctccgggtatttacgagttaagggggcgggtcacaagcgccccgccctctccctggagagtcagcccagccccagaaagctaattggtgcagggagaccacctgtcaggctgggaggcggggcctacagccaggctgccgactcaggtaagccttaaaggggacaaatatgattccacgtttaagaacgacagagtagggtgatatatttgttaaaactcagatcaggattctgtggcccaaggaagagttttagttttgcctcctgataagggatctgatgaatgtaaaaagtcatacagagctaattatgataatagctgcagtcattaagggcttgctacatgctagctaaacccttcaggtaaacacttcacatttattaccttcttttaatcttaataacagtcacttcggagaggctggttaggagcccaaggtcacaaaagttgatgtcaggtttaagttcaatccaggtctgtcttgacctcaaatttctataactctgaagatcccaggaaaggaattgggcggtggatctgaaagaagccagacagtggagccttcagcccagaggaggaagagagcagatgcccggggtttgcctcccaggggcagggtttccaagccagggccctcagcgctggccttgaactgccagtgtggggttggggattcctggggaaagggatctgcggtgaggtcccaatcccatatccatctgggggcggggaccctgaggcagctaccactcctccacgctgatcccagccttcccttcttccaagagccagacctggaggactgcagcttccggtgtcgggggacctcccctcaggagagtctgtcttccatgtcccccatcagcagcctccccgcactcttcgaccagacagcctctgcaccctgtgggggcggccagttagacccggcggccccagggacgactaacatggagcagcttctggagaagcagggcgacggggaggccggcgtcaacatcgtggagatgctgaaggcgctgcacgcgctgcagaaggagaaccagcggctgcaagagcagatcctgagcctgacggccaaaaaggagcggctgcagattctcaacgtgcagctctctgtgcccttccctgccctgcctgctgccctgcctgccgccaacggccctgtccctgggccctatggcctgcctccccaagccggcagcagcgactccttgagcaccagcaagagccctccgggaaagagcagcctcggcctggacaactcgctgtccacttcttctgaggacccacactcaggctgcccgagccgcagcagctcgtcgctgtccttccacagcacgcccccaccgctgcccctcctccagcagagccctgccactctgcccctggccctgcctggggcccctgccccactcccgccccagccgcagaacgggttgggccgggcacccggggcagcggggctgggggccatgcccatggctgaggggctgttgggggggctggcaggcagtgggggcctgcccctcaatgggctccttggggggttgaatggggccgctgcccccaaccccgcaagcttgagccaggctggcggggcccccacgctgcagctgccaggctgtctcaacagccttacagagcagcagagacatctccttcagcagcaagagcagcagctccagcaactccagcagctcctggcctccccgcagctgaccccggaacaccagactgttgtctaccagatgatccagcagatccagcagaaacgggagctgcagcgcctgcagatggctgggggctcccagctgcccatggccagcctgctggcaggaagctccaccccgctgctgtctgcgggtacccctggcctgctgcccacagcgtctgctccacccctgctgcccgctggagccctagtggctccctcgcttggcaacaacacaagtctcatggccgcagcagctgcagctgcagcagtagcagcagcaggcggacctccagtcctcactgcccagaccaaccccttcctcagcctgtcgggagcagagggcagtggcggtggccccaaaggagggaccgctgacaaaggagcctcagccaaccaggaaaaaggctaaatccacccttacccctcctgacccccccaagtggagggaacagatcctggcctgaggggtcctagcctggagcaggcgcctgcgcccagaccctggagagccttgacccagagcctgtgctgaggtccagggagtgtggagagctcctggtgtcgaggactgagactgagaggggagccccctccatctggcccccttccctttccgcactgtccgctttgtgaggctcagaggaaggacagtctgcaagcccgcctaggaggtccatccccagcaaatgttttggaggtccccccagagagcagagtgggccatggcagaagtagggggttggttggacctgtcacatgaaatggatcagcacttgaatggggagaagtggagggagaggccctgggcctgtccctgcggggaaatcttttatggaagaagggctggacccactttacctgcagtttcttcccagctcgggcagatggcagaagggaccccttggactttttctcgccatccctccccccagcgcaggggcacaagctgagcttgtaaaagcccacagatgttgggggctggagaaggggcaggagagcatcacactcagccccagcctcctcaacctcttggggccccgtgatggggaggagagggcaggtgcggggaggctctggccttccttggtgccccgccctttgtttgcactattggacttaggagtgccgagggtggggagatggagctgcccgtctcagtgtgtgagtgtgtgtgtgcgtgcatgtgtgtgtgtgtgtgtgtgtgtgtgtgtgtctgtctgcctgtctctctcctcctggacccagggcagccaagggcagggataggcgcagtggtcagatgaagcagcgccagagaggggacctcccagctcttatttgcaccctccccacctcaccaactttggtccctctctgggggcatgaatggttaacaaacaccagagcagtactccaatattggagagtcgctgggggcacagggctttgaatcagggtagtatcctgccttccctcccctgaccccacatggtctcagggcccccttagggccccctaccccactgatagcttcctccttctctggcacaaggggagccccagggcttgggggagggcgtaaggtggggggaaatgccactgcttttagcaaaagcctccctcccagaattagccagcttgcctcctgcaccccacccccaccaaccaggggagccactaagctgactaacaactgtcccctcacccaccagctatttccccagggtagagtgggcaattctcaccttcaaagagtccccgcctgcccaggcctttggcacagaggctgagtggacagtcaggagagaggcgagaggcaaggcgaagcctgtgtccctgtttcagttgcactggggttggagcccagggtaggggtttccagcttccccaggctccggccttgtcagtctctttgcatgtgtggatttttctgtgtgtgtttctgtttgggtttttgttgttgggttttttttttttttttaataaagaaaagaagatgtgtatatttttggcaacgacagaaacgtagtgcagatatatttttgcctgtgctgctcaactgttttttttttctgatactgaaaataatattaatattcctgttgataagactttgtaagatgttagggagctgataatggaggggggtgggaatccttcaaaggcaatttcttaggcacttgcaagggcttgggggagggggaggcagttgtgatgacctcagaaatactcactttttattaatgctaaatatgttagaaagaaatgatagcattcagcattttattcttcttaatctattaagctgtgtaactccctgccccaaaccactgaaaagaaaagtaaccttcaggccaggcgcggtggctcacgcctgtaatcccaacactttgggaggctgaggcgggcggatcacttaaggtcaggagttcaagaccagcctggccaacatggtgaaaccccgtctctatcaaaaattagccgggcatggtggcacgtgcctgtaatcccagctacttgggaggctgaggcacgagaattgcttgaacccaggaggctgaggctgcagtgagccaagattgtgccactgcactccagcctgtgtgagagagtgagactctgtctcaaaagagaaaaaaaaagaaaagtaaccttcagagattcttagaagagttgctcattcacacccacgcccttgcccaaggctggcccacttagagcgaaacttaacttttgtctggatgggaagagaagtaagtctaccccgaggttgccatgttgaagagtgagaggtccaagtgattctgtgcattgaaaccaagacaccccacccagaacacttcttccctccctcagcccaaaccaaaggctggggttctcatctccaagtggctgttctccaactttcccaagccgcttgcattccccagactggactactgtggcggttaggttagatttgaagacggggcccaggctgggtatgaacgggtgcagccctcttctcctcttcccccccacatctctcatgagagaggtagtggcatttccttctcagggagcttcaatgggaaaggtctcgaaagcttcaggaggagcagaataccaacgcagggggatggctgtaacgatctcaccgtctcctaacctcagtcccttttttgagagtgaatggtggagggtgggaagggacccagatttgtagatctctttgtctgggggaggggaaggatgtggtttgcagagcggaagcagagtttggaaacgcatgagagcagagcttcgtgtgttcccaccctcagtgaggaggtgtgagtgggtgagcatgtggagttgggtgttcccaccctcagtgaggaggtgtgagtgggggtgcatatagaggcagtgcctgctgtggggtcacaactggtgcatgccagcgccaaagggacctgtctttaggggtcatttcagccagctcctcccatcacagatgacagctccaagcctagaaggggctcagtgacagggccaggacaagccctcaggactgtggcctcctggcccttggttcccctgccccacaacatggtctccacatggctggctggctggctgtccctgtgtgtgtgtgacacacggtgtgagtgcagggctgtgcccggggtgggagggtgtctatgtggcactgactgtcttagctcagagctggtggatcctctccatggacaatgacactttaaggattgtcttggtttgtttttcctatttgtggggtattttccccctcaggctcctgggtctgctgctgcctcaaggtgtcctgaccttgaggctgatgaggggacccctgcctgtttcccccatactgagttctagggaggtgctcaccccagactcttaggaagggtctagagaaatgagaggagcccaagccaggggccagctccgagaaagggtaacctccacgcttctctctcccaaattggaaatgaagacaggttttcaaaggcacaggctccccctgccagcttctaggatcttccttggtgtgcaatgggccagttaggggtaggcagcttgcacccagttctcctttatctcaacttattttcctggggagaggtgcctagagggattgaggtaacttcaactgggaattccaaggaaggtgggcaagtagccttggctctctcccaccatgtccatcaggattgagagtgtgtctagctcccgaccactttgtcttgacctactgaaaagttgggaactgaggggtgccttcattcccctttgttcactttctccagctcaacttgggacttgggtggtgggactggagacctcacccctgctcccgtcccgccccctttctatcccaacctgtttccatgtagcagacccttcctagggagcagggaggggaagccacagattgcaaacccaggggctcctttttcattctttctaaaaccttgatatcctcagcccaaaggcgatgcccccctgccacctccaagcctggaattgtgcataacccggatcttgtatctttgtataacggatgttatttgtacgaagggcagttcgtaaacagcacttgttcttttaataaaagaatgttttgca

SEQ ID NO: 318680 - DNA, 7890 bp, Homo sapiens
ctcatgggagtatgaaggagatggtaggaggctgctgcgtatgttcggacgagaggggctgggccgagaacccgctggtctactgcgatgggcacgcgtgcagcgtggccgtccaccaagcttgctatggcatcgttcaggtgccaacgggaccctggttctgccggaaatgtgaatctcaggagcgagcagccagggtgaggtgtgagctgtgcccacacaaagacggggcattgaagaggactgataatggaggctgggcacacgtggtgtgtgccctctacatccccgaggtgcaatttgccaacgtgctcaccatggagcccatcgtgctgcagtacgtgcctcatgatcgcttcaacaagacctgttacatctgcgaggagcagggccgggagagcaaggcggcctcgggagcctgcatgacctgtaaccgccatggatgtcgacaagctttccacgtcacctgtgcccaaatggcaggcttgctgtgtgaggaagaagtgctggaggtggacaacgtcaagtactgcggctactgcaaataccacttcagcaagatgaagacatcccggcacagcagcgggggaggcggaggaggcgctggaggaggaggtggcagcatggggggaggtggcagtggtttcatctctgggaggagaagccggtcagcctcaccatccacgcagcaggagaagcaccccacccaccacgagaggggccagaagaagagtcgaaaggacaaagaacgccttaagcagaagcacaagaagcggcctgagtcgccccccagcatcctcaccccgcccgtggtccccactgctgacaaggtctcctcctcggcttcctcttcctcccaccacgaggccagcacgcaggagacctctgagagcagcagggagtcaaaggggaaaaagtcttccagccatagcctgagtcataaagggaagaaactgagcagtgggaaaggtgtgagcagttttacctccgcctcctcttcttcctcctcctcttcctcctcctctggggggcccttccagcctgcagtctcgtccctgcagagctcccctgacttctctgcattccccaagctggagcagccagaggaggacaagtactccaagcccacagcccccgccccttcagcccctccttctccctcagctcccgagccccccaaggctgacctttttgagcagaaggtggtcttctctggctttgggcccatcatgcgcttctccaccaccacctccagctcaggccgggcccgggcgccctcccctggggactataagtctccccacgtcacggggtctggggcctcggcaggcacccacaaacggatgcccgcactgagtgccacccctgtgcctgctgatgagacccctgagacaggcctgaaggagaagaagcacaaagccagcaagaggagccgccatgggccaggccgtcccaagggcagccggaacaaggagggcactgggggcccagctgccccatccttgcccagtgcccagctggctggctttaccgccactgctgcctcacccttctctggaggttccctggtcagctccggcctgggaggtctgtcctcccgaacctttgggccttctgggagcttgcccagcttgagcctggagtcccccttactaggggcaggcatctacaccagtaataaggaccccatctcccacagtggcgggatgctgcgggctgtctgcagcacccctctctcctccagcctcctggggcccccagggacctcggccctgccccgcctcagccgctccccgttcaccagcaccctcccctcctcttctgcttctatctccaccactcaggtgttttctctggctggctctacctttagcctcccttctacccacatctttggaacccccatgggtgccgttaatcccctcctctcccaagctgagagcagccacacagagccagacctggaggactgcagcttccggtgtcgggggacctcccctcaggagagtctgtcttccatgtcccccatcagcagcctccccgcactcttcgaccagacagcctctgcaccctgtgggggcggccagttagacccggcggccccagggacgactaacatggagcagcttctggagaagcagggcgacggggaggccggcgtcaacatcgtggagatgctgaaggcgctgcacgcgctgcagaaggagaaccagcggctgcaagagcagatcctgagcctgacggccaaaaaggagcggctgcagattctcaacgtgcagctctctgtgcccttccctgccctgcctgctgccctgcctgccgccaacggccctgtccctgggccctatggcctgcctccccaagccggcagcagcgactccttgagcaccagcaagagccctccgggaaagagcagcctcggcctggacaactcgctgtccacttcttctgaggacccacactcaggctgcccgagccgcagcagctcgtcgctgtccttccacagcacgcccccaccgctgcccctcctccagcagagccctgccactctgcccctggccctgcctggggcccctgccccactcccgccccagccgcagaacgggttgggccgggcacccggggcagcggggctgggggccatgcccatggctgaggggctgttgggggggctggcaggcagtgggggcctgcccctcaatgggctccttggggggttgaatggggccgctgcccccaaccccgcaagcttgagccaggctggcggggcccccacgctgcagctgccaggctgtctcaacagccttacagagcagcagagacatctccttcagcagcaagagcagcagctccagcaactccagcagctcctggcctccccgcagctgaccccggaacaccagactgttgtctaccagatgatccagcagatccagcagaaacgggagctgcagcgcctgcagatggctgggggctcccagctgcccatggccagcctgctggcaggaagctccaccccgctgctgtctgcgggtacccctggcctgctgcccacagcgtctgctccacccctgctgcccgctggagccctagtggctccctcgcttggcaacaacacaagtctcatggccgcagcagctgcagctgcagcagtagcagcagcaggcggacctccagtcctcactgcccagaccaaccccttcctcagcctgtcgggagcagagggcagtggcggtggccccaaaggagggaccgctgacaaaggagcctcagccaaccaggaaaaaggctaaatccacccttacccctcctgacccccccaagtggagggaacagatcctggcctgaggggtcctagcctggagcaggcgcctgcgcccagaccctggagagccttgacccagagcctgtgctgaggtccagggagtgtggagagctcctggtgtcgaggactgagactgagaggggagccccctccatctggcccccttccctttccgcactgtccgctttgtgaggctcagaggaaggacagtctgcaagcccgcctaggaggtccatccccagcaaatgttttggaggtccccccagagagcagagtgggccatggcagaagtagggggttggttggacctgtcacatgaaatggatcagcacttgaatggggagaagtggagggagaggccctgggcctgtccctgcggggaaatcttttatggaagaagggctggacccactttacctgcagtttcttcccagctcgggcagatggcagaagggaccccttggactttttctcgccatccctccccccagcgcaggggcacaagctgagcttgtaaaagcccacagatgttgggggctggagaaggggcaggagagcatcacactcagccccagcctcctcaacctcttggggccccgtgatggggaggagagggcaggtgcggggaggctctggccttccttggtgccccgccctttgtttgcactattggacttaggagtgccgagggtggggagatggagctgcccgtctcagtgtgtgtgtgtgtctgtctgcctgtctctctcctcctggacccagggcagccaagggcagggataggcgcagtggtcagatgaagcagcgccagagaggggacctcccagctcttatttgcaccctccccacctcaccaactttggtccctctctgggggcatgaatggttaacaaacaccagagcagtactccaatattggagagtcgctgggggcacagggctttgaatcagggtagtatcctgccttccctcccctgaccccacatggtctcagggcccccttagggccccctaccccactgatagcttcctccttctctggcacaaggggagccccagggcttgggggagggcgtaaggtggggggaaatgccactgcttttagcaaaagcctccctcccagaattagccagcttgcctcctgcaccccacccccaccaaccaggggagccactaagctgactaacaactgtcccctcacccaccagctatttccccagggtagagtgggcaattctcaccttcaaagagtccccgcctgcccaggcctttggcacagaggctgagtggacagtcaggagagaggcgagaggcaaggcgaagcctgtgtccctgtttcagttgcactggggttggagcccagggtaggggtttccagcttccccaggctccggccttgtcagtctctttgcatgtgtggatttttctgtgtgtgtttctgtttgggtttttgttgttgggttttttttttttttttaataaagaaaagaagatgtgtatatttttggcaacgacagaaacgtagtgcagatatatttttgcctgtgctgctcaactgttttttttttctgatactgaaaataatattaatattcctgttgataagactttgtaagatgttagggagctgataatggaggggggtgggaatccttcaaaggcaatttcttaggcacttgcaagggcttgggggagggggaggcagttgtgatgacctcagaaatactcactttttattaatgctaaatatgttagaaagaaatgatagcattcagcattttattcttcttaatctattaagctgtgtaactccctgccccaaaccactgaaaagaaaagtaaccttcaggccaggcgcggtggctcacgcctgtaatcccaacactttgggaggctgaggcgggcggatcacttaaggtcaggagttcaagaccagcctggccaacatggtgaaaccccgtctctatcaaaaattagccgggcatggtggcacgtgcctgtaatcccagctacttgggaggctgaggcacgagaattgcttgaacccaggaggctgaggctgcagtgagccaagattgtgccactgcactccagcctgtgtgagagagtgagactctgtctcaaaagagaaaaaaaaagaaaagtaaccttcagagattcttagaagagttgctcattcacacccacgcccttgcccaaggctggcccacttagagcgaaacttaacttttgtctggatgggaagagaagtaagtctaccccgaggttgccatgttgaagagtgagaggtccaagtgattctgtgcattgaaaccaagacaccccacccagaacacttcttccctccctcagcccaaaccaaaggctggggttctcatctccaagtggctgttctccaactttcccaagccgcttgcattccccagactggactactgtggcggttaggttagatttgaagacggggcccaggctgggtatgaacgggtgcagccctcttctcctcttcccccccacatctctcatgagagaggtagtggcatttccttctcagggagcttcaatgggaaaggtctcgaaagcttcaggaggagcagaataccaacgcagggggatggctgtaacgatctcaccgtctcctaacctcagtcccttttttgagagtgaatggtggagggtgggaagggacccagatttgtagatctctttgtctgggggaggggaaggatgtggtttgcagagcggaagcagagtttggaaacgcatgagagcagagcttcgtgtgttcccaccctcagtgaggaggtgtgagtgggtgagcatgtggagttgggtgttcccaccctcagtgaggaggtgtgagtgggggtgcatatagaggcagtgcctgctgtggggtcacaactggtgcatgccagcgccaaagggacctgtctttaggggtcatttcagccagctcctcccatcacagatgacagctccaagcctagaaggggctcagtgacagggccaggacaagccctcaggactgtggcctcctggcccttggttcccctgccccacaacatggtctccacatggctggctggctggctgtccctgtgtgtgtgtgacacacggtgtgagtgcagggctgtgcccggggtgggagggtgtctatgtggcactgactgtcttagctcagagctggtggatcctctccatggacaatgacactttaaggattgtcttggtttgtttttcctatttgtggggtattttccccctcaggctcctgggtctgctgctgcctcaaggtgtcctgaccttgaggctgatgaggggacccctgcctgtttcccccatactgagttctagggaggtgctcaccccagactcttaggaagggtctagagaaatgagaggagcccaagccaggggccagctccgagaaagggtaacctccacgcttctctctcccaaattggaaatgaagacaggttttcaaaggcacaggctccccctgccagcttctaggatcttccttggtgtgcaatgggccagttaggggtaggcagcttgcacccagttctcctttatctcaacttattttcctggggagaggtgcctagagggattgaggtaacttcaactgggaattccaaggaaggtgggcaagtagccttggctctctcccaccatgtccatcaggattgagagtgtgtctagctcccgaccactttgtcttgacctactgaaaagttgggaactgaggggtgccttcattcccctttgttcactttctccagctcaacttgggacttgggtggtgggactggagacctcacccctgctcccgtcccgccccctttctatcccaacctgtttccatgtagcagacccttcctagggagcagggaggggaagccacagattgcaaacccaggggctcctttttcattctttctaaaaccttgatatcctcagcccaaaggcgatgcccccctgccacctccaagcctggaattgtgcataacccggatcttgtatctttgtataacggatgttatttgtacgaagggcagttcgtaaacagcacttgttcttttaataaaagaatgttttgcaaaaaaaaaacaaaaaaatccgaagagcccctgcgtagtctcgctttatggaaggggacaggaggtgggtgccaactgcgggggtgtaggagggcgtgggctgcggcccttctgtccgcactcagcggcagagagcgcacagacgctcagcacacccgggcccaccacgcagggtgcatcagtccgtgggccccggccgtcgggaccctgacccgtcccgaggtgacgcgacgcccgcgcgcttgctcccagaagcgcggcctaggctcggccagcaacagcgactcctgggagggtcctgcgccctcgggggtgccccaggcgccgaggctgcgcgcggggcgttccaccgccaggcccgcccggcagggggcgccgggaccgaccgctcacgcccggcgtgctgaggaggccgctgggcgggcgccgtggtcgggcttccgtaccccgcccgcccct

SEQ ID NO: 318681 - DNA, 3626 bp, Homo sapiens
agctgcacagaatctggagtcaaatggacgagtgattttctgcccccagtgcctcagttaccccatctgtgaaggtgaagacagtgatgataacgcgatagttcatctcaaaacacagccaaggtgcaggagtgtggggactaagagcaatgcctgccccatgataaatgttagtacatgggaatgggaaatagtgtgtgagtgtgtgtgtgcgtgcatgtgtgtgtgtgtgtgtgtgtgtgtgtgtgtctgtctgcctgtctctctcctcctggacccagggcagccaagggcagggataggcgcagtggtcagatgaagcagcgccagagaggggacctcccagctcttatttgcaccctccccacctcaccaactttggtccctctctgggggcatgaatggttaacaaacaccagagcagtactccaatattggagagtcgctgggggcacagggctttgaatcagggtagtatcctgccttccctcccctgaccccacatggtctcagggcccccttagggccccctaccccactgatagcttcctccttctctggcacaaggggagccccagggcttgggggagggcgtaaggtggggggaaatgccactgcttttagcaaaagcctccctcccagaattagccagcttgcctcctgcaccccacccccaccaaccaggggagccactaagctgactaacaactgtcccctcacccaccagctatttccccagggtagagtgggcaattctcaccttcaaagagtccccgcctgcccaggcctttggcacagaggctgagtggacagtcaggagagaggcgagaggcaaggcgaagcctgtgtccctgtttcagttgcactggggttggagcccagggtaggggtttccagcttccccaggctccggccttgtcagtctctttgcatgtgtggatttttctgtgtgtgtttctgtttgggtttttgttgttgggttttttttttttttttaataaagaaaagaagatgtgtatatttttggcaacgacagaaacgtagtgcagatatatttttgcctgtgctgctcaactgttttttttttctgatactgaaaataatattaatattcctgttgataagactttgtaagatgttagggagctgataatggaggggggtgggaatccttcaaaggcaatttcttaggcacttgcaagggcttgggggagggggaggcagttgtgatgacctcagaaatactcactttttattaatgctaaatatgttagaaagaaatgatagcattcagcattttattcttcttaatctattaagctgtgtaactccctgccccaaaccactgaaaagaaaagtaaccttcaggccaggcgcggtggctcacgcctgtaatcccaacactttgggaggctgaggcgggcggatcacttaaggtcaggagttcaagaccagcctggccaacatggtgaaaccccgtctctatcaaaaattagccgggcatggtggcacgtgcctgtaatcccagctacttgggaggctgaggcacgagaattgcttgaacccaggaggctgaggctgcagtgagccaagattgtgccactgcactccagcctgtgtgagagagtgagactctgtctcaaaagagaaaaaaaaagaaaagtaaccttcagagattcttagaagagttgctcattcacacccacgcccttgcccaaggctggcccacttagagcgaaacttaacttttgtctggatgggaagagaagtaagtctaccccgaggttgccatgttgaagagtgagaggtccaagtgattctgtgcattgaaaccaagacaccccacccagaacacttcttccctccctcagcccaaaccaaaggctggggttctcatctccaagtggctgttctccaactttcccaagccgcttgcattccccagactggactactgtggcggttaggttagatttgaagacggggcccaggctgggtatgaacgggtgcagccctcttctcctcttcccccccacatctctcatgagagaggtagtggcatttccttctcagggagcttcaatgggaaaggtctcgaaagcttcaggaggagcagaataccaacgcagggggatggctgtaacgatctcaccgtctcctaacctcagtcccttttttgagagtgaatggtggagggtgggaagggacccagatttgtagatctctttgtctgggggaggggaaggatgtggtttgcagagcggaagcagagtttggaaacgcatgagagcagagcttcgtgtgttcccaccctcagtgaggaggtgtgagtgggtgagcatgtggagttgggtgttcccaccctcagtgaggaggtgtgagtgggggtgcatatagaggcagtgcctgctgtggggtcacaactggtgcatgccagcgccaaagggacctgtctttaggggtcatttcagccagctcctcccatcacagatgacagctccaagcctagaaggggctcagtgacagggccaggacaagccctcaggactgtggcctcctggcccttggttcccctgccccacaacatggtctccacatggctggctggctggctgtccctgtgtgtgtgtgacacacggtgtgagtgcagggctgtgcccggggtgggagggtgtctatgtggcactgactgtcttagctcagagctggtggatcctctccatggacaatgacactttaaggattgtcttggtttgtttttcctatttgtggggtattttccccctcaggctcctgggtctgctgctgcctcaaggtgtcctgaccttgaggctgatgaggggacccctgcctgtttcccccatactgagttctagggaggtgctcaccccagactcttaggaagggtctagagaaatgagaggagcccaagccaggggccagctccgagaaagggtaacctccacgcttctctctcccaaattggaaatgaagacaggttttcaaaggcacaggctccccctgccagcttctaggatcttccttggtgtgcaatgggccagttaggggtaggcagcttgcacccagttctcctttatctcaacttattttcctggggagaggtgcctagagggattgaggtaacttcaactgggaattccaaggaaggtgggcaagtagccttggctctctcccaccatgtccatcaggattgagagtgtgtctagctcccgaccactttgtcttgacctactgaaaagttgggaactgaggggtgccttcattcccctttgttcactttctccagctcaacttgggacttgggtggtgggactggagacctcacccctgctcccgtcccgccccctttctatcccaacctgtttccatgtagcagacccttcctagggagcagggaggggaagccacagattgcaaacccaggggctcctttttcattctttctaaaaccttgatatcctcagcccaaaggcgatgcccccctgccacctccaagcctggaattgtgcataacccggatcttgtatctttgtataacggatgttatttgtacgaagggcagttcgtaaacagcacttgttcttttaataaaagaatgttttgca

SEQ ID NO: 318682 - DNA, 7061 bp, Homo sapiens
ctcatgggagtatgaaggagatggtaggaggctgctgcgtatgttcggacgagaggggctgggccgagaacccgctggtctactgcgatgggcacgcgtgcagcgtggccgtccaccaagcttgctatggcatcgttcaggtgccaacgggaccctggttctgccggaaatgtgaatctcaggagcgagcagccagggtgaggtgtgagctgtgcccacacaaagacggggcattgaagaggactgataatggaggctgggcacacgtggtgtgtgccctctacatccccgaggtgcaatttgccaacgtgctcaccatggagcccatcgtgctgcagtacgtgcctcatgatcgcttcaacaagacctgttacatctgcgaggagcagggccgggagagcaaggcggcctcgggagcctgcatgacctgtaaccgccatggatgtcgacaagctttccacgtcacctgtgcccaaatggcaggcttgctgtgtgaggaagaagtgctggaggtggacaacgtcaagtactgcggctactgcaaataccacttcagcaagatgaagacatcccggcacagcagcgggggaggcggaggaggcgctggaggaggaggtggcagcatggggggaggtggcagtggtttcatctctgggaggagaagccggtcagcctcaccatccacgcagcaggagaagcaccccacccaccacgagaggggccagaagaagagtcgaaaggacaaagaacgccttaagcagaagcacaagaagcggcctgagtcgccccccagcatcctcaccccgcccgtggtccccactgctgacaaggtctcctcctcggcttcctcttcctcccaccacgaggccagcacgcaggagacctctgagagcagcagggagtcaaaggggaaaaagtcttccagccatagcctgagtcataaagggaagaaactgagcagtgggaaaggtgtgagcagttttacctccgcctcctcttcttcctcctcctcttcctcctcctctggggggcccttccagcctgcagtctcgtccctgcagagctcccctgacttctctgcattccccaagctggagcagccagaggaggacaagtactccaagcccacagcccccgccccttcagcccctccttctccctcagctcccgagccccccaaggctgacctttttgagcagaaggtggtcttctctggctttgggcccatcatgcgcttctccaccaccacctccagctcaggccgggcccgggcgccctcccctggggactataagtctccccacgtcacggggtctggggcctcggcaggcacccacaaacggatgcccgcactgagtgccacccctgtgcctgctgatgagacccctgagacaggcctgaaggagaagaagcacaaagccagcaagaggagccgccatgggccaggccgtcccaagggcagccggaacaaggagggcactgggggcccagctgccccatccttgcccagtgcccagctggctggctttaccgccactgctgcctcacccttctctggaggttccctggtcagctccggcctgggaggtctgtcctcccgaacctttgggccttctgggagcttgcccagcttgagcctggagtcccccttactaggggcaggcatctacaccagtaataaggaccccatctcccacagtggcgggatgctgcgggctgtctgcagcacccctctctcctccagcctcctggggcccccagggacctcggccctgccccgcctcagccgctccccgttcaccagcaccctcccctcctcttctgcttctatctccaccactcaggtgttttctctggctggctctacctttagcctcccttctacccacatctttggaacccccatgggtgccgttaatcccctcctctcccaagctgagagcagccacacagagccagacctggaggactgcagcttccggtgtcgggggacctcccctcaggagagtctgtcttccatgtcccccatcagcagcctccccgcactcttcgaccagacagcctctgcaccctgtgggggcggccagttagacccggcggccccagggacgactaacatggagcagcttctggagaagcagggcgacggggaggccggcgtcaacatcgtggagatgctgaaggcgctgcacgcgctgcagaaggagaaccagcggctgcaagagcagatcctgagcctgacggccaaaaaggagcggctgcagattctcaacgtgcagctctctgtgcccttccctgccctgcctgctgccctgcctgccgccaacggccctgtccctgggccctatggcctgcctccccaagccggcagcagcgactccttgagcaccagcaagagccctccgggaaagagcagcctcggcctggacaactcgctgtccacttcttctgaggacccacactcaggctgcccgagccgcagcagctcgtcgctgtccttccacagcacgcccccaccgctgcccctcctccagcagagccctgccactctgcccctggccctgcctggggcccctgccccactcccgccccagccgcagaacgggttgggccgggcacccggggcagcggggctgggggccatgcccatggctgaggggctgttgggggggctggcaggcagtgggggcctgcccctcaatgggctccttggggggttgaatggggccgctgcccccaaccccgcaagcttgagccaggctggcggggcccccacgctgcagctgccaggctgtctcaacagccttacagagcagcagagacatctccttcagcagcaagagcagcagctccagcaactccagcagctcctggcctccccgcagctgaccccggaacaccagactgttgtctaccagatgatccagcagatccagcagaaacgggagctgcagcgcctgcagatggctgggggctcccagctgcccatggccagcctgctggcaggaagctccaccccgctgctgtctgcgggtacccctggcctgctgcccacagcgtctgctccacccctgctgcccgctggagccctagtggctccctcgcttggcaacaacacaagtctcatggccgcagcagctgcagctgcagcagtagcagcagcaggcggacctccagtcctcactgcccagaccaaccccttcctcagcctgtcgggagcagagggcagtggcggtggccccaaaggagggaccgctgacaaaggagcctcagccaaccaggaaaaaggctaaatccacccttacccctcctgacccccccaagtggagggaacagatcctggcctgaggggtcctagcctggagcaggcgcctgcgcccagaccctggagagccttgacccagagcctgtgctgaggtccagggagtgtggagagctcctggtgtcgaggactgagactgagaggggagccccctccatctggcccccttccctttccgcactgtccgctttgtgaggctcagaggaaggacagtctgcaagcccgcctaggaggtccatccccagcaaatgttttggaggtccccccagagagcagagtgggccatggcagaagtagggggttggttggacctgtcacatgaaatggatcagcacttgaatggggagaagtggagggagaggccctgggcctgtccctgcggggaaatcttttatggaagaagggctggacccactttacctgcagtttcttcccagctcgggcagatggcagaagggaccccttggactttttctcgccatccctccccccagcgcaggggcacaagctgagcttgtaaaagcccacagatgttgggggctggagaaggggcaggagagcatcacactcagccccagcctcctcaacctcttggggccccgtgatggggaggagagggcaggtgcggggaggctctggccttccttggtgccccgccctttgtttgcactattggacttaggagtgccgagggtggggagatggagctgcccgtctcagtgtgtgtgtgtgtctgtctgcctgtctctctcctcctggacccagggcagccaagggcagggataggcgcagtggtcagatgaagcagcgccagagaggggacctcccagctcttatttgcaccctccccacctcaccaactttggtccctctctgggggcatgaatggttaacaaacaccagagcagtactccaatattggagagtcgctgggggcacagggctttgaatcagggtagtatcctgccttccctcccctgaccccacatggtctcagggcccccttagggccccctaccccactgatagcttcctccttctctggcacaaggggagccccagggcttgggggagggcgtaaggtggggggaaatgccactgcttttagcaaaagcctccctcccagaattagccagcttgcctcctgcaccccacccccaccaaccaggggagccactaagctgactaacaactgtcccctcacccaccagctatttccccagggtagagtgggcaattctcaccttcaaagagtccccgcctgcccaggcctttggcacagaggctgagtggacagtcaggagagaggcgagaggcaaggcgaagcctgtgtccctgtttcagttgcactggggttggagcccagggtaggggtttccagcttccccaggctccggccttgtcagtctctttgcatgtgtggatttttctgtgtgtgtttctgtttgggtttttgttgttgggttttttttttttttttaataaagaaaagaagatgtgtatatttttggcaacgacagaaacgtagtgcagatatatttttgcctgtgctgctcaactgttttttttttctgatactgaaaataatattaatattcctgttgataagactttgtaagatgttagggagctgataatggaggggggtgggaatccttcaaaggcaatttcttaggcacttgcaagggcttgggggagggggaggcagttgtgatgacctcagaaatactcactttttattaatgctaaatatgttagaaagaaatgatagcattcagcattttattcttcttaatctattaagctgtgtaactccctgccccaaaccactgaaaagaaaagtaaccttcaggccaggcgcggtggctcacgcctgtaatcccaacactttgggaggctgaggcgggcggatcacttaaggtcaggagttcaagaccagcctggccaacatggtgaaaccccgtctctatcaaaaattagccgggcatggtggcacgtgcctgtaatcccagctacttgggaggctgaggcacgagaattgcttgaacccaggaggctgaggctgcagtgagccaagattgtgccactgcactccagcctgtgtgagagagtgagactctgtctcaaaagagaaaaaaaaagaaaagtaaccttcagagattcttagaagagttgctcattcacacccacgcccttgcccaaggctggcccacttagagcgaaacttaacttttgtctggatgggaagagaagtaagtctaccccgaggttgccatgttgaagagtgagaggtccaagtgattctgtgcattgaaaccaagacaccccacccagaacacttcttccctccctcagcccaaaccaaaggctggggttctcatctccaagtggctgttctccaactttcccaagccgcttgcattccccagactggactactgtggcggttaggttagatttgaagacggggcccaggctgggtatgaacgggtgcagccctcttctcctcttcccccccacatctctcatgagagaggtagtggcatttccttctcagggagcttcaatgggaaaggtctcgaaagcttcaggaggagcagaataccaacgcagggggatggctgtaacgatctcaccgtctcctaacctcagtcccttttttgagagtgaatggtggagggtgggaagggacccagatttgtagatctctttgtctgggggaggggaaggatgtggtttgcagagcggaagcagagtttggaaacgcatgagagcagagcttcgtgtgttcccaccctcagtgaggaggtgtgagtgggtgagcatgtggagttgggtgttcccaccctcagtgaggaggtgtgagtgggggtgcatatagaggcagtgcctgctgtggggtcacaactggtgcatgccagcgccaaagggacctgtctttaggggtcatttcagccagctcctcccatcacagatgacagctccaagcctagaaggggctcagtgacagggccaggacaagccctcaggactgtggcctcctggcccttggttcccctgccccacaacatggtctccacatggctggctggctggctgtccctgtgtgtgtgtgacacacggtgtgagtgcagggctgtgcccggggtgggagggtgtctatgtggcactgactgtcttagctcagagctggtggatcctctccatggacaatgacactttaaggattgtcttggtttgtttttcctatttgtggggtattttccccctcaggctcctgggtctgctgctgcctcaaggtgtcctgaccttgaggctgatgaggggacccctgcctgtttcccccatactgagttctagggaggtgctcaccccagactcttaggaagggtctagagaaatgagaggagcccaagccaggggccagctccgagaaagggtaacctccacgcttctctctcccaaattggaaatgaagacaggttttcaaaggcacaggctccccctgccagcttctaggatcttccttggtgtgcaatgggccagttaggggtaggcagcttgcacccagttctcctttatctcaacttattttcctggggagaggtgcctagaggaggaggaggaattcgcccaggaggaggaggaattcgcccaggaggagaggaattcgcccaggaggaggaggaattcgcccaggaggaggaggaattcgcccaggaggaggaggaattcgccc

SEQ ID NO: 318683 - DNA, 1867 bp, Homo sapiens
gtgtgggagagccaataaacttacggctaggtacgaggcctgggtgttgtccaagtgattctgtgcattgaaaccaagacaccccacccagaacacttcttccctccctcagcccaaaccaaaggctggggttctcatctccaagtggctgttctccaactttcccaagccgcttgcattccccagactggactactgtggcggttaggttagatttgaagacggggcccaggctgggtatgaacgggtgcagccctcttctcctcttcccccccacatctctcatgagagaggtagtggcatttccttctcagggagcttcaatgggaaaggtctcgaaagcttcaggaggagcagaataccaacgcagggggatggctgtaacgatctcaccgtctcctaacctcagtcccttttttgagagtgaatggtggagggtgggaagggacccagatttgtagatctctttgtctgggggaggggaaggatgtggtttgcagagcggaagcagagtttggaaacgcatgagagcagagcttcgtgtgttcccaccctcagtgaggaggtgtgagtgggtgagcatgtggagttgggtgttcccaccctcagtgaggaggtgtgagtgggggtgcatatagaggcagtgcctgctgtggggtcacaactggtgcatgccagcgccaaagggacctgtctttaggggtcatttcagccagctcctcccatcacagatgacagctccaagcctagaaggggctcagtgacagggccaggacaagccctcaggactgtggcctcctggcccttggttcccctgccccacaacatggtctccacatggctggctggctggctgtccctgtgtgtgtgtgacacacggtgtgagtgcagggctgtgcccggggtgggagggtgtctatgtggcactgactgtcttagctcagagctggtggatcctctccatggacaatgacactttaaggattgtcttggtttgtttttcctatttgtggggtattttccccctcaggctcctgggtctgctgctgcctcaaggtgtcctgaccttgaggctgatgaggggacccctgcctgtttcccccatactgagttctagggaggtgctcaccccagactcttaggaagggtctagagaaatgagaggagcccaagccaggggccagctccgagaaagggtaacctccacgcttctctctcccaaattggaaatgaagacaggttttcaaaggcacaggctccccctgccagcttctaggatcttccttggtgtgcaatgggccagttaggggtaggcagcttgcacccagttctcctttatctcaacttattttcctggggagaggtgcctagagggattgaggtaacttcaactgggaattccaaggaaggtgggcaagtagccttggctctctcccaccatgtccatcaggattgagagtgtgtctagctcccgaccactttgtcttgacctactgaaaagttgggaactgaggggtgccttcattcccctttgttcactttctccagctcaacttgggacttgggtggtgggactggagacctcacccctgctcccgtcccgccccctttctatcccaacctgtttccatgtagcagacccttcctagggagcagggaggggaagccacagattgcaaacccaggggctcctttttcattctttctaaaaccttgatatcctcagcccaaaggcgatgcccccctgccacctccaagcctggaattgtgcataacccggatcttgtatctttgtataacggatgttatttgtacgaagggcagttcgtaaacagcacttgttcttttaataaaagaatgttttgca

SEQ ID NO: 318684 - DNA, 1909 bp, Homo sapiens
gtgtgggagagccaataaacttacggctaggtacgaggcctgggtgttagtgagactctgtctcaaaagagaaaaaaaaagaaaagtaaccttcagagattcttagaagagttgctcattcacacccacccagaacacttcttccctccctcagcccaaaccaaaggctggggttctcatctccaagtggctgttctccaactttcccaagccgcttgcattccccagactggactactgtggcggttaggttagatttgaagacggggcccaggctgggtatgaacgggtgcagccctcttctcctcttcccccccacatctctcatgagagaggtagtggcatttccttctcagggagcttcaatgggaaaggtctcgaaagcttcaggaggagcagaataccaacgcagggggatggctgtaacgatctcaccgtctcctaacctcagtcccttttttgagagtgaatggtggagggtgggaagggacccagatttgtagatctctttgtctgggggaggggaaggatgtggtttgcagagcggaagcagagtttggaaacgcatgagagcagagcttcgtgtgttcccaccctcagtgaggaggtgtgagtgggtgagcatgtggagttgggtgttcccaccctcagtgaggaggtgtgagtgggggtgcatatagaggcagtgcctgctgtggggtcacaactggtgcatgccagcgccaaagggacctgtctttaggggtcatttcagccagctcctcccatcacagatgacagctccaagcctagaaggggctcagtgacagggccaggacaagccctcaggactgtggcctcctggcccttggttcccctgccccacaacatggtctccacatggctggctggctggctgtccctgtgtgtgtgtgacacacggtgtgagtgcagggctgtgcccggggtgggagggtgtctatgtggcactgactgtcttagctcagagctggtggatcctctccatggacaatgacactttaaggattgtcttggtttgtttttcctatttgtggggtattttccccctcaggctcctgggtctgctgctgcctcaaggtgtcctgaccttgaggctgatgaggggacccctgcctgtttcccccatactgagttctagggaggtgctcaccccagactcttaggaagggtctagagaaatgagaggagcccaagccaggggccagctccgagaaagggtaacctccacgcttctctctcccaaattggaaatgaagacaggttttcaaaggcacaggctccccctgccagcttctaggatcttccttggtgtgcaatgggccagttaggggtaggcagcttgcacccagttctcctttatctcaacttattttcctggggagaggtgcctagagggattgaggtaacttcaactgggaattccaaggaaggtgggcaagtagccttggctctctcccaccatgtccatcaggattgagagtgtgtctagctcccgaccactttgtcttgacctactgaaaagttgggaactgaggggtgccttcattcccctttgttcactttctccagctcaacttgggacttgggtggtgggactggagacctcacccctgctcccgtcccgccccctttctatcccaacctgtttccatgtagcagacccttcctagggagcagggaggggaagccacagattgcaaacccaggggctcctttttcattctttctaaaaccttgatatcctcagcccaaaggcgatgcccccctgccacctccaagcctggaattgtgcataacccggatcttgtatctttgtataacggatgttatttgtacgaagggcagttcgtaaacagcacttgttcttttaataaaagaatgttttgca

SEQ ID NO: 318685 - DNA, 4880 bp, Homo sapiens
ctcatgggagtatgaaggagatggtaggaggctgctgcgtatgttcggacgagaggggctgggccgagaacccgctggtctactgcgatgggcacgcgtgcagcgtggccgtccaccaagcttgctatggcatcgttcaggtgccaacgggaccctggttctgccggaaatgtgaatctcaggagcgagcagccagggtgaggtgtgagctgtgcccacacaaagacggggcattgaagaggactgataatggaggctgggcacacgtggtgtgtgccctctacatccccgaggtgcaatttgccaacgtgctcaccatggagcccatcgtgctgcagtacgtgcctcatgatcgcttcaacaagacctgttacatctgcgaggagcagggccgggagagcaaggcggcctcgggagcctgcatgacctgtaaccgccatggatgtcgacaagctttccacgtcacctgtgcccaaatggcaggcttgctgtgtgaggaagaagtgctggaggtggacaacgtcaagtactgcggctactgcaaataccacttcagcaagatgaagacatcccggcacagcagcgggggaggcggaggaggcgctggaggaggaggtggcagcatggggggaggtggcagtggtttcatctctgggaggagaagccggtcagcctcaccatccacgcagcaggagaagcaccccacccaccacgagaggggccagaagaagagtcgaaaggacaaagaacgccttaagcagaagcacaagaagcggcctgagtcgccccccagcatcctcaccccgcccgtggtccccactgctgacaaggtctcctcctcggcttcctcttcctcccaccacgaggccagcacgcaggagacctctgagagcagcagggagtcaaaggggaaaaagtcttccagccatagcctgagtcataaagggaagaaactgagcagtgggaaaggtgtgagcagttttacctccgcctcctcttcttcctcctcctcttcctcctcctctggggggcccttccagcctgcagtctcgtccctgcagagctcccctgacttctctgcattccccaagctggagcagccagaggaggacaagtactccaagcccacagcccccgccccttcagcccctccttctccctcagctcccgagccccccaaggctgacctttttgagcagaaggtggtcttctctggctttgggcccatcatgcgcttctccaccaccacctccagctcaggccgggcccgggcgccctcccctggggactataagtctccccacgtcacggggtctggggcctcggcaggcacccacaaacggatgcccgcactgagtgccacccctgtgcctgctgatgagacccctgagacaggcctgaaggagaagaagcacaaagccagcaagaggagccgccatgggccaggccgtcccaagggcagccggaacaaggagggcactgggggcccagctgccccatccttgcccagtgcccagctggctggctttaccgccactgctgcctcacccttctctggaggttccctggtcagctccggcctgggaggtctgtcctcccgaacctttgggccttctgggagcttgcccagcttgagcctggagtcccccttactaggggcaggcatctacaccagtaataaggaccccatctcccacagtggcgggatgctgcgggctgtctgcagcacccctctctcctccagcctcctggggcccccagggacctcggccctgccccgcctcagccgctccccgttcaccagcaccctcccctcctcttctgcttctatctccaccactcaggtgttttctctggctggctctacctttagcctcccttctacccacatctttggaacccccatgggtgccgttaatcccctcctctcccaagctgagagcagccacacagagccagacctggaggactgcagcttccggtgtcgggggacctcccctcaggagagtctgtcttccatgtcccccatcagcagcctccccgcactcttcgaccagacagcctctgcaccctgtgggggcggccagttagacccggcggccccagggacgactaacatggagcagcttctggagaagcagggcgacggggaggccggcgtcaacatcgtggagatgctgaaggcgctgcacgcgctgcagaaggagaaccagcggctgcaagagcagatcctgagcctgacggccaaaaaggagcggctgcagattctcaacgtgcagctctctgtgcccttccctgccctgcctgctgccctgcctgccgccaacggccctgtccctgggccctatggcctgcctccccaagccggcagcagcgactccttgagcaccagcaagagccctccgggaaagagcagcctcggcctggacaactcgctgtccacttcttctgaggacccacactcaggctgcccgagccgcagcagctcgtcgctgtccttccacagcacgcccccaccgctgcccctcctccagcagagccctgccactctgcccctggccctgcctggggcccctgccccactcccgccccagccgcagaacgggttgggccgggcacccggggcagcggggctgggggccatgcccatggctgaggggctgttgggggggctggcaggcagtgggggcctgcccctcaatgggctccttggggggttgaatggggccgctgcccccaaccccgcaagcttgagccaggctggcggggcccccacgctgcagctgccaggctgtctcaacagccttacagagcagcagagacatctccttcagcagcaagagcagcagctccagcaactccagcagctcctggcctccccgcagctgaccccggaacaccagactgttgtctaccagatgatccagcagatccagcagaaacgggagctgcagcgcctgcagatggctgggggctcccagctgcccatggccagcctgctggcaggaagctccaccccgctgctgtctgcgggtacccctggcctgctgcccacagcgtctgctccacccctgctgcccgctggagccctagtggctccctcgcttggcaacaacacaagtctcatggccgcagcagctgcagctgcagcagtagcagcagcaggcggacctccagtcctcactgcccagaccaaccccttcctcagcctgtcgggagcagagggcagtggcggtggccccaaaggagggaccgctgacaaaggagcctcagccaaccaggaaaaaggctaaatccacccttacccctcctgacccccccaagtggagggaacagatcctggcctgaggggtcctagcctggagcaggcgcctgcgcccagaccctggagagccttgacccagagcctgtgctgaggtccagggagtgtggagagctcctggtgtcgaggactgagactgagaggggagccccctccatctggcccccttccctttccgcactgtccgctttgtgaggctcagaggaaggacagtctgcaagcccgcctaggaggtccatccccagcaaatgttttggaggtccccccagagagcagagtgggccatggcagaagtagggggttggttggacctgtcacatgaaatggatcagcacttgaatggggagaagtggagggagaggccctgggcctgtccctgcggggaaatcttttatggaagaagggctggacccactttacctgcagtttcttcccagctcgggcagatggcagaagggaccccttggactttttctcgccatccctccccccagcgcaggggcacaagctgagcttgtaaaagcccacagatgttgggggctggagaaggggcaggagagcatcacactcagccccagcctcctcaacctcttggggccccgtgatggggaggagagggcaggtgcggggaggctctggccttccttggtgccccgccctttgtttgcactattggacttaggagtgccgagggtggggagatggagctgcccgtctcagtgtgtgagtgtgtgtgtgcgtgcatgtgtgtgtgtgtgtgtgtgtgtgtgtgtgtctgtctgcctgtctctctcctcctggacccagggcagccaagggcagggataggcgcagtggtcagatgaagcagcgccagagaggggacctcccagctcttatttgcaccctccccacctcaccaactttggtccctctctgggggcatgaatggttaacaaacaccagagcagtactccaatattggagagtcgctgggggcacagggctttgaatcagggtagtatcctgccttccctcccctgaccccacatggtctcagggcccccttagggccccctaccccactgatagcttcctccttctctggcacaaggggagccccagggcttgggggagggcgtaaggtggggggaaatgccactgcttttagcaaaagcctccctcccagaattagccagcttgcctcctgcaccccacccccaccaaccaggggagccactaagctgactaacaactgtcccctcacccaccagctatttccccagggtagagtgggcaattctcaccttcaaagagtccccgcctgcccaggcctttggcacagaggctgagtggacagtcaggagagaggcgagaggcaaggcgaagcctgtgtccctgtttcagttgcactggggttggagcccagggtaggggtttccagcttccccaggctccggccttgtcagtctctttgcatgtgtggatttttctgtgtgtgtttctgtttgggtttttgttgttgggttttttttttttttttaataaagaaaagaagatgtgtatatttttggcaacg

SEQ ID NO: 318686 - DNA, 3860 bp, Homo sapiens
ctcatgggagtatgaaggagatggtaggaggctgctgcgtatgttcggacgagaggggctgggccgagaacccgctggtctactgcgatgggcacgcgtgcagcgtggccgtccaccaagcttgctatggcatcgttcaggtgccaacgggaccctggttctgccggaaatgtgaatctcaggagcgagcagccagggtgaggtgtgagctgtgcccacacaaagacggggcattgaagaggactgataatggaggctgggcacacgtggtgtgtgccctctacatccccgaggtgcaatttgccaacgtgctcaccatggagcccatcgtgctgcagtacgtgcctcatgatcgcttcaacaagacctgttacatctgcgaggagcagggccgggagagcaaggcggcctcgggagcctgcatgacctgtaaccgccatggatgtcgacaagctttccacgtcacctgtgcccaaatggcaggcttgctgtgtgaggaagaagtgctggaggtggacaacgtcaagtactgcggctactgcaaataccacttcagcaagatgaagacatcccggcacagcagcgggggaggcggaggaggcgctggaggaggaggtggcagcatggggggaggtggcagtggtttcatctctgggaggagaagccggtcagcctcaccatccacgcagcaggagaagcaccccacccaccacgagaggggccagaagaagagtcgaaaggacaaagaacgccttaagcagaagcacaagaagcggcctgagtcgccccccagcatcctcaccccgcccgtggtccccactgctgacaaggtctcctcctcggcttcctcttcctcccaccacgaggccagcacgcaggagacctctgagagcagcagggagtcaaaggggaaaaagtcttccagccatagcctgagtcataaagggaagaaactgagcagtgggaaaggtgtgagcagttttacctccgcctcctcttcttcctcctcctcttcctcctcctctggggggcccttccagcctgcagtctcgtccctgcagagctcccctgacttctctgcattccccaagctggagcagccagaggaggacaagtactccaagcccacagcccccgccccttcagcccctccttctccctcagctcccgagccccccaaggctgacctttttgagcagaaggtggtcttctctggctttgggcccatcatgcgcttctccaccaccacctccagctcaggccgggcccgggcgccctcccctggggactataagtctccccacgtcacggggtctggggcctcggcaggcacccacaaacggatgcccgcactgagtgccacccctgtgcctgctgatgagacccctgagacaggcctgaaggagaagaagcacaaagccagcaagaggagccgccatgggccaggccgtcccaagggcagccggaacaaggagggcactgggggcccagctgccccatccttgcccagtgcccagctggctggctttaccgccactgctgcctcacccttctctggaggttccctggtcagctccggcctgggaggtctgtcctcccgaacctttgggccttctgggagcttgcccagcttgagcctggagtcccccttactaggggcaggcatctacaccagtaataaggaccccatctcccacagtggcgggatgctgcgggctgtctgcagcacccctctctcctccagcctcctggggcccccagggacctcggccctgccccgcctcagccgctccccgttcaccagcaccctcccctcctcttctgcttctatctccaccactcaggtgttttctctggctggctctacctttagcctcccttctacccacatctttggaacccccatgggtgccgttaatcccctcctctcccaagctgagagcagccacacagagccagacctggaggactgcagcttccggtgtcgggggacctcccctcaggagagtctgtcttccatgtcccccatcagcagcctccccgcactcttcgaccagacagcctctgcaccctgtgggggcggccagttagacccggcggccccagggacgactaacatggagcagcttctggagaagcagggcgacggggaggccggcgtcaacatcgtggagatgctgaaggcgctgcacgcgctgcagaaggagaaccagcggctgcaagagcagatcctgagcctgacggccaaaaaggagcggctgcagattctcaacgtgcagctctctgtgcccttccctgccctgcctgctgccctgcctgccgccaacggccctgtccctgggccctatggcctgcctccccaagccggcagcagcgactccttgagcaccagcaagagccctccgggaaagagcagcctcggcctggacaactcgctgtccacttcttctgaggacccacactcaggctgcccgagccgcagcagctcgtcgctgtccttccacagcacgcccccaccgctgcccctcctccagcagagccctgccactctgcccctggccctgcctggggcccctgccccactcccgccccagccgcagaacgggttgggccgggcacccggggcagcggggctgggggccatgcccatggctgaggggctgttgggggggctggcaggcagtgggggcctgcccctcaatgggctccttggggggttgaatggggccgctgcccccaaccccgcaagcttgagccaggctggcggggcccccacgctgcagctgccaggctgtctcaacagccttacagagcagcagagacatctccttcagcagcaagagcagcagctccagcaactccagcagctcctggcctccccgcagctgaccccggaacaccagactgttgtctaccagatgatccagcagatccagcagaaacgggagctgcagcgcctgcagatggctgggggctcccagctgcccatggccagcctgctggcaggaagctccaccccgctgctgtctgcgggtacccctggcctgctgcccacagcgtctgctccacccctgctgcccgctggagccctagtggctccctcgcttggcaacaacacaagtctcatggccgcagcagctgcagctgcagcagtagcagcagcaggcggacctccagtcctcactgcccagaccaaccccttcctcagcctgtcgggagcagagggcagtggcggtggccccaaaggagggaccgctgacaaaggagcctcagccaaccaggaaaaaggctaaatccacccttacccctcctgacccccccaagtggagggaacagatcctggcctgaggggtcctagcctggagcaggcgcctgcgcccagaccctggagagccttgacccagagcctgtgctgaggtccagggagtgtggagagctcctggtgtcgaggactgagactgagaggggagccccctccatctggcccccttccctttccgcactgtccgctttgtgaggctcagaggaaggacagtctgcaagcccgcctaggagctatttccccagggtagagtgggcaattctcaccttcaaagagtccccgcctgcccaggcctttggcacagaggctgagtggacagtcaggagagaggcgagaggcaaggcgaagcctgtgtccctgtttcagttgcactggggttggagcccagggtaggggtttccagcttccccaggctccggccttgtcagtctctttgcatgtgtggatttttctgtgtgtgtttctgtttgggtttttgttgttgggttttttttttttttttaataaagaaaagaagatgtgtatatttttggcaacg

SEQ ID NO: 318687 - DNA, 3031 bp, Homo sapiens
ctcatgggagtatgaaggagatggtaggaggctgctgcgtatgttcggacgagaggggctgggccgagaacccgctggtctactgcgatgggcacgcgtgcagcgtggccgtccaccaagcttgctatggcatcgttcaggtgccaacgggaccctggttctgccggaaatgtgaatctcaggagcgagcagccagggtgaggtgtgagctgtgcccacacaaagacggggcattgaagaggactgataatggaggctgggcacacgtggtgtgtgccctctacatccccgaggtgcaatttgccaacgtgctcaccatggagcccatcgtgctgcagtacgtgcctcatgatcgcttcaacaagacctgttacatctgcgaggagcagggccgggagagcaaggcggcctcgggagcctgcatgacctgtaaccgccatggatgtcgacaagctttccacgtcacctgtgcccaaatggcaggcttgctgtgtgaggaagaagtgctggaggtggacaacgtcaagtactgcggctactgcaaataccacttcagcaagatgaagacatcccggcacagcagcgggggaggcggaggaggcgctggaggaggaggtggcagcatggggggaggtggcagtggtttcatctctgggaggagaagccggtcagcctcaccatccacgcagcaggagaagcaccccacccaccacgagaggggccagaagaagagtcgaaaggacaaagaacgccttaagcagaagcacaagaagcggcctgagtcgccccccagcatcctcaccccgcccgtggtccccactgctgacaaggtctcctcctcggcttcctcttcctcccaccacgaggccagcacgcaggagacctctgagagcagcagggagtcaaaggggaaaaagtcttccagccatagcctgagtcataaagggaagaaactgagcagtgggaaaggtgtgagcagttttacctccgcctcctcttcttcctcctcctcttcctcctcctctggggggcccttccagcctgcagtctcgtccctgcagagctcccctgacttctctgcattccccaagctggagcagccagaggaggacaagtactccaagcccacagcccccgccccttcagcccctccttctccctcagctcccgagccccccaaggctgacctttttgagcagaaggtggtcttctctggctttgggcccatcatgcgcttctccaccaccacctccagctcaggccgggcccgggcgccctcccctggggactataagtctccccacgtcacggggtctggggcctcggcaggcacccacaaacggatgcccgcactgagtgccacccctgtgcctgctgatgagacccctgagacaggcctgaaggagaagaagcacaaagccagcaagaggagccgccatgggccaggccgtcccaagggcagccggaacaaggagggcactgggggcccagctgccccatccttgcccagtgcccagctggctggctttaccgccactgctgcctcacccttctctggaggttccctggtcagctccggcctgggaggtctgtcctcccgaacctttgggccttctgggagcttgcccagcttgagcctggagtcccccttactaggggcaggcatctacaccagtaataaggaccccatctcccacagtggcgggatgctgcgggctgtctgcagcacccctctctcctccagcctcctggggcccccagggacctcggccctgccccgcctcagccgctccccgttcaccagcaccctcccctcctcttctgcttctatctccaccactcaggtgttttctctggctggctctacctttagcctcccttctacccacatctttggaacccccatgggtgccgttaatcccctcctctcccaagctgagagcagccacacagagccagacctggaggactgcagcttccggtgtcgggggacctcccctcaggagagtctgtcttccatgtcccccatcagcagcctccccgcactcttcgaccagacagcctctgcaccctgtgggggcggccagttagacccggcggccccagggacgactaacatggagcagcttctggagaagcagggcgacggggaggccggcgtcaacatcgtggagatgctgaaggcgctgcacgcgctgcagaaggagaaccagcggctgcaagagcagatcctgagcctgacggccaaaaaggagcggctgcagattctcaacgtgcagctctctgtgcccttccctgccctgcctgctgccctgcctgccgccaacggccctgtccctgggccctatggcctgcctccccaagccggcagcagcgactccttgagcaccagcaagagccctccgggaaagagcagcctcggcctggacaactcgctgtccacttcttctgaggtgggcgctacgaggagtggggcaggaaggagggggagactcaaggctctcctggtcccatctcttccccgcagctattggaggctgggcaatgaagtgactgactgagcaattgattgatccattcagtcctcccttaatcaagtaatatttatgaggtgcccacttagtgccagccattggctaagcaatcagtgagcaaaaccggcacagcgctgcttcttaagataggctaccccaagcaaagaaggagtaatcacaaactgggagatatgttagtgtggagagaaattgagggctgtgagagagagaacgggggagggctgcttctgtggatagaaagtggttagggaaggcctctttgagaagtatttgtgaagggtttattatagcgcctcacacaaaataattcctgtgtaactggtggcggttcgaatagcagttgctattgtgttgtggttattactggaatccaacaaactgggttcttgttctctctctgccatttattaactgtgtgacttgggcagtaataatcataataataaccagcattaattgcacacttgccctttgtc

SEQ ID NO: 318688 - DNA, 3149 bp, Homo sapiens
ctcatgggagtatgaaggagatggtaggaggctgctgcgtatgttcggacgagaggggctgggccgagaacccgctggtctactgcgatgggcacgcgtgcagcgtggccgtccaccaagcttgctatggcatcgttcaggtgccaacgggaccctggttctgccggaaatgtgaatctcaggagcgagcagccagggtgaggtgtgagctgtgcccacacaaagacggggcattgaagaggactgataatggaggctgggcacacgtggtgtgtgccctctacatccccgaggtgcaatttgccaacgtgctcaccatggagcccatcgtgctgcagtacgtgcctcatgatcgcttcaacaagacctgttacatctgcgaggagcagggccgggagagcaaggcggcctcgggagcctgcatgacctgtaaccgccatggatgtcgacaagctttccacgtcacctgtgcccaaatggcaggcttgctgtgtgaggaagaagtgctggaggtggacaacgtcaagtactgcggctactgcaaataccacttcagcaagatgaagacatcccggcacagcagcgggggaggcggaggaggcgctggaggaggaggtggcagcatggggggaggtggcagtggtttcatctctgggaggagaagccggtcagcctcaccatccacgcagcaggagaagcaccccacccaccacgagaggggccagaagaagagtcgaaaggacaaagaacgccttaagcagaagcacaagaagcggcctgagtcgccccccagcatcctcaccccgcccgtggtccccactgctgacaaggtctcctcctcggcttcctcttcctcccaccacgaggccagcacgcaggagacctctgagagcagcagggagtcaaaggggaaaaagtcttccagccatagcctgagtcataaagggaagaaactgagcagtgggaaaggtgtgagcagttttacctccgcctcctcttcttcctcctcctcttcctcctcctctggggggcccttccagcctgcagtctcgtccctgcagagctcccctgacttctctgcattccccaagctggagcagccagaggaggacaagtactccaagcccacagcccccgccccttcagcccctccttctccctcagctcccgagccccccaaggctgacctttttgagcagaaggtggtcttctctggctttgggcccatcatgcgcttctccaccaccacctccagctcaggccgggcccgggcgccctcccctggggactataagtctccccacgtcacggggtctggggcctcggcaggcacccacaaacggatgcccgcactgagtgccacccctgtgcctgctgatgagacccctgagacaggcctgaaggagaagaagcacaaagccagcaagaggagccgccatgggccaggccgtcccaagggcagccggaacaaggagggcactgggggcccagctgccccatccttgcccagtgcccagctggctggctttaccgccactgctgcctcacccttctctggaggttccctggtcagctccggcctgggaggtctgtcctcccgaacctttgggccttctgggagcttgcccagcttgagcctggagtcccccttactaggggcaggcatctacaccagtaataaggaccccatctcccacagtggcgggatgctgcgggctgtctgcagcacccctctctcctccagcctcctggggcccccagggacctcggccctgccccgcctcagccgctccccgttcaccagcaccctcccctcctcttctgcttctatctccaccactcaggtgttttctctggctggctctacctttagcctcccttctacccacatctttggaacccccatgggtgccgttaatcccctcctctcccaagctgagagcagccacacagagccagacctggaggactgcagcttccggtgtcgggggacctcccctcaggagagtctgtcttccatgtcccccatcagcagcctccccgcactcttcgaccagacagcctctgcaccctgtgggggcggccagttagacccggcggccccagggacgactaacatggagcagcttctggagaagcagggcgacggggaggccggcgtcaacatcgtggagatgctgaaggcgctgcacgcgctgcagaaggagaaccagcggctgcaagagcagatcctgagcctgacggccaaaaaggagcggctgcagattctcaacgtgcagctctctgtgcccttccctgccctgcctgctgccctgcctgccgccaacggccctgtccctgggccctatggcctgcctccccaagccggcagcagcgactccttgagcaccagcaagagccctccgggaaagagcagcctcggcctggacaactcgctgtccacttcttctgaggacccacactcaggctgcccgagccgcagcagctcgtcgctgtccttccacagcacgcccccaccgctgcccctcctccagcagagccctgccactctgcccctggccctgcctggggcccctgccccactcccgccccagccgcagaacgggttgggccgggcacccggggcagcggggctgggggccatgcccatggctgaggggctgttgggggggctggcaggcagtgggggcctgcccctcaatgggctccttggggggttgaatggggccgctgcccccaaccccgcaagcttgagccaggctggcggggcccccacgctgcagctgccaggctgtctcaacagccttacagagcagcagagacatctccttcagcagcaagagcagcagctccagcaactccagcagctcctggcctccccgcagctgaccccggaacaccagactgttgtctaccagatgatccagcagatccagcagaaacgggagctgcagcgcctgcagatggctgggggctcccagctgcccatggccagcctgctggcaggaagctccaccccgctgctgtctgcgggtacccctggcctgctgcccacagcgtctgctccaccctcctttagtttttttgctcttgtctcatctgctcagtgaggtccccctcatacagcagcctccatccctgtctccata

SEQ ID NO: 318689 - DNA, 949 bp, Homo sapiens
gtgtgggagagccaataaacttacggctaggtacgaggcctgggtgttagtgagactctgtctcaaaagagaaaaaaaaagaaaagtaaccttcagagattcttagaagagttgctcattcacacccacccagaacacttcttccctccctcagcccaaaccaaaggctggggttctcatctccaagtggctgttctccaactttcccaagccgcttgcattccccagactggactactgtggcggttaggttagatttgaagacggggcccaggctgggtatgaacgggtgcagccctcttctcctcttcccccccacatctctcatgagagaggtagtggcatttccttctcagggagcttcaatgggaaaggtctcgaaagcttcaggaggagcagaataccaacgcagggggatggctgtaacgatctcaccgtctcctaacctcagtcccttttttgagagtgaatggtggagggtgggaagggacccagatttgtagatctctttgtctgggggaggggaaggatgtggtttgcagagcggaagcagagtttggaaacgcatgagagcagagcttcgtgtgttcccaccctcagtgaggaggtgtgagtgggtgagcatgtggagttgggtgttcccaccctcagtgaggaggtgtgagtgggggtgcatatagaggcagtgcctgctgtggggtcacaactggtgcatgccagcgccaaagggacctgtctttaggggaagccacagattgcaaacccaggggctcctttttcattctttctaaaaccttgatatcctcagcccaaaggcgatgcccccctgccacctccaagcctggaattgtgcataacccggatcttgtatctttgtataacggatgttatttgtacgaagggcagttcgtaaacagcacttgttcttttaataaaagaatgttttgca

SEQ ID NO: 318690 - DNA, 2249 bp, Homo sapiens
ctcatgggagtatgaaggagatggtaggaggctgctgcgtatgttcggacgagaggggctgggccgagaacccgctggtctactgcgatgggcacgcgtgcagcgtggccgtccaccaagcttgctatggcatcgttcaggtgccaacgggaccctggttctgccggaaatgtgaatctcaggagcgagcagccagggtgaggtgtgagctgtgcccacacaaagacggggcattgaagaggactgataatggaggctgggcacacgtggtgtgtgccctctacatccccgaggtgcaatttgccaacgtgctcaccatggagcccatcgtgctgcagtacgtgcctcatgatcgcttcaacaagacctgttacatctgcgaggagcagggccgggagagcaaggcggcctcgggagcctgcatgacctgtaaccgccatggatgtcgacaagctttccacgtcacctgtgcccaaatggcaggcttgctgtgtgaggaagaagtgctggaggtggacaacgtcaagtactgcggctactgcaaataccacttcagcaagatgaagacatcccggcacagcagcgggggaggcggaggaggcgctggaggaggaggtggcagcatggggggaggtggcagtggtttcatctctgggaggagaagccggtcagcctcaccatccacgcagcaggagaagcaccccacccaccacgagaggggccagaagaagagtcgaaaggacaaagaacgccttaagcagaagcacaagaagcggcctgagtcgccccccagcatcctcaccccgcccgtggtccccactgctgacaaggtctcctcctcggcttcctcttcctcccaccacgaggccagcacgcaggagacctctgagagcagcagggagtcaaaggggaaaaagtcttccagccatagcctgagtcataaagggaagaaactgagcagtgggaaaggtgtgagcagttttacctccgcctcctcttcttcctcctcctcttcctcctcctctggggggcccttccagcctgcagtctcgtccctgcagagctcccctgacttctctgcattccccaagctggagcagccagaggaggacaagtactccaagcccacagcccccgccccttcagcccctccttctccctcagctcccgagccccccaaggctgacctttttgagcagaaggtggtcttctctggctttgggcccatcatgcgcttctccaccaccacctccagctcaggccgggcccgggcgccctcccctggggactataagtctccccacgtcacggggtctggggcctcggcaggcacccacaaacggatgcccgcactgagtgccacccctgtgcctgctgatgagacccctgagacaggcctgaaggagaagaagcacaaagccagcaagaggagccgccatgggccaggccgtcccaagggcagccggaacaaggagggcactgggggcccagctgccccatccttgcccagtgcccagctggctggctttaccgccactgctgcctcacccttctctggaggttccctggtcagctccggcctgggaggtctgtcctcccgaacctttgggccttctgggagcttgcccagcttgagcctggagtcccccttactaggggcaggcatctacaccagtaataaggaccccatctcccacagtggcgggatgctgcgggctgtctgcagcacccctctctcctccagcctcctggggcccccagggacctcggccctgccccgcctcagccgctccccgttcaccagcaccctcccctcctcttctgcttctatctccaccactcaggtgttttctctggctggctctacctttagcctcccttctacccacatctttggaacccccatgggtgccgttaatcccctcctctcccaagctgagagcagccacacaggtatgtgaatatctgatcccctctcccctttcttcccaaaggtcggacacccatcacctgcatgtgaccccagaaagaatgggagagctttctggctgccccctccctctggccattgccctccctgcaaaaacaaacaggccgggtgtggtggctcacgcctgtaatcccagcactttgggaggccgaggcgggtggatcacctgagatcacgagtttgagaccagcctggccacatggtgaaacccgtctcttctaaattcaaaaagtagctgggcgtggtggtgggcgcctgt

SEQ ID NO: 318691 - DNA, 505 bp, Homo sapiens
ctcatgggagtatgaaggagatggtaggaggctgctgcgtatgttcggacgagaggggctgggccgagaacccgctggtctactgcgatgggcacgcgtgcagcgtggccgtccaccaagcttgctatggcatcgttcaggtgccaacgggaccctggttctgccggaaatgtgaatctcaggagcgagcagccagggtgaggtgtgagctgtgcccacacaaagacggggcattgaagaggactgataatggaggctgggcacacgtggtgtgtgccctctacatccccgaggtgcaatttgccaacgtgctcaccatggagcccatcgtgctgcagtatcccatttctgactcctggctttagctctcgggactcctctctctcagcttggtctctctctcttcccttctcactgggcaacggccttggtcaaactccatcccagcattcttcttctctctggagacacggtctcgctctgccgcccaggtgggagtgcatgg

SEQ ID NO: 318692 - DNA, 321 bp, Homo sapiens
aacaagtccagaaagggcgtggggggaggatcttctagaagtttaaggtcaaagactcagacttcccgccctgtttgaagtgcttaattgtgtggttgaaggctggtgttgggcggttgggcagtcctgctgtagagtgagtgacccgtagactggggagcagcccccactgctggaactggctctagtcctttggagtcaccgccttcccccagttaccctgggaaaaagccactggctgacagctttgctcagcgactgtcctccccaccctcagcttgctatggcatcgttcaggtgccaacgggaccctggttctgc

SEQ ID NO: 318693 - DNA, 1142 bp, Homo sapiens
ctcatgggagtatgaaggagatggtaggaggctgctgcgtatgttcggacgagaggggctgggccgagaacccgctggtctactgcgatgggcacgcgtgcagcgtggccgtccaccaagcttgctatggcatcgttcaggtgccaacgggaccctggttctgccggaaatgtgaatctcaggagcgagcagccagggtgaggtgtgagctgtgcccacacaaagacggggcattgaagaggactgataatggaggctgggcacacgtggtgtgtgccctctacatccccgaggtgcaatttgccaacgtgctcaccatggagcccatcgtgctgcagtacgtgcctcatgatcgcttcaacaaggtcagcggccccccgccgtgtcccctaccagttccctcccatctatgggttcctccaacgctctcttcatccggtgtaatttgattctgtccaacgagcactgaaagggaacttgggaggtgggtaggtacctaccagtgaaccacccttctgttgacagacacactcatgctctggcactcaggtgaaatagtaggctcccctgcagtagttctgccagagggtagaccttcgcagttacttcattcattcattcgctggacacattttattaagtgcctactatgtgccagacctggtgcaaggtagctggcacacgctgttcggtgctgatcaagacaggtgtgctgcccgctcaatggaacgcaagttcttgcatgcgaagactataaatatcagtaaaaaggcaaagtaaatgcaatttgtgataaatgctgtgaagaaaataagacactaaaataaagacctggtgggggcttactttagaccagatggtaaaggaaggagacatttaggctgagacctggggcgtgagaaggagccagcttccaggagggtaagggcccccaggttccaggcagaagaaagcctgggcagaggcacagaggtgggcataagctccctagtgagcaagacagacaaaggccttggcctttcagagctaaccatccaaggactgtgctacccagcatagtagccatcggccacacgtggctacataaattaatcaaaattaaaagcaggctgggtgtggtggctcacacctgtaatcccaga

SEQ ID NO: 318694 - DNA, 7432 bp, Homo sapiens
ctcatgggagtatgaaggagatggtaggaggctgctgcgtatgttcggacgagaggggctgggccgagaacccgctggtctactgcgatgggcacgcgtgcagcgtggccgtccaccaagcttgctatggcatcgttcaggtgccaacgggaccctggttctgccggaaatgtgaatctcaggagcgagcagccagggtgaggtgtgagctgtgcccacacaaagacggggcattgaagaggactgataatggaggctgggcacacgtggtgtgtgccctctacatccccgaggtgcaatttgccaacgtgctcaccatggagcccatcgtgctgcagtacgtgcctcatgatcgcttcaacaagacctgttacatctgcgaggagcagggccgggagagcaaggcggcctcgggagcctgcatgacctgtaaccgccatggatgtcgacaagctttccacgtcacctgtgcccaaatggcaggcttgctgtgtgaggaagaagtgctggaggtggacaacgtcaagtactgcggctactgcaaataccacttcagcaagatgaagacatcccggcacagcagcgggggaggcggaggaggcgctggaggaggaggtggcagcatggggggaggtggcagtggtttcatctctgggaggagaagccggtcagcctcaccatccacgcagcaggagaagcaccccacccaccacgagaggggccagaagaagagtcgaaaggacaaagaacgccttaagcagaagcacaagaagcggcctgagtcgccccccagcatcctcaccccgcccgtggtccccactgctgacaaggtctcctcctcggcttcctcttcctcccaccacgaggccagcacgcaggagacctctgagagcagcagggagtcaaaggggaaaaagtcttccagccatagcctgagtcataaagggaagaaactgagcagtgggaaaggtgtgagcagttttacctccgcctcctcttcttcctcctcctcttcctcctcctctggggggcccttccagcctgcagtctcgtccctgcagagctcccctgacttctctgcattccccaagctggagcagccagaggaggacaagtactccaagcccacagcccccgccccttcagcccctccttctccctcagctcccgagccccccaaggctgacctttttgagcagaaggtggtcttctctggctttgggcccatcatgcgcttctccaccaccacctccagctcaggccgggcccgggcgccctcccctggggactataagtctccccacgtcacggggtctggggcctcggcaggcacccacaaacggatgcccgcactgagtgccacccctgtgcctgctgatgagacccctgagacaggcctgaaggagaagaagcacaaagccagcaagaggagccgccatgggccaggccgtcccaagggcagccggaacaaggagggcactgggggcccagctgccccatccttgcccagtgcccagctggctggctttaccgccactgctgcctcacccttctctggaggttccctggtcagctccggcctgggaggtctgtcctcccgaacctttgggccttctgggagcttgcccagcttgagcctggagtcccccttactaggggcaggcatctacaccagtaataaggaccccatctcccacagtggcgggatgctgcgggctgtctgcagcacccctctctcctccagcctcctggggcccccagggacctcggccctgccccgcctcagccgctccccgttcaccagcaccctcccctcctcttctgcttctatctccaccactcaggtgttttctctggctggctctacctttagcctcccttctacccacatctttggaacccccatgggtgccgttaatcccctcctctcccaagctgagagcagccacacagagccagacctggaggactgcagcttccggtgtcgggggacctcccctcaggagagtctgtcttccatgtcccccatcagcagcctccccgcactcttcgaccagacagcctctgcaccctgtgggggcggccagttagacccggcggccccagggacgactaacatggagcagcttctggagaagcagggcgacggggaggccggcgtcaacatcgtggagatgctgaaggcgctgcacgcgctgcagaaggagaaccagcggctgcaagagcagatcctgagcctgacggccaaaaaggagcggctgcagattctcaacgtgcagctctctgtgcccttccctgccctgcctgctgccctgcctgccgccaacggccctgtccctgggccctatggcctgcctccccaagccggcagcagcgactccttgagcaccagcaagagccctccgggaaagagcagcctcggcctggacaactcgctgtccacttcttctgaggacccacactcaggctgcccgagccgcagcagctcgtcgctgtccttccacagcacgcccccaccgctgcccctcctccagcagagccctgccactctgcccctggccctgcctggggcccctgccccactcccgccccagccgcagaacgggttgggccgggcacccggggcagcggggctgggggccatgcccatggctgaggggctgttgggggggctggcaggcagtgggggcctgcccctcaatgggctccttggggggttgaatggggccgctgcccccaaccccgcaagcttgagccaggctggcggggcccccacgctgcagctgccaggctgtctcaacagccttacagagcagcagagacatctccttcagcagcaagagcagcagctccagcaactccagcagctcctggcctccccgcagctgaccccggaacaccagactgttgtctaccagatgatccagcagatccagcagaaacgggagctgcagcgcctgcagatggctgggggctcccagctgcccatggccagcctgctggcaggaagctccaccccgctgctgtctgcgggtacccctggcctgctgcccacagcgtctgctccacccctgctgcccgctggagccctagtggctccctcgcttggcaacaacacaagtctcatggccgcagcagctgcagctgcagcagtagcagcagcaggcggacctccagtcctcactgcccagaccaaccccttcctcagcctgtcgggagcagagggcagtggcggtggccccaaaggagggaccgctgacaaaggagcctcagccaaccaggaaaaaggctaaatccacccttacccctcctgacccccccaagtggagggaacagatcctggcctgaggggtcctagcctggagcaggcgcctgcgcccagaccctggagagccttgacccagagcctgtgctgaggtccagggagtgtggagagctcctggtgtcgaggactgagactgagaggggagccccctccatctggcccccttccctttccgcactgtccgctttgtgaggctcagaggaaggacagtctgcaagcccgcctaggaggtccatccccagcaaatgttttggaggtccccccagagagcagagtgggccatggcagaagtagggggttggttggacctgtcacatgaaatggatcagcacttgaatggggagaagtggagggagaggccctgggcctgtccctgcggggaaatcttttatggaagaagggctggacccactttacctgcagtttcttcccagctcgggcagatggcagaagggaccccttggactttttctcgccatccctccccccagcgcaggggcacaagctgagcttgtaaaagcccacagatgttgggggctggagaaggggcaggagagcatcacactcagccccagcctcctcaacctcttggggccccgtgatggggaggagagggcaggtgcggggaggctctggccttccttggtgccccgccctttgtttgcactattggacttaggagtgccgagggtggggagatggagctgcccgtctcagtgtgtgtgtgtgtctgtctgcctgtctctctcctcctggacccagggcagccaagggcagggataggcgcagtggtcagatgaagcagcgccagagaggggacctcccagctcttatttgcaccctccccacctcaccaactttggtccctctctgggggcatgaatggttaacaaacaccagagcagtactccaatattggagagtcgctgggggcacagggctttgaatcagggtagtatcctgccttccctcccctgaccccacatggtctcagggcccccttagggccccctaccccactgatagcttcctccttctctggcacaaggggagccccagggcttgggggagggcgtaaggtggggggaaatgccactgcttttagcaaaagcctccctcccagaattagccagcttgcctcctgcaccccacccccaccaaccaggggagccactaagctgactaacaactgtcccctcacccaccagctatttccccagggtagagtgggcaattctcaccttcaaagagtccccgcctgcccaggcctttggcacagaggctgagtggacagtcaggagagaggcgagaggcaaggcgaagcctgtgtccctgtttcagttgcactggggttggagcccagggtaggggtttccagcttccccaggctccggccttgtcagtctctttgcatgtgtggatttttctgtgtgtgtttctgtttgggtttttgttgttgggttttttttttttttttaataaagaaaagaagatgtgtatatttttggcaacgacagaaacgtagtgcagatatatttttgcctgtgctgctcaactgttttttttttctgatactgaaaataatattaatattcctgttgataagactttgtaagatgttagggagctgataatggaggggggtgggaatccttcaaaggcaatttcttaggcacttgcaagggcttgggggagggggaggcagttgtgatgacctcagaaatactcactttttattaatgctaaatatgttagaaagaaatgatagcattcagcattttattcttcttaatctattaagctgtgtaactccctgccccaaaccactgaaaagaaaagtaaccttcaggccaggcgcggtggctcacgcctgtaatcccaacactttgggaggctgaggcgggcggatcacttaaggtcaggagttcaagaccagcctggccaacatggtgaaaccccgtctctatcaaaaattagccgggcatggtggcacgtgcctgtaatcccagctacttgggaggctgaggcacgagaattgcttgaacccaggaggctgaggctgcagtgagccaagattgtgccactgcactccagcctgtgtgagagagtgagactctgtctcaaaagagaaaaaaaaagaaaagtaaccttcagagattcttagaagagttgctcattcacacccacgcccttgcccaaggctggcccacttagagcgaaacttaacttttgtctggatgggaagagaagtaagtctaccccgaggttgccatgttgaagagtgagaggtccaagtgattctgtgcattgaaaccaagacaccccacccagaacacttcttccctccctcagcccaaaccaaaggctggggttctcatctccaagtggctgttctccaactttcccaagccgcttgcattccccagactggactactgtggcggttaggttagatttgaagacggggcccaggctgggtatgaacgggtgcagccctcttctcctcttcccccccacatctctcatgagagaggtagtggcatttccttctcagggagcttcaatgggaaaggtctcgaaagcttcaggaggagcagaataccaacgcagggggatggctgtaacgatctcaccgtctcctaacctcagtcccttttttgagagtgaatggtggagggtgggaagggacccagatttgtagatctctttgtctgggggaggggaaggatgtggtttgcagagcggaagcagagtttggaaacgcatgagagcagagcttcgtgtgttcccaccctcagtgaggaggtgtgagtgggtgagcatgtggagttgggtgttcccaccctcagtgaggaggtgtgagtgggggtgcatatagaggcagtgcctgctgtggggtcacaactggtgcatgccagcgccaaagggacctgtctttaggggtcatttcagccagctcctcccatcacagatgacagctccaagcctagaaggggctcagtgacagggccaggacaagccctcaggactgtggcctcctggcccttggttcccctgccccacaacatggtctccacatggctggctggctggctgtccctgtgtgtgtgtgacacacggtgtgagtgcagggctgtgcccggggtgggagggtgtctatgtggcactgactgtcttagctcagagctggtggatcctctccatggacaatgacactttaaggattgtcttggtttgtttttcctatttgtggggtattttccccctcaggctcctgggtctgctgctgcctcaaggtgtcctgaccttgaggctgatgaggggacccctgcctgtttcccccatactgagttctagggaggtgctcaccccagactcttaggaagggtctagagaaatgagaggagcccaagccaggggccagctccgagaaagggtaacctccacgcttctctctcccaaattggaaatgaagacaggttttcaaaggcacaggctccccctgccagcttctaggatcttccttggtgtgcaatgggccagttaggggtaggcagcttgcacccagttctcctttatctcaacttattttcctggggagaggtgcctagagggattgaggtaacttcaactgggaattccaaggaaggtgggcaagtagccttggctctctcccaccatgtccatcaggattgagagtgtgtctagctcccgaccactttgtcttgacctactgaaaagttgggaactgaggggtgccttcattcccctttgttcactttctccagctcaacttgggacttgggtggtgggactggagacctcacccctgctcccgtcccgccccctttctatcccaacctgtttccatgtagcagacccttcctagggagcagggaggggaagccacagattgcaaacccaggggctcctttttcattctttctaaaaccttgatatcctcagcccaaaggcgatgcccccctgccacctccaagcctggaattgtgcataacccggatcttgtatctttgtataacggatgttatttgtacgaagggcagttcgtaaacagcacttgttcttttaataaaagaatgttttgca

SEQ ID NO: 318695 - DNA, 6671 bp, Homo sapiens
caaggtacaatttttcaagaacccccattaacattttctcctataatcgctacagtcatctggtgaggccagtagggtgcgagttactctcccccattttattacaggtgggaaagctggaggggtcgggggtactcatcccaggacacagacagtggcagagctgagacaggaaaccaggcatccccattcgtggaccagagctctctcccgccagtacacgcgggagtgggagggagtgcggggatctggggtccagctgtaactgtttcccctctgtgcacagtctcgtccctgcagagctcccctgacttctctgcattccccaagctggagcagccagaggaggacaagtactccaagcccacagcccccgccccttcagcccctccttctccctcagctcccgagccccccaaggctgacctttttgagcagaaggtggtcttctctggctttgggcccatcatgcgcttctccaccaccacctccagctcaggccgggcccgggcgccctcccctggggactataagtctccccacgtcacggggtctggggcctcggcaggcacccacaaacggatgcccgcactgagtgccacccctgtgcctgctgatgagacccctgagacaggcctgaaggagaagaagcacaaagccagcaagaggagccgccatgggccaggccgtcccaagggcagccggaacaaggagggcactgggggcccagctgccccatccttgcccagtgcccagctggctggctttaccgccactgctgcctcacccttctctggaggttccctggtcagctccggcctgggaggtctgtcctcccgaacctttgggccttctgggagcttgcccagcttgagcctggagtcccccttactaggggcaggcatctacaccagtaataaggaccccatctcccacagtggcgggatgctgcgggctgtctgcagcacccctctctcctccagcctcctggggcccccagggacctcggccctgccccgcctcagccgctccccgttcaccagcaccctcccctcctcttctgcttctatctccaccactcaggtgttttctctggctggctctacctttagcctcccttctacccacatctttggaacccccatgggtgccgttaatcccctcctctcccaagctgagagcagccacacagagccagacctggaggactgcagcttccggtgtcgggggacctcccctcaggagagtctgtcttccatgtcccccatcagcagcctccccgcactcttcgaccagacagcctctgcaccctgtgggggcggccagttagacccggcggccccagggacgactaacatggagcagcttctggagaagcagggcgacggggaggccggcgtcaacatcgtggagatgctgaaggcgctgcacgcgctgcagaaggagaaccagcggctgcaagagcagatcctgagcctgacggccaaaaaggagcggctgcagattctcaacgtgcagctctctgtgcccttccctgccctgcctgctgccctgcctgccgccaacggccctgtccctgggccctatggcctgcctccccaagccggcagcagcgactccttgagcaccagcaagagccctccgggaaagagcagcctcggcctggacaactcgctgtccacttcttctgaggacccacactcaggctgcccgagccgcagcagctcgtcgctgtccttccacagcacgcccccaccgctgcccctcctccagcagagccctgccactctgcccctggccctgcctggggcccctgccccactcccgccccagccgcagaacgggttgggccgggcacccggggcagcggggctgggggccatgcccatggctgaggggctgttgggggggctggcaggcagtgggggcctgcccctcaatgggctccttggggggttgaatggggccgctgcccccaaccccgcaagcttgagccaggctggcggggcccccacgctgcagctgccaggctgtctcaacagccttacagagcagcagagacatctccttcagcagcaagagcagcagctccagcaactccagcagctcctggcctccccgcagctgaccccggaacaccagactgttgtctaccagatgatccagcagatccagcagaaacgggagctgcagcgcctgcagatggctgggggctcccagctgcccatggccagcctgctggcaggaagctccaccccgctgctgtctgcgggtacccctggcctgctgcccacagcgtctgctccacccctgctgcccgctggagccctagtggctccctcgcttggcaacaacacaagtctcatggccgcagcagctgcagctgcagcagtagcagcagcaggcggacctccagtcctcactgcccagaccaaccccttcctcagcctgtcgggagcagagggcagtggcggtggccccaaaggagggaccgctgacaaaggagcctcagccaaccaggaaaaaggctaaatccacccttacccctcctgacccccccaagtggagggaacagatcctggcctgaggggtcctagcctggagcaggcgcctgcgcccagaccctggagagccttgacccagagcctgtgctgaggtccagggagtgtggagagctcctggtgtcgaggactgagactgagaggggagccccctccatctggcccccttccctttccgcactgtccgctttgtgaggctcagaggaaggacagtctgcaagcccgcctaggaggtccatccccagcaaatgttttggaggtccccccagagagcagagtgggccatggcagaagtagggggttggttggacctgtcacatgaaatggatcagcacttgaatggggagaagtggagggagaggccctgggcctgtccctgcggggaaatcttttatggaagaagggctggacccactttacctgcagtttcttcccagctcgggcagatggcagaagggaccccttggactttttctcgccatccctccccccagcgcaggggcacaagctgagcttgtaaaagcccacagatgttgggggctggagaaggggcaggagagcatcacactcagccccagcctcctcaacctcttggggccccgtgatggggaggagagggcaggtgcggggaggctctggccttccttggtgccccgccctttgtttgcactattggacttaggagtgccgagggtggggagatggagctgcccgtctcagtgtgtgtgtgtgtctgtctgcctgtctctctcctcctggacccagggcagccaagggcagggataggcgcagtggtcagatgaagcagcgccagagaggggacctcccagctcttatttgcaccctccccacctcaccaactttggtccctctctgggggcatgaatggttaacaaacaccagagcagtactccaatattggagagtcgctgggggcacagggctttgaatcagggtagtatcctgccttccctcccctgaccccacatggtctcagggcccccttagggccccctaccccactgatagcttcctccttctctggcacaaggggagccccagggcttgggggagggcgtaaggtggggggaaatgccactgcttttagcaaaagcctccctcccagaattagccagcttgcctcctgcaccccacccccaccaaccaggggagccactaagctgactaacaactgtcccctcacccaccagctatttccccagggtagagtgggcaattctcaccttcaaagagtccccgcctgcccaggcctttggcacagaggctgagtggacagtcaggagagaggcgagaggcaaggcgaagcctgtgtccctgtttcagttgcactggggttggagcccagggtaggggtttccagcttccccaggctccggccttgtcagtctctttgcatgtgtggatttttctgtgtgtgtttctgtttgggtttttgttgttgggttttttttttttttttaataaagaaaagaagatgtgtatatttttggcaacgacagaaacgtagtgcagatatatttttgcctgtgctgctcaactgttttttttttctgatactgaaaataatattaatattcctgttgataagactttgtaagatgttagggagctgataatggaggggggtgggaatccttcaaaggcaatttcttaggcacttgcaagggcttgggggagggggaggcagttgtgatgacctcagaaatactcactttttattaatgctaaatatgttagaaagaaatgatagcattcagcattttattcttcttaatctattaagctgtgtaactccctgccccaaaccactgaaaagaaaagtaaccttcaggccaggcgcggtggctcacgcctgtaatcccaacactttgggaggctgaggcgggcggatcacttaaggtcaggagttcaagaccagcctggccaacatggtgaaaccccgtctctatcaaaaattagccgggcatggtggcacgtgcctgtaatcccagctacttgggaggctgaggcacgagaattgcttgaacccaggaggctgaggctgcagtgagccaagattgtgccactgcactccagcctgtgtgagagagtgagactctgtctcaaaagagaaaaaaaaagaaaagtaaccttcagagattcttagaagagttgctcattcacacccacgcccttgcccaaggctggcccacttagagcgaaacttaacttttgtctggatgggaagagaagtaagtctaccccgaggttgccatgttgaagagtgagaggtccaagtgattctgtgcattgaaaccaagacaccccacccagaacacttcttccctccctcagcccaaaccaaaggctggggttctcatctccaagtggctgttctccaactttcccaagccgcttgcattccccagactggactactgtggcggttaggttagatttgaagacggggcccaggctgggtatgaacgggtgcagccctcttctcctcttcccccccacatctctcatgagagaggtagtggcatttccttctcagggagcttcaatgggaaaggtctcgaaagcttcaggaggagcagaataccaacgcagggggatggctgtaacgatctcaccgtctcctaacctcagtcccttttttgagagtgaatggtggagggtgggaagggacccagatttgtagatctctttgtctgggggaggggaaggatgtggtttgcagagcggaagcagagtttggaaacgcatgagagcagagcttcgtgtgttcccaccctcagtgaggaggtgtgagtgggtgagcatgtggagttgggtgttcccaccctcagtgaggaggtgtgagtgggggtgcatatagaggcagtgcctgctgtggggtcacaactggtgcatgccagcgccaaagggacctgtctttaggggtcatttcagccagctcctcccatcacagatgacagctccaagcctagaaggggctcagtgacagggccaggacaagccctcaggactgtggcctcctggcccttggttcccctgccccacaacatggtctccacatggctggctggctggctgtccctgtgtgtgtgtgacacacggtgtgagtgcagggctgtgcccggggtgggagggtgtctatgtggcactgactgtcttagctcagagctggtggatcctctccatggacaatgacactttaaggattgtcttggtttgtttttcctatttgtggggtattttccccctcaggctcctgggtctgctgctgcctcaaggtgtcctgaccttgaggctgatgaggggacccctgcctgtttcccccatactgagttctagggaggtgctcaccccagactcttaggaagggtctagagaaatgagaggagcccaagccaggggccagctccgagaaagggtaacctccacgcttctctctcccaaattggaaatgaagacaggttttcaaaggcacaggctccccctgccagcttctaggatcttccttggtgtgcaatgggccagttaggggtaggcagcttgcacccagttctcctttatctcaacttattttcctggggagaggtgcctagagggattgaggtaacttcaactgggaattccaaggaaggtgggcaagtagccttggctctctcccaccatgtccatcaggattgagagtgtgtctagctcccgaccactttgtcttgacctactgaaaagttgggaactgaggggtgccttcattcccctttgttcactttctccagctcaacttgggacttgggtggtgggactggagacctcacccctgctcccgtcccgccccctttctatcccaacctgtttccatgtagcagacccttcctagggagcagggaggggaagccacagattgcaaacccaggggctcctttttcattctttctaaaaccttgatatcctcagcccaaaggcgatgcccccctgccacctccaagcctggaattgtgcataacccggatcttgtatctttgtataacggatgttatttgtacgaagggcagttcgtaaacagcacttgttcttttaataaaagaatgttttgca

SEQ ID NO: 318696 - DNA, 5858 bp, Homo sapiens
ccacctactacaggaccgccaagaaaagaagttcccaaaaccactcctagtgagcccaagaaaaagcagcctccaccaccagaatcaggcatctacaccagtaataaggaccccatctcccacagtggcgggatgctgcgggctgtctgcagcacccctctctcctccagcctcctggggcccccagggacctcggccctgccccgcctcagccgctccccgttcaccagcaccctcccctcctcttctgcttctatctccaccactcaggtgttttctctggctggctctacctttagcctcccttctacccacatctttggaacccccatgggtgccgttaatcccctcctctcccaagctgagagcagccacacagagccagacctggaggactgcagcttccggtgtcgggggacctcccctcaggagagtctgtcttccatgtcccccatcagcagcctccccgcactcttcgaccagacagcctctgcaccctgtgggggcggccagttagacccggcggccccagggacgactaacatggagcagcttctggagaagcagggcgacggggaggccggcgtcaacatcgtggagatgctgaaggcgctgcacgcgctgcagaaggagaaccagcggctgcaagagcagatcctgagcctgacggccaaaaaggagcggctgcagattctcaacgtgcagctctctgtgcccttccctgccctgcctgctgccctgcctgccgccaacggccctgtccctgggccctatggcctgcctccccaagccggcagcagcgactccttgagcaccagcaagagccctccgggaaagagcagcctcggcctggacaactcgctgtccacttcttctgaggacccacactcaggctgcccgagccgcagcagctcgtcgctgtccttccacagcacgcccccaccgctgcccctcctccagcagagccctgccactctgcccctggccctgcctggggcccctgccccactcccgccccagccgcagaacgggttgggccgggcacccggggcagcggggctgggggccatgcccatggctgaggggctgttgggggggctggcaggcagtgggggcctgcccctcaatgggctccttggggggttgaatggggccgctgcccccaaccccgcaagcttgagccaggctggcggggcccccacgctgcagctgccaggctgtctcaacagccttacagagcagcagagacatctccttcagcagcaagagcagcagctccagcaactccagcagctcctggcctccccgcagctgaccccggaacaccagactgttgtctaccagatgatccagcagatccagcagaaacgggagctgcagcgcctgcagatggctgggggctcccagctgcccatggccagcctgctggcaggaagctccaccccgctgctgtctgcgggtacccctggcctgctgcccacagcgtctgctccacccctgctgcccgctggagccctagtggctccctcgcttggcaacaacacaagtctcatggccgcagcagctgcagctgcagcagtagcagcagcaggcggacctccagtcctcactgcccagaccaaccccttcctcagcctgtcgggagcagagggcagtggcggtggccccaaaggagggaccgctgacaaaggagcctcagccaaccaggaaaaaggctaaatccacccttacccctcctgacccccccaagtggagggaacagatcctggcctgaggggtcctagcctggagcaggcgcctgcgcccagaccctggagagccttgacccagagcctgtgctgaggtccagggagtgtggagagctcctggtgtcgaggactgagactgagaggggagccccctccatctggcccccttccctttccgcactgtccgctttgtgaggctcagaggaaggacagtctgcaagcccgcctaggaggtccatccccagcaaatgttttggaggtccccccagagagcagagtgggccatggcagaagtagggggttggttggacctgtcacatgaaatggatcagcacttgaatggggagaagtggagggagaggccctgggcctgtccctgcggggaaatcttttatggaagaagggctggacccactttacctgcagtttcttcccagctcgggcagatggcagaagggaccccttggactttttctcgccatccctccccccagcgcaggggcacaagctgagcttgtaaaagcccacagatgttgggggctggagaaggggcaggagagcatcacactcagccccagcctcctcaacctcttggggccccgtgatggggaggagagggcaggtgcggggaggctctggccttccttggtgccccgccctttgtttgcactattggacttaggagtgccgagggtggggagatggagctgcccgtctcagtgtgtgtgtgtgtctgtctgcctgtctctctcctcctggacccagggcagccaagggcagggataggcgcagtggtcagatgaagcagcgccagagaggggacctcccagctcttatttgcaccctccccacctcaccaactttggtccctctctgggggcatgaatggttaacaaacaccagagcagtactccaatattggagagtcgctgggggcacagggctttgaatcagggtagtatcctgccttccctcccctgaccccacatggtctcagggcccccttagggccccctaccccactgatagcttcctccttctctggcacaaggggagccccagggcttgggggagggcgtaaggtggggggaaatgccactgcttttagcaaaagcctccctcccagaattagccagcttgcctcctgcaccccacccccaccaaccaggggagccactaagctgactaacaactgtcccctcacccaccagctatttccccagggtagagtgggcaattctcaccttcaaagagtccccgcctgcccaggcctttggcacagaggctgagtggacagtcaggagagaggcgagaggcaaggcgaagcctgtgtccctgtttcagttgcactggggttggagcccagggtaggggtttccagcttccccaggctccggccttgtcagtctctttgcatgtgtggatttttctgtgtgtgtttctgtttgggtttttgttgttgggttttttttttttttttaataaagaaaagaagatgtgtatatttttggcaacgacagaaacgtagtgcagatatatttttgcctgtgctgctcaactgttttttttttctgatactgaaaataatattaatattcctgttgataagactttgtaagatgttagggagctgataatggaggggggtgggaatccttcaaaggcaatttcttaggcacttgcaagggcttgggggagggggaggcagttgtgatgacctcagaaatactcactttttattaatgctaaatatgttagaaagaaatgatagcattcagcattttattcttcttaatctattaagctgtgtaactccctgccccaaaccactgaaaagaaaagtaaccttcaggccaggcgcggtggctcacgcctgtaatcccaacactttgggaggctgaggcgggcggatcacttaaggtcaggagttcaagaccagcctggccaacatggtgaaaccccgtctctatcaaaaattagccgggcatggtggcacgtgcctgtaatcccagctacttgggaggctgaggcacgagaattgcttgaacccaggaggctgaggctgcagtgagccaagattgtgccactgcactccagcctgtgtgagagagtgagactctgtctcaaaagagaaaaaaaaagaaaagtaaccttcagagattcttagaagagttgctcattcacacccacgcccttgcccaaggctggcccacttagagcgaaacttaacttttgtctggatgggaagagaagtaagtctaccccgaggttgccatgttgaagagtgagaggtccaagtgattctgtgcattgaaaccaagacaccccacccagaacacttcttccctccctcagcccaaaccaaaggctggggttctcatctccaagtggctgttctccaactttcccaagccgcttgcattccccagactggactactgtggcggttaggttagatttgaagacggggcccaggctgggtatgaacgggtgcagccctcttctcctcttcccccccacatctctcatgagagaggtagtggcatttccttctcagggagcttcaatgggaaaggtctcgaaagcttcaggaggagcagaataccaacgcagggggatggctgtaacgatctcaccgtctcctaacctcagtcccttttttgagagtgaatggtggagggtgggaagggacccagatttgtagatctctttgtctgggggaggggaaggatgtggtttgcagagcggaagcagagtttggaaacgcatgagagcagagcttcgtgtgttcccaccctcagtgaggaggtgtgagtgggtgagcatgtggagttgggtgttcccaccctcagtgaggaggtgtgagtgggggtgcatatagaggcagtgcctgctgtggggtcacaactggtgcatgccagcgccaaagggacctgtctttaggggtcatttcagccagctcctcccatcacagatgacagctccaagcctagaaggggctcagtgacagggccaggacaagccctcaggactgtggcctcctggcccttggttcccctgccccacaacatggtctccacatggctggctggctggctgtccctgtgtgtgtgtgacacacggtgtgagtgcagggctgtgcccggggtgggagggtgtctatgtggcactgactgtcttagctcagagctggtggatcctctccatggacaatgacactttaaggattgtcttggtttgtttttcctatttgtggggtattttccccctcaggctcctgggtctgctgctgcctcaaggtgtcctgaccttgaggctgatgaggggacccctgcctgtttcccccatactgagttctagggaggtgctcaccccagactcttaggaagggtctagagaaatgagaggagcccaagccaggggccagctccgagaaagggtaacctccacgcttctctctcccaaattggaaatgaagacaggttttcaaaggcacaggctccccctgccagcttctaggatcttccttggtgtgcaatgggccagttaggggtaggcagcttgcacccagttctcctttatctcaacttattttcctggggagaggtgcctagagggattgaggtaacttcaactgggaattccaaggaaggtgggcaagtagccttggctctctcccaccatgtccatcaggattgagagtgtgtctagctcccgaccactttgtcttgacctactgaaaagttgggaactgaggggtgccttcattcccctttgttcactttctccagctcaacttgggacttgggtggtgggactggagacctcacccctgctcccgtcccgccccctttctatcccaacctgtttccatgtagcagacccttcctagggagcagggaggggaagccacagattgcaaacccaggggctcctttttcattctttctaaaaccttgatatcctcagcccaaaggcgatgcccccctgccacctccaagcctggaattgtgcataacccggatcttgtatctttgtataacggatgttatttgtacgaagggcagttcgtaaacagcacttgttcttttaataaaagaatgttttgca

SEQ ID NO: 318697 - DNA, 7441 bp, Homo sapiens
ctcatgggagtatgaaggagatggtaggaggctgctgcgtatgttcggacgagaggggctgggccgagaacccgctggtctactgcgatgggcacgcgtgcagcgtggccgtccaccaagcttgctatggcatcgttcaggtgccaacgggaccctggttctgccggaaatgtgaatctcaggagcgagcagccagggtgaggtgtgagctgtgcccacacaaagacggggcattgaagaggactgataatggaggctgggcacacgtggtgtgtgccctctacatccccgaggtgcaatttgccaacgtgctcaccatggagcccatcgtgctgcagtacgtgcctcatgatcgcttcaacaagacctgttacatctgcgaggagcagggccgggagagcaaggcggcctcgggagcctgcatgacctgtaaccgccatggatgtcgacaagctttccacgtcacctgtgcccaaatggcaggcttgctgtgtgaggaagaagtgctggaggtggacaacgtcaagtactgcggctactgcaaataccacttcagcaagatgaagacatcccggcacagcagcgggggaggcggaggaggcgctggaggaggaggtggcagcatggggggaggtggcagtggtttcatctctgggaggagaagccggtcagcctcaccatccacgcagcaggagaagcaccccacccaccacgagaggggccagaagaagagtcgaaaggacaaagaacgccttaagcagaagcacaagaagcggcctgagtcgccccccagcatcctcaccccgcccgtggtccccactgctgacaaggtctcctcctcggcttcctcttcctcccaccacgaggccagcacgcaggagacctctgagagcagcagggagtcaaaggggaaaaagtcttccagccatagcctgagtcataaagggaagaaactgagcagtgggaaaggtgtgagcagttttacctccgcctcctcttcttcctcctcctcttcctcctcctctggggggcccttccagcctgcagtctcgtccctgcagagctcccctgacttctctgcattccccaagctggagcagccagaggaggacaagtactccaagcccacagcccccgccccttcagcccctccttctccctcagctcccgagccccccaaggctgacctttttgagcagaaggtggtcttctctggctttgggcccatcatgcgcttctccaccaccacctccagctcaggccgggcccgggcgccctcccctggggactataagtctccccacgtcacggggtctggggcctcggcaggcacccacaaacggatgcccgcactgagtgccacccctgtgcctgctgatgagacccctgagacaggcctgaaggagaagaagcacaaagccagcaagaggagccgccatgggccaggccgtcccaagggcagccggaacaaggagggcactgggggcccagctgccccatccttgcccagtgcccagctggctggctttaccgccactgctgcctcacccttctctggaggttccctggtcagctccggcctgggaggtctgtcctcccgaacctttgggccttctgggagcttgcccagcttgagcctggagtcccccttactaggggcaggcatctacaccagtaataaggaccccatctcccacagtggcgggatgctgcgggctgtctgcagcacccctctctcctccagcctcctggggcccccagggacctcggccctgccccgcctcagccgctccccgttcaccagcaccctcccctcctcttctgcttctatctccaccactcaggtgttttctctggctggctctacctttagcctcccttctacccacatctttggaacccccatgggtgccgttaatcccctcctctcccaagctgagagcagccacacagagccagacctggaggactgcagcttccggtgtcgggggacctcccctcaggagagtctgtcttccatgtcccccatcagcagcctccccgcactcttcgaccagacagcctctgcaccctgtgggggcggccagttagacccggcggccccagggacgactaacatggagcagcttctggagaagcagggcgacggggaggccggcgtcaacatcgtggagatgctgaaggcgctgcacgcgctgcagaaggagaaccagcggctgcaagagcagatcctgagcctgacggccaaaaaggagcggctgcagattctcaacgtgcagctctctgtgcccttccctgccctgcctgctgccctgcctgccgccaacggccctgtccctgggccctatggcctgcctccccaagccggcagcagcgactccttgagcaccagcaagagccctccgggaaagagcagcctcggcctggacaactcgctgtccacttcttctgaggacccacactcaggctgcccgagccgcagcagctcgtcgctgtccttccacagcacgcccccaccgctgcccctcctccagcagagccctgccactctgcccctggccctgcctggggcccctgccccactcccgccccagccgcagaacgggttgggccgggcacccggggcagcggggctgggggccatgcccatggctgaggggctgttgggggggctggcaggcagtgggggcctgcccctcaatgggctccttggggggttgaatggggccgctgcccccaaccccgcaagcttgagccaggctggcggggcccccacgctgcagctgccaggctgtctcaacagccttacagagcagcagagacatctccttcagcagcaagagcagcagctccagcaactccagcagctcctggcctccccgcagctgaccccggaacaccagactgttgtctaccagatgatccagcagatccagcagaaacgggagctgcagcgcctgcagatggctgggggctcccagctgcccatggccagcctgctggcaggaagctccaccccgctgctgtctgcgggtacccctggcctgctgcccacagcgtctgctccacccctgctgcccgctggagccctagtggctccctcgcttggcaacaacacaagtctcatggccgcagcagctgcagctgcagcagtagcagcagcaggcggacctccagtcctcactgcccagaccaaccccttcctcagcctgtcgggagcagagggcagtggcggtggccccaaaggagggaccgctgacaaaggagcctcagccaaccaggaaaaaggctaaatccacccttacccctcctgacccccccaagtggagggaacagatcctggcctgaggggtcctagcctggagcaggcgcctgcgcccagaccctggagagccttgacccagagcctgtgctgaggtccagggagtgtggagagctcctggtgtcgaggactgagactgagaggggagccccctccatctggcccccttccctttccgcactgtccgctttgtgaggctcagaggaaggacagtctgcaagcccgcctaggaggtccatccccagcaaatgttttggaggtccccccagagagcagagtgggccatggcagaagtagggggttggttggacctgtcacatgaaatggatcagcacttgaatggggagaagtggagggagaggccctgggcctgtccctgcggggaaatcttttatggaagaagggctggacccactttacctgcagtttcttcccagctcgggcagatggcagaagggaccccttggactttttctcgccatccctccccccagcgcaggggcacaagctgagcttgtaaaagcccacagatgttgggggctggagaaggggcaggagagcatcacactcagccccagcctcctcaacctcttggggccccgtgatggggaggagagggcaggtgcggggaggctctggccttccttggtgccccgccctttgtttgcactattggacttaggagtgccgagggtggggagatggagctgcccgtctcagtgtgtgtgtgtgtctgtctgcctgtctctctcctcctggacccagggcagccaagggcagggataggcgcagtggtcagatgaagcagcgccagagaggggacctcccagctcttatttgcaccctccccacctcaccaactttggtccctctctgggggcatgaatggttaacaaacaccagagcagtactccaatattggagagtcgctgggggcacagggctttgaatcagggtagtatcctgccttccctcccctgaccccacatggtctcagggcccccttagggccccctaccccactgatagcttcctccttctctggcacaaggggagccccagggcttgggggagggcgtaaggtggggggaaatgccactgcttttagcaaaagcctccctcccagaattagccagcttgcctcctgcaccccacccccaccaaccaggggagccactaagctgactaacaactgtcccctcacccaccagctatttccccagggtagagtgggcaattctcaccttcaaagagtccccgcctgcccaggcctttggcacagaggctgagtggacagtcaggagagaggcgagaggcaaggcgaagcctgtgtccctgtttcagttgcactggggttggagcccagggtaggggtttccagcttccccaggctccggccttgtcagtctctttgcatgtgtggatttttctgtgtgtgtttctgtttgggtttttgttgttgggttttttttttttttttaataaagaaaagaagatgtgtatatttttggcaacgacagaaacgtagtgcagatatatttttgcctgtgctgctcaactgttttttttttctgatactgaaaataatattaatattcctgttgataagactttgtaagatgttagggagctgataatggaggggggtgggaatccttcaaaggcaatttcttaggcacttgcaagggcttgggggagggggaggcagttgtgatgacctcagaaatactcactttttattaatgctaaatatgttagaaagaaatgatagcattcagcattttattcttcttaatctattaagctgtgtaactccctgccccaaaccactgaaaagaaaagtaaccttcaggccaggcgcggtggctcacgcctgtaatcccaacactttgggaggctgaggcgggcggatcacttaaggtcaggagttcaagaccagcctggccaacatggtgaaaccccgtctctatcaaaaattagccgggcatggtggcacgtgcctgtaatcccagctacttgggaggctgaggcacgagaattgcttgaacccaggaggctgaggctgcagtgagccaagattgtgccactgcactccagcctgtgtgagagagtgagactctgtctcaaaagagaaaaaaaaagaaaagtaaccttcagagattcttagaagagttgctcattcacacccacgcccttgcccaaggctggcccacttagagcgaaacttaacttttgtctggatgggaagagaagtaagtctaccccgaggttgccatgttgaagagtgagaggtccaagtgattctgtgcattgaaaccaagacaccccacccagaacacttcttccctccctcagcccaaaccaaaggctggggttctcatctccaagtggctgttctccaactttcccaagccgcttgcattccccagactggactactgtggcggttaggttagatttgaagacggggcccaggctgggtatgaacgggtgcagccctcttctcctcttcccccccacatctctcatgagagaggtagtggcatttccttctcagggagcttcaatgggaaaggtctcgaaagcttcaggaggagcagaataccaacgcagggggatggctgtaacgatctcaccgtctcctaacctcagtcccttttttgagagtgaatggtggagggtgggaagggacccagatttgtagatctctttgtctgggggaggggaaggatgtggtttgcagagcggaagcagagtttggaaacgcatgagagcagagcttcgtgtgttcccaccctcagtgaggaggtgtgagtgggtgagcatgtggagttgggtgttcccaccctcagtgaggaggtgtgagtgggggtgcatatagaggcagtgcctgctgtggggtcacaactggtgcatgccagcgccaaagggacctgtctttaggggtcatttcagccagctcctcccatcacagatgacagctccaagcctagaaggggctcagtgacagggccaggacaagccctcaggactgtggcctcctggcccttggttcccctgccccacaacatggtctccacatggctggctggctggctgtccctgtgtgtgtgtgacacacggtgtgagtgcagggctgtgcccggggtgggagggtgtctatgtggcactgactgtcttagctcagagctggtggatcctctccatggacaatgacactttaaggattgtcttggtttgtttttcctatttgtggggtattttccccctcaggctcctgggtctgctgctgcctcaaggtgtcctgaccttgaggctgatgaggggacccctgcctgtttcccccatactgagttctagggaggtgctcaccccagactcttaggaagggtctagagaaatgagaggagcccaagccaggggccagctccgagaaagggtaacctccacgcttctctctcccaaattggaaatgaagacaggttttcaaaggcacaggctccccctgccagcttctaggatcttccttggtgtgcaatgggccagttaggggtaggcagcttgcacccagttctcctttatctcaacttattttcctggggagaggtgcctagagggattgaggtaacttcaactgggaattccaaggaaggtgggcaagtagccttggctctctcccaccaatgaaggaggggagtgtgatataagggaggagtgtaaggagagtgagggagggaggtagagtgagggagaagggtgagatagtggaaggagggggggagtggagggtgaacagggagtggaaaggggaaattgggtggtgggactggagacctcacccctgctcccgtcccgccccctttctatcccaacctgtttccatgtagcagacccttcctagggagcagggaggggaagccacagattgcaaacccaggggctcctttttcattctttctaaaaccttgatatcctcagcccaaaggcgatgcccccctgccacctccaagcctggaattgtgcataacccggatcttgtatctttgtataacggatgttatttgtacgaagggcagttcgtaaacagcacttgttcttttaataaaagaatgttttgca

SEQ ID NO: 318698 - DNA, 6472 bp, Homo sapiens
ctcatgggagtatgaaggagatggtaggaggctgctgcgtatgttcggacgagaggggctgggccgagaacccgctggtctactgcgatgggcacgcgtgcagcgtggccgtccaccaagcttgctatggcatcgttcaggtgccaacgggaccctggttctgccggaaatgtgaatctcaggagcgagcagccagggtgaggtgtgagctgtgcccacacaaagacggggcattgaagaggactgataatggaggctgggcacacgtggtgtgtgccctctacatccccgaggtgcaatttgccaacgtgctcaccatggagcccatcgtgctgcagtacgtgcctcatgatcgcttcaacaagacctgttacatctgcgaggagcagggccgggagagcaaggcggcctcgggagcctgcatgacctgtaaccgccatggatgtcgacaagctttccacgtcacctgtgcccaaatggcaggcttgctgtgtgaggaagaagtgctggaggtggacaacgtcaagtactgcggctactgcaaataccacttcagcaagatgaagacatcccggcacagcagcgggggaggcggaggaggcgctggaggaggaggtggcagcatggggggaggtggcagtggtttcatctctgggaggagaagccggtcagcctcaccatccacgcagcaggagaagcaccccacccaccacgagaggggccagaagaagagtcgaaaggacaaagaacgccttaagcagaagcacaagaagcggcctgagtcgccccccagcatcctcaccccgcccgtggtccccactgctgacaaggtctcctcctcggcttcctcttcctcccaccacgaggccagcacgcaggagacctctgagagcagcagggagtcaaaggggaaaaagtcttccagccatagcctgagtcataaagggaagaaactgagcagtgggaaaggtgtgagcagttttacctccgcctcctcttcttcctcctcctcttcctcctcctctggggggcccttccagcctgcagtctcgtccctgcagagctcccctgacttctctgcattccccaagctggagcagccagaggaggacaagtactccaagcccacagcccccgccccttcagcccctccttctccctcagctcccgagccccccaaggctgacctttttgagcagaaggtggtcttctctggctttgggcccatcatgcgcttctccaccaccacctccagctcaggccgggcccgggcgccctcccctggggactataagtctccccacgtcacggggtctggggcctcggcaggcacccacaaacggatgcccgcactgagtgccacccctgtgcctgctgatgagacccctgagacaggcctgaaggagaagaagcacaaagccagcaagaggagccgccatgggccaggccgtcccaagggcagccggaacaaggagggcactgggggcccagctgccccatccttgcccagtgcccagctggctggctttaccgccactgctgcctcacccttctctggaggttccctggtcagctccggcctgggaggtctgtcctcccgaacctttgggccttctgggagcttgcccagcttgagcctggagtcccccttactaggggcaggcatctacaccagtaataaggaccccatctcccacagtggcgggatgctgcgggctgtctgcagcacccctctctcctccagcctcctggggcccccagggacctcggccctgccccgcctcagccgctccccgttcaccagcaccctcccctcctcttctgcttctatctccaccactcaggtgttttctctggctggctctacctttagcctcccttctacccacatctttggaacccccatgggtgccgttaatcccctcctctcccaagctgagagcagccacacagagccagacctggaggactgcagcttccggtgtcgggggacctcccctcaggagagtctgtcttccatgtcccccatcagcagcctccccgcactcttcgaccagacagcctctgcaccctgtgggggcggccagttagacccggcggccccagggacgactaacatggagcagcttctggagaagcagggcgacggggaggccggcgtcaacatcgtggagatgctgaaggcgctgcacgcgctgcagaaggagaaccagcggctgcaagagcagatcctgagcctgacggccaaaaaggagcggctgcagattctcaacgtgcagctctctgtgcccttccctgccctgcctgctgccctgcctgccgccaacggccctgtccctgggccctatggcctgcctccccaagccggcagcagcgactccttgagcaccagcaagagccctccgggaaagagcagcctcggcctggacaactcgctgtccacttcttctgaggacccacactcaggctgcccgagccgcagcagctcgtcgctgtccttccacagcacgcccccaccgctgcccctcctccagcagagccctgccactctgcccctggccctgcctggggcccctgccccactcccgccccagccgcagaacgggttgggccgggcacccggggcagcggggctgggggccatgcccatggctgaggggctgttgggggggctggcaggcagtgggggcctgcccctcaatgggctccttggggggttgaatggggccgctgcccccaaccccgcaagcttgagccaggctggcggggcccccacgctgcagctgccaggctgtctcaacagccttacagagcagcagagacatctccttcagcagcaagagcagcagctccagcaactccagcagctcctggcctccccgcagctgaccccggaacaccagactgttgtctaccagatgatccagcagatccagcagaaacgggagctgcagcgcctgcagatggctgggggctcccagctgcccatggccagcctgctggcaggaagctccaccccgctgctgtctgcgggtacccctggcctgctgcccacagcgtctgctccacccctgctgcccgctggagccctagtggctccctcgcttggcaacaacacaagtctcatggccgcagcagctgcagctgcagcagtagcagcagcaggcggacctccagtcctcactgcccagaccaaccccttcctcagcctgtcgggagcagagggcagtggcggtggccccaaaggagggaccgctgacaaaggagcctcagccaaccaggaaaaaggctaaatccacccttacccctcctgacccccccaagtggagggaacagatcctggcctgaggggtcctagcctggagcaggcgcctgcgcccagaccctggagagccttgacccagagcctgtgctgaggtccagggagtgtggagagctcctggtgtcgaggactgagactgagaggggagccccctccatctggcccccttccctttccgcactgtccgctttgtgaggctcagaggaaggacagtctgcaagcccgcctaggaggtccatccccagcaaatgttttggaggtccccccagagagcagagtgggccatggcagaagtagggggttggttggacctgtcacatgaaatggatcagcacttgaatggggagaagtggagggagaggccctgggcctgtccctgcggggaaatcttttatggaagaagggctggacccactttacctgcagtttcttcccagctcgggcagatggcagaagggaccccttggactttttctcgccatccctccccccagcgcaggggcacaagctgagcttgtaaaagcccacagatgttgggggctggagaaggggcaggagagcatcacactcagccccagcctcctcaacctcttggggccccgtgatggggaggagagggcaggtgcggggaggctctggccttccttggtgccccgccctttgtttgcactattggacttaggagtgccgagggtggggagatggagctgcccgtctcagtgtgtgtgtgtgtctgtctgcctgtctctctcctcctggacccagggcagccaagggcagggataggcgcagtggtcagatgaagcagcgccagagaggggacctcccagctcttatttgcaccctccccacctcaccaactttggtccctctctgggggcatgaatggttaacaaacaccagagcagtactccaatattggagagtcgctgggggcacagggctttgaatcagggtagtatcctgccttccctcccctgaccccacatggtctcagggcccccttagggccccctaccccactgatagcttcctccttctctggcacaaggggagccccagggcttgggggagggcgtaaggtggggggaaatgccactgcttttagcaaaagcctccctcccagaattagccagcttgcctcctgcaccccacccccaccaaccaggggagccactaagctgactaacaactgtcccctcacccaccagctatttccccagggtagagtgggcaattctcaccttcaaagagtccccgcctgcccaggcctttggcacagaggctgagtggacagtcaggagagaggcgagaggcaaggcgaagcctgtgtccctgtttcagttgcactggggttggagcccagggtaggggtttccagcttccccaggctccggccttgtcagtctctttgcatgtgtggatttttctgtgtgtgtttctgtttgggtttttgttgttgggttttttttttttttttaataaagaaaagaagatgtgtatatttttggcaacgacagaaacgtagtgcagatatatttttgcctgtgctgctcaactgttttttttttctgatactgaaaataatattaatattcctgttgataagactttgtaagatgttagggagctgataatggaggggggtgggaatccttcaaaggcaatttcttaggcacttgcaagggcttgggggagggggaggcagttgtgatgacctcagaaatactcactttttattaatgctaaatatgttagaaagaaatgatagcattcagcattttattcttcttaatctattaagctgtgtaactccctgccccaaaccactgaaaagaaaagtaaccttcaggccaggcgcggtggctcacgcctgtaatcccaacactttgggaggctgaggcgggcggatcacttaaggtcaggagttcaagaccagcctggccaacatggtgaaaccccgtctctatcaaaaattagccgggcatggtggcacgtgcctgtaatcccagctacttgggaggctgaggcacgagaattgcttgaacccaggaggctgaggctgcagtgagccaagattgtgccactgcactccagcctgtgtgagagagtgagactctgtctcaaaagagaaaaaaaaagaaaagtaaccttcagagattcttagaagagttgctcattcacacccacgcccttgcccaaggctggcccacttagagcgaaacttaacttttgtctggatgggaagagaagtaagtctaccccgaggttgccatgttgaagagtgagaggtccaagtgattctgtgcattgaaaccaagacaccccacccagaacacttcttccctccctcagcccaaaccaaaggctggggttctcatctccaagtggctgttctccaactttcccaagccgcttgcattccccagactggactactgtggcggttaggttagatttgaagacggggcccaggctgggtatgaacgggtgcagccctcttctcctcttcccccccacatctctcatgagagaggtagtggcatttccttctcagggagcttcaatgggaaaggtctcgaaagcttcaggaggagcagaataccaacgcagggggatggctgtaacgatctcaccgtctcctaacctcagtcccttttttgagagtgaatggtggagggtgggaagggacccagatttgtagatctctttgtctgggggaggggaaggatgtggtttgcagagcggaagcagagtttggaaacgcatgagagcagagcttcgtgtgttcccaccctcagtgaggaggtgtgagtgggtgagcatgtggagttgggtgttcccaccctcagtgaggaggtgtgagtgggggtgcatatagaggcagtgcctgctgtggggtcacaactggtgcatgccagcgccaaagggacctgtctttaggggaagccacagattgcaaacccaggggctcctttttcattctttctaaaaccttgatatcctcagcccaaaggcgatgcccccctgccacctccaagcctggaattgtgcataacccggatcttgtatctttgtataacggatgttatttgtacgaagggcagttcgtaaacagcacttgttcttttaataaaagaatgttttgca

SEQ ID NO: 318699 - DNA, 4700 bp, Homo sapiens
ctcatgggagtatgaaggagatggtaggaggctgctgcgtatgttcggacgagaggggctgggccgagaacccgctggtctactgcgatgggcacgcgtgcagcgtggccgtccaccaagcttgctatggcatcgttcaggtgccaacgggaccctggttctgccggaaatgtgaatctcaggagcgagcagccagggtgaggtgtgagctgtgcccacacaaagacggggcattgaagaggactgataatggaggctgggcacacgtggtgtgtgccctctacatccccgaggtgcaatttgccaacgtgctcaccatggagcccatcgtgctgcagtacgtgcctcatgatcgcttcaacaagacctgttacatctgcgaggagcagggccgggagagcaaggcggcctcgggagcctgcatgacctgtaaccgccatggatgtcgacaagctttccacgtcacctgtgcccaaatggcaggcttgctgtgtgaggaagaagtgctggaggtggacaacgtcaagtactgcggctactgcaaataccacttcagcaagatgaagacatcccggcacagcagcgggggaggcggaggaggcgctggaggaggaggtggcagcatggggggaggtggcagtggtttcatctctgggaggagaagccggtcagcctcaccatccacgcagcaggagaagcaccccacccaccacgagaggggccagaagaagagtcgaaaggacaaagaacgccttaagcagaagcacaagaagcggcctgagtcgccccccagcatcctcaccccgcccgtggtccccactgctgacaaggtctcctcctcggcttcctcttcctcccaccacgaggccagcacgcaggagacctctgagagcagcagggagtcaaaggggaaaaagtcttccagccatagcctgagtcataaagggaagaaactgagcagtgggaaaggtgtgagcagttttacctccgcctcctcttcttcctcctcctcttcctcctcctctggggggcccttccagcctgcagtctcgtccctgcagagctcccctgacttctctgcattccccaagctggagcagccagaggaggacaagtactccaagcccacagcccccgccccttcagcccctccttctccctcagctcccgagccccccaaggctgacctttttgagcagaaggtggtcttctctggctttgggcccatcatgcgcttctccaccaccacctccagctcaggccgggcccgggcgccctcccctggggactataagtctccccacgtcacggggtctggggcctcggcaggcacccacaaacggatgcccgcactgagtgccacccctgtgcctgctgatgagacccctgagacaggcctgaaggagaagaagcacaaagccagcaagaggagccgccatgggccaggccgtcccaagggcagccggaacaaggagggcactgggggcccagctgccccatccttgcccagtgcccagagtggcgggatgctgcgggctgtctgcagcacccctctctcctccagcctcctggggcccccagggacctcggccctgccccgcctcagccgctccccgttcaccagcaccctcccctcctcttctgcttctatctccaccactcaggtgttttctctggctggctctacctttagcctcccttctacccacatctttggaacccccatgggtgccgttaatcccctcctctcccaagctgagagcagccacacagagccagacctggaggactgcagcttccggtgtcgggggacctcccctcaggagagtctgtcttccatgtcccccatcagcagcctccccgcactcttcgaccagacagcctctgcaccctgtgggggcggccagttagacccggcggccccagggacgactaacatggagcagcttctggagaagcagggcgacggggaggccggcgtcaacatcgtggagatgctgaaggcgctgcacgcgctgcagaaggagaaccagcggctgcaagagcagatcctgagcctgacggccaaaaaggagcggctgcagattctcaacgtgcagctctctgtgcccttccctgccctgcctgctgccctgcctgccgccaacggccctgtccctgggccctatggcctgcctccccaagccggcagcagcgactccttgagcaccagcaagagccctccgggaaagagcagcctcggcctggacaactcgctgtccacttcttctgaggacccacactcaggctgcccgagccgcagcagctcgtcgctgtccttccacagcacgcccccaccgctgcccctcctccagcagagccctgccactctgcccctggccctgcctggggcccctgccccactcccgccccagccgcagaacgggttgggccgggcacccggggcagcggggctgggggccatgcccatggctgaggggctgttgggggggctggcaggcagtgggggcctgcccctcaatgggctccttggggggttgaatggggccgctgcccccaaccccgcaagcttgagccaggctggcggggcccccacgctgcagctgccaggctgtctcaacagccttacagagcagcagagacatctccttcagcagcaagagcagcagctccagcaactccagcagctcctggcctccccgcagctgaccccggaacaccagactgttgtctaccagatgatccagcagatccagcagaaacgggagctgcagcgcctgcagatggctgggggctcccagctgcccatggccagcctgctggcaggaagctccaccccgctgctgtctgcgggtacccctggcctgctgcccacagcgtctgctccacccctgctgcccgctggagccctagtggctccctcgcttggcaacaacacaagtctcatggccgcagcagctgcagctgcagcagtagcagcagcaggcggacctccagtcctcactgcccagaccaaccccttcctcagcctgtcgggagcagagggcagtggcggtggccccaaaggagggaccgctgacaaaggagcctcagccaaccaggaaaaaggctaaatccacccttacccctcctgacccccccaagtggagggaacagatcctggcctgaggggtcctagcctggagcaggcgcctgcgcccagaccctggagagccttgacccagagcctgtgctgaggtccagggagtgtggagagctcctggtgtcgaggactgagactgagaggggagccccctccatctggcccccttccctttccgcactgtccgctttgtgaggctcagaggaaggacagtctgcaagcccgcctaggaggtccatccccagcaaatgttttggaggtccccccagagagcagagtgggccatggcagaagtagggggttggttggacctgtcacatgaaatggatcagcacttgaatggggagaagtggagggagaggccctgggcctgtccctgcggggaaatcttttatggaagaagggctggacccactttacctgcagtttcttcccagctcgggcagatggcagaagggaccccttggactttttctcgccatccctccccccagcgcaggggcacaagctgagcttgtaaaagcccacagatgttgggggctggagaaggggcaggagagcatcacactcagccccagcctcctcaacctcttggggccccgtgatggggaggagagggcaggtgcggggaggctctggccttccttggtgccccgccctttgtttgcactattggacttaggagtgccgagggtggggagatggagctgcccgtctcagtgtgtgagtgtgtgtgtgcgtgcatgtgtgtgtgtgtgtgtgtgtgtgtgtgtgtctgtctgcctgtctctctcctcctggacccagggcagccaagggcagggataggcgcagtggtcagatgaagcagcgccagagaggggacctcccagctcttatttgcaccctccccacctcaccaactttggtccctctctgggggcatgaatggttaacaaacaccagagcagtactccaatattggagagtcgctgggggcacagggctttgaatcagggtagtatcctgccttccctcccctgaccccacatggtctcagggcccccttagggccccctaccccactgatagcttcctccttctctggcacaaggggagccccagggcttgggggagggcgtaaggtggggggaaatgccactgcttttagcaaaagcctccctcccagaattagccagcttgcctcctgcaccccacccccaccaaccaggggagccactaagctgactaacaactgtcccctcacccaccagctatttccccagggtagagtgggcaattctcaccttcaaagagtccccgcctgcccaggcctttggcacagaggctgagtggacagtcaggagagaggcgagaggcaaggcgaagcctgtgtccctgtttcagttgcactggggttggagcccagggtaggggtttccagcttccccaggctccggccttgtcagtctctttgcatgtgtggatttttctgtgtgtgtttctgtttgggtttttgttgttgggttttttttttttttttaataaagaaaagaagatgtgtatatttttggcaacg

SEQ ID NO: 318700 - DNA, 1151 bp, Homo sapiens
ctcatgggagtatgaaggagatggtaggaggctgctgcgtatgttcggacgagaggggctgggccgagaacccgctggtctactgcgatgggcacgcgtgcagcgtggccgtccaccaagcttgctatggcatcgttcaggtgccaacgggaccctggttctgccggaaatgtgaatctcaggagcgagcagccagggtgaggtgtgagctgtgcccacacaaagacggggcattgaagaggactgataatggaggctgggcacacgtggtgtgtgccctctacatccccgaggtgcaatttgccaacgtgctcaccatggagcccatcgtgctgcagtacgtgcctcatgatcgcttcaacaagacctgttacatctgcgaggagcagggccgggagagcaaggcggcctcgggagcctgcatgacctgtaaccgccatggatgtcgacaagctttccacgtcacctgtgcccaaatggcaggcttgctgtgtgaggaagaagtgctggaggtggacaacgtcaagtactgcggctactgcaaataccacttcagcaagatgaagacatcccggcacagcagcgggggaggcggaggaggcgctggaggaggaggtggcagcatggggggaggtggcagtggtttcatctctgggaggagaagccggtcagcctcaccatccacgcagcaggagaagcaccccacccaccacgagaggggccagaagaagagtcgaaaggacaaagaacgccttaagcagaattagccagcttgcctcctgcaccccacccccaccaaccaggggagccactaagctgactaacaactgtcccctcacccaccagctatttccccagggtagagtgggcaattctcaccttcaaagagtccccgcctgcccaggcctttggcacagaggctgagtggacagtcaggagagaggcgagaggcaaggcgaagcctgtgtccctgtttcagttgcactggggttggagcccagggtaggggtttccagcttccccaggctccggccttgtcagtctctttgcatgtgtggatttttctgtgtgtgtttctgtttgggtttttgttgttgggttttttttttttttttaataaagaaaagaagatgtgtatatttttggcaacg

SEQ ID NO: 318701 - DNA, 2099 bp, Homo sapiens
ctcatgggagtatgaaggagatggtaggaggctgctgcgtatgttcggacgagaggggctgggccgagaacccgctggtctactgcgatgggcacgcgtgcagcgtggccgtccaccaagcttgctatggcatcgttcaggtgccaacgggaccctggttctgccggaaatgtgaatctcaggagcgagcagccagggtgaggtgtgagctgtgcccacacaaagacggggcattgaagaggactgataatggaggctgggcacacgtggtgtgtgccctctacatccccgaggtgcaatttgccaacgtgctcaccatggagcccatcgtgctgcagtacgtgcctcatgatcgcttcaacaagacctgttacatctgcgaggagcagggccgggagagcaaggcggcctcgggagcctgcatgacctgtaaccgccatggatgtcgacaagctttccacgtcacctgtgcccaaatggcaggcttgctgtgtgaggaagaagtgctggaggtggacaacgtcaagtactgcggctactgcaaataccacttcagcaagatgaagacatcccggcacagcagcgggggaggcggaggaggcgctggaggaggaggtggcagcatggggggaggtggcagtggtttcatctctgggaggagaagccggtcagcctcaccatccacgcagcaggagaagcaccccacccaccacgagaggggccagaagaagagtcgaaaggacaaagaacgccttaagcagaagcacaagaagcggcctgagtcgccccccagcatcctcaccccgcccgtggtccccactgctgacaaggtctcctcctcggcttcctcttcctcccaccacgaggccagcacgcaggagacctctgagagcagcagggagtcaaaggggaaaaagtcttccagccatagcctgagtcataaagggaagaaactgagcagtgggaaaggtgtgagcagttttacctccgcctcctcttcttcctcctcctcttcctcctcctctggggggcccttccagcctgcagtctcgtccctgcagagctcccctgacttctctgcattccccaagctggagcagccagaggaggacaagtactccaagcccacagcccccgccccttcagcccctccttctccctcagctcccgagccccccaaggctgacctttttgagcagaaggtggtcttctctggctttgggcccatcatgcgcttctccaccaccacctccagctcaggccgggcccgggcgccctcccctggggactataagtctccccacgtcacggggtctggggcctcggcaggcacccacaaacggatgcccgcactgagtgccacccctgtgcctgctgatgagacccctgagacaggcctgaaggagaagaagcacaaagccagcaagaggagccgccatgggccaggccgtcccaagggcagccggaacaaggagggcactgggggcccagctgccccatccttgcccagtgcccagctggctggctttaccgccactgctgcctcacccttctctggaggttccctggtcagctccggcctgggaggtctgtcctcccgaacctttgggccttctgggagcttgcccagcttgagcctggagtcccccttactaggggcaggcatctacaccagtaataaggaccccatctcccacagtggcgggatgctgcgggctgtctgcagcacccctctctcctccagcctcctggggcccccagggacctcggccctgccccgcctcagccgctccccgttcaccagcaccctcccctcctcttctgcttctatctccaccactcaggtcggacacccatcacctgcatgtgaccccagaaagaatgggagagctttctggctgccccctccctctggccattgccctccctgcaaaaacaaacaggccgggtgtggtggctcacgcctgtaatcccagcactttgggaggccgaggcgggtggatcacctgagatcacgagtttgagaccagcctggccacatggtgaaacccgtctcttctaaattcaaaaagtagctgggcgtggtggtgggcgcctgt

SEQ ID NO: 318702 - DNA, 1209 bp, Homo sapiens
ctcatgggagtatgaaggagatggtaggaggctgctgcgtatgttcggacgagaggggctgggccgagaacccgctggtctactgcgatgggcacgcgtgcagcgtggccgtccaccaagcttgctatggcatcgttcaggtgccaacgggaccctggttctgccggaaatgtgaatctcaggagcgagcagccagggtgaggtgtgagctgtgcccacacaaagacggggcattgaagaggactgataatggaggctgggcacacgtggtgtgtgccctctacatccccgaggtgcaatttgccaacgtgctcaccatggagcccatcgtgctgcagtacgtgcctcatgatcgcttcaacaagacctgttacatctgcgaggagcagggccgggagagcaaggcggcctcgggagcctgcatgacctgtaaccgccatggatgtcgacaagctttccacgtcacctgtgcccaaatggcaggcttgctgtgtgaggaagaagtgctggaggtggacaacgtcaagtactgcggctactgcaaataccacttcagcaagatgaagacatcccggcacagcagcgggggaggcggaggaggcgctggaggaggaggtggcagcatggggggaggtggcagtggtttcatctctgggaggagaagccggtcagcctcaccatccacgcagcaggagaagcaccccacccaccacgagaggggccagaagaagagtcgaaaggacaaagaacgccttaagcagaagcacaagaagcggcctgagtcgccccccagcatcctcaccccgcccgtggtccccactgctgacaaggtctcctcctcggcttcctcttcctcccaccacgaggccagcacgcaggagacctctgagagcagcagggagtcaaaggggaaaaagtcttccagccatagcctgagtcataaagggaagaaactgagcagtgggaaaggtgtgagcagttttacctccgcctcctcttcttcctcctcctcttcctcctcctctggggggcccttccagcctgcaggtgagtgtgggcatccgggaggaagctgggagccgggaaagccttttgtcctgagcttttctcgcagggactttgcatattgggtttgcatctcatttacttctccattggttcaggataaagactggggaatcccctcctcctccaacctgcctctatgtc

SEQ ID NO: 318703 - DNA, 1201 bp, Homo sapiens
gtcgtgaggcgggccttcgggctggctcgccgtcggctgccggggggttggcctgggtgtcattggctctgggaagcggcagcagaggcagggaccactcggggtctggtgtcggcacagccatggcgggcgcgttggtgcggaaagcggcggactatgtccgaagcaaggatttccgggactacctcatgagtacgcacttctggggcccagtagccaactggggtcttcccattgctgccatcaatgatatgaaaaagtctccagagattatcagtgggcggatgacatttgccctctgttgctattctttgacattcatgagatttgcctacaaggtacagcctcggaactggcttctgtttgcatgccacgcaacaaatgaagtagcccagctcatccagggagggcggcttatcaaacacgagatgactaaaacggcatctgcataacaatggaaaaggaagaacaaggtcttgaagggacagcattgccagctgctgctgagtcacagatttcattataaatagcctccctaaggaaaatacactgaatgctatttttactaaccattctatttttatagaaatagctgagagtttctaaaccaactctctgctgccttacaagtattaaatattttacttctttccataaagagtagctcaaaatatgcaattaatttaatactttctgatgatggttttatctgcagtaatatgtatatcatctattagaatttacttaatgaaaaactgaagagaacaaaatttgtaaccactagcacttaagtactcctgattcttaacattgtctttaatgaccacaagacaaccaacagctggccacgtacttaaaattttgtccccactgtttaaaaatgttacctgtgtatttccatgcagtgtatatattgagatgctgtaacttaatggcaataaatgatttaaatatttgttaacacaccaaaaaagaacacaagaacaaacaaacaagacagagacaacagaaaatacagaatggagaccccagaagacgacaaaaatgataaccagtgcactgaccagacagagtactatagtcgagaacgcggaaacataaggggggaggcgcggcaaaacacattcctgccggcggaccacactcaacacccccgcgtgacgaagcgggagacaccacgggggaaatcaacagagggggg

SEQ ID NO: 318704 - DNA, 1027 bp, Homo sapiens
gtcgtgaggcgggccttcgggctggctcgccgtcggctgccggggggttggcctgggtgtcattggctctgggaagcggcagcagaggcagggaccactcggggtctggtgtcggcacagccatggcgggcgcgttggtgcggaaagcggcggactatgtccgaagcaaggatttccgggactacctcatgagtacgcacttctggggcccagtagccaactggggtcttcccattgctgccatcaatgatatgaaaaagtctccagagattatcagtgggcggatgacatttgccctctgttgctattctttgacattcatgagatttgcctacaaggtacagcctcggaactggcttctgtttgcatgccacgcaacaaatgaagtagcccagctcatccagggagggcggcttatcaaacacgagatgactaaaacggcatctgcataacaatggaaaaggaagaacaaggtcttgaagggacagcattgccagctgctgctgagtcacagatttcattataaatagcctccctaaggaaaatacactgaatgctatttttactaaccattctatttttatagaaatagctgagagtttctaaaccaactctctgctgccttacaagtattaaatattttacttctttccataaagagtagctcaaaatatgcaattaatttaatactttctgatgatggttttatctgcagtaatatgtatatcatctattagaatttacttaatgaaaaactgaagagaacaaaatttgtaaccactagcacttaagtactcctgattcttaacattgtctttaatgaccacaagacaaccaacagctggccacgtacttaaaattttgtccccactgtttaaaaatgttacctgtgtatttccatgcagtgtatatattgagatgctgtaacttaatggcaataaatgatttaaatatttgttaagggtatctggaggaagaaatttctaagcaacaaagcattcaaggtttcatcagctgtcgtaactgg

SEQ ID NO: 318705 - DNA, 1528 bp, Homo sapiens
atagtgtactgttttgcttccctgaatgatgtactttaatttcacccatttttgagcttcatgtaaatggatgcttttcatatattttctgttatggcttgctttttttctcaacattatgtatttgtgagaatcatccatgttgtgcaccaagctgggtgccttcattttttaactgctatttagtattctatcttcatgattataccacatttatttgtccatgccactatcactggacatctgggtggtttccattgtgcattttcttcacctgcagaaaaggcataaataaatattttcctcacatgcttgttacaccaagcaaacaaagtagtaaacagaaaaatgccttgaaaatactatgtggacacaaatttgagttagttataatggttatagaaatcctcgtgccgaattcggcacgaggcagaggcagggaccactcggggtctggtgtcggcacagccatggcgggcgcgttggtgcggaaagcggcggactatgtccgaagcaaggatttccgggactacctcatgagtaggacaatcagagatgacttggttgtagtgtggaaaccagtagggaccttgggaagctgccaaaccctttctagctctgggctcagctgtaagaactgctgattcctacaggaacacttggacaatccaatacctaaatgttaaccatcaattaacccagtaaacctgcaagatggaaacgaagatttgttctcacgagtttcacgtgattatttaaatacgcacttctggggcccagtagccaactggggtcttcccattgctgccatcaatgatatgaaaaagtctccagagattatcagtgggcggatgacatttgccctctgttgctattctttgacattcatgagatttgcctacaaggtacagcctcggaactggcttctgtttgcatgccacgcaacaaatgaagtagcccagctcatccagggagggcggcttatcaaacacgagatgactaaaacggcatctgcataacaatggaaaaggaagaacaaggtcttgaagggacagcattgccagctgctgctgagtcacagatttcattataaatagcctccctaaggaaaatacactgaatgctatttttactaaccattctatttttatagaaatagctgagagtttctaaaccaactctctgctgccttacaagtattaaatattttacttctttccataaagagtagctcaaaatatgcaattaatttaatactttctgatgatggttttatctgcagtaatatgtatatcatctattagaatttacttaatgaaaaactgaagagaacaaaatttgtaaccactagcacttaagtactcctgattcttaacattgtctttaatgaccacaagacaaccaacagctggccacgtacttaaaattttgtccccactgtttaaaaatgttacctgtgtatttccatgcagtgtatatattgagatgctgtaacttaatggcaataaatgatttaaatatttgttaa

SEQ ID NO: 318706 - DNA, 1575 bp, Homo sapiens
aggataactaaaaggggtgtttagccaacaagatgtggttcctttcagatttgaaaatattatttccaaattctaaattaatgaaacaatttttcatctttaatgaacaaaagccacaagccttattttatttcagcctctaaaattaaattgattgtggctgctgtcaaacacagacgacttcactttggtatccttggatgagtgtagttgtggaatgaaaaactattggttcatttctttaatattaatataagtttttgctattatgtcaaaagtactttccaatcttaatttcttagtgtctggggtcctgggcattgatttccaagttattttatcttagaatagctcatatgagctgaaaaacaatttattctcttattaagcttctttcttcagaaaagtacccaatttagggtctgcattttaagaattattaacaaatatcttcataaaaatttgggaaaaggagtgtggatagatttaaacataaaaatatggagaatagttctaacagggtttgaattatagcaacaatggattgtgtaagaagtgaatcttatttttatttttaaatgttctaaataggacaatcagagatgacttggttgtagtgtggaaaccagtagggaccttgggaagctgccaaaccctttctagctctgggctcagctgtaagaactgctgattcctacaggaacacttggacaatccaatacctaaatgttaaccatcaattaacccagtaaacctgcaagatggaaacgaagatttgttctcacgagtttcacgtgattatttaaatacgcacttctggggcccagtagccaactggggtcttcccattgctgccatcaatgatatgaaaaagtctccagagattatcagtgggcggatgacatttgccctctgttgctattctttgacattcatgagatttgcctacaaggtacagcctcggaactggcttctgtttgcatgccacgcaacaaatgaagtagcccagctcatccagggagggcggcttatcaaacacgagatgactaaaacggcatctgcataacaatggaaaaggaagaacaaggtcttgaagggacagcattgccagctgctgctgagtcacagatttcattataaatagcctccctaaggaaaatacactgaatgctatttttactaaccattctatttttatagaaatagctgagagtttctaaaccaactctctgctgccttacaagtattaaatattttacttctttccataaagagtagctcaaaatatgcaattaatttaatactttctgatgatggttttatctgcagtaatatgtatatcatctattagaatttacttaatgaaaaactgaagagaacaaaatttgtaaccactagcacttaagtactcctgattcttaacattgtctttaatgaccacaagacaaccaacagctggccacgtacttaaaattttgtccccactgtttaaaaatgttacctgtgtatttccatgcagtgtatatattgagatgctgtaacttaatggcaataaatgatttaaatatttgttaa

SEQ ID NO: 318707 - DNA, 1541 bp, Homo sapiens
atagtgtactgttttgcttccctgaatgatgtactttaatttcacccatttttgagcttcatgtaaatggatgcttttcatatattttctgttatggcttgctttttttctcaacattatgtatttgtgagaatcatccatgttgtgcaccaagctgggtgccttcattttttaactgctatttagtattctatcttcatgattataccacatttatttgtccatgccactatcactggacatctgggtggtttccattgtgcattttcttcacctgcagaaaaggcataaataaatattttcctcacatgcttgttacaccaagcaaacaaagtagtaaacagaaaaatgccttgaaaatactatgtggacacaaatttgagttagttataatggttatagaaatcctcgtgccgaattcggcacgaggcagaggcagggaccactcggggtctggtgtcggcacagccatggcgggcgcgttggtgcggaaagcggcggactatgtccgaagcaaggatttccgggactacctcatgagtagaataactcttcaggctctgtttatagccctgggttcatgcatgataaagtagacagcaacaccaccatacagtgcagaggagtggcaagagagtaaacggaaaaggagatgaaaatagaccaagtggagaaaggcctggtcaaaaaaggaggaaaaggaagatcactatggaataatagagagttgaaaaatgaagtgacacccaataacaggacgggtaagaaaagaatacgcacttctggggcccagtagccaactggggtcttcccattgctgccatcaatgatatgaaaaagtctccagagattatcagtgggcggatgacatttgccctctgttgctattctttgacattcatgagatttgcctacaaggtacagcctcggaactggcttctgtttgcatgccacgcaacaaatgaagtagcccagctcatccagggagggcggcttatcaaacacgagatgactaaaacggcatctgcataacaatggaaaaggaagaacaaggtcttgaagggacagcattgccagctgctgctgagtcacagatttcattataaatagcctccctaaggaaaatacactgaatgctatttttactaaccattctatttttatagaaatagctgagagtttctaaaccaactctctgctgccttacaagtattaaatattttacttctttccataaagagtagctcaaaatatgcaattaatttaatactttctgatgatggttttatctgcagtaatatgtatatcatctattagaatttacttaatgaaaaactgaagagaacaaaatttgtaaccactagcacttaagtactcctgattcttaacattgtctttaatgaccacaagacaaccaacagctggccacgtacttaaaattttgtccccactgtttaaaaatgttacctgtgtatttccatgcagtgtatatattgagatgctgtaacttaatggcaataaatgatttaaatatttgttaa

SEQ ID NO: 318708 - DNA, 2263 bp, Homo sapiens
aggataactaaaaggggtgtttagccaacaagatgtggttcctttcagatttgaaaatattatttccaaattctaaattaatgaaacaatttttcatctttaatgaacaaaagccacaagccttattttatttcagcctctaaaattaaattgattgtggctgctgtcaaacacagacgacttcactttggtatccttggatgagtgtagttgtggaatgaaaaactattggttcatttctttaatattaatataagtttttgctattatgtcaaaagtactttccaatcttaatttcttagtgtctggggtcctgggcattgatttccaagttattttatcttagaatagctcatatgagctgaaaaacaatttattctcttattaagcttctttcttcagaaaagtacccaatttagggtctgcattttaagaattattaacaaatatcttcataaaaatttgggaaaaggagtgtggatagatttaaacataaaaatatggagaatagttctaacagggtttgaattatagcaacaatggattgtgtaagaagtgaatcttatttttatttttaaatgttctaaataggacaatcagagatgacttggttgtagtgtggaaaccagtagggaccttgggaagctgccaaaccctttctagctctgggctcagctgtaagaactgctgattcctacaggaacacttggacaatccaatacctaaatgttaaccatcaattaacccagtaaacctgcaagatggaaacgaagatttgttctcacgagtttcacgtgattatttaaatacgcacttctggggcccagtagccaactggggtcttcccattgctgccatcaatgatatgaaaaagtctccagagattatcagtgggcggatgacatttggtaagaatgcagatttggataattgggaggactttcaacatagtagagctcctgcttgcatttcaagattgtagcactagatgttacagtcactattagaaagtcacatacagaatgtgatggcatggaagagtgttacttctctatgtcagtaagaaacaagattaattagaaatatttatctaggaagtagtaacatcttatttgcctttcagatttagcacactgaactgaagactgtgtcatctgaatcattctaatagtcactttaatgatttatattgtgaacttttttgggggaaactgtcattaaactgacttgaaaccctgatatttgaacataaaactattgtggagggaataaataacaattctttcagataatgaatggattataagcaactccaggagacaaaaaaagtgtctagaacaaatttcagcctactcttgctcggaaatatgttccttaaatgtttaaataattaacaaaaatgcatagcagtacagtaaatttttttatgagcttcctattgatacaggcatttaagtaacaacttttatctgtcaaaggctttcgcagaagaggttcttttttgatcagggcaatggaactgttcatctctgtggtcctatcaaccctctcagttttctaagttattgattgtctttgctctgctatttttggcagccctctgttgctattctttgacattcatgagatttgcctacaaggtacagcctcggaactggcttctgtttgcatgccacgcaacaaatgaagtagcccagctcatccagggagggcggcttatcaaacacgagatgactaaaacggcatctgcataacaatggaaaaggaagaacaaggtcttgaagggacagcattgccagctgctgctgagtcacagatttcattataaatagcctccctaaggaaaatacactgaatgctatttttactaaccattctatttttatagaaatagctgagagtttctaaaccaactctctgctgccttacaagtattaaatattttacttctttccataaagagtagctcaaaatatgcaattaatttaatactttctgatgatggttttatctgcagtaatatgtatatcatctattagaatttacttaatgaaaaactgaagagaacaaaatttgtaaccactagcacttaagtactcctgattcttaacattgtctttaatgaccacaagacaaccaacagctggccacgtacttaaaattttgtccccactgtttaaaaatgttacctgtgtatttccatgcagtgtatatattgagatgctgtaacttaatggcaataaatgatttaaatatttgttaa

SEQ ID NO: 318709 - DNA, 906 bp, Homo sapiens
gtcgtgaggcgggccttcgggctggctcgccgtcggctgccggggggttggcctgggtgtcattggctctgggaagcggcagcagaggcagggaccactcggggtctggtgtcggcacagccatggcgggcgcgttggtgcggaaagcggcggactatgtccgaagcaaggatttccgggactacctcatgagtacgcacttctggggcccagtagccaactggggtcttcccattgctgccatcaatgatatgaaaaagtctccagagattatcagtgggcggatgacatttgccctctgttgctattctttgacattcatgagatttgcctacaaggtacagcctcggaactggcttctgtttgcatgccacgcaacaaatgaagtagcccagctcatccagggagggcggcttatcaaacacgaggacagcattgccagctgctgctgagtcacagatttcattataaatagcctccctaaggaaaatacactgaatgctatttttactaaccattctatttttatagaaatagctgagagtttctaaaccaactctctgctgccttacaagtattaaatattttacttctttccataaagagtagctcaaaatatgcaattaatttaatactttctgatgatggttttatctgcagtaatatgtatatcatctattagaatttacttaatgaaaaactgaagagaacaaaatttgtaaccactagcacttaagtactcctgattcttaacattgtctttaatgaccacaagacaaccaacagctggccacgtacttaaaattttgtccccactgtttaaaaatgttacctgtgtatttccatgcagtgtatatattgagatgctgtaacttaatggcaataaatgatttaaatatttgttaa

SEQ ID NO: 318710 - DNA, 406 bp, Homo sapiens
tttcaccatgttggtcaggctggtctcaaactcctgacctcatgatccgcctgcctcagcctcccaaagtactgggattacaggtgtgagccaccatgcccggcccatacttaaacttttaataacatcacttagccaggaatctcccaaggctactttaggtttagatttattccattgtccatttctgctttagccccacctatgaaagaagacacattcacaaccagtggtagagaaactgtggtttatatgcccctcttagaataactcttcaggctctgtttatagccctgggttcatgcatgataaagtagacagcaacaccaccatacagtgcagaggagtggcaagagagtaaacggaaaaggagatgaaaatagaccaagtggagaaaggcctggtc

SEQ ID NO: 318711 - DNA, 961 bp, Homo sapiens
gtcgtgaggcgggccttcgggctggctcgccgtcggctgccggggggttggcctgggtgtcattggctctgggaagcggcagcagaggcagggaccactcggggtctggtgtcggcacagccatggcgggcgcgttggtgcggaaagcggcggactatgtccgaagcaaggatttccgggactacctcatgagtacgcacttctggggcccagtagccaactggggtcttcccattgctgccatcaatgatatgaaaaagtctccagagattatcagtgggcggatgacatttgccctctgttgctattctttgacattcatgagatttgcctacaaggtacagcctcggaactggcttctgtttgcatgccacgcaacaaatgaagtagcccagctcatccagggagggcggcttatcaaacacgagatgactaaaacggcatctgcataacaatggaaaaggaagaacaaggtcttgaagggacagcattgccagctgctgctgagtcacagatttcattataaatagcctccctaaggaaaatacactgaatgctatttttactaaccattctatttttatagaaatagctgagagtttctaaaccaactctctgctgccttacaagtattaaatattttacttctttccataaagagtagctcaaaatatgcaattaatttaatactttctgatgatggttttatctgcagtaatatgtatatcatctattagaatttacttaatgaaaaactgaagagaacaaaatttgtaaccactagcacttaagtactcctgattcttaacattgtctttaatgaccacaagacaaccaacagctggccacgtacttaaaattttgtccccactgtttaaaaatgttacctgtgtatttccatgcagtgtatatattgagatgctgtaacttaatggcaataaatgatttaaatatttgttaa

SEQ ID NO: 318712 - DNA, 1309 bp, Homo sapiens
atagtgtactgttttgcttccctgaatgatgtactttaatttcacccatttttgagcttcatgtaaatggatgcttttcatatattttctgttatggcttgctttttttctcaacattatgtatttgtgagaatcatccatgttgtgcaccaagctgggtgccttcattttttaactgctatttagtattctatcttcatgattataccacatttatttgtccatgccactatcactggacatctgggtggtttccattgtgcattttcttcacctgcagaaaaggcataaataaatattttcctcacatgcttgttacaccaagcaaacaaagtagtaaacagaaaaatgccttgaaaatactatgtggacacaaatttgagttagttataatggttatagaaatcctcgtgccgaattcggcacgaggcagaggcagggaccactcggggtctggtgtcggcacagccatggcgggcgcgttggtgcggaaagcggcggactatgtccgaagcaaggatttccgggactacctcatgagtacgcacttctggggcccagtagccaactggggtcttcccattgctgccatcaatgatatgaaaaagtctccagagattatcagtgggcggatgacatttgccctctgttgctattctttgacattcatgagatttgcctacaaggtacagcctcggaactggcttctgtttgcatgccacgcaacaaatgaagtagcccagctcatccagggagggcggcttatcaaacacgagatgactaaaacggcatctgcataacaatggaaaaggaagaacaaggtcttgaagggacagcattgccagctgctgctgagtcacagatttcattataaatagcctccctaaggaaaatacactgaatgctatttttactaaccattctatttttatagaaatagctgagagtttctaaaccaactctctgctgccttacaagtattaaatattttacttctttccataaagagtagctcaaaatatgcaattaatttaatactttctgatgatggttttatctgcagtaatatgtatatcatctattagaatttacttaatgaaaaactgaagagaacaaaatttgtaaccactagcacttaagtactcctgattcttaacattgtctttaatgaccacaagacaaccaacagctggccacgtacttaaaattttgtccccactgtttaaaaatgttacctgtgtatttccatgcagtgtatatattgagatgctgtaacttaatggcaataaatgatttaaatatttgttaa

SEQ ID NO: 318713 - DNA, 1007 bp, Homo sapiens
gtcgtgaggcgggccttcgggctggctcgccgtcggctgccggggggttggcctgggtgtcattggctctgggaagcggcagcagaggcagggaccactcggggtctggtgtcggcacagccatggcgggcgcgttggtgcggaaagcggcggactatgtccgaagcaaggatttccgggactacctcatgagtacgcacttctggggcccagtagccaactggggtcttcccattgctgccatcaatgatatgaaaaagtctccagagattatcagtgggcggatgacatttgccctctgttgctattctttgacattcatgagatttgcctacaaggtacagcctcggaactggcttctgtttgcatgccacgcaacaaatgaagtagcccagctcatccagggagggcggcttatcaaacacgagatgactaaaacggcatctgcataacaatggaaaaggaagaacaaggtcttgaagggacagcattgccagctgctgctgagtcacagatttcattataaatagcctccctaaggaaaatacactgaatgctatttttactaaccattctatttttatagaaatagctgagagtttctaaaccaactctctgctgccttacaagtattaaatattttacttctttccataaagagtagctcaaaatatgcaattaatttaatactttctgatgatggttttatctgcagtaatatgtatatcatctattagaatttacttaatgaaaaactgaagagaacaaaatttgtaaccactagcacttaagtactcctgattcttaacattgtctttaatgaccacaagacaaccaacagctggccacgtacttaaaattttgtccccactgtttaaaaatgttacctgtgtatttccatgcagtgtatatattgagatgctgtaacttaatggcaataaatgatttaaatatttgttaatatttgttaaatgagtatgattaaatatcttgctgcattccctagg

SEQ ID NO: 318714 - DNA, 1608 bp, Homo sapiens
gtcgtgaggcgggccttcgggctggctcgccgtcggctgccggggggttggcctgggtgtcattggctctgggaagcggcagcagaggcagggaccactcggggtctggtgtcggcacagccatggcgggcgcgttggtgcggaaagcggcggactatgtccgaagcaaggatttccgggactacctcatgagtacgcacttctggggcccagtagccaactggggtcttcccattgctgccatcaatgatatgaaaaagtctccagagattatcagtgggcggatgacatttgccctctgttgctattctttgacattcatgagatttgcctacaaggtacagcctcggaactggcttctgtttgcatgccacgcaacaaatgaagtagcccagctcatccagggagggcggcttatcaaacacgagatgactaaaacggcatctgcataacaatggaaaaggaagaacaaggtcttgaagggacagcattgccagctgctgctgagtcacagatttcattataaatagcctccctaaggaaaatacactgaatgctatttttactaaccattctatttttatagaaatagctgagagtttctaaaccaactctctgctgccttacaagtattaaatattttacttctttccataaagagtagctcaaaatatgcaattaatttaatactttctgatgatggttttatctgcagtaatatgtatatcatctattagaatttacttaatgaaaaactgaagagaacaaaatttgtaaccactagcacttaagtactcctgattcttaacattgtctttaatgaccacaagacaaccaacagctggccacgtacttaaaattttgtccccactgtttaaaaatgttacctgtgtatttccatgcagtgtatatattgagatgctgtaacttaatggcaataaatgatttaaatatttgttaaacaaaaagacaaaaaaaaaagaaaaaaaaactatgtgttcgggcaccctgcgccccctggaaacgttccacacacaactgcataggccacaggggacacaaacgcaaaggcaaccgtgccaaacagtgcccacagaaacacgggccaagaaaagagcaagagaatacaccccacaaaacaacgcgccgcggaaacaccgagcctctctagaaaaacccagagggcatccagaagcacaaaggggaccatcacacggaccaccacacaaccggaaattacaaatagccgcagcccacggggggcacagcgcaagaacgaggaataatcaacaacaacaaacaacaaagcagaacacgagaagcaacaccacagagagcaaacgagcacgaccagaacacgaagcagcaacacacccagcagtacagagaaaccacaaacaacaaggcaaaagacaagcgggcaagcgcgaagcaacagcacacacacacacaaaagagcgacgagagaccagagccagactagacgtaccaacactacagggaacactacacagctacgacaccacacagaagacaaatcctactgacattacctaagcaacacgcccaccacacatatcaacactaacacaacacagagtcctagac

SEQ ID NO: 318715 - DNA, 1259 bp, Homo sapiens
atagtgtactgttttgcttccctgaatgatgtactttaatttcacccatttttgagcttcatgtaaatggatgcttttcatatattttctgttatggcttgctttttttctcaacattatgtatttgtgagaatcatccatgttgtgcaccaagctgggtgccttcattttttaactgctatttagtattctatcttcatgattataccacatttatttgtccatgccactatcactggacatctgggtggtttccattgtgcattttcttcacctgcagaaaaggcataaataaatattttcctcacatgcttgttacaccaagcaaacaaagtagtaaacagaaaaatgccttgaaaatactatgtggacacaaatttgagttagttataatggttatagaaatcctcgtgccgaattcggcacgaggcagaggcagggaccactcggggtctggtgtcggcacagccatggcgggcgcgttggtgcggaaagcggcggactatgtccgaagcaaggatttccgggactacctcatgagtacgcacttctggggcccagtagccaactggggtcttcccattgctgccatcaatgatatgaaaaagtctccagagattatcagtgggcggatgacatttgcctcggaactggcttctgtttgcatgccacgcaacaaatgaagtagcccagctcatccagggagggcggcttatcaaacacgagatgactaaaacggcatctgcataacaatggaaaaggaagaacaaggtcttgaagggacagcattgccagctgctgctgagtcacagatttcattataaatagcctccctaaggaaaatacactgaatgctatttttactaaccattctatttttatagaaatagctgagagtttctaaaccaactctctgctgccttacaagtattaaatattttacttctttccataaagagtagctcaaaatatgcaattaatttaatactttctgatgatggttttatctgcagtaatatgtatatcatctattagaatttacttaatgaaaaactgaagagaacaaaatttgtaaccactagcacttaagtactcctgattcttaacattgtctttaatgaccacaagacaaccaacagctggccacgtacttaaaattttgtccccactgtttaaaaatgttacctgtgtatttccatgcagtgtatatattgagatgctgtaacttaatggcaataaatgatttaaatatttgttaa

SEQ ID NO: 318716 - DNA, 602 bp, Homo sapiens
atagtgtactgttttgcttccctgaatgatgtactttaatttcacccatttttgagcttcatgtaaatggatgcttttcatatattttctgttatggcttgctttttttctcaacattatgtatttgtgagaatcatccatgttgtgcaccaagctgggtgccttcattttttaactgctatttagtattctatcttcatgattataccacatttatttgtccatgccactatcactggacatctgggtggtttccattgtgcattttcttcacctgcagaaaaggcataaataaatattttcctcacatgcttgttacaccaagcaaacaaagtagtaaacagaaaaatgccttgaaaatactatgtggacacaaatttgagttagttataatggttatagaaatcctcgtgccgaattcggcacgaggcagaggcagggaccactcggggtctggtgtcggcacagccatggcgggcgcgttggtgcggaaagcggcggactatgtccgaagcaaggatttccgggactacctcatgagccaccgcactcgggtctggtgtcgtcacagccatggcggcgcgttgtcgaaagcggcgact

SEQ ID NO: 318717 - DNA, 1549 bp, Homo sapiens
ggcacgaggccgaggcggcggggctcgcgcgggtggagccgcctcggcgttcgagcggggtgggggctgcccggttgagatttcccggcgggtcccggcctctgcgtgcacgcgcctgcgtgctcgcgctcgcggttctggcgctgctggaaaggaataatgctgacagcatgtctgcacattccatgctctgtgaacgaatcgccatagccaaggaactgatcaagagagcagaatcactttctagatcaagaaaaggtggcatagaaggtggtgcaaagctgtgcagcaaattgaaggcagaattaaaattcttgcagaaagtagaagctgggaaagtagctattaaagagtctcatttacagagcactaacctaacacacctgagagccattgtggaatcagcagaaaacctggaagaagttgttagtgttcttcatgtctttggttatacagataccttaggagaaaagcaaacccttgtggtagatgtagttgcaaatggtggtcatacttgggtgaaagccattggccggaaggctgaagctcttcataacatctggctgggcaggggccaatatggtgacaaaagcatcattgagcaggctgaagacttcctccaggccagtcaccagcagccagtgcagtatagcaaccctcacatcatctttgcattttacaacagtgtctccagccccatggcagagaagctgaaagaaatgggcatatctgtgagaggagacatagtagcagtcaacgctctgttagatcaccctgaagagcttcaaccaagtgagagtgaatcagatgatgagggccctgaacttttgcaggtgaccagagttgaccgagaaaatatactagcaagtgttgcgtttccaacagaaattaaggtcgatgtgtgcaaaagagtaaatctggacattactactttaatcacatatgtatctgccctcagctatggaggctgccactttattttcaaagagaaagtgctcacagaacaagcagagcaagagaggaaagagcaggttctacctcagctggaggcctttatgaaggacaaggagttgtttgcttgtgaatctgctgtcaaggactttcagtctattttagataccttaggaggacctggggagagagagagggccactgtgttaattaagcgaattaatgtggtaccagaccagccttctgagcgtgccttgagactagtggccagttcaaaaattaatagccgctcattaacaatttttgggacgggagacaccctaaaagccatcacaatgactgctaatagtggttttgtcagagctgcaaacaaccagggtgttaaatttagtgtgtttatccatcagcccagagcacttactgagagtaaagaggctctagccacccccttaccaaaagactacacaactgacagtgaacactaaagataccctttaaatatttttgtggaagtaagttatttataccaaaggctgggtcttcccatctaaactggtgggaaaaaaggtctatagtaaaagtaaaactgagaactctt

SEQ ID NO: 318718 - DNA, 805 bp, Homo sapiens
ggcacgaggccgaggcggcggggctcgcgcgggtggagccgcctcggcgttcgagcggggtgggggctgcccggttgagatttcccggcgggtcccggcctctgcgtgcacgcgcctgcgtgctcgcgctcgcggttctggcgctgctggaaaggaataatgctgacagcatgtctgcacattccatgctctgtgaacgaatcgccatagccaaggaactgatcaagagagcagaatcactttctagatcaagaaaaggtggcatagaaggtggtgcaaagctgtgcagcaaattgaaggcagaattaaaattcttgcagaaagtagaagctgggaaagtagctattaaagagtctcatttacagagcactaacctaacacacctgagagccattgtggaatcagcagaaaacctggaagaagttgttagtgttcttcatgtctttggttatacagataccttaggagaaaaactacacaactgacagtgaacactaaagataccctttaaatatttttgtggaagtaagttatttataccaaaggctgggtcttcccatctaaactggtgggaaaaaaggtctatagtaaaagtaaaactgagaactcttaaaccagtagagtttctttgtctctcatctaaagtatataacctcccaaagtagaaaccgaaatacgtctatataaagctttcagctgtattgtaatactttgattcgatagggctacaactcccctactgctaaccacatttcatggaatatggctacattgcatcttgcattaaatatctggagaaaattca

SEQ ID NO: 318719 - DNA, 1894 bp, Homo sapiens
ggcacgaggccgaggcggcggggctcgcgcgggtggagccgcctcggcgttcgagcggggtgggggctgcccggttgagatttcccggcgggtcccggcctctgcgtgcacgcgcctgcgtgctcgcgctcgcggttctggcgctgctggaaaggaataatgctgacagcatgtctgcacattccatgctctgtgaacgaatcgccatagccaaggaactgatcaagagagcagaatcactttctagatcaagaaaaggtggcatagaaggtggtgcaaagctgtgcagcaaattgaaggcagaattaaaattcttgcagaaagtagaagctgggaaagtagctattaaagagtctcatttacagagcactaacctaacacacctgagagccattgtggaatcagcagaaaacctggaagaagttgttagtgttcttcatgtctttggttatacagataccttaggagaaaagcaaacccttgtggtagatgtagttgcaaatggtggtcatacttgggtgaaagccattggccggaaggctgaagctcttcataacatctggctgggcaggggccaatatggtgacaaaagcatcattgagcaggctgaagacttcctccaggccagtcaccagcagccagtgcagtatagcaaccctcacatcatctttgcattttacaacagtgtctccagccccatggcagagaagctgaaagaaatgggcatatctgtgagaggagacatagtagcagtcaacgctctgttagatcaccctgaagagcttcaaccaagtgagagtgaatcagatgatgagggccctgaacttttgcaggtgaccagagttgaccgagaaaatatactagcaagtgttgcgtttccaacagaaattaaggtcgatgtgtgcaaaagagtaaatctggacattactactttaatcacatatgtatctgccctcagctatggaggctgccactttattttcaaagagaaagtgctcacagaacaagcagagcaagagaggaaagagcaggttctacctcagctggaggcctttatgaaggacaaggagttgtttgcttgtgaatctgctgtcaaggactttcagtctattttagataccttaggaggacctggggagagagagagggccactgtgttaattaagcgaattaatgtggtaccagaccagccttctgagcgtgccttgagactagtggccagttcaaaaattaatagccgctcattaacaatttttgggacgggagacaccctaaaagccatcacaatgactgctaatagtggttttgtcagagctgcaaacaaccagggtgttaaatttagtgtgtttatccatcagcccagagcacttactgagagtaaagaggctctagccacccccttaccaaaagactacacaactgacagtgaacactaaagataccctttaaatatttttgtggaagtaagttatttataccaaaggctgggtcttcccatctaaactggtgggaaaaaaggtctatagtaaaagtaaaactgagaactcttaaaccagtagagtttctttgtctctcatctaaagtatataacctcccaaagtagaaaaagcacaagagagaagcttatctatcaaactgtctgcattagtgcaattaagaaccgaaatacgtctatataaagctttcagctgtattgtaatactttgattcgatagggctacaactcccctactgctaaccacatttcatggaatatggctacattgcatcttgcattaaatatctggagaaaattcaagcctgtttttcattgtattgctttatatggtttaggctgggaggtagtcgttggtaatcaattttagattctaaggttaaccattaatgaaaaact

SEQ ID NO: 318720 - DNA, 711 bp, Homo sapiens
gttttcgacatttttgtcgcctttattaaaatttctcagcagttaaacaggccgctgatagacataaaggaattatttatatagcagattgcccaactcttgcattgtatcctaacctaggaccatgctgtgtccccatggctttcaagctgaagaaatgaaggtctaaagtgtgtcagacgtacctaaagaagagttcaaaagtgtagctgccatcctttccttagctatcagaggaagcagtcactccagaatgagacatacacaagcccaggttcatagactcaccctccataagctgtgttgctagattgaagtttttaatcaccagtgaagaattgattgtcataattttaggagactactgaagtttgccttgtttctttccctaggaaaggaataatgctgacagcatgtctgcacattccatgctctgtgaacgaatcgccatagccaaggaactgatcaagagagcagaatcactttctagatcaagaaaaggtggcatagaaggtggtgcaaagctgtgcagcaaattgaaggcagaattaaaattcttgcagaaagtagaagctgggaaagtagctattaaagagtctcatttacagagcactaacctaacacacctgagagccattgtggaatcagcagaaaacctggaagaagttgttagtgttcttcatgtctttggttatacagataccttaggag

SEQ ID NO: 318721 - DNA, 1797 bp, Homo sapiens
ggcacgaggccgaggcggcggggctcgcgcgggtggagccgcctcggcgttcgagcggggtgggggctgcccggttgagatttcccggcgggtcccggcctctgcgtgcacgcgcctgcgtgctcgcgctcgcggttctggcgctgctggaaaggaataatgctgacagcatgtctgcacattccatgctctgtgaacgaatcgccatagccaaggaactgatcaagagagcagaatcactttctagatcaagaaaaggtggcatagaaggtggtgcaaagctgtgcagcaaattgaaggcagaattaaaattcttgcagaaagtagaagctgggaaagtagctattaaagagtctcatttacagagcactaacctaacacacctgagagccattgtggaatcagcagaaaacctggaagaagttgttagtgttcttcatgtctttggttatacagataccttaggagaaaagcaaacccttgtggtagatgtagttgcaaatggtggtcatacttgggtgaaagccattggccggaaggctgaagctcttcataacatctggctgggcaggggccaatatggtgacaaaagcatcattgagcaggctgaagacttcctccaggccagtcaccagcagccagtgcagtatagcaaccctcacatcatctttgcattttacaacagtgtctccagccccatggcagagaagctgaaagaaatgggcatatctgtgagaggagacatagtagcagtcaacgctctgttagatcaccctgaagagcttcaaccaagtgagagtgaatcagatgatgagggccctgaacttttgcaggtgaccagagttgaccgagaaaatatactagcaagtgttgcgtttccaacagaaattaaggtcgatgtgtgcaaaagagtaaatctggacattactactttaatcacatatgtatctgccctcagctatggaggctgccactttattttcaaagagaaagtgctcacagaacaagcagagcaagagaggaaagagcaggttctacctcagctggaggcctttatgaaggacaaggagttgtttgcttgtgaatctgctgtcaaggactttcagtctattttagataccttaggaggacctggggagagagagagggccactgtgttaattaagcgaattaatgtggtaccagaccagccttctgagcgtgccttgagactagtggccagttcaaaaattaatagccgctcattaacaatttttgggacgggagacaccctaaaagccatcacaatgactgctaatagtggttttgtcagagctgcaaacaaccagggtgttaaatttagtgtgtttatccatcagcccagagcacttactgagagtaaagaggctctagccacccccttaccaaaagactacacaactgacagtgaacactaaagataccctttaaatatttttgtggaagtaagttatttataccaaaggctgggtcttcccatctaaactggtgggaaaaaaggtctatagtaaaagtaaaactgagaactcttaaaccagtagagtttctttgtctctcatctaaagtatataacctcccaaagtagaaaaagcacaagagagaagcttatctatcaaactgtctgcattagtgcaattaagaaccgaaatacgtctatataaagctttcagctgtattgtaatactttgattcgatagggctacaactcccctactgctaaccacatttcatggaatatggctacattgcatcttgcattaaatatctggagaaaattca

SEQ ID NO: 318722 - DNA, 1802 bp, Homo sapiens
gaccatgctgtgtccccatggctttcaagctgaagaaatgaaggtctaaagtgtgtcagacgtacctaaagaagagttcaaaagtgtagctgccatcctttccttagctatcagaggaagcagtcactccagaatgagacatacacaagcccaggaaaggaataatgctgacagcatgtctgcacattccatgctctgtgaacgaatcgccatagccaaggaactgatcaagagagcagaatcactttctagatcaagaaaaggtggcatagaaggtggtgcaaagctgtgcagcaaattgaaggcagaattaaaattcttgcagaaagtagaagctgggaaagtagctattaaagagtctcatttacagagcactaacctaacacacctgagagccattgtggaatcagcagaaaacctggaagaagttgttagtgttcttcatgtctttggttatacagataccttaggagaaaagcaaacccttgtggtagatgtagttgcaaatggtggtcatacttgggtgaaagccattggccggaaggctgaagctcttcataacatctggctgggcaggggccaatatggtgacaaaagcatcattgagcaggctgaagacttcctccaggccagtcaccagcagccagtgcagtatagcaaccctcacatcatctttgcattttacaacagtgtctccagccccatggcagagaagctgaaagaaatgggcatatctgtgagaggagacatagtagcagtcaacgctctgttagatcaccctgaagagcttcaaccaagtgagagtgaatcagatgatgagggccctgaacttttgcaggtgaccagagttgaccgagaaaatatactagcaagtgttgcgtttccaacagaaattaaggtcgatgtgtgcaaaagagtaaatctggacattactactttaatcacatatgtatctgccctcagctatggaggctgccactttattttcaaagagaaagtgctcacagaacaagcagagcaagagaggaaagagcaggttctacctcagctggaggcctttatgaaggacaaggagttgtttgcttgtgaatctgctgtcaaggactttcagtctattttagataccttaggaggacctggggagagagagagggccactgtgttaattaagcgaattaatgtggtaccagaccagccttctgagcgtgccttgagactagtggccagttcaaaaattaatagccgctcattaacaatttttgggacgggagacaccctaaaagccatcacaatgactgctaatagtggttttgtcagagctgcaaacaaccagggtgttaaatttagtgtgtttatccatcagcccagagcacttactgagagtaaagaggctctagccacccccttaccaaaagactacacaactgacagtgaacactaaagataccctttaaatatttttgtggaagtaagttatttataccaaaggctgggtcttcccatctaaactggtgggaaaaaaggtctatagtaaaagtaaaactgagaactcttaaaccagtagagtttctttgtctctcatctaaagtatataacctcccaaagtagaaaaagcacaagagagaagcttatctatcaaactgtctgcattagtgcaattaagaaccgaaatacgtctatataaagctttcagctgtattgtaatactttgattcgatagggctacaactcccctactgctaaccacatttcatggaatatggctacattgcatcttgcattaaatatctggagaaaattca

SEQ ID NO: 318723 - DNA, 990 bp, Homo sapiens
agtggtcaaaactggcacaacacaggatttatactggagagcaacctcacaaatgtaatgaaagtggtaaggctttttatcaaatgtccttgtctttggggtcatgagaaaattcatacagaatctattaaaaatgtactaaacatggaaagacctttaagcaacagtgatgtgatgaaggtggtagttttttaaatgaactcccataagagtctacacaccatagaactcataccaggaatcacaaagtctctaaatttccaaagttaactggaaatattacaaactgcagaataattccaggccaaaatatgttaaattcataacatgatgtatatcaaaggaaaaaaggacatgttggaaatgacacattatcttcagtgtataaaatattcatttatgtgaagtttcttggaaaggctacactactattactggtttccgtctgatgtttgagatctgttgattttatgcttttcttacaggcctttcattatgatctttgggaaggaatcaataaaatgatagggcctacttcattaggtgtggttcattcctattcatgctccctggaagaacaagaatgctgaattttgaaatttaatattgtatgaattagcatcagggagaggtggagaaaaatacaaaactaaaagtcatgcttattgtgttcagtgtgcccttctccagagggccactggcttataggaaaggattgctgctctaccagttgaccaggagatggcacgccaggacattaagacactggagttttgtttcgttttttttttttttgatgagtatcgcaccactgctcgccagcctgggcaacagagtgagactctgcctcaaaaaaaaaccaaaccaaaccaaagaaccagaatagcatgtgcacatatacacagacgtttcacaactggcattatgttttgctactgttttatttacaatgtatcacaagttttatgctttaataaaatttaatcataa

SEQ ID NO: 318724 - DNA, 956 bp, Homo sapiens
agtggtcaaaactggcacaacacaggatttatactggagagcaacctcacaaatgtaatgaaagtggtaaggctttttatcaaatgtccttgtctttggggtcatgagaaaattcatacagaatctattaaaaatgtactaaacatggaaagacctttaagcaacagtgatgtgatgaaggtggtagttttttaaatgaactcccataagagtctacacaccatagaactcataccaggaatcacaaagtctctaaatttccaaagttaactggaaatattacaaactgcagaataattccaggccaaaatatgttaaattcataacatgatgtatatcaaaggaaaaaaggacatgttggaaatgacacattatcttcagtgtataaaatattcatttatgtgaagtttcttggaaaggctacactactattactggtttccgtctgatgtttgagatctgttgattttatgcttttcttacaggcctttcattatgatctttgggaaggaatcaataaaatgatagggcctacttcattaggtgtggttcattcctattcatgctccctggaagaacaagaatgctgaattttgaaatttaatattgtatgaattagcatcagggagaggtggagaaaaatacaaaactaaaagtcatgcttattgtgttcagtgtgcccttctccagagggccactggcttataggaaaggattgctgctctaccagttgaccaggagatggcacgccaggacattaagacactggagttttgtttcgttttttttttttttgatgagttgagactctgcctcaaaaaaaaaccaaaccaaaccaaagaaccagaatagcatgtgcacatatacacagacgtttcacaactggcattatgttttgctactgttttatttacaatgtatcacaagttttatgctttaataaaatttaatcataa

SEQ ID NO: 318725 - DNA, 1013 bp, Homo sapiens
agtggtcaaaactggcacaacacaggatttatactggagagcaacctcacaaatgtaatgaaagtggtaaggctttttatcaaatgtccttgtctttggggtcatgagaaaattcatacagaatctattaaaaatgtactaaacatggaaagacctttaagcaacagtgatgtgatgaaggtggtagttttttaaatgaactcccataagagtctacacaccatagaactcataccaggaatcacaaagtctctaaatttccaaagttaactggaaatattacaaactgcagaataattccaggccaaaatatgttaaattcataacatgatgtatatcaaaggaaaaaaggacatgttggaaatgacacattatcttcagtgtataaaatattcatttatgtgaagtttcttggaaaggctacactactattactggtttccgtctgatgtttgagatctgttgattttatgcttttcttacaggcctttcattatgatctttgggaaggaatcaataaaatgatagggcctacttcattaggtgtggttcattcctattcatgctccctggaagaacaagaatgctgaattttgaaatttaatattgtatgaattagcatcagggagaggtggagaaaaatacaaaactaaaagtcatgcttattgtgttcagtgtgcccttctccagagggccactggcttataggaaaggattgctgctctaccagttgaccaggagatggcacgccaggacattaagacactggagttttgtttcgttttttttttttttgatgagtggagtctcgctctcttgacaggcatcgcaccactgctcgccagcctgggcaacagagtgagactctgcctcaaaaaaaaaccaaaccaaaccaaagaaccagaatagcatgtgcacatatacacagacgtttcacaactggcattatgttttgctactgttttatttacaatgtatcacaagttttatgctttaataaaatttaatcataa

SEQ ID NO: 318726 - DNA, 945 bp, Homo sapiens
tggtagaagtaatgtaggggaaatggcgattatctttttttaaaagcaatagctgttgtatatcaatgataaatgaaaaattagttattcttgtaaattgaagaaagaatggttatcatagagggtagttcaagtgattctcctgcctcagcctcccgagtagctgggactacaggcgtgtgccaccacccccagctaacttttgtatttttagtagagacagggtttcgccatgttggccaggatggtctcgatctcttgacctcatgatccgcccgcctccgccttccaaagtgctgggattacaggcgtgagccagtgtgcccggccgacactgggctttttatgagagtgacagattactaggacctcattatgtggtagaagtaatgtaggggaaatggcgattatctttttttaaaagcaatagctgttgtatatcaatgataaatgaaaaattagttattcttgtaaattgaagaaagaatggttatcatagagggtagttcaagtaaaagaaccagggctgggtgtggtggctcacgttctgtaatccctgtactttgggaggccaaggcagatggatctcttgaggccaggagttcgagaccagcctgaccaacatggcaaaaccgtgtctctacaaaaaatacaaaaattagccggacatcgtggtagatgcctgtaatctcagatattcaggagaccgaggggaaaatcacttgaacccgggagacggaggttgcagtgagctgagatcgcaccactgctcgccagcctgggcaacagagtgagactctgcctcaaaaaaaaaccaaaccaaaccaaagaaccagaatagcatgtgcacatatacacagacgtttcacaactggcattatgttttgctactgttttatttacaatgtatcacaagttttatgctttaataaaatttaatcataa

SEQ ID NO: 318727 - DNA, 1011 bp, Homo sapiens
ttatcagagcttttaacaaatagtgctcccagctgttgctttcagcaaaggagatctccaattaaagagagtaatcatgttctctctactttcgagactatattccttgttaaattgacttctaggtttcatttcccaaggaatctaacaataataacagaagctaaggatgaacttgaattttaagtctatttcaacaaaaggattatattcatttactaatttgtccagtaaacaggaatgcttaagatgtatacttagatttaataatgtgactgaagactgtgtctctgtctctttatttttagcttagctttgtgtgaaaaaataattaatactgatcttctaatttaatactctctttgtgtaacattgtatgtttcttcttgtaatgatcacaagcaaacatctcttatacatagtgttttcaatctatttgttagccaagttataaaactgtagcctagtcaaatctatggcaaagcaatttgatgatattttgtaaaacaatataatttatttcttcctccccctttctcctttcagctaaatttcaacagtgccacttctgcattctctgttctcaaggcacctggatggtgaccctgggccgtcctctcctcctcttcatgcatgtttctgagtgcatgaagttgtgaaggtcctacatgtaatgcatatgtgatgcatcatcttatcatatattccttcctatacattgtttacacttcaactacggggatgttccacacaaacttaatacgggggcaacaaaggggggaattgaccaaagacaaaaagttcccagtttccgtgtccaggcctcatcagatctcggagcagatttacgacttgaacttgtcctgagcacggtacaaagtgtactgaagaccgggcgacgggggggacggacccaatgagaccaaaacctgcgcgggaccgcaggagtcaaataggacacagggagtggacctagcacacgaggttcaccggtagtcgagcaacagcgag

SEQ ID NO: 318728 - DNA, 6293 bp, Homo sapiens
  misc_feature (6115)..(6115): n is a, c, g, or t
tctctgtgcgggtttaaatgggtaactgtgacttctcgcctcattcacccaaacctccagtcttctcccccgcacatcctcctccacccacctggtttctccctagactggtgtgctcgtgtgtgcaaccaaaggagggagtgcgagagatccacgaagggacaggcttggagtcgctagagggaggtgtgggaccagcgaggagggggcttcgccagggagggggtgctggcaggcggagggagcggcgggaggaggcgccggaggaggagacggaggcctggggacggcagaagaggcttcgcctgagccgagcgctctttctctcgccgcgccgtcttgaagccgcgcgggctcgtgagcagcgcgaggccgccaaggtgcctcgcttcgccggagccgctgccgcccgccggagggaagccggcctcgggcgcgcacgctcgtcggagccccggcgcgccccgcgcctgagcctgctgacagcggccgctgggctcaggctgtccgctctgggctccgcggcctcggccccgctgcactccacctccgccccctcggactccctcccctctgcttctactcctcctgctccagtgcggatcgtttcgcaactgcttgccactcgtcccgtgcctggctgtttttccatttcccggccccctcttcttgagtactttaccccctgcatttggggacagggactggaaaaggggcgggtggagcgtccagtggagaagaaggaagcgaggcccgcaggaggaggaggatcggcggactgtggggaggagaccccacgccaccctttctggtcatctcccctcccgccccgcccctgcgcacactccctcgcgggcgagctactttcggaccaggaaagtaagagcggccctgggtgacagcgccgcggggccagtcccggggttagccgcgcgtctgctcgcttctggtccgtcgcgctcccagccagggcacagcccggaccgaggatggcttcgaccacaacctgcaccaggttcacggacgagtatcagcttttcgaggagcttggaaagggggcattctcagtggtgagaagatgtatgaaaattcctactggacaagaatatgctgccaaaattatcaacaccaaaaagctttctgctagggatcatcagaaactagaaagagaagctagaatctgccgtcttttgaagcaccctaatattgtgcgacttcatgatagcatatcagaagagggctttcactacttggtgtttgatttagttactggaggtgaactgtttgaagacatagtggcaagagaatactacagtgaagctgatgccagtcattgtatacagcagattctagaaagtgttaatcattgtcacctaaatggcatagttcacagggacctgaagcctgagaatttgcttttagctagcaaatccaagggagcagctgtgaaattggcagactttggcttagccatagaagttcaaggggaccagcaggcgtggtttggttttgctggcacacctggatatctttctccagaagttttacgtaaagatccttatggaaagccagtggatatgtgggcatgtggtgtcattctctatattctacttgtggggtatccacccttctgggatgaagaccaacacagactctatcagcagatcaaggctggagcttatgattttccatcaccagaatgggacacggtgactcctgaagccaaagacctcatcaataaaatgcttactatcaaccctgccaaacgcatcacagcctcagaggcactgaagcacccatggatctgtcaacgttctactgttgcttccatgatgcacagacaggagactgtagactgcttgaagaaatttaatgctagaagaaaactaaagggtgccatcttgacaactatgctggctacaaggaatttctcagcagccaagagtttgttgaagaaaccagatggagtaaaggagtcaactgagagttcaaatacaacaattgaggatgaagatgtgaaagcacgaaagcaagagattatcaaagtcactgaacaactgatcgaagctatcaacaatggggactttgaagcctacacaaaaatctgtgacccaggccttactgcttttgaacctgaagctttgggtaatttagtggaagggatggattttcaccgattctactttgaaaatgctttgtccaaaagcaataaaccaatccacactattattctaaaccctcatgtacatctggtaggggatgatgccgcctgcatagcatatattaggctcacacagtacatggatggcagtggaatgccaaagacaatgcagtcagaagagactcgtgtgtggcaccgccgggatggaaagtggcagaatgttcattttcatcgctcggggtcaccaacagtacccatcaagccaccctgtattccaaatgggaaagaaaacttctcaggaggcacctctttgtggcaaaacatctaaggcctgaaaaccattcacatatgggtcttctaaatttcaacagtgccacttctgcattctctgttctcaaggcacctggatggtgaccctgggccgtcctctcctcctcttcatgcatgtttctgagtgcatgaagttgtgaaggtcctacatgtaatgcatatgtgatgcatcatcttatcatatattccttcctatacattgtttacacttcaactacggggatgttccacacaaacttaaattactgttggcaaaacaatagggggagattagacaaaaaaaaaaatccacaatattccaagtacaactcttcatcaagtttctctgttaatgccaagatttaacagacttaagaactattgttctctgaatgacagttgtaagagaaatgtaaattttttagaactctttgctgttaatctgttttggtttgtttggttttttttttttttttttaaggtaaaaaaaaaatacaccttcagtttcctggtgtgatcctggttaaaatggatgatttttcattgaaagttttgctgattaacaattaaagtgggatgatatgtgggcaaaatcacttatgaaagtagaagcaagaatcagttggtttgctaccacataaagccatgctgtttttggtcaaactgtgtaaactggaaaaattcacatcatttctgagtttaatcactttaggatatattcacattgttttggtgaatttgctgaattgaattgtttttctttctcaaatctgtgatctcttttctttatcctgtttctttgttcctttcgtttgctttcttatttttcttttgttccattcttttcttacttttttcccttttccttttttggggaggctggctagtagtgtgtgagaaaagaatagaagtgaaatttgcataatgaatgtaaaagggaaataaaagtcttttgaaggtagctatactagcacttttgatcatcttcagggcccacaaaaatgttgtcaagattttaaaggtttataattctgcttaagctctagtttggacttaggtatcctaactatgttggaggtatttgcattgtttaaagttaggataaaagcaagttcctcctgtgactgcaacgtcttactgattgggacagttgccaggaggataccaacttgatagcagagggggttttatgcaaacgcactcacctccgccttggggaatgaaagggtcacttctgcatcatcactagctagttttctagtgttagagaggcttacaaatgtttgccattctcataagtgttttgaacttgatctttgtgacttgtgcttttttagcttctctcttgaatcagagtatcattgtcttcctccaaggagttagaatttcccagtttaaaacaaaaagggaaatgtcctaggttttctttgtgcttctcatttttcctttgttgattcaattcctgtgatttttgttctcttccctgaagtgctttacagtgcatggaatctccatcattgttattttaacgatagtaattcacagtcctcagaagcctatttttaaagcagaagcaaaaaagaaaaacaaaataacaaaaacaacccttcctcttttctctcatctcacctctctgtgttgattactaatcatcttagatattattgctagtggatgtatggtagatgggttgaagcttttctgataattattacacaatttaaaacaacatatatatttaaaataaatatatacagtaaatatattgagccatgttaacctgccaatgagatctgtgaaaaaataatggcctcatttttctctttttaatttcttttacccttttgtgaagcagctatacgtggcatacatgtatttaaagaaaaaaaaatagatgtagagtgttttttttacacttttaacttagcatgtggtgttgaagtattactgtagatcaagtttgtcttccgcactaagatgtgaggaaattgtgatttgttctctccaccacaaatgaattacacatttattatcttctatcattttgaaacactgcagtttaccatgggacactgtatatatttcttgccataatggtaaaggactgattgatatatttaagagttaataaatttgtgatttctgctgacagtgcgtccatctttatttcttcagaagaggtactgtatgtatgcctgcatagtgctggccagtgtcaagggcagtgtgtcctactctggtctcatttagtacataacaatttgcacttggtgagaatggcaagttaattgttctctgtgagccaaaccatggtctcttctgggaaaatgttgctgagaaccatatagttaaccactaagactcctaaaagcttctctaaactgtaccctccaatccagccttcacatggctgccctttttttttttttaatacgaacctgtccttgtaacactttgatgttaccatttctgggatacaggcaagcaccccagctcctgctactccccagcttgaacttgagcatacatggatgctcagcttcttttgatttgctaaaaacatcacacttgctcacatgcctgtttatgctgttcatgttgtttatgtttcttacctagaataaatagtctcttcccctacttcttttcccgacttcttactttttcctaagattcagtgtacagcatcatgctccacagcaaaccttcctaggccctattctgggcttgccttccctctcaaaacctacataatagattgtatttacctctcctgtcaaccacattgttttgaaaatatatttctatttgtgtctcctctactgcagtataatgtctccatgggcaagaactgtgtattcatcattgcattcctaaacccaaaccaaggccaggaatggagatatcattgataaatagttgttgaattgaggccaagcccttttgataacagaagcctcaaggggtacccagatagtccttgttttaatgatgggttctctcaccactgtcttgatgctctgagcaagttacctcttccctctgaccctcagtttccatatttgtaaaatgagaataaacataccaacttaataaagatattgtgaggattaatgggtacagagtgactagaatgatatttgatagaaattaaatggtagcagtataactattctgatcactgacattaatattcctattgttattattctttactcacgagggtatacaactcttgttttgctgttgggctgccctctttatgtaggtttactgttaatgctgaggatatactcggactcaaatgtctcagcagaaggctgagagacaccaaatgaagtggtcatctagctgaatgtaggaaaaatgaaatgtagtagcaaatcagtatattctaaggaaattttcaaggaatattaatcttcacccaaattttgaatttttatgtaaaaaattataatttaagggtaaacatagatgacacagctttcgagtgatttcattgaataaaattctactgacttctatgaaaaaaaaaaaaaataaaaaaaaaaaaaaaaaaaaaaaaaaggggggggggcgcctaaaaatataaccaccggagggcggacaatactatccacaccccacgtttttgtaaacagnggccccaatgagagggggtatataaagagacggagacagcgcactatcaaaccgcccgcgcggcacaaggcctggactctggcgaacacccccgtgtgcgagactaggcacccactcggatttaccccggacaacactccgtctgagtacccacgcattacgcgacatcgcggcatga

SEQ ID NO: 318729 - DNA, 6001 bp, Homo sapiens
tctctgtgcgggtttaaatgggtaactgtgacttctcgcctcattcacccaaacctccagtcttctcccccgcacatcctcctccacccacctggtttctccctagactggtgtgctcgtgtgtgcaaccaaaggagggagtgcgagagatccacgaagggacaggcttggagtcgctagagggaggtgtgggaccagcgaggagggggcttcgccagggagggggtgctggcaggcggagggagcggcgggaggaggcgccggaggaggagacggaggcctggggacggcagaagaggcttcgcctgagccgagcgctctttctctcgccgcgccgtcttgaagccgcgcgggctcgtgagcagcgcgaggccgccaaggtgcctcgcttcgccggagccgctgccgcccgccggagggaagccggcctcgggcgcgcacgctcgtcggagccccggcgcgccccgcgcctgagcctgctgacagcggccgctgggctcaggctgtccgctctgggctccgcggcctcggccccgctgcactccacctccgccccctcggactccctcccctctgcttctactcctcctgctccagtgcggatcgtttcgcaactgcttgccactcgtcccgtgcctggctgtttttccatttcccggccccctcttcttgagtactttaccccctgcatttggggacagggactggaaaaggggcgggtggagcgtccagtggagaagaaggaagcgaggcccgcaggaggaggaggatcggcggactgtggggaggagaccccacgccaccctttctggtcatctcccctcccgccccgcccctgcgcacactccctcgcgggcgagctactttcggaccaggaaagtaagagcggccctgggtgacagcgccgcggggccagtcccggggttagccgcgcgtctgctcgcttctggtccgtcgcgctcccagccagggcacagcccggaccgaggatggcttcgaccacaacctgcaccaggttcacggacgagtatcagcttttcgaggagcttggaaagggggcattctcagtggtgagaagatgtatgaaaattcctactggacaagaatatgctgccaaaattatcaacaccaaaaagctttctgctagggatcatcagaaactagaaagagaagctagaatctgccgtcttttgaagcaccctaatattgtgcgacttcatgatagcatatcagaagagggctttcactacttggtgtttgatttagttactggaggtgaactgtttgaagacatagtggcaagagaatactacagtgaagctgatgccagtcattgtatacagcagattctagaaagtgttaatcattgtcacctaaatggcatagttcacagggacctgaagcctgagaatttgcttttagctagcaaatccaagggagcagctgtgaaattggcagactttggcttagccatagaagttcaaggggaccagcaggcgtggtttggttttgctggcacacctggatatctttctccagaagttttacgtaaagatccttatggaaagccagtggatatgtgggcatgtggtgtcattctctatattctacttgtggggtatccacccttctgggatgaagaccaacacagactctatcagcagatcaaggctggagcttatgattttccatcaccagaatgggacacggtgactcctgaagccaaagacctcatcaataaaatgcttactatcaaccctgccaaacgcatcacagcctcagaggcactgaagcacccatggatctgtcaacgttctactgttgcttccatgatgcacagacaggagactgtagactgcttgaagaaatttaatgctagaagaaaactaaagggtgccatcttgacaactatgctggctacaaggaatttctcagcagccaagagtttgttgaagaaaccagatggagtaaaggagtcaactgagagttcaaatacaacaattgaggatgaagatgtgaaagcacgaaagcaagagattatcaaagtcactgaacaactgatcgaagctatcaacaatggggactttgaagcctacacaaaaatctgtgacccaggccttactgcttttgaacctgaagctttgggtaatttagtggaagggatggattttcaccgattctactttgaaaatgctttgtccaaaagcaataaaccaatccacactattattctaaaccctcatgtacatctggtaggggatgatgccgcctgcatagcatatattaggctcacacagtacatggatggcagtggaatgccaaagacaatgcagtcagaagagactcgtgtgtggcaccgccgggatggaaagtggcagaatgttcattttcatcgctcggggtcaccaacagtacccatcaagccaccctgtattccaaatgggaaagaaaacttctcaggaggcacctctttgtggcaaaacatctaaggcctgaaaaccattcacatatgggtcttctaaatttcaacagtgccacttctgcattctctgttctcaaggcacctggatggtgaccctgggccgtcctctcctcctcttcatgcatgtttctgagtgcatgaagttgtgaaggtcctacatgtaatgcatatgtgatgcatcatcttatcatatattccttcctatacattgtttacacttcaactacggggatgttccacacaaacttaaattactgttggcaaaacaatagggggagattagacaaaaaaaaaaatccacaatattccaagtacaactcttcatcaagtttctctgttaatgccaagatttaacagacttaagaactattgttctctgaatgacagttgtaagagaaatgtaaattttttagaactctttgctgttaatctgttttggtttgtttggttttttttttttttttttaaggtaaaaaaaaaatacaccttcagtttcctggtgtgatcctggttaaaatggatgatttttcattgaaagttttgctgattaacaattaaagtgggatgatatgtgggcaaaatcacttatgaaagtagaagcaagaatcagttggtttgctaccacataaagccatgctgtttttggtcaaactgtgtaaactggaaaaattcacatcatttctgagtttaatcactttaggatatattcacattgttttggtgaatttgctgaattgaattgtttttctttctcaaatctgtgatctcttttctttatcctgtttctttgttcctttcgtttgctttcttatttttcttttgttccattcttttcttacttttttcccttttccttttttggggaggctggctagtagtgtgtgagaaaagaatagaagtgaaatttgcataatgaatgtaaaagggaaataaaagtcttttgaaggtagctatactagcacttttgatcatcttcagggcccacaaaaatgttgtcaagattttaaaggtttataattctgcttaagctctagtttggacttaggtatcctaactatgttggaggtatttgcattgtttaaagttaggataaaagcaagttcctcctgtgactgcaacgtcttactgattgggacagttgccaggaggataccaacttgatagcagagggggttttatgcaaacgcactcacctccgccttggggaatgaaagggtcacttctgcatcatcactagctagttttctagtgttagagaggcttacaaatgtttgccattctcataagtgttttgaacttgatctttgtgacttgtgcttttttagcttctctcttgaatcagagtatcattgtcttcctccaaggagttagaatttcccagtttaaaacaaaaagggaaatgtcctaggttttctttgtgcttctcatttttcctttgttgattcaattcctgtgatttttgttctcttccctgaagtgctttacagtgcatggaatctccatcattgttattttaacgatagtaattcacagtcctcagaagcctatttttaaagcagaagcaaaaaagaaaaacaaaataacaaaaacaacccttcctcttttctctcatctcacctctctgtgttgattactaatcatcttagatattattgctagtggatgtatggtagatgggttgaagcttttctgataattattacacaatttaaaacaacatatatatttaaaataaatatatacagtaaatatattgagccatgttaacctgccaatgagatctgtgaaaaaataatggcctcatttttctctttttaatttcttttacccttttgtgaagcagctatacgtggcatacatgtatttaaagaaaaaaaaatagatgtagagtgttttttttacacttttaacttagcatgtggtgttgaagtattactgtagatcaagtttgtcttccgcactaagatgtgaggaaattgtgatttgttctctccaccacaaatgaattacacatttattatcttctatcattttgaaacactgcagtttaccatgggacactgtatatatttcttgccataatggtaaaggactgattgatatatttaagagttaataaatttgtgatttctgctgacagtgcgtccatctttatttcttcagaagaggtactgtatgtatgcctgcatagtgctggccagtgtcaagggcagtgtgtcctactctggtctcatttagtacataacaatttgcacttggtgagaatggcaagttaattgttctctgtgagccaaaccatggtctcttctgggaaaatgttgctgagaaccatatagttaaccactaagactcctaaaagcttctctaaactgtaccctccaatccagccttcacatggctgccctttttttttttttaatacgaacctgtccttgtaacactttgatgttaccatttctgggatacaggcaagcaccccagctcctgctactccccagcttgaacttgagcatacatggatgctcagcttcttttgatttgctaaaaacatcacacttgctcacatgcctgtttatgctgttcatgttgtttatgtttcttacctagaataaatagtctcttcccctacttcttttcccgacttcttactttttcctaagattcagtgtacagcatcatgctccacagcaaaccttcctaggccctattctgggcttgccttccctctcaaaacctacataatagattgtatttacctctcctgtcaaccacattgttttgaaaatatatttctatttgtgtctcctctactgcagtataatgtctccatgggcaagaactgtgtattcatcattgcattcctaaacccaaaccaaggccaggaatggagatatcattgataaatagttgttgaattgaggccaagcccttttgataacagaagcctcaaggggtacccagatagtccttgttttaatgatgggttctctcaccactgtcttgatgctctgagcaagttacctcttccctctgaccctcagtttccatatttgtaaaatgagaataaacataccaacttaataaagatattgtgaggattaatgggtacagagtgactagaatgatatttgatagaaattaaatggtagcagtataactattctgatcactgacattaatattcctattgttattattctttactcacgagggtatacaactcttgttttgctgttgggctgccctctttatgtaggtttactgttaatgctgaggatatactcggactcaaatgtctcagcagaaggctgagagacaccaaatgaagtggtcatctagctgaatgtaggaaaaatgaaatgtagtagcaaatcagtatattctaaggaaattttcaaggaatattaatcttcacccaaattttgaatttttatgtaaaaaattataatttaagggtaaacatagatgacacagctttcgagtgatttcattgaataaaattctactgacttctatgaa

SEQ ID NO: 318730 - DNA, 6241 bp, Homo sapiens
  misc_feature (6063)..(6063): n is a, c, g, or t
tctctgtgcgggtttaaatgggtaactgtgacttctcgcctcattcacccaaacctccagtcttctcccccgcacatcctcctccacccacctggtttctccctagactggtgtgctcgtgtgtgcaaccaaaggagggagtgcgagagatccacgaagggacaggcttggagtcgctagagggaggtgtgggaccagcgaggagggggcttcgccagggagggggtgctggcaggcggagggagcggcgggaggaggcgccggaggaggagacggaggcctggggacggcagaagaggcttcgcctgagccgagcgctctttctctcgccgcgccgtcttgaagccgcgcgggctcgtgagcagcgcgaggccgccaaggtgcctcgcttcgccggagccgctgccgcccgccggagggaagccggcctcgggcgcgcacgctcgtcggagccccggcgcgccccgcgcctgagcctgctgacagcggccgctgggctcaggctgtccgctctgggctccgcggcctcggccccgctgcactccacctccgccccctcggactccctcccctctgcttctactcctcctgctccagtgcggatcgtttcgcaactgcttgccactcgtcccgtgcctggctgtttttccatttcccggccccctcttcttgagtactttaccccctgcatttggggacagggactggaaaaggggcgggtggagcgtccagtggagaagaaggaagcgaggcccgcaggaggaggaggatcggcggactgtggggaggagaccccacgccaccctttctggtcatctcccctcccgccccgcccctgcgcacactccctcgcgggcgagctactttcggaccaggaaagtaagagcggccctgggtgacagcgccgcggggccagtcccggggttagccgcgcgtctgctcgcttctggtccgtcgcgctcccagccagggcacagcccggaccgaggatggcttcgaccacaacctgcaccaggttcacggacgagtatcagcttttcgaggagcttggaaagggggcattctcagtggtgagaagatgtatgaaaattcctactggacaagaatatgctgccaaaattatcaacaccaaaaagctttctgctagggatcatcagaaactagaaagagaagctagaatctgccgtcttttgaagcaccctaatattgtgcgacttcatgatagcatatcagaagagggctttcactacttggtgtttgatttagttactggaggtgaactgtttgaagacatagtggcaagagaatactacagtgaagctgatgccagtcattgtatacagcagattctagaaagtgttaatcattgtcacctaaatggcatagttcacagggacctgaagcctgagaatttgcttttagctagcaaatccaagggagcagctgtgaaattggcagactttggcttagccatagaagttcaaggggaccagcaggcgtggtttggttttgctggcacacctggatatctttctccagaagttttacgtaaagatccttatggaaagccagtggatatgtgggcatgtggtgtcattctctatattctacttgtggggtatccacccttctgggatgaagaccaacacagactctatcagcagatcaaggctggagcttatgattttccatcaccagaatgggacacggtgactcctgaagccaaagacctcatcaataaaatgcttactatcaaccctgccaaacgcatcacagcctcagaggcactgaagcacccatggatctgtcaacgttctactgttgcttccatgatgcacagacaggagactgtagactgcttgaagaaatttaatgctagaagaaaactaaagggtgccatcttgacaactatgctggctacaaggaatttctcagcagccaagagtttgttgaagaaaccagatggagtaaaggagtcaactgagagttcaaatacaacaattgaggatgaagatgtgaaagcacgaaagcaagagattatcaaagtcactgaacaactgatcgaagctatcaacaatggggactttgaagcctacacaaaaatctgtgacccaggccttactgcttttgaacctgaagctttgggtaatttagtggaagggatggattttcaccgattctactttgaaaatgctttgtccaaaagcaataaaccaatccacactattattctaaaccctcatgtacatctggtaggggatgatgccgcctgcatagcatatattaggctcacacagtacatggatggcagtggaatgccaaagacaatgcagtcagaagagactcgtgtgtggcaccgccgggatggaaagtggcagaatgttcattttcatcgctcggggtcaccaacagtacccatcaagtaaatatttccaggctgtcagcttctttgttaatacacccatgctaaatttcaacagtgccacttctgcattctctgttctcaaggcacctggatggtgaccctgggccgtcctctcctcctcttcatgcatgtttctgagtgcatgaagttgtgaaggtcctacatgtaatgcatatgtgatgcatcatcttatcatatattccttcctatacattgtttacacttcaactacggggatgttccacacaaacttaaattactgttggcaaaacaatagggggagattagacaaaaaaaaaaatccacaatattccaagtacaactcttcatcaagtttctctgttaatgccaagatttaacagacttaagaactattgttctctgaatgacagttgtaagagaaatgtaaattttttagaactctttgctgttaatctgttttggtttgtttggttttttttttttttttttaaggtaaaaaaaaaatacaccttcagtttcctggtgtgatcctggttaaaatggatgatttttcattgaaagttttgctgattaacaattaaagtgggatgatatgtgggcaaaatcacttatgaaagtagaagcaagaatcagttggtttgctaccacataaagccatgctgtttttggtcaaactgtgtaaactggaaaaattcacatcatttctgagtttaatcactttaggatatattcacattgttttggtgaatttgctgaattgaattgtttttctttctcaaatctgtgatctcttttctttatcctgtttctttgttcctttcgtttgctttcttatttttcttttgttccattcttttcttacttttttcccttttccttttttggggaggctggctagtagtgtgtgagaaaagaatagaagtgaaatttgcataatgaatgtaaaagggaaataaaagtcttttgaaggtagctatactagcacttttgatcatcttcagggcccacaaaaatgttgtcaagattttaaaggtttataattctgcttaagctctagtttggacttaggtatcctaactatgttggaggtatttgcattgtttaaagttaggataaaagcaagttcctcctgtgactgcaacgtcttactgattgggacagttgccaggaggataccaacttgatagcagagggggttttatgcaaacgcactcacctccgccttggggaatgaaagggtcacttctgcatcatcactagctagttttctagtgttagagaggcttacaaatgtttgccattctcataagtgttttgaacttgatctttgtgacttgtgcttttttagcttctctcttgaatcagagtatcattgtcttcctccaaggagttagaatttcccagtttaaaacaaaaagggaaatgtcctaggttttctttgtgcttctcatttttcctttgttgattcaattcctgtgatttttgttctcttccctgaagtgctttacagtgcatggaatctccatcattgttattttaacgatagtaattcacagtcctcagaagcctatttttaaagcagaagcaaaaaagaaaaacaaaataacaaaaacaacccttcctcttttctctcatctcacctctctgtgttgattactaatcatcttagatattattgctagtggatgtatggtagatgggttgaagcttttctgataattattacacaatttaaaacaacatatatatttaaaataaatatatacagtaaatatattgagccatgttaacctgccaatgagatctgtgaaaaaataatggcctcatttttctctttttaatttcttttacccttttgtgaagcagctatacgtggcatacatgtatttaaagaaaaaaaaatagatgtagagtgttttttttacacttttaacttagcatgtggtgttgaagtattactgtagatcaagtttgtcttccgcactaagatgtgaggaaattgtgatttgttctctccaccacaaatgaattacacatttattatcttctatcattttgaaacactgcagtttaccatgggacactgtatatatttcttgccataatggtaaaggactgattgatatatttaagagttaataaatttgtgatttctgctgacagtgcgtccatctttatttcttcagaagaggtactgtatgtatgcctgcatagtgctggccagtgtcaagggcagtgtgtcctactctggtctcatttagtacataacaatttgcacttggtgagaatggcaagttaattgttctctgtgagccaaaccatggtctcttctgggaaaatgttgctgagaaccatatagttaaccactaagactcctaaaagcttctctaaactgtaccctccaatccagccttcacatggctgccctttttttttttttaatacgaacctgtccttgtaacactttgatgttaccatttctgggatacaggcaagcaccccagctcctgctactccccagcttgaacttgagcatacatggatgctcagcttcttttgatttgctaaaaacatcacacttgctcacatgcctgtttatgctgttcatgttgtttatgtttcttacctagaataaatagtctcttcccctacttcttttcccgacttcttactttttcctaagattcagtgtacagcatcatgctccacagcaaaccttcctaggccctattctgggcttgccttccctctcaaaacctacataatagattgtatttacctctcctgtcaaccacattgttttgaaaatatatttctatttgtgtctcctctactgcagtataatgtctccatgggcaagaactgtgtattcatcattgcattcctaaacccaaaccaaggccaggaatggagatatcattgataaatagttgttgaattgaggccaagcccttttgataacagaagcctcaaggggtacccagatagtccttgttttaatgatgggttctctcaccactgtcttgatgctctgagcaagttacctcttccctctgaccctcagtttccatatttgtaaaatgagaataaacataccaacttaataaagatattgtgaggattaatgggtacagagtgactagaatgatatttgatagaaattaaatggtagcagtataactattctgatcactgacattaatattcctattgttattattctttactcacgagggtatacaactcttgttttgctgttgggctgccctctttatgtaggtttactgttaatgctgaggatatactcggactcaaatgtctcagcagaaggctgagagacaccaaatgaagtggtcatctagctgaatgtaggaaaaatgaaatgtagtagcaaatcagtatattctaaggaaattttcaaggaatattaatcttcacccaaattttgaatttttatgtaaaaaattataatttaagggtaaacatagatgacacagctttcgagtgatttcattgaataaaattctactgacttctatgaaaaaaaaaaaaaataaaaaaaaaaaaaaaaaaaaaaaaaaggggggggggcgcctaaaaatataaccaccggagggcggacaatactatccacaccccacgtttttgtaaacagnggccccaatgagagggggtatataaagagacggagacagcgcactatcaaaccgcccgcgcggcacaaggcctggactctggcgaacacccccgtgtgcgagactaggcacccactcggatttaccccggacaacactccgtctgagtacccacgcattacgcgacatcgcggcatga

SEQ ID NO: 318731 - DNA, 5737 bp, Homo sapiens
  misc_feature (5559)..(5559): n is a, c, g, or t
ccgggctgcaggaattcggcacgagactcctcctgctccagtgcggatcgtttcgcaactgcttgccactcgtcccgtgcctggctgtttttccatttcccggccccctcttcttgagtactttaccccctgcatttggggacagggactggaaaaggggcgggtggagcgtccagtggagaagaaggaagcgaggcccgcaggaggaggaggatcggcggactgtggggaggagaccccacgccaccctttctggtcatctcccctcccgccccgcccctgcgcacactccctcgcgggcgagctactttcggaccaggaaagtaagagcggccctgggtgacagcgccgcggggccagtcccggggttagccgcgcgtctgctcgcttctggtccgtcgcgctcccagccagggcacagcccggaccgaggatggcttcgaccacaacctgcaccaggttcacggacgagtatcagcttttcgaggagcttggaaagggggcattctcagtggtgagaagatgtatgaaaattcctactggacaagaatatgctgccaaaattatcaacaccaaaaagctttctgctagggatcatcagaaactagaaagagaagctagaatctgccgtcttttgaagcaccctaatattgtgcgacttcatgatagcatatcagaagagggctttcactacttggtgtttgatttagttactggaggtgaactgtttgaagacatagtggcaagagaatactacagtgaagctgatgccagtcattgtatacagcagattctagaaagtgttaatcattgtcacctaaatggcatagttcacagggacctgaagcctgagaatttgcttttagctagcaaatccaagggagcagctgtgaaattggcagactttggcttagccatagaagttcaaggggaccagcaggcgtggtttggttttgctggcacacctggatatctttctccagaagttttacgtaaagatccttatggaaagccagtggatatgtgggcatgtggtgtcattctctatattctacttgtggggtatccacccttctgggatgaagaccaacacagactctatcagcagatcaaggctggagcttatgattttccatcaccagaatgggacacggtgactcctgaagccaaagacctcatcaataaaatgcttactatcaaccctgccaaacgcatcacagcctcagaggcactgaagcacccatggatctgtcaacgttctactgttgcttccatgatgcacagacaggagactgtagactgcttgaagaaatttaatgctagaagaaaactaaagggtgccatcttgacaactatgctggctacaaggaatttctcagcagccaagagtttgttgaagaaaccagatggagtaaaggagtcaactgagagttcaaatacaacaattgaggatgaagatgtgaaagcacgaaagcaagagattatcaaagtcactgaacaactgatcgaagctatcaacaatggggactttgaagcctacacaaaaatctgtgacccaggccttactgcttttgaacctgaagctttgggtaatttagtggaagggatggattttcaccgattctactttgaaaatgctttgtccaaaagcaataaaccaatccacactattattctaaaccctcatgtacatctggtaggggatgatgccgcctgcatagcatatattaggctcacacagtacatggatggcagtggaatgccaaagacaatgcagtcagaagagactcgtgtgtggcaccgccgggatggaaagtggcagaatgttcattttcatcgctcggggtcaccaacagtacccatcaagccaccctgtattccaaatgggaaagaaaacttctcaggaggcacctctttgtggcaaaacatctaaggcctgaaaaccattcacatatgggtcttctaaatttcaacagtgccacttctgcattctctgttctcaaggcacctggatggtgaccctgggccgtcctctcctcctcttcatgcatgtttctgagtgcatgaagttgtgaaggtcctacatgtaatgcatatgtgatgcatcatcttatcatatattccttcctatacattgtttacacttcaactacggggatgttccacacaaacttaaattactgttggcaaaacaatagggggagattagacaaaaaaaaaaatccacaatattccaagtacaactcttcatcaagtttctctgttaatgccaagatttaacagacttaagaactattgttctctgaatgacagttgtaagagaaatgtaaattttttagaactctttgctgttaatctgttttggtttgtttggttttttttttttttttttaaggtaaaaaaaaaatacaccttcagtttcctggtgtgatcctggttaaaatggatgatttttcattgaaagttttgctgattaacaattaaagtgggatgatatgtgggcaaaatcacttatgaaagtagaagcaagaatcagttggtttgctaccacataaagccatgctgtttttggtcaaactgtgtaaactggaaaaattcacatcatttctgagtttaatcactttaggatatattcacattgttttggtgaatttgctgaattgaattgtttttctttctcaaatctgtgatctcttttctttatcctgtttctttgttcctttcgtttgctttcttatttttcttttgttccattcttttcttacttttttcccttttccttttttggggaggctggctagtagtgtgtgagaaaagaatagaagtgaaatttgcataatgaatgtaaaagggaaataaaagtcttttgaaggtagctatactagcacttttgatcatcttcagggcccacaaaaatgttgtcaagattttaaaggtttataattctgcttaagctctagtttggacttaggtatcctaactatgttggaggtatttgcattgtttaaagttaggataaaagcaagttcctcctgtgactgcaacgtcttactgattgggacagttgccaggaggataccaacttgatagcagagggggttttatgcaaacgcactcacctccgccttggggaatgaaagggtcacttctgcatcatcactagctagttttctagtgttagagaggcttacaaatgtttgccattctcataagtgttttgaacttgatctttgtgacttgtgcttttttagcttctctcttgaatcagagtatcattgtcttcctccaaggagttagaatttcccagtttaaaacaaaaagggaaatgtcctaggttttctttgtgcttctcatttttcctttgttgattcaattcctgtgatttttgttctcttccctgaagtgctttacagtgcatggaatctccatcattgttattttaacgatagtaattcacagtcctcagaagcctatttttaaagcagaagcaaaaaagaaaaacaaaataacaaaaacaacccttcctcttttctctcatctcacctctctgtgttgattactaatcatcttagatattattgctagtggatgtatggtagatgggttgaagcttttctgataattattacacaatttaaaacaacatatatatttaaaataaatatatacagtaaatatattgagccatgttaacctgccaatgagatctgtgaaaaaataatggcctcatttttctctttttaatttcttttacccttttgtgaagcagctatacgtggcatacatgtatttaaagaaaaaaaaatagatgtagagtgttttttttacacttttaacttagcatgtggtgttgaagtattactgtagatcaagtttgtcttccgcactaagatgtgaggaaattgtgatttgttctctccaccacaaatgaattacacatttattatcttctatcattttgaaacactgcagtttaccatgggacactgtatatatttcttgccataatggtaaaggactgattgatatatttaagagttaataaatttgtgatttctgctgacagtgcgtccatctttatttcttcagaagaggtactgtatgtatgcctgcatagtgctggccagtgtcaagggcagtgtgtcctactctggtctcatttagtacataacaatttgcacttggtgagaatggcaagttaattgttctctgtgagccaaaccatggtctcttctgggaaaatgttgctgagaaccatatagttaaccactaagactcctaaaagcttctctaaactgtaccctccaatccagccttcacatggctgccctttttttttttttaatacgaacctgtccttgtaacactttgatgttaccatttctgggatacaggcaagcaccccagctcctgctactccccagcttgaacttgagcatacatggatgctcagcttcttttgatttgctaaaaacatcacacttgctcacatgcctgtttatgctgttcatgttgtttatgtttcttacctagaataaatagtctcttcccctacttcttttcccgacttcttactttttcctaagattcagtgtacagcatcatgctccacagcaaaccttcctaggccctattctgggcttgccttccctctcaaaacctacataatagattgtatttacctctcctgtcaaccacattgttttgaaaatatatttctatttgtgtctcctctactgcagtataatgtctccatgggcaagaactgtgtattcatcattgcattcctaaacccaaaccaaggccaggaatggagatatcattgataaatagttgttgaattgaggccaagcccttttgataacagaagcctcaaggggtacccagatagtccttgttttaatgatgggttctctcaccactgtcttgatgctctgagcaagttacctcttccctctgaccctcagtttccatatttgtaaaatgagaataaacataccaacttaataaagatattgtgaggattaatgggtacagagtgactagaatgatatttgatagaaattaaatggtagcagtataactattctgatcactgacattaatattcctattgttattattctttactcacgagggtatacaactcttgttttgctgttgggctgccctctttatgtaggtttactgttaatgctgaggatatactcggactcaaatgtctcagcagaaggctgagagacaccaaatgaagtggtcatctagctgaatgtaggaaaaatgaaatgtagtagcaaatcagtatattctaaggaaattttcaaggaatattaatcttcacccaaattttgaatttttatgtaaaaaattataatttaagggtaaacatagatgacacagctttcgagtgatttcattgaataaaattctactgacttctatgaaaaaaaaaaaaaataaaaaaaaaaaaaaaaaaaaaaaaaaggggggggggcgcctaaaaatataaccaccggagggcggacaatactatccacaccccacgtttttgtaaacagnggccccaatgagagggggtatataaagagacggagacagcgcactatcaaaccgcccgcgcggcacaaggcctggactctggcgaacacccccgtgtgcgagactaggcacccactcggatttaccccggacaacactccgtctgagtacccacgcattacgcgacatcgcggcatga

SEQ ID NO: 318732 - DNA, 6436 bp, Homo sapiens
  misc_feature (6258)..(6258): n is a, c, g, or t
tctctgtgcgggtttaaatgggtaactgtgacttctcgcctcattcacccaaacctccagtcttctcccccgcacatcctcctccacccacctggtttctccctagactggtgtgctcgtgtgtgcaaccaaaggagggagtgcgagagatccacgaagggacaggcttggagtcgctagagggaggtgtgggaccagcgaggagggggcttcgccagggagggggtgctggcaggcggagggagcggcgggaggaggcgccggaggaggagacggaggcctggggacggcagaagaggcttcgcctgagccgagcgctctttctctcgccgcgccgtcttgaagccgcgcgggctcgtgagcagcgcgaggccgccaaggtgcctcgcttcgccggagccgctgccgcccgccggagggaagccggcctcgggcgcgcacgctcgtcggagccccggcgcgccccgcgcctgagcctgctgacagcggccgctgggctcaggctgtccgctctgggctccgcggcctcggccccgctgcactccacctccgccccctcggactccctcccctctgcttctactcctcctgctccagtgcggatcgtttcgcaactgcttgccactcgtcccgtgcctggctgtttttccatttcccggccccctcttcttgagtactttaccccctgcatttggggacagggactggaaaaggggcgggtggagcgtccagtggagaagaaggaagcgaggcccgcaggaggaggaggatcggcggactgtggggaggagaccccacgccaccctttctggtcatctcccctcccgccccgcccctgcgcacactccctcgcgggcgagctactttcggaccaggaaagtaagagcggccctgggtgacagcgccgcggggccagtcccggggttagccgcgcgtctgctcgcttctggtccgtcgcgctcccagccagggcacagcccggaccgaggatggcttcgaccacaacctgcaccaggttcacggacgagtatcagcttttcgaggagcttggaaagggggcattctcagtggtgagaagatgtatgaaaattcctactggacaagaatatgctgccaaaattatcaacaccaaaaagctttctgctaggggacagaaaaagcagagactggagaatatgtggctggaatatatgatggacatctagggaagaattaagaaagaaaagaaaatggctggggagagatggtattgcatcgcttgactcttagagaaggctctggatgattgacagattatcctcatgtctgacggaagtaagacgagcaagttccttcaagaaggaaatcatcagaaactagaaagagaagctagaatctgccgtcttttgaagcaccctaatattgtgcgacttcatgatagcatatcagaagagggctttcactacttggtgtttgatttagttactggaggtgaactgtttgaagacatagtggcaagagaatactacagtgaagctgatgccagtcattgtatacagcagattctagaaagtgttaatcattgtcacctaaatggcatagttcacagggacctgaagcctgagaatttgcttttagctagcaaatccaagggagcagctgtgaaattggcagactttggcttagccatagaagttcaaggggaccagcaggcgtggtttggttttgctggcacacctggatatctttctccagaagttttacgtaaagatccttatggaaagccagtggatatgtgggcatgtggtgtcattctctatattctacttgtggggtatccacccttctgggatgaagaccaacacagactctatcagcagatcaaggctggagcttatgattttccatcaccagaatgggacacggtgactcctgaagccaaagacctcatcaataaaatgcttactatcaaccctgccaaacgcatcacagcctcagaggcactgaagcacccatggatctgtcaacgttctactgttgcttccatgatgcacagacaggagactgtagactgcttgaagaaatttaatgctagaagaaaactaaagggtgccatcttgacaactatgctggctacaaggaatttctcagcagccaagagtttgttgaagaaaccagatggagtaaaggagtcaactgagagttcaaatacaacaattgaggatgaagatgtgaaagcacgaaagcaagagattatcaaagtcactgaacaactgatcgaagctatcaacaatggggactttgaagcctacacaaaaatctgtgacccaggccttactgcttttgaacctgaagctttgggtaatttagtggaagggatggattttcaccgattctactttgaaaatgctttgtccaaaagcaataaaccaatccacactattattctaaaccctcatgtacatctggtaggggatgatgccgcctgcatagcatatattaggctcacacagtacatggatggcagtggaatgccaaagacaatgcagtcagaagagactcgtgtgtggcaccgccgggatggaaagtggcagaatgttcattttcatcgctcggggtcaccaacagtacccatcaagtaaatatttccaggctgtcagcttctttgttaatacacccatgctaaatttcaacagtgccacttctgcattctctgttctcaaggcacctggatggtgaccctgggccgtcctctcctcctcttcatgcatgtttctgagtgcatgaagttgtgaaggtcctacatgtaatgcatatgtgatgcatcatcttatcatatattccttcctatacattgtttacacttcaactacggggatgttccacacaaacttaaattactgttggcaaaacaatagggggagattagacaaaaaaaaaaatccacaatattccaagtacaactcttcatcaagtttctctgttaatgccaagatttaacagacttaagaactattgttctctgaatgacagttgtaagagaaatgtaaattttttagaactctttgctgttaatctgttttggtttgtttggttttttttttttttttttaaggtaaaaaaaaaatacaccttcagtttcctggtgtgatcctggttaaaatggatgatttttcattgaaagttttgctgattaacaattaaagtgggatgatatgtgggcaaaatcacttatgaaagtagaagcaagaatcagttggtttgctaccacataaagccatgctgtttttggtcaaactgtgtaaactggaaaaattcacatcatttctgagtttaatcactttaggatatattcacattgttttggtgaatttgctgaattgaattgtttttctttctcaaatctgtgatctcttttctttatcctgtttctttgttcctttcgtttgctttcttatttttcttttgttccattcttttcttacttttttcccttttccttttttggggaggctggctagtagtgtgtgagaaaagaatagaagtgaaatttgcataatgaatgtaaaagggaaataaaagtcttttgaaggtagctatactagcacttttgatcatcttcagggcccacaaaaatgttgtcaagattttaaaggtttataattctgcttaagctctagtttggacttaggtatcctaactatgttggaggtatttgcattgtttaaagttaggataaaagcaagttcctcctgtgactgcaacgtcttactgattgggacagttgccaggaggataccaacttgatagcagagggggttttatgcaaacgcactcacctccgccttggggaatgaaagggtcacttctgcatcatcactagctagttttctagtgttagagaggcttacaaatgtttgccattctcataagtgttttgaacttgatctttgtgacttgtgcttttttagcttctctcttgaatcagagtatcattgtcttcctccaaggagttagaatttcccagtttaaaacaaaaagggaaatgtcctaggttttctttgtgcttctcatttttcctttgttgattcaattcctgtgatttttgttctcttccctgaagtgctttacagtgcatggaatctccatcattgttattttaacgatagtaattcacagtcctcagaagcctatttttaaagcagaagcaaaaaagaaaaacaaaataacaaaaacaacccttcctcttttctctcatctcacctctctgtgttgattactaatcatcttagatattattgctagtggatgtatggtagatgggttgaagcttttctgataattattacacaatttaaaacaacatatatatttaaaataaatatatacagtaaatatattgagccatgttaacctgccaatgagatctgtgaaaaaataatggcctcatttttctctttttaatttcttttacccttttgtgaagcagctatacgtggcatacatgtatttaaagaaaaaaaaatagatgtagagtgttttttttacacttttaacttagcatgtggtgttgaagtattactgtagatcaagtttgtcttccgcactaagatgtgaggaaattgtgatttgttctctccaccacaaatgaattacacatttattatcttctatcattttgaaacactgcagtttaccatgggacactgtatatatttcttgccataatggtaaaggactgattgatatatttaagagttaataaatttgtgatttctgctgacagtgcgtccatctttatttcttcagaagaggtactgtatgtatgcctgcatagtgctggccagtgtcaagggcagtgtgtcctactctggtctcatttagtacataacaatttgcacttggtgagaatggcaagttaattgttctctgtgagccaaaccatggtctcttctgggaaaatgttgctgagaaccatatagttaaccactaagactcctaaaagcttctctaaactgtaccctccaatccagccttcacatggctgccctttttttttttttaatacgaacctgtccttgtaacactttgatgttaccatttctgggatacaggcaagcaccccagctcctgctactccccagcttgaacttgagcatacatggatgctcagcttcttttgatttgctaaaaacatcacacttgctcacatgcctgtttatgctgttcatgttgtttatgtttcttacctagaataaatagtctcttcccctacttcttttcccgacttcttactttttcctaagattcagtgtacagcatcatgctccacagcaaaccttcctaggccctattctgggcttgccttccctctcaaaacctacataatagattgtatttacctctcctgtcaaccacattgttttgaaaatatatttctatttgtgtctcctctactgcagtataatgtctccatgggcaagaactgtgtattcatcattgcattcctaaacccaaaccaaggccaggaatggagatatcattgataaatagttgttgaattgaggccaagcccttttgataacagaagcctcaaggggtacccagatagtccttgttttaatgatgggttctctcaccactgtcttgatgctctgagcaagttacctcttccctctgaccctcagtttccatatttgtaaaatgagaataaacataccaacttaataaagatattgtgaggattaatgggtacagagtgactagaatgatatttgatagaaattaaatggtagcagtataactattctgatcactgacattaatattcctattgttattattctttactcacgagggtatacaactcttgttttgctgttgggctgccctctttatgtaggtttactgttaatgctgaggatatactcggactcaaatgtctcagcagaaggctgagagacaccaaatgaagtggtcatctagctgaatgtaggaaaaatgaaatgtagtagcaaatcagtatattctaaggaaattttcaaggaatattaatcttcacccaaattttgaatttttatgtaaaaaattataatttaagggtaaacatagatgacacagctttcgagtgatttcattgaataaaattctactgacttctatgaaaaaaaaaaaaaataaaaaaaaaaaaaaaaaaaaaaaaaaggggggggggcgcctaaaaatataaccaccggagggcggacaatactatccacaccccacgtttttgtaaacagnggccccaatgagagggggtatataaagagacggagacagcgcactatcaaaccgcccgcgcggcacaaggcctggactctggcgaacacccccgtgtgcgagactaggcacccactcggatttaccccggacaacactccgtctgagtacccacgcattacgcgacatcgcggcatga

SEQ ID NO: 318733 - DNA, 6239 bp, Homo sapiens
  misc_feature (6061)..(6061): n is a, c, g, or t
tctctgtgcgggtttaaatgggtaactgtgacttctcgcctcattcacccaaacctccagtcttctcccccgcacatcctcctccacccacctggtttctccctagactggtgtgctcgtgtgtgcaaccaaaggagggagtgcgagagatccacgaagggacaggcttggagtcgctagagggaggtgtgggaccagcgaggagggggcttcgccagggagggggtgctggcaggcggagggagcggcgggaggaggcgccggaggaggagacggaggcctggggacggcagaagaggcttcgcctgagccgagcgctctttctctcgccgcgccgtcttgaagccgcgcgggctcgtgagcagcgcgaggccgccaaggtgcctcgcttcgccggagccgctgccgcccgccggagggaagccggcctcgggcgcgcacgctcgtcggagccccggcgcgccccgcgcctgagcctgctgacagcggccgctgggctcaggctgtccgctctgggctccgcggcctcggccccgctgcactccacctccgccccctcggactccctcccctctgcttctactcctcctgctccagtgcggatcgtttcgcaactgcttgccactcgtcccgtgcctggctgtttttccatttcccggccccctcttcttgagtactttaccccctgcatttggggacagggactggaaaaggggcgggtggagcgtccagtggagaagaaggaagcgaggcccgcaggaggaggaggatcggcggactgtggggaggagaccccacgccaccctttctggtcatctcccctcccgccccgcccctgcgcacactccctcgcgggcgagctactttcggaccaggaaagtaagagcggccctgggtgacagcgccgcggggccagtcccggggttagccgcgcgtctgctcgcttctggtccgtcgcgctcccagccagggcacagcccggaccgaggatggcttcgaccacaacctgcaccaggttcacggacgagtatcagcttttcgaggagcttggaaagggggcattctcagtggtgagaagatgtatgaaaattcctactggacaagaatatgctgccaaaattatcaacaccaaaaagctttctgctagggatcatcagaaactagaaagagaagctagaatctgccgtcttttgaagcaccctaatattgtgcgacttcatgatagcatatcagaagagggctttcactacttggtgtttgatttagttactggaggtgaactgtttgaagacatagtggcaagagaatactacagtgaagctgatgccagtcattgtatacagcagattctagaaagtgttaatcattgtcacctaaatggcatagttcacagggacctgaagcctgagaatttgcttttagctagcaaatccaagggagcagctgtgaaattggcagactttggcttagccatagaagttcaaggggaccagcaggcgtggtttggttttgctggcacacctggatatctttctccagaagttttacgtaaagatccttatggaaagccagtggatatgtgggcatgtggtgtcattctctatattctacttgtggggtatccacccttctgggatgaagaccaacacagactctatcagcagatcaaggctggagcttatgattttccatcaccagaatgggacacggtgactcctgaagccaaagacctcatcaataaaatgcttactatcaaccctgccaaacgcatcacagcctcagaggcactgaagcacccatggatctgtcaacgttctactgttgcttccatgatgcacagacaggagactgtagactgcttgaagaaatttaatgctagaagaaaactaaagggtgccatcttgacaactatgctggctacaaggaatttctcagcagccaagagtttgttgaagaaaccagatggagtaaaggagccccaaactactgtaatccacaaccctgatggaaacaaggagtcaactgagagttcaaatacaacaattgaggatgaagatgtgaaagcacgaaagcaagagattatcaaagtcactgaacaactgatcgaagctatcaacaatggggactttgaagcctacacaaaaatctgtgacccaggccttactgcttttgaacctgaagctttgggtaatttagtggaagggatggattttcaccgattctactttgaaaatgctttgtccaaaagcaataaaccaatccacactattattctaaaccctcatgtacatctggtaggggatgatgccgcctgcatagcatatattaggctcacacagtacatggatggcagtggaatgccaaagacaatgcagtcagaagagactcgtgtgtggcaccgccgggatggaaagtggcagaatgttcattttcatcgctcggggtcaccaacagtacccatcaactaaatttcaacagtgccacttctgcattctctgttctcaaggcacctggatggtgaccctgggccgtcctctcctcctcttcatgcatgtttctgagtgcatgaagttgtgaaggtcctacatgtaatgcatatgtgatgcatcatcttatcatatattccttcctatacattgtttacacttcaactacggggatgttccacacaaacttaaattactgttggcaaaacaatagggggagattagacaaaaaaaaaaatccacaatattccaagtacaactcttcatcaagtttctctgttaatgccaagatttaacagacttaagaactattgttctctgaatgacagttgtaagagaaatgtaaattttttagaactctttgctgttaatctgttttggtttgtttggttttttttttttttttttaaggtaaaaaaaaaatacaccttcagtttcctggtgtgatcctggttaaaatggatgatttttcattgaaagttttgctgattaacaattaaagtgggatgatatgtgggcaaaatcacttatgaaagtagaagcaagaatcagttggtttgctaccacataaagccatgctgtttttggtcaaactgtgtaaactggaaaaattcacatcatttctgagtttaatcactttaggatatattcacattgttttggtgaatttgctgaattgaattgtttttctttctcaaatctgtgatctcttttctttatcctgtttctttgttcctttcgtttgctttcttatttttcttttgttccattcttttcttacttttttcccttttccttttttggggaggctggctagtagtgtgtgagaaaagaatagaagtgaaatttgcataatgaatgtaaaagggaaataaaagtcttttgaaggtagctatactagcacttttgatcatcttcagggcccacaaaaatgttgtcaagattttaaaggtttataattctgcttaagctctagtttggacttaggtatcctaactatgttggaggtatttgcattgtttaaagttaggataaaagcaagttcctcctgtgactgcaacgtcttactgattgggacagttgccaggaggataccaacttgatagcagagggggttttatgcaaacgcactcacctccgccttggggaatgaaagggtcacttctgcatcatcactagctagttttctagtgttagagaggcttacaaatgtttgccattctcataagtgttttgaacttgatctttgtgacttgtgcttttttagcttctctcttgaatcagagtatcattgtcttcctccaaggagttagaatttcccagtttaaaacaaaaagggaaatgtcctaggttttctttgtgcttctcatttttcctttgttgattcaattcctgtgatttttgttctcttccctgaagtgctttacagtgcatggaatctccatcattgttattttaacgatagtaattcacagtcctcagaagcctatttttaaagcagaagcaaaaaagaaaaacaaaataacaaaaacaacccttcctcttttctctcatctcacctctctgtgttgattactaatcatcttagatattattgctagtggatgtatggtagatgggttgaagcttttctgataattattacacaatttaaaacaacatatatatttaaaataaatatatacagtaaatatattgagccatgttaacctgccaatgagatctgtgaaaaaataatggcctcatttttctctttttaatttcttttacccttttgtgaagcagctatacgtggcatacatgtatttaaagaaaaaaaaatagatgtagagtgttttttttacacttttaacttagcatgtggtgttgaagtattactgtagatcaagtttgtcttccgcactaagatgtgaggaaattgtgatttgttctctccaccacaaatgaattacacatttattatcttctatcattttgaaacactgcagtttaccatgggacactgtatatatttcttgccataatggtaaaggactgattgatatatttaagagttaataaatttgtgatttctgctgacagtgcgtccatctttatttcttcagaagaggtactgtatgtatgcctgcatagtgctggccagtgtcaagggcagtgtgtcctactctggtctcatttagtacataacaatttgcacttggtgagaatggcaagttaattgttctctgtgagccaaaccatggtctcttctgggaaaatgttgctgagaaccatatagttaaccactaagactcctaaaagcttctctaaactgtaccctccaatccagccttcacatggctgccctttttttttttttaatacgaacctgtccttgtaacactttgatgttaccatttctgggatacaggcaagcaccccagctcctgctactccccagcttgaacttgagcatacatggatgctcagcttcttttgatttgctaaaaacatcacacttgctcacatgcctgtttatgctgttcatgttgtttatgtttcttacctagaataaatagtctcttcccctacttcttttcccgacttcttactttttcctaagattcagtgtacagcatcatgctccacagcaaaccttcctaggccctattctgggcttgccttccctctcaaaacctacataatagattgtatttacctctcctgtcaaccacattgttttgaaaatatatttctatttgtgtctcctctactgcagtataatgtctccatgggcaagaactgtgtattcatcattgcattcctaaacccaaaccaaggccaggaatggagatatcattgataaatagttgttgaattgaggccaagcccttttgataacagaagcctcaaggggtacccagatagtccttgttttaatgatgggttctctcaccactgtcttgatgctctgagcaagttacctcttccctctgaccctcagtttccatatttgtaaaatgagaataaacataccaacttaataaagatattgtgaggattaatgggtacagagtgactagaatgatatttgatagaaattaaatggtagcagtataactattctgatcactgacattaatattcctattgttattattctttactcacgagggtatacaactcttgttttgctgttgggctgccctctttatgtaggtttactgttaatgctgaggatatactcggactcaaatgtctcagcagaaggctgagagacaccaaatgaagtggtcatctagctgaatgtaggaaaaatgaaatgtagtagcaaatcagtatattctaaggaaattttcaaggaatattaatcttcacccaaattttgaatttttatgtaaaaaattataatttaagggtaaacatagatgacacagctttcgagtgatttcattgaataaaattctactgacttctatgaaaaaaaaaaaaaataaaaaaaaaaaaaaaaaaaaaaaaaaggggggggggcgcctaaaaatataaccaccggagggcggacaatactatccacaccccacgtttttgtaaacagnggccccaatgagagggggtatataaagagacggagacagcgcactatcaaaccgcccgcgcggcacaaggcctggactctggcgaacacccccgtgtgcgagactaggcacccactcggatttaccccggacaacactccgtctgagtacccacgcattacgcgacatcgcggcatga

SEQ ID NO: 318734 - DNA, 4321 bp, Homo sapiens
  misc_feature (4143)..(4143): n is a, c, g, or t
ttatcagagcttttaacaaatagtgctcccagctgttgctttcagcaaaggagatctccaattaaagagagtaatcatgttctctctactttcgagactatattccttgttaaattgacttctaggtttcatttcccaaggaatctaacaataataacagaagctaaggatgaacttgaattttaagtctatttcaacaaaaggattatattcatttactaatttgtccagtaaacaggaatgcttaagatgtatacttagatttaataatgtgactgaagactgtgtctctgtctctttatttttagcttagctttgtgtgaaaaaataattaatactgatcttctaatttaatactctctttgtgtaacattgtatgtttcttcttgtaatgatcacaagcaaacatctcttatacatagtgttttcaatctatttgttagccaagttataaaactgtagcctagtcaaatctatggcaaagcaatttgatgatattttgtaaaacaatataatttatttcttcctccccctttctcctttcagctaaatttcaacagtgccacttctgcattctctgttctcaaggcacctggatggtgaccctgggccgtcctctcctcctcttcatgcatgtttctgagtgcatgaagttgtgaaggtcctacatgtaatgcatatgtgatgcatcatcttatcatatattccttcctatacattgtttacacttcaactacggggatgttccacacaaacttaaattactgttggcaaaacaatagggggagattagacaaaaaaaaaaatccacaatattccaagtacaactcttcatcaagtttctctgttaatgccaagatttaacagacttaagaactattgttctctgaatgacagttgtaagagaaatgtaaattttttagaactctttgctgttaatctgttttggtttgtttggttttttttttttttttttaaggtaaaaaaaaaatacaccttcagtttcctggtgtgatcctggttaaaatggatgatttttcattgaaagttttgctgattaacaattaaagtgggatgatatgtgggcaaaatcacttatgaaagtagaagcaagaatcagttggtttgctaccacataaagccatgctgtttttggtcaaactgtgtaaactggaaaaattcacatcatttctgagtttaatcactttaggatatattcacattgttttggtgaatttgctgaattgaattgtttttctttctcaaatctgtgatctcttttctttatcctgtttctttgttcctttcgtttgctttcttatttttcttttgttccattcttttcttacttttttcccttttccttttttggggaggctggctagtagtgtgtgagaaaagaatagaagtgaaatttgcataatgaatgtaaaagggaaataaaagtcttttgaaggtagctatactagcacttttgatcatcttcagggcccacaaaaatgttgtcaagattttaaaggtttataattctgcttaagctctagtttggacttaggtatcctaactatgttggaggtatttgcattgtttaaagttaggataaaagcaagttcctcctgtgactgcaacgtcttactgattgggacagttgccaggaggataccaacttgatagcagagggggttttatgcaaacgcactcacctccgccttggggaatgaaagggtcacttctgcatcatcactagctagttttctagtgttagagaggcttacaaatgtttgccattctcataagtgttttgaacttgatctttgtgacttgtgcttttttagcttctctcttgaatcagagtatcattgtcttcctccaaggagttagaatttcccagtttaaaacaaaaagggaaatgtcctaggttttctttgtgcttctcatttttcctttgttgattcaattcctgtgatttttgttctcttccctgaagtgctttacagtgcatggaatctccatcattgttattttaacgatagtaattcacagtcctcagaagcctatttttaaagcagaagcaaaaaagaaaaacaaaataacaaaaacaacccttcctcttttctctcatctcacctctctgtgttgattactaatcatcttagatattattgctagtggatgtatggtagatgggttgaagcttttctgataattattacacaatttaaaacaacatatatatttaaaataaatatatacagtaaatatattgagccatgttaacctgccaatgagatctgtgaaaaaataatggcctcatttttctctttttaatttcttttacccttttgtgaagcagctatacgtggcatacatgtatttaaagaaaaaaaaatagatgtagagtgttttttttacacttttaacttagcatgtggtgttgaagtattactgtagatcaagtttgtcttccgcactaagatgtgaggaaattgtgatttgttctctccaccacaaatgaattacacatttattatcttctatcattttgaaacactgcagtttaccatgggacactgtatatatttcttgccataatggtaaaggactgattgatatatttaagagttaataaatttgtgatttctgctgacagtgcgtccatctttatttcttcagaagaggtactgtatgtatgcctgcatagtgctggccagtgtcaagggcagtgtgtcctactctggtctcatttagtacataacaatttgcacttggtgagaatggcaagttaattgttctctgtgagccaaaccatggtctcttctgggaaaatgttgctgagaaccatatagttaaccactaagactcctaaaagcttctctaaactgtaccctccaatccagccttcacatggctgccctttttttttttttaatacgaacctgtccttgtaacactttgatgttaccatttctgggatacaggcaagcaccccagctcctgctactccccagcttgaacttgagcatacatggatgctcagcttcttttgatttgctaaaaacatcacacttgctcacatgcctgtttatgctgttcatgttgtttatgtttcttacctagaataaatagtctcttcccctacttcttttcccgacttcttactttttcctaagattcagtgtacagcatcatgctccacagcaaaccttcctaggccctattctgggcttgccttccctctcaaaacctacataatagattgtatttacctctcctgtcaaccacattgttttgaaaatatatttctatttgtgtctcctctactgcagtataatgtctccatgggcaagaactgtgtattcatcattgcattcctaaacccaaaccaaggccaggaatggagatatcattgataaatagttgttgaattgaggccaagcccttttgataacagaagcctcaaggggtacccagatagtccttgttttaatgatgggttctctcaccactgtcttgatgctctgagcaagttacctcttccctctgaccctcagtttccatatttgtaaaatgagaataaacataccaacttaataaagatattgtgaggattaatgggtacagagtgactagaatgatatttgatagaaattaaatggtagcagtataactattctgatcactgacattaatattcctattgttattattctttactcacgagggtatacaactcttgttttgctgttgggctgccctctttatgtaggtttactgttaatgctgaggatatactcggactcaaatgtctcagcagaaggctgagagacaccaaatgaagtggtcatctagctgaatgtaggaaaaatgaaatgtagtagcaaatcagtatattctaaggaaattttcaaggaatattaatcttcacccaaattttgaatttttatgtaaaaaattataatttaagggtaaacatagatgacacagctttcgagtgatttcattgaataaaattctactgacttctatgaaaaaaaaaaaaaataaaaaaaaaaaaaaaaaaaaaaaaaaggggggggggcgcctaaaaatataaccaccggagggcggacaatactatccacaccccacgtttttgtaaacagnggccccaatgagagggggtatataaagagacggagacagcgcactatcaaaccgcccgcgcggcacaaggcctggactctggcgaacacccccgtgtgcgagactaggcacccactcggatttaccccggacaacactccgtctgagtacccacgcattacgcgacatcgcggcatga

SEQ ID NO: 318735 - DNA, 3667 bp, Homo sapiens
  misc_feature (4)..(4): n is a, c, g, or t
  misc_feature (3489)..(3489): n is a, c, g, or t
tgtnattcggcacgagctcgtgccgcacatatgcatcatcttatcatatattccttcctatacattgtttacacttcaactacggggatgttccacacaaacttaaattactgttggcaaaacaatagggggagattagacaaaaaaaaaaatccacaatattccaagtacaactcttcatcaagtttctctgttaatgccaagatttaacagacttaagaactattgttctctgaatgacagttgtaagagaaatgtaaattttttagaactctttgctgttaatctgttttggtttgtttggttttttttttttttttttaaggtaaaaaaaaaatacaccttcagtttcctggtgtgatcctggttaaaatggatgatttttcattgaaagttttgctgattaacaattaaagtgggatgatatgtgggcaaaatcacttatgaaagtagaagcaagaatcagttggtttgctaccacataaagccatgctgtttttggtcaaactgtgtaaactggaaaaattcacatcatttctgagtttaatcactttaggatatattcacattgttttggtgaatttgctgaattgaattgtttttctttctcaaatctgtgatctcttttctttatcctgtttctttgttcctttcgtttgctttcttatttttcttttgttccattcttttcttacttttttcccttttccttttttggggaggctggctagtagtgtgtgagaaaagaatagaagtgaaatttgcataatgaatgtaaaagggaaataaaagtcttttgaaggtagctatactagcacttttgatcatcttcagggcccacaaaaatgttgtcaagattttaaaggtttataattctgcttaagctctagtttggacttaggtatcctaactatgttggaggtatttgcattgtttaaagttaggataaaagcaagttcctcctgtgactgcaacgtcttactgattgggacagttgccaggaggataccaacttgatagcagagggggttttatgcaaacgcactcacctccgccttggggaatgaaagggtcacttctgcatcatcactagctagttttctagtgttagagaggcttacaaatgtttgccattctcataagtgttttgaacttgatctttgtgacttgtgcttttttagcttctctcttgaatcagagtatcattgtcttcctccaaggagttagaatttcccagtttaaaacaaaaagggaaatgtcctaggttttctttgtgcttctcatttttcctttgttgattcaattcctgtgatttttgttctcttccctgaagtgctttacagtgcatggaatctccatcattgttattttaacgatagtaattcacagtcctcagaagcctatttttaaagcagaagcaaaaaagaaaaacaaaataacaaaaacaacccttcctcttttctctcatctcacctctctgtgttgattactaatcatcttagatattattgctagtggatgtatggtagatgggttgaagcttttctgataattattacacaatttaaaacaacatatatatttaaaataaatatatacagtaaatatattgagccatgttaacctgccaatgagatctgtgaaaaaataatggcctcatttttctctttttaatttcttttacccttttgtgaagcagctatacgtggcatacatgtatttaaagaaaaaaaaatagatgtagagtgttttttttacacttttaacttagcatgtggtgttgaagtattactgtagatcaagtttgtcttccgcactaagatgtgaggaaattgtgatttgttctctccaccacaaatgaattacacatttattatcttctatcattttgaaacactgcagtttaccatgggacactgtatatatttcttgccataatggtaaaggactgattgatatatttaagagttaataaatttgtgatttctgctgacagtgcgtccatctttatttcttcagaagaggtactgtatgtatgcctgcatagtgctggccagtgtcaagggcagtgtgtcctactctggtctcatttagtacataacaatttgcacttggtgagaatggcaagttaattgttctctgtgagccaaaccatggtctcttctgggaaaatgttgctgagaaccatatagttaaccactaagactcctaaaagcttctctaaactgtaccctccaatccagccttcacatggctgccctttttttttttttaatacgaacctgtccttgtaacactttgatgttaccatttctgggatacaggcaagcaccccagctcctgctactccccagcttgaacttgagcatacatggatgctcagcttcttttgatttgctaaaaacatcacacttgctcacatgcctgtttatgctgttcatgttgtttatgtttcttacctagaataaatagtctcttcccctacttcttttcccgacttcttactttttcctaagattcagtgtacagcatcatgctccacagcaaaccttcctaggccctattctgggcttgccttccctctcaaaacctacataatagattgtatttacctctcctgtcaaccacattgttttgaaaatatatttctatttgtgtctcctctactgcagtataatgtctccatgggcaagaactgtgtattcatcattgcattcctaaacccaaaccaaggccaggaatggagatatcattgataaatagttgttgaattgaggccaagcccttttgataacagaagcctcaaggggtacccagatagtccttgttttaatgatgggttctctcaccactgtcttgatgctctgagcaagttacctcttccctctgaccctcagtttccatatttgtaaaatgagaataaacataccaacttaataaagatattgtgaggattaatgggtacagagtgactagaatgatatttgatagaaattaaatggtagcagtataactattctgatcactgacattaatattcctattgttattattctttactcacgagggtatacaactcttgttttgctgttgggctgccctctttatgtaggtttactgttaatgctgaggatatactcggactcaaatgtctcagcagaaggctgagagacaccaaatgaagtggtcatctagctgaatgtaggaaaaatgaaatgtagtagcaaatcagtatattctaaggaaattttcaaggaatattaatcttcacccaaattttgaatttttatgtaaaaaattataatttaagggtaaacatagatgacacagctttcgagtgatttcattgaataaaattctactgacttctatgaaaaaaaaaaaaaataaaaaaaaaaaaaaaaaaaaaaaaaaggggggggggcgcctaaaaatataaccaccggagggcggacaatactatccacaccccacgtttttgtaaacagnggccccaatgagagggggtatataaagagacggagacagcgcactatcaaaccgcccgcgcggcacaaggcctggactctggcgaacacccccgtgtgcgagactaggcacccactcggatttaccccggacaacactccgtctgagtacccacgcattacgcgacatcgcggcatga

SEQ ID NO: 318736 - DNA, 2804 bp, Homo sapiens
  misc_feature (2626)..(2626): n is a, c, g, or t
atagatgtagagtgttttttttacacttttaacttagcatgtggtgttgaagtattactgtagatcaagtttgtcttccgcactaagatgtgaggaaattgtgatttgttctctccaccacaaatgaattacacatttattatcttctatcattttgaaacactgcagtttaccatgggacactgtatatatttcttgccataatggtaaaggactgattgatatatttaagagttaataaatttgtgatttctgctgacagtgcgtccattctcataagtgttttgaacttgatctttgtgacttgtgcttttttagcttctctcttgaatcagagtatcattgtcttcctccaaggagttagaatttcccagtttaaaacaaaaagggaaatgtcctaggttttctttgtgcttctcatttttcctttgttgattcaattcctgtgatttttgttctcttccctgaagtgctttacagtgcatggaatctccatcattgttattttaacgatagtaattcacagtcctcagaagcctatttttaaagcagaagcaaaaaagaaaaacaaaataacaaaaacaacccttcctcttttctctcatctcacctctctgtgttgattactaatcatcttagatattattgctagtggatgtatggtagatgggttgaagcttttctgataattattacacaatttaaaacaacatatatatttaaaataaatatatacagtaaatatattgagccatgttaacctgccaatgagatctgtgaaaaaataatggcctcatttttctctttttaatttcttttacccttttgtgaagcagctatacgtggcatacatgtatttaaagaaaaaaaaatagatgtagagtgttttttttacacttttaacttagcatgtggtgttgaagtattactgtagatcaagtttgtcttccgcactaagatgtgaggaaattgtgatttgttctctccaccacaaatgaattacacatttattatcttctatcattttgaaacactgcagtttaccatgggacactgtatatatttcttgccataatggtaaaggactgattgatatatttaagagttaataaatttgtgatttctgctgacagtgcgtccatctttatttcttcagaagaggtactgtatgtatgcctgcatagtgctggccagtgtcaagggcagtgtgtcctactctggtctcatttagtacataacaatttgcacttggtgagaatggcaagttaattgttctctgtgagccaaaccatggtctcttctgggaaaatgttgctgagaaccatatagttaaccactaagactcctaaaagcttctctaaactgtaccctccaatccagccttcacatggctgccctttttttttttttaatacgaacctgtccttgtaacactttgatgttaccatttctgggatacaggcaagcaccccagctcctgctactccccagcttgaacttgagcatacatggatgctcagcttcttttgatttgctaaaaacatcacacttgctcacatgcctgtttatgctgttcatgttgtttatgtttcttacctagaataaatagtctcttcccctacttcttttcccgacttcttactttttcctaagattcagtgtacagcatcatgctccacagcaaaccttcctaggccctattctgggcttgccttccctctcaaaacctacataatagattgtatttacctctcctgtcaaccacattgttttgaaaatatatttctatttgtgtctcctctactgcagtataatgtctccatgggcaagaactgtgtattcatcattgcattcctaaacccaaaccaaggccaggaatggagatatcattgataaatagttgttgaattgaggccaagcccttttgataacagaagcctcaaggggtacccagatagtccttgttttaatgatgggttctctcaccactgtcttgatgctctgagcaagttacctcttccctctgaccctcagtttccatatttgtaaaatgagaataaacataccaacttaataaagatattgtgaggattaatgggtacagagtgactagaatgatatttgatagaaattaaatggtagcagtataactattctgatcactgacattaatattcctattgttattattctttactcacgagggtatacaactcttgttttgctgttgggctgccctctttatgtaggtttactgttaatgctgaggatatactcggactcaaatgtctcagcagaaggctgagagacaccaaatgaagtggtcatctagctgaatgtaggaaaaatgaaatgtagtagcaaatcagtatattctaaggaaattttcaaggaatattaatcttcacccaaattttgaatttttatgtaaaaaattataatttaagggtaaacatagatgacacagctttcgagtgatttcattgaataaaattctactgacttctatgaaaaaaaaaaaaaataaaaaaaaaaaaaaaaaaaaaaaaaaggggggggggcgcctaaaaatataaccaccggagggcggacaatactatccacaccccacgtttttgtaaacagnggccccaatgagagggggtatataaagagacggagacagcgcactatcaaaccgcccgcgcggcacaaggcctggactctggcgaacacccccgtgtgcgagactaggcacccactcggatttaccccggacaacactccgtctgagtacccacgcattacgcgacatcgcggcatga

SEQ ID NO: 318737 - DNA, 1919 bp, Homo sapiens
tctctgtgcgggtttaaatgggtaactgtgacttctcgcctcattcacccaaacctccagtcttctcccccgcacatcctcctccacccacctggtttctccctagactggtgtgctcgtgtgtgcaaccaaaggagggagtgcgagagatccacgaagggacaggcttggagtcgctagagggaggtgtgggaccagcgaggagggggcttcgccagggagggggtgctggcaggcggagggagcggcgggaggaggcgccggaggaggagacggaggcctggggacggcagaagaggcttcgcctgagccgagcgctctttctctcgccgcgccgtcttgaagccgcgcgggctcgtgagcagcgcgaggccgccaaggtgcctcgcttcgccggagccgctgccgcccgccggagggaagccggcctcgggcgcgcacgctcgtcggagccccggcgcgccccgcgcctgagcctgctgacagcggccgctgggctcaggctgtccgctctgggctccgcggcctcggccccgctgcactccacctccgccccctcggactccctcccctctgcttctactcctcctgctccagtgcggatcgtttcgcaactgcttgccactcgtcccgtgcctggctgtttttccatttcccggccccctcttcttgagtactttaccccctgcatttggggacagggactggaaaaggggcgggtggagcgtccagtggagaagaaggaagcgaggcccgcaggaggaggaggatcggcggactgtggggaggagaccccacgccaccctttctggtcatctcccctcccgccccgcccctgcgcacactccctcgcgggcgagctactttcggaccaggaaagtaagagcggccctgggtgacagcgccgcggggccagtcccggggttagccgcgcgtctgctcgcttctggtccgtcgcgctcccagccagggcacagcccggaccgaggatggcttcgaccacaacctgcaccaggttcacggacgagtatcagcttttcgaggagcttggaaagggggcattctcagtggtgagaagatgtatgaaaattcctactggacaagaatatgctgccaaaattatcaacaccaaaaagctttctgctaggggacagaaaaagcagagactggagaatatgtggctggaatatatgatggacatctagggaagaattaagaaagaaaagaaaatggctggggagaggcaagtatttaaaaaacaaccgcatgtgttagtagagaagaggataagagtctaaattttgacatacgtgtattagtaaacctaagctacttttgactttgcacactgtttatttatgttgtggtcacagagttaattatatctgttagaacaagcctttgaaagtttaatgagctctttagcattaacaacctttcatatttccttatttttttttcacctttccattcatccatcttaaattttgcagctcttaacaatgttattgcactagaaccccagagcagcattaggtgagtggaatgtgttccagggttaaaataaaaacaaggcacagtacatagtgtgttattcctattacataaagtattatataaaaacaagctaaatttctgctattagaaatcagaatagtggttattctggtgtggaggtaggggcagggagtaggagaggcttctgggtgctggttatggcacccagatctgtttcttgatctgtgtgctgatcacatgtgtgttcattttatgaaagatcattgtgcaatatactcatgacatctgcagttttctgtctttgtattttatacttaaatattcaaaaaattgggtgaaggaaatgcctgtgggctggatttactttgcttcacttagacctttaagaatcacagaaccac

SEQ ID NO: 318738 - DNA, 1764 bp, Homo sapiens
tctctgtgcgggtttaaatgggtaactgtgacttctcgcctcattcacccaaacctccagtcttctcccccgcacatcctcctccacccacctggtttctccctagactggtgtgctcgtgtgtgcaaccaaaggagggagtgcgagagatccacgaagggacaggcttggagtcgctagagggaggtgtgggaccagcgaggagggggcttcgccagggagggggtgctggcaggcggagggagcggcgggaggaggcgccggaggaggagacggaggcctggggacggcagaagaggcttcgcctgagccgagcgctctttctctcgccgcgccgtcttgaagccgcgcgggctcgtgagcagcgcgaggccgccaaggtgcctcgcttcgccggagccgctgccgcccgccggagggaagccggcctcgggcgcgcacgctcgtcggagccccggcgcgccccgcgcctgagcctgctgacagcggccgctgggctcaggctgtccgctctgggctccgcggcctcggccccgctgcactccacctccgccccctcggactccctcccctctgcttctactcctcctgctccagtgcggatcgtttcgcaactgcttgccactcgtcccgtgcctggctgtttttccatttcccggccccctcttcttgagtactttaccccctgcatttggggacagggactggaaaaggggcgggtggagcgtccagtggagaagaaggaagcgaggcccgcaggaggaggaggatcggcggactgtggggaggagaccccacgccaccctttctggtcatctcccctcccgccccgcccctgcgcacactccctcgcgggcgagctactttcggaccaggaaagtaagagcggccctgggtgacagcgccgcggggccagtcccggggttagccgcgcgtctgctcgcttctggtccgtcgcgctcccagccagggcacagcccggaccgaggatggcttcgaccacaacctgcaccaggttcacggacgagtatcagcttttcgaggagcttggaaagggggcattctcagtggtgagaagatgtatgaaaattcctactggacaagaatatgctgccaaaattatcaacaccaaaaagctttctgctaggggcagtcaagaaagtactgtaatttctcaacttcatggttacttgtcttgaattggaagtagaactgagactatgtagatggattaagttctgattatacattattgatttggcaaattggaacaatttggacaaattaaaatttgaaggtttcttggcaagaacaacattttaagaaaaaaattagtaaatcatttttatatttgtacatagaatctccacaactcttcagttatggacccagaagtggcatgtgtcatccttattattttgtatcctttacttacgtttagttgtatttacattcttctataggtcttcatattaaacattcattttcttctttcattgaatgaaagcattactgctcttcagaactagttaggagacacaaataataaaaaaaaaaagtatatccacacttccaggaaataatagaattcttttctgtatttcattaaatgaagaaaataaagaaagtggttgtcaggtgccatactgtgatattaataactagtgtaaacctctacctgattgtgtgagaactttgtttagacaattagattaatacttctcatttccattgaaatgttgaataaactgaatataaaaatta

SEQ ID NO: 318739 - DNA, 790 bp, Homo sapiens
ggaggctaagccgggaggattgcttgagtctggaaggttgaggctgcagtgagccatgattgcaccaatacactccagcctgggcaatggagcaagaccctgtctcaaaaataataataattattattattattattgcagaagtatttaatttcagaatcaaagatagttttataggatttggagagtgtcttacacttggacaataggacttggagagcatttttaaaaaatagtaaacctcaatcaagagttagaaaaactggaaaattcaccttaaaaataaaaaagtagaaattataaaaaggggcctcctaaaatattgtgtattatcatctgcttgaactggataaattagtttgttcctatcagagttctctgcaaaatgtctttttaagagtctgctcctcaacccaccttgccaaggtttatgatagaacttttgtatgtaagtgtttttagaggctctttccttcagtgactggtaaatcagaatgtttacacatgaaacaacaaaacacattaaagcacctattaattggttgttttcattatttttcttttacagaaaaatctgtgacccaggccttactgcttttgaacctgaagctttgggtaatttagtggaagggatggattttcaccgattctactttgaaaatggtacatttattcctaatttaataacatgccctttttaaacctctctgaattttcccaaatttgcagattattttgctcttttctacaatgagagtttttaccttcatccagcatttgaaaccataca

SEQ ID NO: 318740 - DNA, 4619 bp, Homo sapiens
tctctgtgcgggtttaaatgggtaactgtgacttctcgcctcattcacccaaacctccagtcttctcccccgcacatcctcctccacccacctggtttctccctagactggtgtgctcgtgtgtgcaaccaaaggagggagtgcgagagatccacgaagggacaggcttggagtcgctagagggaggtgtgggaccagcgaggagggggcttcgccagggagggggtgctggcaggcggagggagcggcgggaggaggcgccggaggaggagacggaggcctggggacggcagaagaggcttcgcctgagccgagcgctctttctctcgccgcgccgtcttgaagccgcgcgggctcgtgagcagcgcgaggccgccaaggtgcctcgcttcgccggagccgctgccgcccgccggagggaagccggcctcgggcgcgcacgctcgtcggagccccggcgcgccccgcgcctgagcctgctgacagcggccgctgggctcaggctgtccgctctgggctccgcggcctcggccccgctgcactccacctccgccccctcggactccctcccctctgcttctactcctcctgctccagtgcggatcgtttcgcaactgcttgccactcgtcccgtgcctggctgtttttccatttcccggccccctcttcttgagtactttaccccctgcatttggggacagggactggaaaaggggcgggtggagcgtccagtggagaagaaggaagcgaggcccgcaggaggaggaggatcggcggactgtggggaggagaccccacgccaccctttctggtcatctcccctcccgccccgcccctgcgcacactccctcgcgggcgagctactttcggaccaggaaagtaagagcggccctgggtgacagcgccgcggggccagtcccggggttagccgcgcgtctgctcgcttctggtccgtcgcgctcccagccagggcacagcccggaccgaggatggcttcgaccacaacctgcaccaggttcacggacgagtatcagcttttcgaggagcttggaaagggggcattctcagtggtgagaagatgtatgaaaattcctactggacaagaatatgctgccaaaattatcaacaccaaaaagctttctgctagggatcatcagaaactagaaagagaagctagaatctgccgtcttttgaagcaccctaatattgtgcgacttcatgatagcatatcagaagagggctttcactacttggtgtttgatttagttactggaggtgaactgtttgaagacatagtggcaagagaatactacagtgaagctgatgccagtcattgtatacagcagattctagaaagtgttaatcattgtcacctaaatggcatagttcacagggacctgaagcctgagaatttgcttttagctagcaaatccaagggagcagctgtgaaattggcagactttggcttagccatagaagttcaaggggaccagcaggcgtggtttggttttgctggcacacctggatatctttctccagaagttttacgtaaagatccttatggaaagccagtggatatgtgggcatgtggtgtcattctctatattctacttgtggggtatccacccttctgggatgaagaccaacacagactctatcagcagatcaaggctggagcttatgattttccatcaccagaatgggacacggtgactcctgaagccaaagacctcatcaataaaatgcttactatcaaccctgccaaacgcatcacagcctcagaggcactgaagcacccatggatctgtcaacgttctactgttgcttccatgatgcacagacaggagactgtagactgcttgaagaaatttaatgctagaagaaaactaaagggtgccatcttgacaactatgctggctacaaggaatttctcagcagccaagagtttgttgaagaaaccagatggagtaaaggagtcaactgagagttcaaatacaacaattgaggatgaagatgtgaaagcacgaaagcaagagattatcaaagtcactgaacaactgatcgaagctatcaacaatggggactttgaagcctacacaaaaatctgtgacccaggccttactgcttttgaacctgaagctttgggtaatttagtggaagggatggattttcaccgattctactttgaaaatgctttgtccaaaagcaataaaccaatccacactattattctaaaccctcatgtacatctggtaggggatgatgccgcctgcatagcatatattaggctcacacagtacatggatggcagtggaatgccaaagacaatgcagtcagaagagactcgtgtgtggcaccgccgggatggaaagtggcagaatgttcattttcatcgctcggggtcaccaacagtacccatcaagccaccctgtattccaaatgggaaagaaaacttctcaggaggcacctctttgtggcaaaacatctaaggcctgaaaaccattcacatatgggtcttctaaatttcaacagtgccacttctgcattctctgttctcaaggcacctggatggtgaccctgggccgtcctctcctcctcttcatgcatgtttctgagtgcatgaagttgtgaaggtcctacatgtaatgcatatgtgatgcatcatcttatcatatattccttcctatacattgtttacacttcaactacggggatgttccacacaaacttaaattactgttggcaaaacaatagggggagattagacaaaaaaaaaaatccacaatattccaagtacaactcttcatcaagtttctctgttaatgccaagatttaacagacttaagaactattgttctctgaatgacagttgtaagagaaatgtaaattttttagaactctttgctgttaatctgttttggtttgtttggttttttttttttttttttaaggtaaaaaaaaaatacaccttcagtttcctggtgtgatcctggttaaaatggatgatttttcattgaaagttttgctgattaacaattaaagtgggatgatatgtgggcaaaatcacttatgaaagtagaagcaagaatcagttggtttgctaccacataaagccatgctgtttttggtcaaactgtgtaaactggaaaaattcacatcatttctgagtttaatcactttaggatatattcacattgttttggtgaatttgctgaattgaattgtttttctttctcaaatctgtgatctcttttctttatcctgtttctttgttcctttcgtttgctttcttatttttcttttgttccattcttttcttacttttttcccttttccttttttggggaggctggctagtagtgtgtgagaaaagaatagaagtgaaatttgcataatgaatgtaaaagggaaataaaagtcttttgaaggtagctatactagcacttttgatcatcttcagggcccacaaaaatgttgtcaagattttaaaggtttataattctgcttaagctctagtttggacttaggtatcctaactatgttggaggtatttgcattgtttaaagttaggataaaagcaagttcctcctgtgactgcaacgtcttactgattgggacagttgccaggaggataccaacttgatagcagagggggttttatgcaaacgcactcacctccgccttggggaatgaaagggtcacttctgcatcatcactagctagttttctagtgttagagaggcttacaaatgtttgccattctcataagtgttttgaacttgatctttgtgacttgtgcttttttagcttctctcttgaatcagagtatcattgtcttcctccaaggagttagaatttcccagtttaaaacaaaaagggaaatgtcctaggttttctttgtgcttctcatttttcctttgttgattcaattcctgtgatttttgttctcttccctgaagtgctttacagtgcatggaatctccatcattgttattttaacgatagtaattcacagtcctcagaagcctatttttaaagcagaagcaaaaaagaaaaacaaaataacaaaaacaacccttcctcttttctctcatctcacctctctgtgttgattactaatcatcttagatattattgctagtggatgtatggtagatgggttgaagcttttctgataattattacacaatttaaaacaacatatatatttaaaataaatatatacagtaaatatattgagccatgttaacctgccaatgagatctgtgaaaaaataatggcctcatttttctctttttaatttcttttacccttttgtgaagcagctatacgtggcatacatgtatttaaagaaaaaaaaatagatgtagagtgttttttttacacttttaacttagcatgtggtgttgaagtattactgtagatcaagtttgtcttccgcactaagatgtgaggaaattgtgatttgttctctccaccacaaatgaattacacatttattatcttctatcattttgaaacactgcagtttaccatgggacactgtatatatttcttgccataatggtaaaggactgattgatatatttaagagttaataaatttgtgatttctgctga

SEQ ID NO: 318741 - DNA, 6197 bp, Homo sapiens
  misc_feature (6019)..(6019): n is a, c, g, or t
tctctgtgcgggtttaaatgggtaactgtgacttctcgcctcattcacccaaacctccagtcttctcccccgcacatcctcctccacccacctggtttctccctagactggtgtgctcgtgtgtgcaaccaaaggagggagtgcgagagatccacgaagggacaggcttggagtcgctagagggaggtgtgggaccagcgaggagggggcttcgccagggagggggtgctggcaggcggagggagcggcgggaggaggcgccggaggaggagacggaggcctggggacggcagaagaggcttcgcctgagccgagcgctctttctctcgccgcgccgtcttgaagccgcgcgggctcgtgagcagcgcgaggccgccaaggtgcctcgcttcgccggagccgctgccgcccgccggagggaagccggcctcgggcgcgcacgctcgtcggagccccggcgcgccccgcgcctgagcctgctgacagcggccgctgggctcaggctgtccgctctgggctccgcggcctcggccccgctgcactccacctccgccccctcggactccctcccctctgcttctactcctcctgctccagtgcggatcgtttcgcaactgcttgccactcgtcccgtgcctggctgtttttccatttcccggccccctcttcttgagtactttaccccctgcatttggggacagggactggaaaaggggcgggtggagcgtccagtggagaagaaggaagcgaggcccgcaggaggaggaggatcggcggactgtggggaggagaccccacgccaccctttctggtcatctcccctcccgccccgcccctgcgcacactccctcgcgggcgagctactttcggaccaggaaagtaagagcggccctgggtgacagcgccgcggggccagtcccggggttagccgcgcgtctgctcgcttctggtccgtcgcgctcccagccagggcacagcccggaccgaggatggcttcgaccacaacctgcaccaggttcacggacgagtatcagcttttcgaggagcttggaaagggggcattctcagtggtgagaagatgtatgaaaattcctactggacaagaatatgctgccaaaattatcaacaccaaaaagctttctgctagggatcatcagaaactagaaagagaagctagaatctgccgtcttttgaagcaccctaatattgtgcgacttcatgatagcatatcagaagagggctttcactacttggtgtttgatttagttactggaggtgaactgtttgaagacatagtggcaagagaatactacagtgaagctgatgccagtcattgtatacagcagattctagaaagtgttaatcattgtcacctaaatggcatagttcacagggacctgaagcctgagaatttgcttttagctagcaaatccaagggagcagctgtgaaattggcagactttggcttagccatagaagttcaaggggaccagcaggcgtggtttggttttgctggcacacctggatatctttctccagaagttttacgtaaagatccttatggaaagccagtggatatgtgggcatgtggtgtcattctctatattctacttgtggggtatccacccttctgggatgaagaccaacacagactctatcagcagatcaaggctggagcttatgattttccatcaccagaatgggacacggtgactcctgaagccaaagacctcatcaataaaatgcttactatcaaccctgccaaacgcatcacagcctcagaggcactgaagcacccatggatctgtcaacgttctactgttgcttccatgatgcacagacaggagactgtagactgcttgaagaaatttaatgctagaagaaaactaaagggtgccatcttgacaactatgctggctacaaggaatttctcagcagccaagagtttgttgaagaaaccagatggagtaaaggagtcaactgagagttcaaatacaacaattgaggatgaagatgtgaaagcacgaaagcaagagattatcaaagtcactgaacaactgatcgaagctatcaacaatggggactttgaagcctacacaaaaatctgtgacccaggccttactgcttttgaacctgaagctttgggtaatttagtggaagggatggattttcaccgattctactttgaaaatgctttgtccaaaagcaataaaccaatccacactattattctaaaccctcatgtacatctggtaggggatgatgccgcctgcatagcatatattaggctcacacagtacatggatggcagtggaatgccaaagacaatgcagtcagaagagactcgtgtgtggcaccgccgggatggaaagtggcagaatgttcattttcatcgctcggggtcaccaacagtacccatcaactaaatttcaacagtgccacttctgcattctctgttctcaaggcacctggatggtgaccctgggccgtcctctcctcctcttcatgcatgtttctgagtgcatgaagttgtgaaggtcctacatgtaatgcatatgtgatgcatcatcttatcatatattccttcctatacattgtttacacttcaactacggggatgttccacacaaacttaaattactgttggcaaaacaatagggggagattagacaaaaaaaaaaatccacaatattccaagtacaactcttcatcaagtttctctgttaatgccaagatttaacagacttaagaactattgttctctgaatgacagttgtaagagaaatgtaaattttttagaactctttgctgttaatctgttttggtttgtttggttttttttttttttttttaaggtaaaaaaaaaatacaccttcagtttcctggtgtgatcctggttaaaatggatgatttttcattgaaagttttgctgattaacaattaaagtgggatgatatgtgggcaaaatcacttatgaaagtagaagcaagaatcagttggtttgctaccacataaagccatgctgtttttggtcaaactgtgtaaactggaaaaattcacatcatttctgagtttaatcactttaggatatattcacattgttttggtgaatttgctgaattgaattgtttttctttctcaaatctgtgatctcttttctttatcctgtttctttgttcctttcgtttgctttcttatttttcttttgttccattcttttcttacttttttcccttttccttttttggggaggctggctagtagtgtgtgagaaaagaatagaagtgaaatttgcataatgaatgtaaaagggaaataaaagtcttttgaaggtagctatactagcacttttgatcatcttcagggcccacaaaaatgttgtcaagattttaaaggtttataattctgcttaagctctagtttggacttaggtatcctaactatgttggaggtatttgcattgtttaaagttaggataaaagcaagttcctcctgtgactgcaacgtcttactgattgggacagttgccaggaggataccaacttgatagcagagggggttttatgcaaacgcactcacctccgccttggggaatgaaagggtcacttctgcatcatcactagctagttttctagtgttagagaggcttacaaatgtttgccattctcataagtgttttgaacttgatctttgtgacttgtgcttttttagcttctctcttgaatcagagtatcattgtcttcctccaaggagttagaatttcccagtttaaaacaaaaagggaaatgtcctaggttttctttgtgcttctcatttttcctttgttgattcaattcctgtgatttttgttctcttccctgaagtgctttacagtgcatggaatctccatcattgttattttaacgatagtaattcacagtcctcagaagcctatttttaaagcagaagcaaaaaagaaaaacaaaataacaaaaacaacccttcctcttttctctcatctcacctctctgtgttgattactaatcatcttagatattattgctagtggatgtatggtagatgggttgaagcttttctgataattattacacaatttaaaacaacatatatatttaaaataaatatatacagtaaatatattgagccatgttaacctgccaatgagatctgtgaaaaaataatggcctcatttttctctttttaatttcttttacccttttgtgaagcagctatacgtggcatacatgtatttaaagaaaaaaaaatagatgtagagtgttttttttacacttttaacttagcatgtggtgttgaagtattactgtagatcaagtttgtcttccgcactaagatgtgaggaaattgtgatttgttctctccaccacaaatgaattacacatttattatcttctatcattttgaaacactgcagtttaccatgggacactgtatatatttcttgccataatggtaaaggactgattgatatatttaagagttaataaatttgtgatttctgctgacagtgcgtccatctttatttcttcagaagaggtactgtatgtatgcctgcatagtgctggccagtgtcaagggcagtgtgtcctactctggtctcatttagtacataacaatttgcacttggtgagaatggcaagttaattgttctctgtgagccaaaccatggtctcttctgggaaaatgttgctgagaaccatatagttaaccactaagactcctaaaagcttctctaaactgtaccctccaatccagccttcacatggctgccctttttttttttttaatacgaacctgtccttgtaacactttgatgttaccatttctgggatacaggcaagcaccccagctcctgctactccccagcttgaacttgagcatacatggatgctcagcttcttttgatttgctaaaaacatcacacttgctcacatgcctgtttatgctgttcatgttgtttatgtttcttacctagaataaatagtctcttcccctacttcttttcccgacttcttactttttcctaagattcagtgtacagcatcatgctccacagcaaaccttcctaggccctattctgggcttgccttccctctcaaaacctacataatagattgtatttacctctcctgtcaaccacattgttttgaaaatatatttctatttgtgtctcctctactgcagtataatgtctccatgggcaagaactgtgtattcatcattgcattcctaaacccaaaccaaggccaggaatggagatatcattgataaatagttgttgaattgaggccaagcccttttgataacagaagcctcaaggggtacccagatagtccttgttttaatgatgggttctctcaccactgtcttgatgctctgagcaagttacctcttccctctgaccctcagtttccatatttgtaaaatgagaataaacataccaacttaataaagatattgtgaggattaatgggtacagagtgactagaatgatatttgatagaaattaaatggtagcagtataactattctgatcactgacattaatattcctattgttattattctttactcacgagggtatacaactcttgttttgctgttgggctgccctctttatgtaggtttactgttaatgctgaggatatactcggactcaaatgtctcagcagaaggctgagagacaccaaatgaagtggtcatctagctgaatgtaggaaaaatgaaatgtagtagcaaatcagtatattctaaggaaattttcaaggaatattaatcttcacccaaattttgaatttttatgtaaaaaattataatttaagggtaaacatagatgacacagctttcgagtgatttcattgaataaaattctactgacttctatgaaaaaaaaaaaaaataaaaaaaaaaaaaaaaaaaaaaaaaaggggggggggcgcctaaaaatataaccaccggagggcggacaatactatccacaccccacgtttttgtaaacagnggccccaatgagagggggtatataaagagacggagacagcgcactatcaaaccgcccgcgcggcacaaggcctggactctggcgaacacccccgtgtgcgagactaggcacccactcggatttaccccggacaacactccgtctgagtacccacgcattacgcgacatcgcggcatga

SEQ ID NO: 318742 - DNA, 5070 bp, Homo sapiens
  misc_feature (4892)..(4892): n is a, c, g, or t
tctctgtgcgggtttaaatgggtaactgtgacttctcgcctcattcacccaaacctccagtcttctcccccgcacatcctcctccacccacctggtttctccctagactggtgtgctcgtgtgtgcaaccaaaggagggagtgcgagagatccacgaagggacaggcttggagtcgctagagggaggtgtgggaccagcgaggagggggcttcgccagggagggggtgctggcaggcggagggagcggcgggaggaggcgccggaggaggagacggaggcctggggacggcagaagaggcttcgcctgagccgagcgctctttctctcgccgcgccgtcttgaagccgcgcgggctcgtgagcagcgcgaggccgccaaggtgcctcgcttcgccggagccgctgccgcccgccggagggaagccggcctcgggcgcgcacgctcgtcggagccccggcgcgccccgcgcctgagcctgctgacagcggccgctgggctcaggctgtccgctctgggctccgcggcctcggccccgctgcactccacctccgccccctcggactccctcccctctgcttctactcctcctgctccagtgcggatcgtttcgcaactgcttgccactcgtcccgtgcctggctgtttttccatttcccggccccctcttcttgagtactttaccccctgcatttggggacagggactggaaaaggggcgggtggagcgtccagtggagaagaaggaagcgaggcccgcaggaggaggaggatcggcggactgtggggaggagaccccacgccaccctttctggtcatctcccctcccgccccgcccctgcgcacactccctcgcgggcgagctactttcggaccaggaaagtaagagcggccctgggtgacagcgccgcggggccagtcccggggttagccgcgcgtctgctcgcttctggtccgtcgcgctcccagccagggcacagcccggaccgaggatggcttcgaccacaacctgcaccaggttcacggacgagtatcagcttttcgaggagcttggaaagggggcattctcagtggtgagaagatgtatgaaaattcctactggacaagaatatgctgccaaaattatcaacaccaaaaagctttctgctagggtggcagaatgttcattttcatcgctcggggtcaccaacagtacccatcaagccaccctgtattccaaatgggaaagaaaacttctcaggaggcacctctttgtggcaaaacatctaaggcctgaaaaccattcacatatgggtcttctaaatttcaacagtgccacttctgcattctctgttctcaaggcacctggatggtgaccctgggccgtcctctcctcctcttcatgcatgtttctgagtgcatgaagttgtgaaggtcctacatgtaatgcatatgtgatgcatcatcttatcatatattccttcctatacattgtttacacttcaactacggggatgttccacacaaacttaaattactgttggcaaaacaatagggggagattagacaaaaaaaaaaatccacaatattccaagtacaactcttcatcaagtttctctgttaatgccaagatttaacagacttaagaactattgttctctgaatgacagttgtaagagaaatgtaaattttttagaactctttgctgttaatctgttttggtttgtttggttttttttttttttttttaaggtaaaaaaaaaatacaccttcagtttcctggtgtgatcctggttaaaatggatgatttttcattgaaagttttgctgattaacaattaaagtgggatgatatgtgggcaaaatcacttatgaaagtagaagcaagaatcagttggtttgctaccacataaagccatgctgtttttggtcaaactgtgtaaactggaaaaattcacatcatttctgagtttaatcactttaggatatattcacattgttttggtgaatttgctgaattgaattgtttttctttctcaaatctgtgatctcttttctttatcctgtttctttgttcctttcgtttgctttcttatttttcttttgttccattcttttcttacttttttcccttttccttttttggggaggctggctagtagtgtgtgagaaaagaatagaagtgaaatttgcataatgaatgtaaaagggaaataaaagtcttttgaaggtagctatactagcacttttgatcatcttcagggcccacaaaaatgttgtcaagattttaaaggtttataattctgcttaagctctagtttggacttaggtatcctaactatgttggaggtatttgcattgtttaaagttaggataaaagcaagttcctcctgtgactgcaacgtcttactgattgggacagttgccaggaggataccaacttgatagcagagggggttttatgcaaacgcactcacctccgccttggggaatgaaagggtcacttctgcatcatcactagctagttttctagtgttagagaggcttacaaatgtttgccattctcataagtgttttgaacttgatctttgtgacttgtgcttttttagcttctctcttgaatcagagtatcattgtcttcctccaaggagttagaatttcccagtttaaaacaaaaagggaaatgtcctaggttttctttgtgcttctcatttttcctttgttgattcaattcctgtgatttttgttctcttccctgaagtgctttacagtgcatggaatctccatcattgttattttaacgatagtaattcacagtcctcagaagcctatttttaaagcagaagcaaaaaagaaaaacaaaataacaaaaacaacccttcctcttttctctcatctcacctctctgtgttgattactaatcatcttagatattattgctagtggatgtatggtagatgggttgaagcttttctgataattattacacaatttaaaacaacatatatatttaaaataaatatatacagtaaatatattgagccatgttaacctgccaatgagatctgtgaaaaaataatggcctcatttttctctttttaatttcttttacccttttgtgaagcagctatacgtggcatacatgtatttaaagaaaaaaaaatagatgtagagtgttttttttacacttttaacttagcatgtggtgttgaagtattactgtagatcaagtttgtcttccgcactaagatgtgaggaaattgtgatttgttctctccaccacaaatgaattacacatttattatcttctatcattttgaaacactgcagtttaccatgggacactgtatatatttcttgccataatggtaaaggactgattgatatatttaagagttaataaatttgtgatttctgctgacagtgcgtccatctttatttcttcagaagaggtactgtatgtatgcctgcatagtgctggccagtgtcaagggcagtgtgtcctactctggtctcatttagtacataacaatttgcacttggtgagaatggcaagttaattgttctctgtgagccaaaccatggtctcttctgggaaaatgttgctgagaaccatatagttaaccactaagactcctaaaagcttctctaaactgtaccctccaatccagccttcacatggctgccctttttttttttttaatacgaacctgtccttgtaacactttgatgttaccatttctgggatacaggcaagcaccccagctcctgctactccccagcttgaacttgagcatacatggatgctcagcttcttttgatttgctaaaaacatcacacttgctcacatgcctgtttatgctgttcatgttgtttatgtttcttacctagaataaatagtctcttcccctacttcttttcccgacttcttactttttcctaagattcagtgtacagcatcatgctccacagcaaaccttcctaggccctattctgggcttgccttccctctcaaaacctacataatagattgtatttacctctcctgtcaaccacattgttttgaaaatatatttctatttgtgtctcctctactgcagtataatgtctccatgggcaagaactgtgtattcatcattgcattcctaaacccaaaccaaggccaggaatggagatatcattgataaatagttgttgaattgaggccaagcccttttgataacagaagcctcaaggggtacccagatagtccttgttttaatgatgggttctctcaccactgtcttgatgctctgagcaagttacctcttccctctgaccctcagtttccatatttgtaaaatgagaataaacataccaacttaataaagatattgtgaggattaatgggtacagagtgactagaatgatatttgatagaaattaaatggtagcagtataactattctgatcactgacattaatattcctattgttattattctttactcacgagggtatacaactcttgttttgctgttgggctgccctctttatgtaggtttactgttaatgctgaggatatactcggactcaaatgtctcagcagaaggctgagagacaccaaatgaagtggtcatctagctgaatgtaggaaaaatgaaatgtagtagcaaatcagtatattctaaggaaattttcaaggaatattaatcttcacccaaattttgaatttttatgtaaaaaattataatttaagggtaaacatagatgacacagctttcgagtgatttcattgaataaaattctactgacttctatgaaaaaaaaaaaaaataaaaaaaaaaaaaaaaaaaaaaaaaaggggggggggcgcctaaaaatataaccaccggagggcggacaatactatccacaccccacgtttttgtaaacagnggccccaatgagagggggtatataaagagacggagacagcgcactatcaaaccgcccgcgcggcacaaggcctggactctggcgaacacccccgtgtgcgagactaggcacccactcggatttaccccggacaacactccgtctgagtacccacgcattacgcgacatcgcggcatga

SEQ ID NO: 318743 - DNA, 2570 bp, Homo sapiens
tctctgtgcgggtttaaatgggtaactgtgacttctcgcctcattcacccaaacctccagtcttctcccccgcacatcctcctccacccacctggtttctccctagactggtgtgctcgtgtgtgcaaccaaaggagggagtgcgagagatccacgaagggacaggcttggagtcgctagagggaggtgtgggaccagcgaggagggggcttcgccagggagggggtgctggcaggcggagggagcggcgggaggaggcgccggaggaggagacggaggcctggggacggcagaagaggcttcgcctgagccgagcgctctttctctcgccgcgccgtcttgaagccgcgcgggctcgtgagcagcgcgaggccgccaaggtgcctcgcttcgccggagccgctgccgcccgccggagggaagccggcctcgggcgcgcacgctcgtcggagccccggcgcgccccgcgcctgagcctgctgacagcggccgctgggctcaggctgtccgctctgggctccgcggcctcggccccgctgcactccacctccgccccctcggactccctcccctctgcttctactcctcctgctccagtgcggatcgtttcgcaactgcttgccactcgtcccgtgcctggctgtttttccatttcccggccccctcttcttgagtactttaccccctgcatttggggacagggactggaaaaggggcgggtggagcgtccagtggagaagaaggaagcgaggcccgcaggaggaggaggatcggcggactgtggggaggagaccccacgccaccctttctggtcatctcccctcccgccccgcccctgcgcacactccctcgcgggcgagctactttcggaccaggaaagtaagagcggccctgggtgacagcgccgcggggccagtcccggggttagccgcgcgtctgctcgcttctggtccgtcgcgctcccagccagggcacagcccggaccgaggatggcttcgaccacaacctgcaccaggttcacggacgagtatcagcttttcgaggagcttggaaagggggcattctcagtggtgagaagatgtatgaaaattcctactggacaagaatatgctgccaaaattatcaacaccaaaaagctttctgctagggatcatcagaaactagaaagagaagctagaatctgccgtcttttgaagcaccctaatattgtgcgacttcatgatagcatatcagaagagggctttcactacttggtgtttgatttagttactggaggtgaactgtttgaagacatagtggcaagagaatactacagtgaagctgatgccagtcattgtatacagcagattctagaaagtgttaatcattgtcacctaaatggcatagttcacagggacctgaagcctgagaatttgcttttagctagcaaatccaagggagcagctgtgaaattggcagactttggcttagccatagaagttcaaggggaccagcaggcgtggtttggttttgctggcacacctggatatctttctccagaagttttacgtaaagatccttatggaaagccagtggatatgtgggcatgtggtgtcattctctatattctacttgtggggtatccacccttctgggatgaagaccaacacagactctatcagcagatcaaggctggagcttatgattttccatcaccagaatgggacacggtgactcctgaagccaaagacctcatcaataaaatgcttactatcaaccctgccaaacgcatcacagcctcagaggcactgaagcacccatggatctgtcaacgttctactgttgcttccatgatgcacagacaggagactgtagactgcttgaagaaatttaatgctagaagaaaactaaagggtgccatcttgacaactatgctggctacaaggaatttctcagcagccaagagtttgttgaagaaaccagatggagtaaaggagtcaactgagagttcaaatacaacaattgaggatgaagatgtgaaagcacgaaagcaagagattatcaaagtcactgaacaactgatcgaagctatcaacaatggggactttgaagcctacacaaaaatctgtgacccaggccttactgcttttgaacctgaagctttgggtaatttagtggaagggatggattttcaccgattctactttgaaaatgctttgtccaaaagcaataaaccaatccacactattattctaaaccctcatgtacatctggtaggggatgatgccgcctgcatagcatatattaggctcacacagtacatggatggcagtggaatgccaaagacaatgcagtcagaagagactcgtgtgtggcaccgccgggatggaaagtggcagaatgttcattttcatcgctcggggtcaccaacagtacccatcaagtaaatatttccaggctgtcagcttctttgttaatacacccatggtcagctccttctacttattccattgttaatagcatggtatatgttatttaacgctagtagttggttacactgatgaaaataaatgccttcacgggaaaggtta

SEQ ID NO: 318744 - DNA, 1226 bp, Homo sapiens
  misc_feature (33)..(33): n is a, c, g, or t
  misc_feature (36)..(36): n is a, c, g, or t
atctttgactacggtgaaatccccaactttccncgnaagtacagtgccaggtcatgctggccgactggtgtttgggttcctgaatggcagggcctgtgtgatgatgcagggcaggttccacatgtatgaagggtacccactctggaaggtgacattcccagtgagggttttccaccttctgggtgtggacaccctggtagtcaccaatgcagcaggagggctgaaccccaagtttgaggttggagatatcatgctgatccgtgaccatatcaacctacctggtttcagtggtcagaaccctctcagagggcccaatgatgaaaggtttggagatcgtttccctgccatgtctgatgcctacgaccggactatgaggcagagggctctcagtacctggaaacaaatgggggagcaacgtgagctacaggaaggcacctatgtgatggtggcaggccccagctttgagactgtggcagaatgtcgtgtgctgcagaagctgggagcagacgctgttggcatgagtacagtaccagaagttatcgttgcacggcactgtggacttcgagtctttggcttctcactcatcactaacaaggtcatcatggattatgaaagcctggagaaggccaaccatgaagaagtcttagcagctggcaaacaagctgcacagaaattggaacagtttgtctccattcttatggccagcattccactccctgacaaagccagttgacctgccttggagtcgtctggcatctcccacacaagacccaagtagctgctaccttctttggccccttgctggagtcatgtgcctctgtccttaggttgtagcagaaaggaaaagattcctgtccttcacctttcccactttcttctaccagacccttctggtgccagatcctcttctcaaagctgggattacaggtgtgagcatagtgagaccttggcgctacaaaataaagctgttctcattcctgttctttcttacacaagagctggagcccgtgccctaccacacatctgtggagatgcccaggatttgactcgggccttagaactttgcatagcagctgctactagctctttgagataatacattccgaggggctcagttctgccttatctaaatcaccagagaccaaacaaggactaatccaatacctcttggattttatttaatgtcataatgttgtcagaataaagagaaagatgaaataatttca

SEQ ID NO: 318745 - DNA, 1497 bp, Homo sapiens
  misc_feature (33)..(33): n is a, c, g, or t
  misc_feature (36)..(36): n is a, c, g, or t
atctttgactacggtgaaatccccaactttccncgnaagtacagtgccaggtcatgctggccgactggtgtttgggttcctgaatggcagggcctgtgtgatgatgcagggcaggttccacatgtatgaagggtacccactctggaaggtgacattcccagtgagggttttccaccttctgggtgtggacaccctggtagtcaccaatgcagcaggagggctgaaccccaagtttgaggttggagatatcatgctgatccgtgaccatatcaacctacctggtttcagtggtcagaaccctctcagagggcccaatgatgaaaggtttggagatcgtttccctgccatgtctgatgcctacgaccggactatgaggcagagggctctcagtacctggaaacaaatgggggagcaacgtgagctacaggaaggcacctatgtgatggtggcaggccccagctttgagactgtggcagaatgtcgtgtgctgcagaagctgggagcagacgctgttggcatgagtacagtaccagaagttatcgttgcacggcactgtggacttcgagtctttggcttctcactcatcactaacaaggtcatcatggattatgaaagcctggagaaggccaaccatgaagaagtcttagcagctggcaaacaagctgcacagaaattggaacagtttgtctccattcttatggccagcattccactccctgacaaagccagttgacctgccttggagtcgtctggcatctcccacacaagacccaagtagctgctaccttctttggccccttgctggagtcatgtgcctctgtccttaggttgtagcagaaaggaaaagattcctgtccttcacctttcccactttcttctaccagacccttctggtgccagatcctcttctcaaagctgggattacaggtgtgagcatagtgagaccttggcgctacaaaataaagctgttctcattcctgttctttcttacacaagagctggagcccgtgccctaccacacatctgtggagatgcccaggatttgactcgggccttagaactttgcatagcagctgctactagctctttgagataatacattccgaggggctcagttctgccttatctaaatcaccagagaccaaacaaggactaatccaatacctcttggattttatttaatgtcataatgttgtcagaataaagagaaagatgaaataatttcaaaaaaaaaaaaaaaaaaaaaaaaaaaaaaaaaaaaaaaaaaaaaaaaaaaaaaaaaaaaacaaaaaaaaaacaaaaaaacaacaaaaaaaacacaaaaacaaaacaacacaacaacagagaacagaaacaaaagaaagacaaaataaagaaaggaggaggcgaagagacgcagaaaacaaaatgagaagccgacggcgagcgaacgcacgagacagtggacgggacggcaacacaacaggggagcccaggcgacacacgcaagaccccgca

SEQ ID NO: 318746 - DNA, 1200 bp, Homo sapiens
  misc_feature (33)..(33): n is a, c, g, or t
  misc_feature (36)..(36): n is a, c, g, or t
atctttgactacggtgaaatccccaactttccncgnaagtacagtgccaggtcatgctggccgactggtgtttgggttcctgaatggcagggcctgtgtgatgatgcagggcaggttccacatgtatgaagggtacccactctggaaggtgacattcccagtgagggttttccaccttctgggtgtggacaccctggtagtcaccaatgcagcaggagggctgaaccccaagtttgaggttggagatatcatgctgatccgtgaccatatcaacctacctggtttcagtggtcagaaccctctcagagggcccaatgatgaaaggtttggagatcgtttccctgccatgtctgatgcctacgaccggactatgaggcagagggctctcagtacctggaaacaaatgggggagcaacgtgagctacaggaaggcacctatgtgatggtggcaggccccagctttgagactgtggcagaatgtcgtgtgctgcagaagctgggagcagacgctgttggcatgagtacagtaccagaagttatcgttgcacggcactgtggacttcgagtctttggcttctcactcatcactaacaaggtcatcatggattatgaaagcctggagaaggccaaccatgaagaagtcttagcagctggcaaacaagctgcacagaaattggaacagtttgtctccattcttatggccagcattccactccctgacaaagccagttgacctgccttggagtcgtctggcatctcccacacaagacccaagtagctgctaccttctttggccccttgctggagtcatgtgcctctgtccttaggttgtagcagaaaggaaaagattcctgtccttcacctttcccactttcttctaccagacccttctggtgccagatcctcttctcaaagctgggattacaggtgtgagcatagtgagaccttggcgctacaaaataaagctgttctcattcctgttctttcttacacaagagctggagcccgtgccctaccacacatgggccttagaactttgcatagcagctgctactagctctttgagataatacattccgaggggctcagttctgccttatctaaatcaccagagaccaaacaaggactaatccaatacctcttggattttatttaatgtcataatgttgtcagaataaagagaaagatgaaataatttca

SEQ ID NO: 318747 - DNA, 1031 bp, Homo sapiens
  misc_feature (33)..(33): n is a, c, g, or t
  misc_feature (36)..(36): n is a, c, g, or t
atctttgactacggtgaaatccccaactttccncgnaagtacagtgccaggtcatgctggccgactggtgtttgggttcctgaatggcagggcctgtgtgatgatgcagggcaggttccacatgtatgaagggtacccactctggaaggtgacattcccagtgagggttttccaccttctgggtgtggacaccctggtagtcaccaatgcagcaggagggctgaaccccaagtttgaggttggagatatcatgctgatccgtgaccatatcaacctacctggtttcagtggtcagaaccctctcagagggcccaatgatgaaaggtttggagatcgtttccctgccatgtctgatgcctacgaccggactatgaggcagagggctctcagtacctggaaacaaatgggggagcaacgtgagctacaggaaggcacctatgtgatggtggcaggccccagctttgagactgtggcagaatgtcgtgtgctgcagaagctgggagcagacgctgttggcatgagtacagtaccagaagttatcgttgcacggcactgtggacttcgagtctttggcttctcactcatcactaacaaggtcatcatggattatgaaagcctggagaaggccaaccatgaagaagtcttagcagctggcaaacaagctgcacagaaattggaacagtttgtctccattcttatggccagcattccactccctgacaaagccagttgacctgccttggagtcgtctggcatctcccacacaagacccaagtagctgctaccttctttggccccttgctggagtcatgtgcctctgtccttaggttgtagcagaaaggaaaagattcctgtccttcacctttcccactttcttctaccagacccttctggtgccagatcctcttctcaaagctgggattacaggtgtgagcatagtgagaccttggcgctacaaaataaagctgttctcattcccgctcggtctacccagagcagatcaccgctgtcctctgtagaaggcgccaggt

SEQ ID NO: 318748 - DNA, 1150 bp, Homo sapiens
  misc_feature (33)..(33): n is a, c, g, or t
  misc_feature (36)..(36): n is a, c, g, or t
atctttgactacggtgaaatccccaactttccncgnaagtacagtgccaggtcatgctggccgactggtgtttgggttcctgaatggcagggcctgtgtgatgatgcagggcaggttccacatgtatgaagggtacccactctggaaggtgacattcccagtgagggttttccaccttctgggtgtggacaccctggtagtcaccaatgcagcaggagggctgaaccccaagtttgaggttggagatatcatgctgatccgtgaccatatcaacctacctggtttcagtggtcagaaccctctcagagggcccaatgatgaaaggtttggagatcgtttccctgccatgtctgatgcctacgaccggactatgaggcagagggctctcagtacctggaaacaaatgggggagcaacgtgagctacaggaaggcacctatgtgatggtggcaggccccagctttgagactgtggcagaatgtcgtgtgctgcagaagctgggagcagacgctgttggcatgagtacagtaccagaagttatcgttgcacggcactgtggacttcgagtctttggcttctcactcatcactaacaaggtcatcatggattatgaaagcctggagaaggccaaccatgaagaagtcttagcagctggcaaacaagctgcacagaaattggaacagtttgtctccattcttatggccagcattccactccctgacaaagccagttgacctgccttggagtcgtctggcatctcccacacaagcgcctgggcgttgttggtcacctggtatttctcccgttccactccggtggccgtgccgccggcgattgcccatggttacgccaaggcgctgaaacaggcacgcaacggcgaaccaggcgccgcccgcgtgctgtatcaacagctgggccgcccggacttgtcgcctgaacgtcgcgccgccttgcacgccgaactgcccaattacccaagccctcaagcgctgaagctggcggataaaggcctggcggatgagtcgccattggttcgcgaggcggcgattcacagcattgtcggcctggtgcccagcggccaacgcaccttgctgcttggcccggcattgggcgacccagagcaagaagtacgcttgccaataagcgcctgg

SEQ ID NO: 318749 - DNA, 1088 bp, Homo sapiens
cagtggcatatgaagtgctatggtgaaaaatacaagagaagacatggccactgttcttgaatggaaaatttaattgggactaaaagacatatatatgcatcaaacagttaagcaagtgatcaatatgcaaatgcatgttaatatgctaaaaactgcattgctatagcacctaaaagtatagaaattataactagggtgcaaaatgtacatgggaaaggtttaagaaaagcacattataagcaggtaagaatcaaaaggaaggaaaatgggggagcaacgtgagctacaggaaggcacctatgtgatggtggcaggccccagctttgagactgtggcagaatgtcgtgtgctgcagaagctgggagcagacgctgttggcatgagtacagtaccagaagttatcgttgcacggcactgtggacttcgagtctttggcttctcactcatcactaacaaggtcatcatggattatgaaagcctggagaaggccaaccatgaagaagtcttagcagctggcaaacaagctgcacagaaattggaacagtttgtctccattcttatggccagcattccactccctgacaaagccagttgacctgccttggagtcgtctggcatctcccacacaagacccaagtagctgctaccttctttggccccttgctggagtcatgtgcctctgtccttaggttgtagcagaaaggaaaagattcctgtccttcacctttcccactttcttctaccagacccttctggtgccagatcctcttctcaaagctgggattacaggtgtgagcatagtgagaccttggcgctacaaaataaagctgttctcattcctgttctttcttacacaagagctggagcccgtgccctaccacacatctgtggagatgcccaggatttgactcgggccttagaactttgcatagcagctgctactagctctttgagataatacattccgaggggctcagttctgccttatctaaatcaccagagaccaaacaaggactaatccaatacctcttggattttatttaatgtcataatgttgtcagaataaagagaaagatgaaataatttca

SEQ ID NO: 318750 - DNA, 1541 bp, Homo sapiens
tcaccagacttaaactttctgaaagcagagataataatgagtcttttacttaattacaacctaacattttgagcagagcgagtaactcacagtaggtgcttaatggatatgtgttgcatgaaaatataatcccattcatttctctttctgttttgtatacagtgccaggtcatgctggccgactggtgtttgggttcctgaatggcagggcctgtgtgatgatgcagggcaggttccacatgtatgaagggtacccactctggaaggtaagtcagagggataggtccggttggatctggaagaggcaggagagaactatctagcctctttcactacctagctatctgggctaggtggatttttggtcctctccttccttttctttcacgatgtatgtcatgcatttcagtgtagctgaattaatgaaattttgtaaatttttttcggattgtttgcttcgaaggtgacattcccagtgagggttttccaccttctgggtgtggacaccctggtagtcaccaatgcagcaggagggctgaaccccaagtttgaggttggagatatcatgctgatccgtgaccatatcaacctacctggtttcagtggtcagaaccctctcagagggcccaatgatgaaaggtttggagatcgtttccctgccatgtctgatgcctacgaccggactatgaggcagagggctctcagtacctggaaacaaatgggggagcaacgtgagctacaggaaggcacctatgtgatggtggcaggccccagctttgagactgtggcagaatgtcgtgtgctgcagaagctgggagcagacgctgttggcatgagtacagtaccagaagttatcgttgcacggcactgtggacttcgagtctttggcttctcactcatcactaacaaggtcatcatggattatgaaagcctggagaaggccaaccatgaagaagtcttagcagctggcaaacaagctgcacagaaattggaacagtttgtctccattcttatggccagcattccactccctgacaaagccagttgacctgccttggagtcgtctggcatctcccacacaagacccaagtagctgctaccttctttggccccttgctggagtcatgtgcctctgtccttaggttgtagcagaaaggaaaagattcctgtccttcacctttcccactttcttctaccagacccttctggtgccagatcctcttctcaaagctgggattacaggtgtgagcatagtgagaccttggcgctacaaaataaagctgttctcattcctgttctttcttacacaagagctggagcccgtgccctaccacacatctgtggagatgcccaggatttgactcgggccttagaactttgcatagcagctgctactagctctttgagataatacattccgaggggctcagttctgccttatctaaatcaccagagaccaaacaaggactaatccaatacctcttggattttatttaatgtcataatgttgtcagaataaagagaaagatgaaataatttca

SEQ ID NO: 318751 - DNA, 1655 bp, Homo sapiens
tcaccagacttaaactttctgaaagcagagataataatgagtcttttacttaattacaacctaacattttgagcagagcgagtaactcacagtaggtgcttaatggatatgtgttgcatgaaaatataatcccattcatttctctttctgttttgtatacagtgccaggtcatgctggccgactggtgtttgggttcctgaatggcagggcctgtgtgatgatgcagggcaggttccacatgtatgaagggtacccactctggaaggtaagtcagagggataggtccggttggatctggaagaggcaggagagaactatctagcctctttcactacctagctatctgggctaggtggatttttggtcctctccttccttttctttcacgatgtatgtcatgcatttcagtgtagctgaattaatgaaattttgtaaatttttttcggattgtttgcttcgaaggtgacattcccagtgagggttttccaccttctgggtgtggacaccctggtagtcaccaatgcagcaggagggctgaaccccaagtttgaggttggagatatcatgctgatccgtgaccatatcaacctacctggtttcagtggtcagaaccctctcagagggcccaatgatgaaaggtatgtatgttactccgttttttttaggtgggtaggatttaaagacttctctaggagctgtgggagaatttttaaaattccgtttatgtgagataattcaacctgtgtcctaaggtttggagatcgtttccctgccatgtctgatgcctacgaccggactatgaggcagagggctctcagtacctggaaacaaatgggggagcaacgtgagctacaggaaggcacctatgtgatggtggcaggccccagctttgagactgtggcagaatgtcgtgtgctgcagaagctgggagcagacgctgttggcatgagtacagtaccagaagttatcgttgcacggcactgtggacttcgagtctttggcttctcactcatcactaacaaggtcatcatggattatgaaagcctggagaaggccaaccatgaagaagtcttagcagctggcaaacaagctgcacagaaattggaacagtttgtctccattcttatggccagcattccactccctgacaaagccagttgacctgccttggagtcgtctggcatctcccacacaagacccaagtagctgctaccttctttggccccttgctggagtcatgtgcctctgtccttaggttgtagcagaaaggaaaagattcctgtccttcacctttcccactttcttctaccagacccttctggtgccagatcctcttctcaaagctgggattacaggtgtgagcatagtgagaccttggcgctacaaaataaagctgttctcattcctgttctttcttacacaagagctggagcccgtgccctaccacacatctgtggagatgcccaggatttgactcgggccttagaactttgcatagcagctgctactagctctttgagataatacattccgaggggctcagttctgccttatctaaatcaccagagaccaaacaaggactaatccaatacctcttggattttatttaatgtcataatgttgtcagaataaagagaaagatgaaataatttca

SEQ ID NO: 318752 - DNA, 792 bp, Homo sapiens
  misc_feature (33)..(33): n is a, c, g, or t
  misc_feature (36)..(36): n is a, c, g, or t
atctttgactacggtgaaatccccaactttccncgnaagtacagtgccaggtcatgctggccgactggtgtttgggttcctgaatggcagggcctgtgtgatgatgcagggcaggttccacatgtatgaagggtacccactctggaaggtgacattcccagtgagggttttccaccttctgggtgtggacaccctggtagtcaccaatgcagcaggagggctgaaccccaagtttgaggttggagatatcatgctgatccgtgaccatatcaacctacctggtttcagtggtcagaaccctctcagagggcccaatgatgaaaggtttggagatcgtttccctgccatgtctgatgcctacgaccggactatgaggcagagggctctcagtacctggaaacaaatgggggagcaacgtgagctacaggaaggcacctatgtgatggtggcaggccccagctttgagactgtggcagaatgtcgtgtgctgcagaagctgggagcagacgctgttggcatgagtacagtaccagaagttatcgttgcacggcactgtggacttcgagtctttggcttctcactcatcactaacaaggtcatcatggattatgaaagcctggagaaggccaaccatgaagaagtcttagcagctggcaaacaagctgcacagaaattggaacagtttgtctccattcttatggccagcattccactccctgacaaagccagttgacctgccttggagtcgtctggcatctcccacacaagcgcctgggggatcctctagagtca

SEQ ID NO: 318753 - DNA, 462 bp, Homo sapiens
cattattattccagagtattgtaaagactcataacttggattttttttaactgtagactttttttattgaagtgaaattcataaaacgttaagttaaccatttaaaaataaacaattcaggcccatgcctgtaatcccagcactttgagaggccaaggccagggggctttaggccagcagttcaagaccagcgtgggcaatatagtgagacctcattgctaccaaaataataatttgctgggtttagtggtgtctagttctagctactcaggaggctgaggtgggaggaaagcttgagcctaagtggtcaaggctgcagtgagctgtgatcatgccgctgcactccagcctcagcaacagagcgagactgtctacaaaaaaatgaaaaataaaaataaacaaacaatgcagtggcatttagtacattcacaatgctgtgcaaccatcatctctgtctagttc

SEQ ID NO: 318754 - DNA, 956 bp, Homo sapiens
atgtcatagaattctcaaaacttcctaactgcttctctctctctcttttactcttactctttctctctcactctctctcttttcccacccttaagccaagtacagggatagttgtctcatcattggtggcttaaaatgatgtttttgaacaagaagacgccccatgggtacttttggtgactagcactatctctgtttttttccttttaaattcctgagctattgtttagcagtacacccttttatctccattgctactgaagctgaatgttacttgggtggaaagcataactgctttcttttctatgtccttaaaccctttgataatgttactgtttgagagtccctgaagccaggatactagaagagtctggcttgtctgaacagctgaactacgaaataatggagtagggcaggtgggtgggggagcagggcgttctgtcgataaacgagctcccttctttgcacacatagccagttaatcgggcattctgagatagtttggatggggagggggagcttctgagaatcgccagtgacagttaagtggcctattgttgacgtcctctgctgaacgacttggttggattcagcttctgccttacccccaccccctgtggattttctgttagattcatcatttgccattcaggcatcatctttcactttctccttccaacatgactgctttgtgtgctggcccctgctttactcctgctattcccaaactataaagggaactgtgtggggcttcagcaggactgagaaattgactctgctgtctgttgagaactctaataatgactgcggtgaccttcatgtctagcagaaaacccactgtctgtgctagcacaatgatgaccacctgaagacagagaaaagggaatcttgattgaattccttctcatacaatatatagttatttcctttgttctcctctccattctcttctcttc

SEQ ID NO: 318755 - DNA, 969 bp, Homo sapiens
atgtcatagaattctcaaaacttcctaactgcttctctctctctcttttactcttactctttctctctcactctctctcttttcccacccttaagccaagtacagggatagttgtctcatcattggtggcttaaaatgatgtttttgaacaagaagacgccccatgggtacttttggtgactagcactatctctgtttttttccttttaaattcctgagctattgtttagcagtacacccttttatctccattgctactgaagctgaatgttacttgggtggaaagcataactgctttcttttctatgtccttaaaccctttgataatgttactgtttgagagtccctgaagccaggatactagaagagtctggcttgtctgaacagctgaactacgaaataatggagtagggcaggctttaccaagccaattcactcaagttgtctcatctataccccttcaaaccctgtgagagatggatgctttgatgctcacaaggggctgccctggcaaacctcctgagagaaaagaaaagctaaggctgggctttccagcctctaggtgctgtgctgtcctgaggcctgggccatggtgcccaaggaaagcccctgaagctcaccaggaggaagaagcatgcagggcacccctggaggcgggacgcgccctgggccatcccccgtggacaggcggacactcctggtcttcagctttatcctggcagcagctttgggccaaatgaatttcacaggggaccaggttcttcgagtcctggccaaagatgagaagcagctttcacttctcggggatctggagggcctgaaaccccagaaggtggacttctggcgtggcccagccaggcccagcctccctgtggatatgagagttcctttctctgaactgaaagacatcaaagcttatctggagtctcatggacttgcttacagcatcatgataaaggacatccaggt

SEQ ID NO: 318756 - DNA, 902 bp, Homo sapiens
atgtcatagaattctcaaaacttcctaactgcttctctctctctcttttactcttactctttctctctcactctctctcttttcccacccttaagccaagtacagggatagttgtctcatcattggtggcttaaaatgatgtttttgaacaagaagacgccccatgggtacttttggtgactagcactatctctgtttttttccttttaaattcctgagctattgtttagcagtacacccttttatctccattgctactgaagctgaatgttacttgggtggaaagcataactgctttcttttctatgtccttaaaccctttgataatgttactgtttgagagtccctgaagccaggatactagaagagtctggcttgtctgaacagctgaactacgaaataatggagtagggcaggctttaccaagccaattcactcaagttgtctcatctataccccttcaaaccctgtgaggctgggctttccagcctctaggtgctgtgctgtcctgaggcctgggccatggtgcccaaggaaagcccctgaagctcaccaggaggaagaagcatgcagggcacccctggaggcgggacgcgccctgggccatcccccgtggacaggcggacactcctggtcttcagctttatcctggcagcagctttgggccaaatgaatttcacaggggaccaggttcttcgagtcctggccaaagatgagaagcagctttcacttctcggggatctggagggcctgaaaccccagaaggtggacttctggcgtggcccagccaggcccagcctccctgtggatatgagagttcctttctctgaactgaaagacatcaaagcttatctggagtctcatggacttgcttacagcatcatgataaaggacatccaggt

SEQ ID NO: 318757 - DNA, 2450 bp, Homo sapiens
aacgccccatatccgggttcccgccgtctccaccgccaccgcctcagccgcctcgcacatttagtcttgccgggagtggtgtgattcccgaccaagatggcggccgtggggcgagtcggctccttcggttcttctccgccgggattatcctcgacttacactggcggccccttgggcaacgagatagcgtcgggcaacggtggcgccgcggcaggcgacgacgaggacgggcagaacctttggtcctgcatcctcagcgaggtctccacccgctcgcgctccaagctccctgcggggaagaacgtgctactgctgggtgaagatggagctggaaaaacaagcttaataagaaaaattcagggaatagaggagtataagaaaggaagaggattggaatatttgtacttaaatgtgcatgatgaagacagggatgatcaaacaagatgtaatgtttggatcttagatggagacctatatcacaaaggcctccttaaattttcactggatgccgtatctctgaaggatactctagttatgctggttgttgacatgtcaaagccttggactgctttggattctttacagaaatgggcaagtgttgttagagaacatgttgacaaactgaaaatccctcctgaagaaatgaaacaaatggaacaaaagttgattagagacttccaagaatatgtagagccaggagaagacttcccggcttctccccagagaagaaatactgcgtcacaagaagacaaagatgacagtgtagttttacctctgggtgcggatacacttacacataacttgggcattccagtactagtagtttgcacaaagtgtgatgccattagtgtattggagaaagaacatgactacagagatgaacattttgattttattcagtcacatatccggaagttttgtttacagtatggtgcagcacttatttacacttcagtaaaagaaaacaaaaatatagacttagtatataaatacatcgttcagaaactatatggatttccctataagattcctgctgttgttgtggaaaaggatgcagtatttattccagcagggtgggataatgataagaaaataggaatattacatgaaaattttcaaacattaaaagcagaagataattttgaagacatcataactaaaccacctgttcgaaagtttgtacatgagaaggaaattatggcagaagatgatcaggtgtttcttatgaagctacagtcccttttagcaaagcaaccaccaactgcagctggaaggcctgtggatgcctcaccaagagtcccaggaggctccccacgaacaccaaatagatctgtatcatctaatgttgccagcgtgtcacccattcctgctgggtcaaaaaaaattgatccaaacatgaaagctggagctacaagtgaaggcgttctggcaaatttcttcaacagtttgttgagtaaaaagactggctctccaggaggccctggtgtgagtggtggtagccctgcaggtggggctggaggtggaagcagtggtttaccaccatccaccaaaaagtcaggccagaagcctgtcttagatgttcatgcagaactagacagaattacacgcttcttgaagataccaaataaagccatttattctgttttctgggataatgtaaacatgcctctgccttttccttcaaaagtggaattagaaagctggagtgcttcttcagatggactaaatttatgtcgtgtgtgtgtgtgtgtgtgtgtgtggttacccattttttagaaggagccgtacagaagaaaaattattctacattatgtaggattgctgtttgcattgccattttgcataagaaagtaatttttgattttgaaaatctcaaaacttttagatctgaaatacagccatgtgatcgatcatattctaaaggctatttaaaacatgtaaaaggatttggggaacggcagaaaacatgcagtttgggcatttgactgacttggaagtctaagcttattttagttataactattaaaatcatttttaaaaatttgttagttttgctgacagagaaaaatcgtcagttgtcagattttgcacaccacaataaatgtaccaccacacacggaatatgctaagaaaactatcagatagcgtttgatacactagtcattgtctcaatcactgatcctgtaagttgtcatcaaaatatgatttagaaatattggccaaggtgttgctttaactgaggagaaaagaaagcacactgcctaaatgtgtaaaagaaaaatgcagaggttattaaaatgtaaagaagtaacaatctttggatttgtctatacatatatatatatatatatggctttgccttaatatacccccttttttgtttgtgactttcaactgtaatcagttaataaagtatttattctctgcattcaggttcaaaaaaaaaaatg

SEQ ID NO: 318758 - DNA, 2302 bp, Homo sapiens
ggacagccggcccagccccgccccgcctcgcctcccgacctgtcgcggatggctgggagagaaggggaacacgagacccttgacccaggacctgcggggacccgccctccctcaggtgaagatggagctggaaaaacaagcttaataagaaaaattcagggaatagaggagtataagaaaggaagaggattggaatatttgtacttaaatgtgcatgatgaagacagggatgatcaaacaagatgtaatgtttggatcttagatggagacctatatcacaaaggcctccttaaattttcactggatgccgtatctctgaaggatactctagttatgctggttgttgacatgtcaaagccttggactgctttggattctttacagaaatgggcaagtgttgttagagaacatgttgacaaactgaaaatccctcctgaagaaatgaaacaaatggaacaaaagttgattagagacttccaagaatatgtagagccaggagaagacttcccggcttctccccagagaagaaatactgcgtcacaagaagacaaagatgacagtgtagttttacctctgggtgcggatacacttacacataacttgggcattccagtactagtagtttgcacaaagtgtgatgccattagtgtattggagaaagaacatgactacagagatgaacattttgattttattcagtcacatatccggaagttttgtttacagtatggtgcagcacttatttacacttcagtaaaagaaaacaaaaatatagacttagtatataaatacatcgttcagaaactatatggatttccctataagattcctgctgttgttgtggaaaaggatgcagtatttattccagcagggtgggataatgataagaaaataggaatattacatgaaaattttcaaacattaaaagcagaagataattttgaagacatcataactaaaccacctgttcgaaagtttgtacatgagaaggaaattatggcagaagatgatcaggtgtttcttatgaagctacagtcccttttagcaaagcaaccaccaactgcagctggaaggcctgtggatgcctcaccaagagtcccaggaggctccccacgaacaccaaatagatctgtatcatctaatgttgccagcgtgtcacccattcctgctgggtcaaaaaaaattgatccaaacatgaaagctggagctacaagtgaaggcgttctggcaaatttcttcaacagtttgttgagtaaaaagactggctctccaggaggccctggtgtgagtggtggtagccctgcaggtggggctggaggtggaagcagtggtttaccaccatccaccaaaaagtcaggccagaagcctgtcttagatgttcatgcagaactagacagaattacacgaaaaccagttacagtttctcccacaacacctacatctcctacggaaggagaagcttcttgaagataccaaataaagccatttattctgttttctgggataatgtaaacatgcctctgccttttccttcaaaagtggaattagaaagctggagtgcttcttcagatggactaaatttatgtcgtgtgtgtgtgtgtgtgtgtgtgtggttacccattttttagaaggagccgtacagaagaaaaattattctacattatgtaggattgctgtttgcattgccattttgcataagaaagtaatttttgattttgaaaatctcaaaacttttagatctgaaatacagccatgtgatcgatcatattctaaaggctatttaaaacatgtaaaaggatttggggaacggcagaaaacatgcagtttgggcatttgactgacttggaagtctaagcttattttagttataactattaaaatcatttttaaaaatttgttagttttgctgacagagaaaaatcgtcagttgtcagattttgcacaccacaataaatgtaccaccacacacggaatatgctaagaaaactatcagatagcgtttgatacactagtcattgtctcaatcactgatcctgtaagttgtcatcaaaatatgatttagaaatattggccaaggtgttgctttaactgaggagaaaagaaagcacactgcctaaatgtgtaaaagaaaaatgcagaggttattaaaatgtaaagaagtaacaatctttggatttgtctatacatatatatatatatatatggctttgccttaatatacccccttttttgtttgtgactttcaactgtaatcagttaataaagtatttattctctgcattcaggttcaaaaaaaaaaatg

SEQ ID NO: 318759 - DNA, 1934 bp, Homo sapiens
tataaattcgagtaaattttatctttagattatggcaagaaaagttacctgctgaaatgaagcaatttctaaattgtgtttactttgattttcagtgattagagacttccaagaatatgtagagccaggagaagacttcccggcttctccccagagaagaaatactgcgtcacaagaagacaaagatgacagtgtagttttacctctgggtgcggatacacttacacataacttgggcattccagtactagtagtttgcacaaagtgtgatgccattagtgtattggagaaagaacatgactacagagatgaacattttgattttattcagtcacatatccggaagttttgtttacagtatggtgcagcacttatttacacttcagtaaaagaaaacaaaaatatagacttagtatataaatacatcgttcagaaactatatggatttccctataagattcctgctgttgttgtggaaaaggatgcagtatttattccagcagggtgggataatgataagaaaataggaatattacatgaaaattttcaaacattaaaagcagaagataattttgaagacatcataactaaaccacctgttcgaaagtttgtacatgagaaggaaattatggcagaagatgatcaggtgtttcttatgaagctacagtcccttttagcaaagcaaccaccaactgcagctggaaggcctgtggatgcctcaccaagagtcccaggaggctccccacgaacaccaaatagatctgtatcatctaatgttgccagcgtgtcacccattcctgctgggtcaaaaaaaattgatccaaacatgaaagctggagctacaagtgaaggcgttctggcaaatttcttcaacagtttgttgagtaaaaagactggctctccaggaggccctggtgtgagtggtggtagccctgcaggtggggctggaggtggaagcagtggtttaccaccatccaccaaaaagtcaggccagaagcctgtcttagatgttcatgcagaactagacagaattacacgaaaaccagttacagtttctcccacaacacctacatctcctacggaaggagaagcttcttgaagataccaaataaagccatttattctgttttctgggataatgtaaacatgcctctgccttttccttcaaaagtggaattagaaagctggagtgcttcttcagatggactaaatttatgtcgtgtgtgtgtgtgtgtgtgtgtgtggttacccattttttagaaggagccgtacagaagaaaaattattctacattatgtaggattgctgtttgcattgccattttgcataagaaagtaatttttgattttgaaaatctcaaaacttttagatctgaaatacagccatgtgatcgatcatattctaaaggctatttaaaacatgtaaaaggatttggggaacggcagaaaacatgcagtttgggcatttgactgacttggaagtctaagcttattttagttataactattaaaatcatttttaaaaatttgttagttttgctgacagagaaaaatcgtcagttgtcagattttgcacaccacaataaatgtaccaccacacacggaatatgctaagaaaactatcagatagcgtttgatacactagtcattgtctcaatcactgatcctgtaagttgtcatcaaaatatgatttagaaatattggccaaggtgttgctttaactgaggagaaaagaaagcacactgcctaaatgtgtaaaagaaaaatgcagaggttattaaaatgtaaagaagtaacaatctttggatttgtctatacatatatatatatatatatggctttgccttaatatacccccttttttgtttgtgactttcaactgtaatcagttaataaagtatttattctctgcattcaggttcaaaaaaaaaaatg

SEQ ID NO: 318760 - DNA, 722 bp, Homo sapiens
ctgacttaaccttttagaagaatcactggctcctgggaagaaaatagactgggtatgtgttatacagcaagaatagaagcaggagacttctgcaattccttttcctaattattcagctcatagaagagccattatatttttatttcagagaaacaagggagaagttgcatttcacttaactaggatattactggcccttttaaaacaccctaactgctgtttagcaaattttataagcatgattaatatgcttgtgactctagggttgtgctgttcaatacggtagccacttgcctcatatgccttttaaatgtaaaattagataaaattaaaaatcatttccttagtcacactagccacatttcaagtgctcagtagccactggtggctagtgactgccatattgaacagcacagatatagaatatttccaaaactgtagctagttactggacacctctgctgaaggccttgggtagggcagctcacgcatgtgaatataaatatagtataggtaatgttcaaattcttgaactgttttttaattagtccaatctagagaataaattattaattgtgttagcataatatattaaatttgctcatttgtgcattgctcatttcagtttgtacatgagaaggaaattatggcagaagatgatcaggtgtttcttatgaagctacaggtatgaaattatatcagaagcagacttagtatggtta

SEQ ID NO: 318761 - DNA, 530 bp, Homo sapiens
tgggagggagcacttttcacctgacacacccaacccccctgccgcagcccagggccgcggatgagcggaaggaaagcacttccatactgtcagatcactgggcttcagttgcagcatagcggcccaccccgccgcccgcgtacgctcagcccctcagcgccggccaggcagccacgcacgcgcagtccgttctcgctcgctccatcagtcctggcccggcccggggccccgcccccgcaggccccgccccgctcccgtgcgctgaacgccccatatccgggttcccgccgtctccaccgccaccgcctcagccgcctcgcacatttagtcttgccgggagtggtgtgattcccgaccaagatggcggccgtggggcgagtcggctccttcggttcttctccgccgggattatcctcgacttacactggcggccccttgggcaacgagatagcgtcgggcaacggtggcgccgcggcaggcgacgacgaggacgggcagaacctttggtaacgactccacctctccctcag

SEQ ID NO: 318762 - DNA, 2503 bp, Homo sapiens
aacgccccatatccgggttcccgccgtctccaccgccaccgcctcagccgcctcgcacatttagtcttgccgggagtggtgtgattcccgaccaagatggcggccgtggggcgagtcggctccttcggttcttctccgccgggattatcctcgacttacactggcggccccttgggcaacgagatagcgtcgggcaacggtggcgccgcggcaggcgacgacgaggacgggcagaacctttggtcctgcatcctcagcgaggtctccacccgctcgcgctccaagctccctgcggggaagaacgtgctactgctgggtgaagatggagctggaaaaacaagcttaataagaaaaattcagggaatagaggagtataagaaaggaagaggattggaatatttgtacttaaatgtgcatgatgaagacagggatgatcaaacaagatgtaatgtttggatcttagatggagacctatatcacaaaggcctccttaaattttcactggatgccgtatctctgaaggatactctagttatgctggttgttgacatgtcaaagccttggactgctttggattctttacagaaatgggcaagtgttgttagagaacatgttgacaaactgaaaatccctcctgaagaaatgaaacaaatggaacaaaagttgattagagacttccaagaatatgtagagccaggagaagacttcccggcttctccccagagaagaaatactgcgtcacaagaagacaaagatgacagtgtagttttacctctgggtgcggatacacttacacataacttgggcattccagtactagtagtttgcacaaagtgtgatgccattagtgtattggagaaagaacatgactacagagatgaacattttgattttattcagtcacatatccggaagttttgtttacagtatggtgcagcacttatttacacttcagtaaaagaaaacaaaaatatagacttagtatataaatacatcgttcagaaactatatggatttccctataagattcctgctgttgttgtggaaaaggatgcagtatttattccagcagggtgggataatgataagaaaataggaatattacatgaaaattttcaaacattaaaagcagaagataattttgaagacatcataactaaaccacctgttcgaaagtttgtacatgagaaggaaattatggcagaagatgatcaggtgtttcttatgaagctacagtcccttttagcaaagcaaccaccaactgcagctggaaggcctgtggatgcctcaccaagagtcccaggaggctccccacgaacaccaaatagatctgtatcatctaatgttgccagcgtgtcacccattcctgctgggtcaaaaaaaattgatccaaacatgaaagctggagctacaagtgaaggcgttctggcaaatttcttcaacagtttgttgagtaaaaagactggctctccaggaggccctggtgtgagtggtggtagccctgcaggtggggctggaggtggaagcagtggtttaccaccatccaccaaaaagtcaggccagaagcctgtcttagatgttcatgcagaactagacagaattacacgaaaaccagttacagtttctcccacaacacctacatctcctacggaaggagaagcttcttgaagataccaaataaagccatttattctgttttctgggataatgtaaacatgcctctgccttttccttcaaaagtggaattagaaagctggagtgcttcttcagatggactaaatttatgtcgtgtgtgtgtgtgtgtgtgtgtgtggttacccattttttagaaggagccgtacagaagaaaaattattctacattatgtaggattgctgtttgcattgccattttgcataagaaagtaatttttgattttgaaaatctcaaaacttttagatctgaaatacagccatgtgatcgatcatattctaaaggctatttaaaacatgtaaaaggatttggggaacggcagaaaacatgcagtttgggcatttgactgacttggaagtctaagcttattttagttataactattaaaatcatttttaaaaatttgttagttttgctgacagagaaaaatcgtcagttgtcagattttgcacaccacaataaatgtaccaccacacacggaatatgctaagaaaactatcagatagcgtttgatacactagtcattgtctcaatcactgatcctgtaagttgtcatcaaaatatgatttagaaatattggccaaggtgttgctttaactgaggagaaaagaaagcacactgcctaaatgtgtaaaagaaaaatgcagaggttattaaaatgtaaagaagtaacaatctttggatttgtctatacatatatatatatatatatggctttgccttaatatacccccttttttgtttgtgactttcaactgtaatcagttaataaagtatttattctctgcattcaggttcaaaaaaaaaaatg

SEQ ID NO: 318763 - DNA, 1712 bp, Homo sapiens
aacgccccatatccgggttcccgccgtctccaccgccaccgcctcagccgcctcgcacatttagtcttgccgggagtggtgtgattcccgaccaagatggcggccgtggggcgagtcggctccttcggttcttctccgccgggattatcctcgacttacactggcggccccttgggcaacgagatagcgtcgggcaacggtggcgccgcggcaggcgacgacgaggacgggcagaacctttggtcctgcatcctcagcgaggtctccacccgctcgcgctccaagctccctgcggggaagaacgtgctactgctgggtgaagatggagctggaaaaacaagcttaataagaaaaattcagggaatagaggagtataagaaaggaagaggattggaatatttgtacttaaatgtgcatgatgaagacagggatgatcaaacaagatgtaatgtttggatcttagatggagacctatatcacaaaggcctccttaaattttcactggatgccgtatctctgaaggatactctagttatgctggttgttgacatgtcaaagccttggactgctttggattctttacagaaatgggcaagtgttgttagagaacatgttgacaaactgaaaatccctcctgaagaaatgaaacaaatggaacaaaagttgattagagacttccaagaatatgtagagccaggagaagacttcccggcttctccccagagaagaaatactgcgtcacaagaagacaaagatgacagtgtagttttacctctgggtgcggatacacttacacataacttgggcattccagtactagtagtttgcacaaagtgtgatgccattagtgtattggagaaagaacatgactacagagatgaacattttgattttattcagtcacatatccggaagttttgtttacagtatggtgcagcacttatttacacttcagtaaaagaaaacaaaaatatagacttagtatataaatacatcgttcagaaactatatggatttccctataagattcctgctgttgttgtggaaaaggatgcagtatttattccagcagggtgggataatgataagaaaataggaatattacatgaaaattttcaaacattaaaagcagaagataattttgaagacatcataactaaaccacctgttcgaaagtttgtacatgagaaggaaattatggcagaagatgatcaggtgtttcttatgaagctacagtcccttttagcaaagcaaccaccaactgcagctggaaggcctgtggatgcctcaccaagagtcccaggaggctccccacgaacaccaaatagatctgtatcatctaatgttgccagcgtgtcacccattcctgctgggtcaaaaaaaattgatccaaacatgaaagctggagctacaagtgaaggcgttctggcaaatttcttcaacagtttgttgagtaaaaagactggctctccaggaggccctggtgtgagtggtggtagccctgcaggtggggctggaggtggaagcagtggtttaccaccatccaccaaaaagtcaggccagaagcctgtcttagatgttcatgcagaactagacagaattacacgaaaaccagttacagtttctcccacaacacctacatctcctacggaaggagaagcttcttgaagataccaaataaagccatttattctgttttctgggataatgta

SEQ ID NO: 318764 - DNA, 2449 bp, Homo sapiens
aacgccccatatccgggttcccgccgtctccaccgccaccgcctcagccgcctcgcacatttagtcttgccgggagtggtgtgattcccgaccaagatggcggccgtggggcgagtcggctccttcggttcttctccgccgggattatcctcgacttacactggcggccccttgggcaacgagatagcgtcgggcaacggtggcgccgcggcaggcgacgacgaggacgggcagaacctttggtcctgcatcctcagcgaggtctccacccgctcgcgctccaagctccctgcggggaagaacgtgctactgctgggtgaagatggagctggaaaaacaagcttaataagattaaatgtgcatgatgaagacagggatgatcaaacaagatgtaatgtttggatcttagatggagacctatatcacaaaggcctccttaaattttcactggatgccgtatctctgaaggatactctagttatgctggttgttgacatgtcaaagccttggactgctttggattctttacagaaatgggcaagtgttgttagagaacatgttgacaaactgaaaatccctcctgaagaaatgaaacaaatggaacaaaagttgattagagacttccaagaatatgtagagccaggagaagacttcccggcttctccccagagaagaaatactgcgtcacaagaagacaaagatgacagtgtagttttacctctgggtgcggatacacttacacataacttgggcattccagtactagtagtttgcacaaagtgtgatgccattagtgtattggagaaagaacatgactacagagatgaacattttgattttattcagtcacatatccggaagttttgtttacagtatggtgcagcacttatttacacttcagtaaaagaaaacaaaaatatagacttagtatataaatacatcgttcagaaactatatggatttccctataagattcctgctgttgttgtggaaaaggatgcagtatttattccagcagggtgggataatgataagaaaataggaatattacatgaaaattttcaaacattaaaagcagaagataattttgaagacatcataactaaaccacctgttcgaaagtttgtacatgagaaggaaattatggcagaagatgatcaggtgtttcttatgaagctacagtcccttttagcaaagcaaccaccaactgcagctggaaggcctgtggatgcctcaccaagagtcccaggaggctccccacgaacaccaaatagatctgtatcatctaatgttgccagcgtgtcacccattcctgctgggtcaaaaaaaattgatccaaacatgaaagctggagctacaagtgaaggcgttctggcaaatttcttcaacagtttgttgagtaaaaagactggctctccaggaggccctggtgtgagtggtggtagccctgcaggtggggctggaggtggaagcagtggtttaccaccatccaccaaaaagtcaggccagaagcctgtcttagatgttcatgcagaactagacagaattacacgaaaaccagttacagtttctcccacaacacctacatctcctacggaaggagaagcttcttgaagataccaaataaagccatttattctgttttctgggataatgtaaacatgcctctgccttttccttcaaaagtggaattagaaagctggagtgcttcttcagatggactaaatttatgtcgtgtgtgtgtgtgtgtgtgtgtgtggttacccattttttagaaggagccgtacagaagaaaaattattctacattatgtaggattgctgtttgcattgccattttgcataagaaagtaatttttgattttgaaaatctcaaaacttttagatctgaaatacagccatgtgatcgatcatattctaaaggctatttaaaacatgtaaaaggatttggggaacggcagaaaacatgcagtttgggcatttgactgacttggaagtctaagcttattttagttataactattaaaatcatttttaaaaatttgttagttttgctgacagagaaaaatcgtcagttgtcagattttgcacaccacaataaatgtaccaccacacacggaatatgctaagaaaactatcagatagcgtttgatacactagtcattgtctcaatcactgatcctgtaagttgtcatcaaaatatgatttagaaatattggccaaggtgttgctttaactgaggagaaaagaaagcacactgcctaaatgtgtaaaagaaaaatgcagaggttattaaaatgtaaagaagtaacaatctttggatttgtctatacatatatatatatatatatggctttgccttaatatacccccttttttgtttgtgactttcaactgtaatcagttaataaagtatttattctctgcattcaggttcaaaaaaaaaaatg

SEQ ID NO: 318765 - DNA, 1721 bp, Homo sapiens
aacgccccatatccgggttcccgccgtctccaccgccaccgcctcagccgcctcgcacatttagtcttgccgggagtggtgtgattcccgaccaagatggcggccgtggggcgagtcggctccttcggttcttctccgccgggattatcctcgacttacactggcggccccttgggcaacgagatagcgtcgggcaacggtggcgccgcggcaggcgacgacgaggacgggcagaacctttggtcctgcatcctcagcgaggtctccacccgctcgcgctccaagctccctgcggggaagaacgtgctactgctgggtgaagatggagctggaaaaacaagcttaataagaaaaattcagggaatagaggagtataagaaaggaagaggattggaatatttgtacttaaatgtgcatgatgaagacagggatgatcaaacaagatgtaatgtttggatcttagatggagacctatatcacaaaggcctccttaaattttcactggatgccgtatctctgaaggatactctagttatgctggttgttgacatgtcaaagccttggactgctttggattctttacagaaatgggcaagtgttgttagagaacatgttgacaaactgaaaatccctcctgaagaaatgaaacaaatggaacaaaagttgattagagacttccaagaatatgtagagccaggagaagacttcccggcttctccccagagaagaaatactgcgtcacaagaagacaaagatgacagtgtagttttacctctgggtgcggatacacttacacataacttgggcattccagtactagtagtttgcacaaagtgtgatgccattagtgtattggagaaagaacatgactacagagatgaacattttgattttattcagtcacatatccggaagttttgtttacagtatggtgcagcacttatttacacttcagtaaaagaaaacaaaaatatagacttagtatataaatacatcgttcagaaactatatggatttccctataagattcctgctgttgttgtggaaaaggatgcagtatttattccagcagggtgggataatgataagaaaataggaatattacatgaaaattttcaaacattaaaagcagaagataattttgaagacatcataactaaaccacctgttcgaaagtttgtacatgagaaggaaattatggcagaagatgatcaggtgtttcttatgaagctacagtcccttttagcaaagcaaccaccaactgcagctggaaggcctgtggatgcctcaccaagagtcccaggaggctccccacgaacaccaaatagatctgtatcatctaatgttgccagcgtgtcacccattcctgctgggtcaaaaaaaattgatccaaacatgaaagctggagctacaagtgaaggcgttctggcaaatttcttcaacagtttgttgagtaaaaagactggctctccaggaggccctggtgtgagtggtggtagccctgcaggtggggctggaggtggaagcagtggtttaccaccatccaccaaaaagtcaggccagaagcctgtcttagatgttcatgcagaactagacagaattacacgaaaaccagttacagtttctcccacaacacctacattatcccagaaaacagaataaatggctttatttggtatcttcaagaagcttctccttccgtaggagatgtaggtcgacgc

SEQ ID NO: 318766 - DNA, 1116 bp, Homo sapiens
cgggctaccccggctactcctgctcagcatggctgctttagggactgttctcttcacaggtgtccggaggctgcactgcagcgcagccgcttgggcgggcggccagtggcgactacagcagggactggctgccaacccctccggctacgggccccttaccgagctcccagactggtcatatgcggatggccgccctgctcccccaatgaaaggccagcttcgaagaaaagctgaaagggagacgtttgcaagacgagttgtactgctgtcacaggaaatggacgctggattacaagcatggcagctcaggcagcagaagttgcaggaagaacaaaggaagcaggaaaatgctcttaaacccaaaggggcttcactgaagagcccacttccaagtcaataaaaagcaactcctgcctcccttcctcaccctgtctctggatttcttttctatcacctagatgcttcatccagccagaagatagccttcacgttccccatctgtcttcagagcaaaagagctgggacaccaagaacaagctgttagatcactgcctgggaggcttggcttagtactctcatctctggttccattccagttcagctaagtcttgctttaaaatttttacctcctagctgggtgcggtggctcacgcctgtaatcccagcactttgggaggctgaggcgggcagatcacaagatcaggagttcgagaccagcctggccaacccagcctggtcaacatggtgaaaccctgtccctactaaagatacaaacaattagccgggcgtggtggggtgcgcttgtaatcccagctactcaggaggctgaggcaggagaatcgcttaaactcgggaggtagaggttgcagtgagccaaggtcacaccattgcactccaacctgggcgacagggcgagactctgtctcaaaaaaaaaaaaaaatttacctcctttgcaggccataggactagcccaactatgagaaatagctgttctgtgaacgtgaaaaggggacagcagttttcccagttttggccaggcagtcaagcctttaacagctcatgcacagtttaggccatgtacagctggcatctaataaatgttttcatgaaaaaga

SEQ ID NO: 318767 - DNA, 1225 bp, Homo sapiens
cgggctaccccggctactcctgctcagcatggctgctttagggactgttctcttcagtgagtgggtatagatagggaccgtggactcgggggccctttggggacgggcacaggacccctgatccggctgcgcggcctctcccccaactctgctctgttctcccagcaggtgtccggaggctgcactgcagcgcagccgcttgggcgggcggccagtggcgactacagcagggactggctgccaacccctccggctacgggccccttaccgagctcccagactggtcatatgcggatggccgccctgctcccccaatgaaaggccagcttcgaagaaaagctgaaagggagacgtttgcaagacgagttgtactgctgtcacaggaaatggacgctggattacaagcatggcagctcaggcagcagaagttgcaggaagaacaaaggaagcaggaaaatgctcttaaacccaaaggggcttcactgaagagcccacttccaagtcaataaaaagcaactcctgcctcccttcctcaccctgtctctggatttcttttctatcacctagatgcttcatccagccagaagatagccttcacgttccccatctgtcttcagagcaaaagagctgggacaccaagaacaagctgttagatcactgcctgggaggcttggcttagtactctcatctctggttccattccagttcagctaagtcttgctttaaaatttttacctcctagctgggtgcggtggctcacgcctgtaatcccagcactttgggaggctgaggcgggcagatcacaagatcaggagttcgagaccagcctggccaacccagcctggtcaacatggtgaaaccctgtccctactaaagatacaaacaattagccgggcgtggtggggtgcgcttgtaatcccagctactcaggaggctgaggcaggagaatcgcttaaactcgggaggtagaggttgcagtgagccaaggtcacaccattgcactccaacctgggcgacagggcgagactctgtctcaaaaaaaaaaaaaaatttacctcctttgcaggccataggactagcccaactatgagaaatagctgttctgtgaacgtgaaaaggggacagcagttttcccagttttggccaggcagtcaagcctttaacagctcatgcacagtttaggccatgtacagctggcatctaataaatgttttcatgaaaaaga

SEQ ID NO: 318768 - DNA, 688 bp, Homo sapiens
  misc_feature (474)..(474): n is a, c, g, or t
  misc_feature (484)..(484): n is a, c, g, or t
  misc_feature (486)..(486): n is a, c, g, or t
cgggctaccccggctactcctgctcagcatggctgctttagggactgttctcttcacaggtgtccggaggctgcactgcagcgcagccgcttgggcgggcggccagtggcgactacagcagggactggctgccaacccctccggctacgggccccttaccgagctcccagactggtcatatgcggatggccgccctgctcccccaatgaaaggccagcttcgaagaaaagctgaaagggagacgtttgcaagacgagttgtactgctgtcacaggaaatggacgctggattacaagcatggcagctcaggcagcagaagttgcaggaagaacaaaggaagcaggaaaatgctcttaaacccaaaggggcttcactgaagagcccacttccaagtcaataaaaagcaactcctgcctcccttcctcaaaaaaaaaaaaaaaaaaaaaaacaaaaaaaaacaaaaacaaagaaaangaaaacaaananaaaccagcgagcgggctccctacttctccggggcgggggacaaagcagaagggcgagaagccagccggcggacgggagcagacagcagtgctctcgaaccaccaccgctctttcgggacacagggggggaaaaccggccgggcgcccccatagaacgggggcgaacacacattgagacgacaggggaaccacatatagaggc

SEQ ID NO: 318769 - DNA, 952 bp, Homo sapiens
gtgggaccacaggcacacaccaccattcctggctaatttttttttttaacttttagtagagacaggctcttgctatgttgcccaagctggtcttgtactccttagctcaagtgatccacttcagcctcccaaagtgctgggattacaggcatgagccaccacgcccagcctatggaccttattcttaatccaggcttcccttctcgctaagtttgtggtcttggacaaattacttaattttatcttagtctcagtttccatatctgtaaaagaatacctatctcatgtggttcttttaaggataaaatgaaacaaccaatgtaaagcatgtggcatacacaatattggttccccttcctggtaaataacacctcttctctgtcttgccttcaaacttttgggcagagttttcactctgtttctttctttgcggaaagtaaactacttgggttagatactgcatcttttcagcaagtcagcaggtatttatggatttttattaacatgcttatgtgtctacactatactgtgaatagcaaaagctagcaacacagtccctgacccaaagaacttaaagtctaactgggacaaagcatggactttttaaaaattaagtaatagtattcagggccatgcatctacagttccagatatcaggaggctgaggcaggagaatcgcttaaactcgggaggtagaggttgcagtgagccaaggtcacaccattgcactccaacctgggcgacagggcgagactctgtctcaaaaaaaaaaaaaaatttacctcctttgcaggccataggactagcccaactatgagaaatagctgttctgtgaacgtgaaaaggggacagcagttttcccagttttggccaggcagtcaagcctttaacagctcatgcacagtttaggccatgtacagctggcatctaataaatgttttcatgaaaaaga

SEQ ID NO: 318770 - DNA, 997 bp, Homo sapiens
gtgggaccacaggcacacaccaccattcctggctaatttttttttttaacttttagtagagacaggctcttgctatgttgcccaagctggtcttgtactccttagctcaagtgatccacttcagcctcccaaagtgctgggattacaggcatgagccaccacgcccagcctatggaccttattcttaatccaggcttcccttctcgctaagtttgtggtcttggacaaattacttaattttatcttagtctcagtttccatatctgtaaaagaatacctatctcatgtggttcttttaaggataaaatgaaacaaccaatgtaaagcatgtggcatacacaatattggttccccttcctggtaaataacacctcttctctgtcttgccttcaaacttttgggcagagttttcactctgtttctttctttgcggaaagtaaactacttgggttagatactgcatcttttcagcaagtcagcaggtatttatggatttttattaacatgcttatgtgtctacactatactgtgaatagcaaaagctagcaacacagtccctgacccaaagaacttaaagtctaactgggacaaagcatggactttttaaaaattaagtaatagtattcagggccatgcatctacagttccagatactcgggaggctgaggcaggagaatcgcttaagcccaggaggcagaggttgtaataatctgagatcatgccattgcactccagcctgggcgacggagcgagaccttgtctcaaaaataataataaataatatttcaatactctgcgcctttccaaaaggacctgaggtagctaaataacacttaaaaaaataaaacagaagagtacagtaaatgtcccaaggcaaataggtgaatattaaatattcagtacttctttcagaagagaaggctgatggacttgaagagatgagcgtttctgggaaagttagggtttgagtggacctaaggatgaagatttggctgga

SEQ ID NO: 318771 - DNA, 1146 bp, Homo sapiens
cgggctaccccggctactcctgctcagcatggctgctttagggactgttctcttcagtgagtgggtatagatagggaccgtggactcgggggccctttggggacgggccccttaccgagctcccagactggtcatatgcgggggtatgatcctgcttaattggataattggtgactgaggaagatggtgaagattttttctacttgttatttactatggccgccctgctcccccaatgaaaggccagcttcgaagaaaagctgaaagggagacgtttgcaagacgagttgtactgctgtcacaggaaatggacgctggattacaagcatggcagctcaggcagcagaagttgcaggaagaacaaaggaagcaggaaaatgctcttaaacccaaaggggcttcactgaagagcccacttccaagtcaataaaaagcaactcctgcctcccttcctcaccctgtctctggatttcttttctatcacctagatgcttcatccagccagaagatagccttcacgttccccatctgtcttcagagcaaaagagctgggacaccaagaacaagctgttagatcactgcctgggaggcttggcttagtactctcatctctggttccattccagttcagctaagtcttgctttaaaatttttacctcctagctgggtgcggtggctcacgcctgtaatcccagcactttgggaggctgaggcgggcagatcacaagatcaggagttcgagaccagcctggccaacccagcctggtcaacatggtgaaaccctgtccctactaaagatacaaacaattagccgggcgtggtggggtgcgcttgtaatcccagctactcaggaggctgaggcaggagaatcgcttaaactcgggaggtagaggttgcagtgagccaaggtcacaccattgcactccaacctgggcgacagggcgagactctgtctcaaaaaaaaaaaaaaatttacctcctttgcaggccataggactagcccaactatgagaaatagctgttctgtgaacgtgaaaaggggacagcagttttcccagttttggccaggcagtcaagcctttaacagctcatgcacagtttaggccatgtacagctggcatctaataaatgttttcatgaaaaaga

SEQ ID NO: 318772 - DNA, 1190 bp, Homo sapiens
cgggctaccccggctactcctgctcagcatggctgctttagggactgttctcttcacaggtgtccggaggctgcactgcagcgcagccgcttgggcgggcggccagtggcgactacagcagggactggctgccaacccctccggctacgggccccttaccgagctcccagactggtcatatgcgggggtatgatcctgcttaattggataattggtgactgaggaagatggtgaagattttttctacttgttatttactatggccgccctgctcccccaatgaaaggccagcttcgaagaaaagctgaaagggagacgtttgcaagacgagttgtactgctgtcacaggaaatggacgctggattacaagcatggcagctcaggcagcagaagttgcaggaagaacaaaggaagcaggaaaatgctcttaaacccaaaggggcttcactgaagagcccacttccaagtcaataaaaagcaactcctgcctcccttcctcaccctgtctctggatttcttttctatcacctagatgcttcatccagccagaagatagccttcacgttccccatctgtcttcagagcaaaagagctgggacaccaagaacaagctgttagatcactgcctgggaggcttggcttagtactctcatctctggttccattccagttcagctaagtcttgctttaaaatttttacctcctagctgggtgcggtggctcacgcctgtaatcccagcactttgggaggctgaggcgggcagatcacaagatcaggagttcgagaccagcctggccaacccagcctggtcaacatggtgaaaccctgtccctactaaagatacaaacaattagccgggcgtggtggggtgcgcttgtaatcccagctactcaggaggctgaggcaggagaatcgcttaaactcgggaggtagaggttgcagtgagccaaggtcacaccattgcactccaacctgggcgacagggcgagactctgtctcaaaaaaaaaaaaaaatttacctcctttgcaggccataggactagcccaactatgagaaatagctgttctgtgaacgtgaaaaggggacagcagttttcccagttttggccaggcagtcaagcctttaacagctcatgcacagtttaggccatgtacagctggcatctaataaatgttttcatgaaaaaga

SEQ ID NO: 318773 - DNA, 1299 bp, Homo sapiens
cgggctaccccggctactcctgctcagcatggctgctttagggactgttctcttcagtgagtgggtatagatagggaccgtggactcgggggccctttggggacgggcacaggacccctgatccggctgcgcggcctctcccccaactctgctctgttctcccagcaggtgtccggaggctgcactgcagcgcagccgcttgggcgggcggccagtggcgactacagcagggactggctgccaacccctccggctacgggccccttaccgagctcccagactggtcatatgcgggggtatgatcctgcttaattggataattggtgactgaggaagatggtgaagattttttctacttgttatttactatggccgccctgctcccccaatgaaaggccagcttcgaagaaaagctgaaagggagacgtttgcaagacgagttgtactgctgtcacaggaaatggacgctggattacaagcatggcagctcaggcagcagaagttgcaggaagaacaaaggaagcaggaaaatgctcttaaacccaaaggggcttcactgaagagcccacttccaagtcaataaaaagcaactcctgcctcccttcctcaccctgtctctggatttcttttctatcacctagatgcttcatccagccagaagatagccttcacgttccccatctgtcttcagagcaaaagagctgggacaccaagaacaagctgttagatcactgcctgggaggcttggcttagtactctcatctctggttccattccagttcagctaagtcttgctttaaaatttttacctcctagctgggtgcggtggctcacgcctgtaatcccagcactttgggaggctgaggcgggcagatcacaagatcaggagttcgagaccagcctggccaacccagcctggtcaacatggtgaaaccctgtccctactaaagatacaaacaattagccgggcgtggtggggtgcgcttgtaatcccagctactcaggaggctgaggcaggagaatcgcttaaactcgggaggtagaggttgcagtgagccaaggtcacaccattgcactccaacctgggcgacagggcgagactctgtctcaaaaaaaaaaaaaaatttacctcctttgcaggccataggactagcccaactatgagaaatagctgttctgtgaacgtgaaaaggggacagcagttttcccagttttggccaggcagtcaagcctttaacagctcatgcacagtttaggccatgtacagctggcatctaataaatgttttcatgaaaaaga

SEQ ID NO: 318774 - DNA, 1162 bp, Homo sapiens
  misc_feature (59)..(59): n is a, c, g, or t
ttctcttctagtgatgtggcacggtgtccgtgagcttgtgactgcagcgatacgctgcnttgtggcgtgtcggccaggtggcgactacagcagggactggctgccaacccctccggctacgggccccttaccgagctcccagactggtcatatgcgggggtatgatcctgcttaattggataattggtgactgaggaagatggtgaagattttttctacttgttatttactatggccgccctgctcccccaatgaaaggccagcttcgaagaaaagctgaaagggagacgtttgcaagacgagttgtactgctgtcacaggaaatggacgctggattacaagcatggcagctcaggcagcagaagttgcaggaagaacaaaggaagcaggaaaatgctcttaaacccaaaggggcttcactgaagagcccacttccaagtcaataaaaagcaactcctgcctcccttcctcaccctgtctctggatttcttttctatcacctagatgcttcatccagccagaagatagccttcacgttccccatctgtcttcagagcaaaagagctgggacaccaagaacaagctgttagatcactgcctgggaggcttggcttagtactctcatctctggttccattccagttcagctaagtcttgctttaaaatttttacctcctagctgggtgcggtggctcacgcctgtaatcccagcactttgggaggctgaggcgggcagatcacaagatcaggagttcgagaccagcctggccaacccagcctggtcaacatggtgaaaccctgtccctactaaagatacaaacaattagccgggcgtggtggggtgcgcttgtaatcccagctactcaggaggctgaggcaggagaatcgcttaaactcgggaggtagaggttgcagtgagccaaggtcacaccattgcactccaacctgggcgacagggcgagactctgtctcaaaaaaaaaaaaaaatttacctcctttgcaggccataggactagcccaactatgagaaatagctgttctgtgaacgtgaaaaggggacagcagttttcccagttttggccaggcagtcaagcctttaacagctcatgcacagtttaggccatgtacagctggcatctaataaatgttttcatgaaaaaga

SEQ ID NO: 318775 - DNA, 1082 bp, Homo sapiens
tggacatattttaggataattaagctacaatgtatatgaaatggaagagaggagctagagattggttcttcccttattcctatcacagtatttgcacaaggtgatgcagtccatctctaacacttgacttttctctcacttctacttgtagatggccgccctgctcccccaatgaaaggccagcttcgaagaaaagctgaaagggagacgtttgcaagacgagttgtactgctgtcacaggaaatggacgctggattacaagcatggcagctcaggcagcagaagttgcaggaagaacaaaggaagcaggaaaatgctcttaaacccaaaggggcttcactgaagagcccacttccaagtcaataaaaagcaactcctgcctcccttcctcaccctgtctctggatttcttttctatcacctagatgcttcatccagccagaagatagccttcacgttccccatctgtcttcagagcaaaagagctgggacaccaagaacaagctgttagatcactgcctgggaggcttggcttagtactctcatctctggttccattccagttcagctaagtcttgctttaaaatttttacctcctagctgggtgcggtggctcacgcctgtaatcccagcactttgggaggctgaggcgggcagatcacaagatcaggagttcgagaccagcctggccaacccagcctggtcaacatggtgaaaccctgtccctactaaagatacaaacaattagccgggcgtggtggggtgcgcttgtaatcccagctactcaggaggctgaggcaggagaatcgcttaaactcgggaggtagaggttgcagtgagccaaggtcacaccattgcactccaacctgggcgacagggcgagactctgtctcaaaaaaaaaaaaaaatttacctcctttgcaggccataggactagcccaactatgagaaatagctgttctgtgaacgtgaaaaggggacagcagttttcccagttttggccaggcagtcaagcctttaacagctcatgcacagtttaggccatgtacagctggcatctaataaatgttttcatgaaaaaga

SEQ ID NO: 318776 - DNA, 905 bp, Homo sapiens
tatacggctgctgaagacgacagaagggagacgtttgcaagacgagttgtactgctgtcacaggaaatggacgctggattacaagcatggcagctcaggcagcagaagttgcaggaagaacaaaggaagcaggaaaatgctcttaaacccaaaggggcttcactgaagagcccacttccaagtcaataaaaagcaactcctgcctcccttcctcaccctgtctctggatttcttttctatcacctagatgcttcatccagccagaagatagccttcacgttccccatctgtcttcagagcaaaagagctgggacaccaagaacaagctgttagatcactgcctgggaggcttggcttagtactctcatctctggttccattccagttcagctaagtcttgctttaaaatttttacctcctagctgggtgcggtggctcacgcctgtaatcccagcactttgggaggctgaggcgggcagatcacaagatcaggagttcgagaccagcctggccaacccagcctggtcaacatggtgaaaccctgtccctactaaagatacaaacaattagccgggcgtggtggggtgcgcttgtaatcccagctactcaggaggctgaggcaggagaatcgcttaaactcgggaggtagaggttgcagtgagccaaggtcacaccattgcactccaacctgggcgacagggcgagactctgtctcaaaaaaaaaaaaaaatttacctcctttgcaggccataggactagcccaactatgagaaatagctgttctgtgaacgtgaaaaggggacagcagttttcccagttttggccaggcagtcaagcctttaacagctcatgcacagtttaggccatgtacagctggcatctaataaatgttttcatgaaaaaga

SEQ ID NO: 318777 - DNA, 1051 bp, Homo sapiens
cgggctaccccggctactcctgctcagcatggctgctttagggactgttctcttcacaggtgtccggaggctgcactgcagcgcagccgcttgggcgggcggccagtggcgactacagcagggactggctgccaacccctccggctacgggccccttaccgagctcccagactggtcatatgcggagacgagttgtactgctgtcacaggaaatggacgctggattacaagcatggcagctcaggcagcagaagttgcaggaagaacaaaggaagcaggaaaatgctcttaaacccaaaggggcttcactgaagagcccacttccaagtcaataaaaagcaactcctgcctcccttcctcaccctgtctctggatttcttttctatcacctagatgcttcatccagccagaagatagccttcacgttccccatctgtcttcagagcaaaagagctgggacaccaagaacaagctgttagatcactgcctgggaggcttggcttagtactctcatctctggttccattccagttcagctaagtcttgctttaaaatttttacctcctagctgggtgcggtggctcacgcctgtaatcccagcactttgggaggctgaggcgggcagatcacaagatcaggagttcgagaccagcctggccaacccagcctggtcaacatggtgaaaccctgtccctactaaagatacaaacaattagccgggcgtggtggggtgcgcttgtaatcccagctactcaggaggctgaggcaggagaatcgcttaaactcgggaggtagaggttgcagtgagccaaggtcacaccattgcactccaacctgggcgacagggcgagactctgtctcaaaaaaaaaaaaaaatttacctcctttgcaggccataggactagcccaactatgagaaatagctgttctgtgaacgtgaaaaggggacagcagttttcccagttttggccaggcagtcaagcctttaacagctcatgcacagtttaggccatgtacagctggcatctaataaatgttttcatgaaaaaga

SEQ ID NO: 318778 - DNA, 1181 bp, Homo sapiens
aagtccagcacctacgtgaagaatggtacctcgtttaacatccactatgtctcgggcagcctctccgggtacctgagccaggacactgtgatggtgccctgccagtcagcgtcgtcagcctctgccctgggcggtgtcaaagtggagaggcaggtctttggggaggccaccaagcagccaggcatcaccttcatcgcagccaagttcgatggcatcctgggcatggcctacccccgcatctccgtcaacaacgtgctgcccgtcttcgacaacctgatgcagcttcgaagaaaagctgaaagggagacgtttgcaagacgagttgtactgctgtcacaggaaatggacgctggattacaagcatggcagctcaggcagcagaagttgcaggaagaacaaaggaagcaggaaaatgctcttaaacccaaaggggcttcactgaagagcccacttccaagtcaataaaaagcaactcctgcctcccttcctcaccctgtctctggatttcttttctatcacctagatgcttcatccagccagaagatagccttcacgttccccatctgtcttcagagcaaaagagctgggacaccaagaacaagctgttagatcactgcctgggaggcttggcttagtactctcatctctggttccattccagttcagctaagtcttgctttaaaatttttacctcctagctgggtgcggtggctcacgcctgtaatcccagcactttgggaggctgaggcgggcagatcacaagatcaggagttcgagaccagcctggccaacccagcctggtcaacatggtgaaaccctgtccctactaaagatacaaacaattagccgggcgtggtggggtgcgcttgtaatcccagctactcaggaggctgaggcaggagaatcgcttaaactcgggaggtagaggttgcagtgagccaaggtcacaccattgcactccaacctgggcgacagggcgagactctgtctcaaaaaaaaaaaaaaatttacctcctttgcaggccataggactagcccaactatgagaaatagctgttctgtgaacgtgaaaaggggacagcagttttcccagttttggccaggcagtcaagcctttaacagctcatgcacagtttaggccatgtacagctggcatctaataaatgttttcatgaaaaaga

SEQ ID NO: 318779 - DNA, 349 bp, Homo sapiens
gcggccgcctactactactaaattcgcggccgcgtcgacaaagaccaagcagaagtaatgtggtccacagccatgcccttgaggagccggccaccagatgctgaatcccctatcccattctgtgtatgagtcccatttgccttgcaattagcattctgtctcccccaaaaaagaatgtgctatgaagctttctttcctacacactctgagtctctgaatgaagctgaaggtcttagtaccagagctagttttcagctgctcagaattcatctgaagagagacttaagatgaaagcaaatgattcagctcccttatacccccattaaattcactttcaattccaaacatg

SEQ ID NO: 318780 - DNA, 837 bp, Homo sapiens
ttatgagtctcatattcctgctagaagcctgttattgtgctgtgtaggaagaaagagagcaccaggagaggccctgctccagtggagcaagagcaaatcatctttaagttcctcttcttcaaaggctcagaaattaaattaagtattctttgtggtcaagaaggggaaagaacattgctttttaagagaccagaagtggtattcaccatggcttcttccctattattctctgtttaaatcatctgttctgtgtccaggaccagccactgttgcagcatgagttcccagcagcagaagcagccctgcatcccaccccctcagcttcagcagcagcaggtgaaacagccttgccagcctccacctcaggaaccatgcatccccaaaaccaaggagccctgccaccccaaggtgcctgagccctgccaccccaaagtgcctgagccctgccagcccaaggttccagagccatgccaccccaaggtgcctgagccctgcccttcaatagtcactccagcaccagcccagcagaagaccaagcagaagtaatgtggtccacagccatgcccttgaggagccggccaccagatgctgaatcccctatcccattctgtgtatgagtcccatttgccttgcaattagcattctgtctcccccaaaaaagaatgtgctatgaagctttctttcctacacactctgagtctctgaatgaagctgaaggtcttagtaccagagctagttttcagctgctcagaattcatctgaagagagacttaagatgaaagcaaatgattcagctcccttatacccccattaaattcactttcaattccaaacatg

SEQ ID NO: 318781 - DNA, 645 bp, Homo sapiens
gcggccgcctactactactaaattcgcggccgcgtcgacacagagtattcctctcttcacaccaggaccagccactgttgcagcatgagttcccagcagcagaagcagccctgcatcccaccccctcagcttcagcagcagcaggtgaaacagccttgccagcctccacctcaggaaccatgcatccccaaaaccaaggagccctgccaccccaaggtgcctgagccctgccaccccaaagtgcctgagccctgccagcccaaggttccagagccatgccaccccaaggtgcctgagccctgcccttcaatagtcactccagcaccagcccagcagaagaccaagcagaagtaatgtggtccacagccatgcccttgaggagccggccaccagatgctgaatcccctatcccattctgtgtatgagtcccatttgccttgcaattagcattctgtctcccccaaaaaagaatgtgctatgaagctttctttcctacacactctgagtctctgaatgaagctgaaggtcttagtaccagagctagttttcagctgctcagaattcatctgaagagagacttaagatgaaagcaaatgattcagctcccttatacccccattaaattcactttcaattccaaacatg

SEQ ID NO: 318782 - DNA, 382 bp, Homo sapiens
tcttagggaggtggaataagaattcggggaatctggaagaattactatgctgaatcctatggggtaatatttgttgtggattccagtgatgaagagagaatggaagagacaaaagaggctatgtcagaaatgctaagacatcctaggatatcgggaaagcctatattggtgtaagtaatgttagcattctgtctcccccaaaaaagaatgtgctatgaagctttctttcctacacactctgagtctctgaatgaagctgaaggtcttagtaccagagctagttttcagctgctcagaattcatctgaagagagacttaagatgaaagcaaatgattcagctcccttatacccccattaaattcactttcaattccaaacatg

SEQ ID NO: 318783 - DNA, 655 bp, Homo sapiens
ctctcgaggatccccgactacatacttccgaccagttctaagggaccatacagagtattcctctcttcacaccaggaccagccactgttgcagcatgagttcccagcagcagaagcagccctgcatcccaccccctcagcttcagcagcagcaggtgaaacagccttgccagcctccacctcaggaaccatgcatccccaaaaccaaggagccctgccaccccaaggtgcctgagccctgccaccccaaagtgcctgagccctgccagcccaaggttccagagccatgccaccccaaggtgcctgagccctgcccttcaatagtcactccagcaccagcccagcagaagaccaagcagaagtaatgtggtccacagccatgcccttgaggagccggccaccagatgctgaatcccctatcccattctgtgtatgagtcccatttgccttgcaattagcattctgtctcccccaaaaaagaatgtgctatgaagctttctttcctacacactctgagtctctgaatgaagctgaaggtcttagtaccagagctagttttcagctgctcagaattcatctgaagagagacttaagatgaaagcaaatgattcagctcccttatacccccattaaattcactttcaattccaaacatg

SEQ ID NO: 318784 - DNA, 608 bp, Homo sapiens
ctctcgaggatccccgactacatacttccgaccagttctaagggaccatacagagtattcctctcttcacaccaggaccagccactgttgcagcatgagttcccagcagcagaagcagccctgcatcccaccccctcagcttcagcagcagcaggtgaaacagccttgccagcctccacctcaggaaccatgcatccccaaaaccaaggagccctgccaccccaaggtgcctgagccctgccaccccaaagtgcctgagccctgccagcccaaggttccagagccatgccaccccaaggtgcctgagccctgcccttcaatagtcactccagcaccagcccagcagaagaccaagcagaagtaatgtggtccacagccatgcccttgaggagccggccaccagatgctgaatcccctatcccggtgggaagtcgacttcccacgggacatgcagacagatggattatcgggaacactgatggattaacaggaacaccaactggggaaggattcttgacattatttattaagagctaggatgtgattgaggtacgtgggggccactcaatattcaatcatcatttattgaatacttaccactacttacc

SEQ ID NO: 318785 - DNA, 441 bp, Homo sapiens
ctctcgaggatccccgactacatacttccgaccagttctaagggaccatacagagtattcctctcttcacaccaggaccagccactgttgcagcatgagttcccagcagcagaagcagccctgcatcccaccccctcagcttcagcagcagcaggtgaaacagccttgccagcctccacctcaggaaccatgcatccccaaaaccaaggagccctgccaccccaaggtgcctgagccctgccaccccaaagtgcctgagccctgccagcccaaggttccagagccatgccaccccaaggtgcctgagccctgcccttcaatagtcactccagcaccagcccagcagactgttgcagcatgagttcccagcagcagaagcagccctgcatcccaccccctcagcttcagcagcagcaggtgaaacagccttgccagcctcca

SEQ ID NO: 318786 - DNA, 3748 bp, Homo sapiens
  misc_feature (165)..(165): n is a, c, g, or t
  misc_feature (175)..(175): n is a, c, g, or t
  misc_feature (177)..(177): n is a, c, g, or t
  misc_feature (180)..(180): n is a, c, g, or t
aagaacatatactataaggaatgagcatgttgattacgtagatgttggtggagcttatgtgggaccaacccaaaacagaatcttacgcttgtctaaggagctgggcatagagacttacaaagtggatgtcagtgagcgtctcgttcaatatgtcaaggggaaaanatatcctttngnggngctttccaccagtatggaatcccattgcatatttggattacaataatctgtggaggacaatagataacatggggaaggagattccaactgatgcaccctgggaggctcaacatgctgacaaatgggacaaaatgaccatgaaagagctcattgacaaaatctgctggacaaaggactgctaggcggtttgcttatctttttgtgaatatcaatgtgacctctgagcctcacgaagtgtctgccctgtggttcttgtggtatgtgaagcagtgcgggggcaccactcggatattctctgtcaccaatggtggccaggaacggaagtttgtaggtggatctggtcaagtgagcgaacggataatggacctcctcggagaccaagtgaagctgaaccatcctgtcactcacgttgaccagtcaagtgacaacatcatcatagagacgctgaaccatgaacattatgagtgcaaatacgtaattaatgcgatccctccgaccttgactgccaagattcacttcagaccagagcttccagcagagagaaaccagttaattcagcgtcttccaatgggagctgtcattaagtgcatgatgtattacaaggaggccttctggaagaagaaggattactgtggctgcatgatcattgaagatgaagatgctccaatttcaataaccttggatgacaccaagccagatgggtcactgcctgccatcatgggcttcattcttgcccggaaagctgatcgacttgctaagctacataaggaaataaggaagaagaaaatctgtgagctctatgccaaagtgctgggatcccaagaagctttacatccagtgcattatgaagagaagaactggtgtgaggagcagtactctgggggctgctacacggcctacttccctcctgggatcatgactcaatatggaagggtgattcgtcaacccgtgggcaggattttctttgcgggcacagagactgccacaaagtggagcggctacatggaaggggcagttgaggctggagaacgagcagctagggaggtcttaaatggtctcgggaaggtgaccgagaaagacatctgggtacaagaacctgaatcaaaggacgttccagcggtagaaatcacccacaccttctgggaaaggaacctgccctctgtttctggcctgctgaagatcattggattttccacatcagtaactgccctggggtttgtgctgtacaaatacaagctcctgccacggtcttgaagttctgttcttatgctctctgctcactggttttcaataccaccaagaggaaaatattgacaagtttaaaggctgtgtcattgggccatgtttaagtgtactggatttaactacctttggcttaattccaatcattgttaaagtaaaaacaattcaaagaatcacctaattaatttcagtaagatcaagctccatcttatttgtcagtgtagatcaactcatgttaattgatagaataaagccttgtgatcactttctgaaattcacaaagttaaacgtgatgtgctcatcagaaacaatttctgtgtcctgtttttattcccttcaatgcaaaatacatgatgatttcagaaacaaagcatttgactttctgtctgtggaggtggagtaggtgaaggcccagcctgtaactgtcctttttcttcccttaggcaatggtgaactgtcattacagagcctagaggctcacagcctcctggaggaagcagcctccactttggatcaggaaatagtaaaggaaagcagtgttgggggtagcggcatgcagaccctcagaccagaatggggacatcttgtggtctgctgcctcaggaatctcctgaccacttgtagtccctccgacttctctagacatctagtctcagtgctagcttatttgtatttttcctctttcacttcttatggaggagagtgtttaactgagttagaatgttgaaactgacttgctgtgacttatgtgcagctttccagttgagcagaggaaaatagtggcaggactgtcccccaggaggactccctgcttagctctgtgggagaccaactacgactggcatcttctcttccccctggaaggcagctagacaccaatggatccttgtcagttgtaacattctatttcaacttcaggaaagcagcagttttcttttaatttttcctatgaccataaaattagacatacctctcaacttacatatgtcttcaacatggttacctctgcataaatattagcaaagcatgccaatttctcttaagtactgaaatacatatgataaatttgactgttatttgttgagactatcagacagaaaagaaattagggctctaatttccttaaagcaagctcacttgctttagttgttaagttttataaaagacatgaaattgagtcattttatatatgaaaactaagttctctatcttaggagtaatgtcggcccacaagggtgcccacctcttgttttccccttttaaaaactcagatttttaaaagccctttccaaaggtttcaactgtaaaatacttctttttacaatgtatcaacatatttttatttaaggggaattaacaattgccagggaaaccagccaacccaagtttattatatcattaaccttatcataaattcaaacctaagttgctggaccctggtgtgaggacataaatcttccaaagttttgcctatcctaagagctgcatttttctactgctctttaccttgcattttagctaatttaggagttttgagaatgtattggatacgctccagtacataaggagttgccgcatattatatcagactgctttgagaaatctcatccctagtctattgcagttgtttctattagcttactgattaactcagtcctgacacaccttttgggaaatgctgatttaaacttcttaactggcaacagttggaacagtaatcagtttgctaacatatttaaagtcttgaatgttgaagaactcatgtgatttacccttttcaactttttggaaaacgatttaatttattctaattagattaaccctattaatctatggattgggtatcaaaatgaatgccagtccagatgtgcctagacacgaaattggagctgaggactctcacgatatgcaagttcatccaacgtgaagataccataagctttttctctgaaccagagaaatgaaagtcagtttaagaggctgatagatcttggccctgttaaggcatccacttcacagttctgaaggctgagtcagccccactccacagttaggccaagaattagattttaaaacttcatctgtctgtcccagttaactgttaaataaggcctcatcctccactgaagagtatggattgaaggattgtgaactatgtttagtgtgattgtgaacttggtgcctaatgttccatgtctgaagtttgccccagtgctacacgttggagtatacctatgtgtgtgctttgccactgaagtaagattttgcctgtatggtactgttttgtttgttaataaagtgcactgccacccccaaaaaaaaaaaa

SEQ ID NO: 318787 - DNA, 3510 bp, Homo sapiens
tttagagagatggtgtcttccagcaatctgccacaagggtggttagaggtccaggggataccggaagggtgggatggtgtagcaggatggtatcttccaggaataaaccctggcggactgctaggcggtttgcttatctttttgtgaatatcaatgtgacctctgagcctcacgaagtgtctgccctgtggttcttgtggtatgtgaagcagtgcgggggcaccactcggatattctctgtcaccaatggtggccaggaacggaagtttgtaggtggatctggtcaagtgagcgaacggataatggacctcctcggagaccaagtgaagctgaaccatcctgtcactcacgttgaccagtcaagtgacaacatcatcatagagacgctgaaccatgaacattatgagtgcaaatacgtaattaatgcgatccctccgaccttgactgccaagattcacttcagaccagagcttccagcagagagaaaccagttaattcagcgtcttccaatgggagctgtcattaagtgcatgatgtattacaaggaggccttctggaagaagaaggattactgtggctgcatgatcattgaagatgaagatgctccaatttcaataaccttggatgacaccaagccagatgggtcactgcctgccatcatgggcttcattcttgcccggaaagctgatcgacttgctaagctacataaggaaataaggaagaagaaaatctgtgagctctatgccaaagtgctgggatcccaagaagctttacatccagtgcattatgaagagaagaactggtgtgaggagcagtactctgggggctgctacacggcctacttccctcctgggatcatgactcaatatggaagggtgattcgtcaacccgtgggcaggattttctttgcgggcacagagactgccacaaagtggagcggctacatggaaggggcagttgaggctggagaacgagcagctagggaggtcttaaatggtctcgggaaggtgaccgagaaagacatctgggtacaagaacctgaatcaaaggacgttccagcggtagaaatcacccacaccttctgggaaaggaacctgccctctgtttctggcctgctgaagatcattggattttccacatcagtaactgccctggggtttgtgctgtacaaatacaagctcctgccacggtcttgaagttctgttcttatgctctctgctcactggttttcaataccaccaagaggaaaatattgacaagtttaaaggctgtgtcattgggccatgtttaagtgtactggatttaactacctttggcttaattccaatcattgttaaagtaaaaacaattcaaagaatcacctaattaatttcagtaagatcaagctccatcttatttgtcagtgtagatcaactcatgttaattgatagaataaagccttgtgatcactttctgaaattcacaaagttaaacgtgatgtgctcatcagaaacaatttctgtgtcctgtttttattcccttcaatgcaaaatacatgatgatttcagaaacaaagcatttgactttctgtctgtggaggtggagtaggtgaaggcccagcctgtaactgtcctttttcttcccttaggcaatggtgaactgtcattacagagcctagaggctcacagcctcctggaggaagcagcctccactttggatcaggaaatagtaaaggaaagcagtgttgggggtagcggcatgcagaccctcagaccagaatggggacatcttgtggtctgctgcctcaggaatctcctgaccacttgtagtccctccgacttctctagacatctagtctcagtgctagcttatttgtatttttcctctttcacttcttatggaggagagtgtttaactgagttagaatgttgaaactgacttgctgtgacttatgtgcagctttccagttgagcagaggaaaatagtggcaggactgtcccccaggaggactccctgcttagctctgtgggagaccaactacgactggcatcttctcttccccctggaaggcagctagacaccaatggatccttgtcagttgtaacattctatttcaacttcaggaaagcagcagttttcttttaatttttcctatgaccataaaattagacatacctctcaacttacatatgtcttcaacatggttacctctgcataaatattagcaaagcatgccaatttctcttaagtactgaaatacatatgataaatttgactgttatttgttgagactatcagacagaaaagaaattagggctctaatttccttaaagcaagctcacttgctttagttgttaagttttataaaagacatgaaattgagtcattttatatatgaaaactaagttctctatcttaggagtaatgtcggcccacaagggtgcccacctcttgttttccccttttaaaaactcagatttttaaaagccctttccaaaggtttcaactgtaaaatacttctttttacaatgtatcaacatatttttatttaaggggaattaacaattgccagggaaaccagccaacccaagtttattatatcattaaccttatcataaattcaaacctaagttgctggaccctggtgtgaggacataaatcttccaaagttttgcctatcctaagagctgcatttttctactgctctttaccttgcattttagctaatttaggagttttgagaatgtattggatacgctccagtacataaggagttgccgcatattatatcagactgctttgagaaatctcatccctagtctattgcagttgtttctattagcttactgattaactcagtcctgacacaccttttgggaaatgctgatttaaacttcttaactggcaacagttggaacagtaatcagtttgctaacatatttaaagtcttgaatgttgaagaactcatgtgatttacccttttcaactttttggaaaacgatttaatttattctaattagattaaccctattaatctatggattgggtatcaaaatgaatgccagtccagatgtgcctagacacgaaattggagctgaggactctcacgatatgcaagttcatccaacgtgaagataccataagctttttctctgaaccagagaaatgaaagtcagtttaagaggctgatagatcttggccctgttaaggcatccacttcacagttctgaaggctgagtcagccccactccacagttaggccaagaattagattttaaaacttcatctgtctgtcccagttaactgttaaataaggcctcatcctccactgaagagtatggattgaaggattgtgaactatgtttagtgtgattgtgaacttggtgcctaatgttccatgtctgaagtttgccccagtgctacacgttggagtatacctatgtgtgtgctttgccactgaagtaagattttgcctgtatggtactgttttgtttgttaataaagtgcactgccacccccaaaaaaaaaaaa

SEQ ID NO: 318788 - DNA, 2146 bp, Homo sapiens
  misc_feature (165)..(165): n is a, c, g, or t
  misc_feature (175)..(175): n is a, c, g, or t
  misc_feature (177)..(177): n is a, c, g, or t
  misc_feature (180)..(180): n is a, c, g, or t
aagaacatatactataaggaatgagcatgttgattacgtagatgttggtggagcttatgtgggaccaacccaaaacagaatcttacgcttgtctaaggagctgggcatagagacttacaaagtggatgtcagtgagcgtctcgttcaatatgtcaaggggaaaanatatcctttngnggngctttccaccagtatggaatcccattgcatatttggattacaataatctgtggaggacaatagataacatggggaaggagattccaactgatgcaccctgggaggctcaacatgctgacaaatgggacaaaatgaccatgaaagagctcattgacaaaatctgctggacaaaggactgctaggcggtttgcttatctttttgtgaatatcaatgtgacctctgagcctcacgaagtgtctgccctgtggttcttgtggtatgtgaagcagtgcgggggcaccactcggatattctctgtcaccaatggtggccaggaacggaagtttgtaggtggatctggtcaagtgagcgaacggataatggacctcctcggagaccaagtgaagctgaaccatcctgtcactcacgttgaccagtcaagtgacaacatcatcatagagacgctgaaccatgaacattatgagtgcaaatacgtaattaatgcgatccctccgaccttgactgccaagattcacttcagaccagagcttccagcagagagaaaccagttaattcagcgtcttccaatgggagctgtcattaagtgcatgatgtattacaaggaggccttctggaagaagaaggattactgtggctgcatgatcattgaagatgaagatgctccaatttcaataaccttggatgacaccaagccagatgggtcactgcctgccatcatgggcttcattcttgcccggaaagctgatcgacttgctaagctacataaggaaataaggaagaagaaaatctgtgagctctatgccaaagtgctgggatcccaagaagctttacatccagtgcattatgaagagaagaactggtgtgaggagcagtactctgggggctgctacacggcctacttccctcctgggatcatgactcaatatggaagggtgattcgtcaacccgtgggcaggattttctttgcgggcacagagactgccacaaagtggagcggctacatggaaggggcagttgaggctggagaacgagcagctagggaggtcttaaatggtctcgggaaggtgaccgagaaagacatctgggtacaagaacctgaatcaaaggacgttccagcggtagaaatcacccacaccttctgggaaaggaacctgccctctgtttctggcctgctgaagatcattggattttccacatcagtaactgccctggggtttgtgctgtacaaatacaagctcctgccacggtcttgaagttctgttcttatgctctctgctcactggttttcaataccaccaagaggaaaatattgacaagtttaaaggctgtgtcattgggccatgtttaagtgtactggatttaactacctttggcttaattccaatcattgttaaagtaaaaacaattcaaagaatcacctaattaatttcagtaagatcaagctccatcttatttgtcagtgtagatcaactcatgttaattgatagaataaagccttgtgatcactttctgaaattcacaaagttaaacgtgatgtgctcatcagaaacaatttctgtgtcctgtttttattcccttcaatgcaaaatacatgatgatttcagaaacaaagcatttgactttctgtctgtggaggtggagtaggtgaaggcccagcctgtaactgtcctttttcttcccttaggcaatggtgaactgtcattagattttaaaacttcatctgtctgtcccagttaactgttaaataaggcctcatcctccactgaagagtatggattgaaggattgtgaactatgtttagtgtgattgtgaacttggtgcctaatgttccatgtctgaagtttgccccagtgctacacgttggagtatacctatgtgtgtgctttgccactgaagtaagattttgcctgtatggtactgttttgtttgttaataaagtgcactgccacccccaaaaaaaaaaaa

SEQ ID NO: 318789 - DNA, 2687 bp, Homo sapiens
tctgaatttctgtgccttctgcagactaaatgagggcagtgattggctcatttaccctgcccaccttcccaagtaactctgtgtaacctcttggttcccttgaagggtgattcgtcaacccgtgggcaggattttctttgcgggcacagagactgccacaaagtggagcggctacatggaaggggcagttgaggctggagaacgagcagctagggaggtcttaaatggtctcgggaaggtgaccgagaaagacatctgggtacaagaacctgaatcaaaggacgttccagcggtagaaatcacccacaccttctgggaaaggaacctgccctctgtttctggcctgctgaagatcattggattttccacatcagtaactgccctggggtttgtgctgtacaaatacaagctcctgccacggtcttgaagttctgttcttatgctctctgctcactggttttcaataccaccaagaggaaaatattgacaagtttaaaggctgtgtcattgggccatgtttaagtgtactggatttaactacctttggcttaattccaatcattgttaaattatttgtcagtgtagatcaactcatgttaattgatagaataaagccttgtgatcactttctgaaattcacaaagttaaacgtgatgtgctcatcagaaacaatttctgtgtcctgtttttattcccttcaatgcaaaatacatgatgatttcagaaacaaagcatttgactttctgtctgtggaggtggagtaggtgaaggcccagcctgtaactgtcctttttcttcccttaggcaatggtgaactgtcattacagagcctagaggctcacagcctcctggaggaagcagcctccactttggatcaggaaatagtaaaggaaagcagtgttgggggtagcggcatgcagaccctcagaccagaatggggacatcttgtggtctgctgcctcaggaatctcctgaccacttgtagtccctccgacttctctagacatctagtctcagtgctagcttatttgtatttttcctctttcacttcttatggaggagagtgtttaactgagttagaatgttgaaactgacttgctgtgacttatgtgcagctttccagttgagcagaggaaaatagtggcaggactgtcccccaggaggactccctgcttagctctgtgggagaccaactacgactggcatcttctcttccccctggaaggcagctagacaccaatggatccttgtcagttgtaacattctatttcaacttcaggaaagcagcagttttcttttaatttttcctatgaccataaaattagacatacctctcaacttacatatgtcttcaacatggttacctctgcataaatattagcaaagcatgccaatttctcttaagtactgaaatacatatgataaatttgactgttatttgttgagactatcagacagaaaagaaattagggctctaatttccttaaagcaagctcacttgctttagttgttaagttttataaaagacatgaaattgagtcattttatatatgaaaactaagttctctatcttaggagtaatgtcggcccacaagggtgcccacctcttgttttccccttttaaaaactcagatttttaaaagccctttccaaaggtttcaactgtaaaatacttctttttacaatgtatcaacatatttttatttaaggggaattaacaattgccagggaaaccagccaacccaagtttattatatcattaaccttatcataaattcaaacctaagttgctggaccctggtgtgaggacataaatcttccaaagttttgcctatcctaagagctgcatttttctactgctctttaccttgcattttagctaatttaggagttttgagaatgtattggatacgctccagtacataaggagttgccgcatattatatcagactgctttgagaaatctcatccctagtctattgcagttgtttctattagcttactgattaactcagtcctgacacaccttttgggaaatgctgatttaaacttcttaactggcaacagttggaacagtaatcagtttgctaacatatttaaagtcttgaatgttgaagaactcatgtgatttacccttttcaactttttggaaaacgatttaatttattctaattagattaaccctattaatctatggattgggtatcaaaatgaatgccagtccagatgtgcctagacacgaaattggagctgaggactctcacgatatgcaagttcatccaacgtgaagataccataagctttttctctgaaccagagaaatgaaagtcagtttaagaggctgatagatcttggccctgttaaggcatccacttcacagttctgaaggctgagtcagccccactccacagttaggccaagaattagattttaaaacttcatctgtctgtcccagttaactgttaaataaggcctcatcctccactgaagagtatggattgaaggattgtgaactatgtttagtgtgattgtgaacttggtgcctaatgttccatgtctgaagtttgccccagtgctacacgttggagtatacctatgtgtgtgctttgccactgaagtaagattttgcctgtatggtactgttttgtttgttaataaagtgcactgccacccccaaaaaaaaaaaa

SEQ ID NO: 318790 - DNA, 2164 bp, Homo sapiens
  misc_feature (165)..(165): n is a, c, g, or t
  misc_feature (175)..(175): n is a, c, g, or t
  misc_feature (177)..(177): n is a, c, g, or t
  misc_feature (180)..(180): n is a, c, g, or t
  misc_feature (1999)..(2000): n is a, c, g, or t
aagaacatatactataaggaatgagcatgttgattacgtagatgttggtggagcttatgtgggaccaacccaaaacagaatcttacgcttgtctaaggagctgggcatagagacttacaaagtggatgtcagtgagcgtctcgttcaatatgtcaaggggaaaanatatcctttngnggngctttccaccagtatggaatcccattgcatatttggattacaataatctgtggaggacaatagataacatggggaaggagattccaactgatgcaccctgggaggctcaacatgctgacaaatgggacaaaatgaccatgaaagagctcattgacaaaatctgctggacaaaggactgctaggcggtttgcttatctttttgtgaatatcaatgtgacctctgagcctcacgaagtgtctgccctgtggttcttgtggtatgtgaagcagtgcgggggcaccactcggatattctctgtcaccaatggtggccaggaacggaagtttgtaggtggatctggtcaagtgagcgaacggataatggacctcctcggagaccaagtgaagctgaaccatcctgtcactcacgttgaccagtcaagtgacaacatcatcatagagacgctgaaccatgaacattatgagtgcaaatacgtaattaatgcgatccctccgaccttgactgccaagattcacttcagaccagagcttccagcagagagaaaccagttaattcagcgtcttccaatgggagctgtcattaagtgcatgatgtattacaaggaggccttctggaagaagaaggattactgtggctgcatgatcattgaagatgaagatgctccaatttcaataaccttggatgacaccaagccagatgggtcactgcctgccatcatgggcttcattcttgcccggaaagctgatcgacttgctaagctacataaggaaataaggaagaagaaaatctgtgagctctatgccaaagtgctgggatcccaagaagctttacatccagtgcattatgaagagaagaactggtgtgaggagcagtactctgggggctgctacacggcctacttccctcctgggatcatgactcaatatggaagggtgattcgtcaacccgtgggcaggattttctttgcgggcacagagactgccacaaagtggagcggctacatggaaggggcagttgaggctggagaacgagcagctagggaggtcttaaatggtctcgggaaggtgaccgagaaagacatctgggtacaagaacctgaatcaaaggacgttccagcggtagaaatcacccacaccttctgggaaaggaacctgccctctgtttctggcctgctgaagatcattggattttccacatcagtaactgccctggggtttgtgctgtacaaatacaagctcctgccacggtcttgaagttctgttcttatgctctctgctcactggttttcaataccaccaagaggaaaatattgacaagtttaaaggctgtgtcattgggccatgtttaagtgtactggatttaactacctttggcttaattccaatcattgttaaagtaaaaacaattcaaagaatcacctaattaatttcagtaagatcaagctccatcttatttgtcagtgtagatcaactcatgttaattgatagaataaagccttgtgatcactttctgaaattcacaaagttaaacgtgatgtgctcatcagaaacaaaaaaaaaaaaaaaaaaaaaaaaaaaattttggggggggtggggcaggaaaaagttttaagacccatttgttgggggggggggcccctgggtttgggggaagggggcaaggggggccaagaagaaaccacgggcacgaactgtgtgcgggtttcccccccaaaaaaaacgggcggggggaccggggcgttggaacacacccagggggctggggggccatgggttcaaacacgggcccaggggcgcgtataatcgccggcgcggaggnnaagagcaaacaaccgacacaaacagaacacagcacaagaaacccaaactagcacacacacaaagtaagtactaaacaacagcacagtgcaccaagaacacgaccacacaactagcagagcatgaccacctgatctaatcgagacaacacaatacacagaacaga

SEQ ID NO: 318791 - DNA, 3694 bp, Homo sapiens
  misc_feature (165)..(165): n is a, c, g, or t
  misc_feature (175)..(175): n is a, c, g, or t
  misc_feature (177)..(177): n is a, c, g, or t
  misc_feature (180)..(180): n is a, c, g, or t
aagaacatatactataaggaatgagcatgttgattacgtagatgttggtggagcttatgtgggaccaacccaaaacagaatcttacgcttgtctaaggagctgggcatagagacttacaaagtggatgtcagtgagcgtctcgttcaatatgtcaaggggaaaanatatcctttngnggngctttccaccagtatggaatcccattgcatatttggattacaataatctgtggaggacaatagataacatggggaaggagattccaactgatgcaccctgggaggctcaacatgctgacaaatgggacaaaatgaccatgaaagagctcattgacaaaatctgctggacaaaggactgctaggcggtttgcttatctttttgtgaatatcaatgtgacctctgagcctcacgaagtgtctgccctgtggttcttgtggtatgtgaagcagtgcgggggcaccactcggatattctctgtcaccaatggtggccaggaacggaagtttgtaggtggatctggtcaagtgagcgaacggataatggacctcctcggagaccaagtgaagctgaaccatcctgtcactcacgttgaccagtcaagtgacaacatcatcatagagacgctgaaccatgaacattatgagtgcaaatacgtaattaatgcgatccctccgaccttgactgccaagattcacttcagaccagagcttccagcagagagaaaccagttaattcagcgtcttccaatgggagctgtcattaagtgcatgatgtattacaaggaggccttctggaagaagaaggattactgtggctgcatgatcattgaagatgaagatgctccaatttcaataaccttggatgacaccaagccagatgggtcactgcctgccatcatgggcttcattcttgcccggaaagctgatcgacttgctaagctacataaggaaataaggaagaagaaaatctgtgagctctatgccaaagtgctgggatcccaagaagctttacatccagtgcattatgaagagaagaactggtgtgaggagcagtactctgggggctgctacacggcctacttccctcctgggatcatgactcaatatggaagggtgattcgtcaacccgtgggcaggattttctttgcgggcacagagactgccacaaagtggagcggctacatggaaggggcagttgaggctggagaacgagcagctagggaggtcttaaatggtctcgggaaggtgaccgagaaagacatctgggtacaagaacctgaatcaaaggacgttccagcggtagaaatcacccacaccttctgggaaaggaacctgccctctgtttctggcctgctgaagatcattggattttccacatcagtaactgccctggggtttgtgctgtacaaatacaagctcctgccacggtcttgaagttctgttcttatgctctctgctcactggttttcaataccaccaagaggaaaatattgacaagtttaaaggctgtgtcattgggccatgtttaagtgtactggatttaactacctttggcttaattccaatcattgttaaattatttgtcagtgtagatcaactcatgttaattgatagaataaagccttgtgatcactttctgaaattcacaaagttaaacgtgatgtgctcatcagaaacaatttctgtgtcctgtttttattcccttcaatgcaaaatacatgatgatttcagaaacaaagcatttgactttctgtctgtggaggtggagtaggtgaaggcccagcctgtaactgtcctttttcttcccttaggcaatggtgaactgtcattacagagcctagaggctcacagcctcctggaggaagcagcctccactttggatcaggaaatagtaaaggaaagcagtgttgggggtagcggcatgcagaccctcagaccagaatggggacatcttgtggtctgctgcctcaggaatctcctgaccacttgtagtccctccgacttctctagacatctagtctcagtgctagcttatttgtatttttcctctttcacttcttatggaggagagtgtttaactgagttagaatgttgaaactgacttgctgtgacttatgtgcagctttccagttgagcagaggaaaatagtggcaggactgtcccccaggaggactccctgcttagctctgtgggagaccaactacgactggcatcttctcttccccctggaaggcagctagacaccaatggatccttgtcagttgtaacattctatttcaacttcaggaaagcagcagttttcttttaatttttcctatgaccataaaattagacatacctctcaacttacatatgtcttcaacatggttacctctgcataaatattagcaaagcatgccaatttctcttaagtactgaaatacatatgataaatttgactgttatttgttgagactatcagacagaaaagaaattagggctctaatttccttaaagcaagctcacttgctttagttgttaagttttataaaagacatgaaattgagtcattttatatatgaaaactaagttctctatcttaggagtaatgtcggcccacaagggtgcccacctcttgttttccccttttaaaaactcagatttttaaaagccctttccaaaggtttcaactgtaaaatacttctttttacaatgtatcaacatatttttatttaaggggaattaacaattgccagggaaaccagccaacccaagtttattatatcattaaccttatcataaattcaaacctaagttgctggaccctggtgtgaggacataaatcttccaaagttttgcctatcctaagagctgcatttttctactgctctttaccttgcattttagctaatttaggagttttgagaatgtattggatacgctccagtacataaggagttgccgcatattatatcagactgctttgagaaatctcatccctagtctattgcagttgtttctattagcttactgattaactcagtcctgacacaccttttgggaaatgctgatttaaacttcttaactggcaacagttggaacagtaatcagtttgctaacatatttaaagtcttgaatgttgaagaactcatgtgatttacccttttcaactttttggaaaacgatttaatttattctaattagattaaccctattaatctatggattgggtatcaaaatgaatgccagtccagatgtgcctagacacgaaattggagctgaggactctcacgatatgcaagttcatccaacgtgaagataccataagctttttctctgaaccagagaaatgaaagtcagtttaagaggctgatagatcttggccctgttaaggcatccacttcacagttctgaaggctgagtcagccccactccacagttaggccaagaattagattttaaaacttcatctgtctgtcccagttaactgttaaataaggcctcatcctccactgaagagtatggattgaaggattgtgaactatgtttagtgtgattgtgaacttggtgcctaatgttccatgtctgaagtttgccccagtgctacacgttggagtatacctatgtgtgtgctttgccactgaagtaagattttgcctgtatggtactgttttgtttgttaataaagtgcactgccacccccaaaaaaaaaaaa

SEQ ID NO: 318792 - DNA, 2043 bp, Homo sapiens
agtgcggcttgttttctttcctccagtctcggggctgcaggctgagcgcgatgcgcggagacccccgcgggggcggcggcggccgtgagccccgatgaggcccgagcgtccccggccgcgcggcagcgcccccggcccgatggagaccccgccgtgggacccagcccgcaacgactcgctgccgcccacgctgaccccggccgtgcccccctacgtgaagcttggcctcaccgtcgtctacaccgtgttctacgcgctgctcttcgtgttcatctacgtgcagctctggctggtgctgcgttaccgccacaagcggctcagctaccagagcgtcttcctctttctctgcctcttctgggcctccctgcggaccgtcctcttctccttctacttcaaagacttcgtggcggccaattcgctcagccccttcgtcttctggctgctctactgcttccctgtgtgcctgcagtttttcaccctcacgctgatgaacttgtacttcacgcaggtgattttcaaagccaagtcaaaatattctccagaattactcaaataccggttgcccctctacctggcctccctcttcatcagccttgttttcctgttggtgaatttaacctgtgctgtgctggtaaagacgggaaattgggagaggaaggttatcgtctctgtgcgagtggccattaatgacacgctcttcgtgctgtgtgccgtctctctctccatctgtctctacaaaatctctaagatgtccttagccaacatttacttggagtccaagggctcctccgtgtgtcaagtgactgccatcggtgtcaccgtgatactgctttacacctctcgggcctgctacaacctgttcatcctgtcattttctcagaacaagagcgtccattcctttgattatgactggtacaatgtatcagaccaggcagatttgaagaatcagctgggagatgctggatacgtattatttggagtggtgttatttgtttgggaactcttacctaccaccttagtcgtttatttcttccgagttagaaatcctacaaaggaccttaccaaccctggaatggtccccagccatggattcagtcccagatcttatttctttgacaaccctcgaagatatgacagtgatgatgaccttgcctggaacattgcccctcagggacttcagggaggttttgctccagattactatgattggggacaacaaactaacagcttcctggcacaagcaggaactttgcaagactcaactttggatcctgacaaaccaagccttgggtagcatcagttaacagttttatggacgattcctcagatgaaaagcttcagaaaagcatagtgacagctgaatttttagggcacttttccttaagaaatagaacttgatttttatttgttacaggtttccaatggccccataggaataagcaataatgtagactgataaacccttattttagtactaaagagggagccttgctatttcagtgggtataatttaaactttttaaagaaaatctgtacttttataaagatgtattttgtataacttaaataataatgctaaagtatactagggtttttttttcttgagaatgttactgcaatcatgttgtagtttgcacagacttttatgcataattcactttaaaaatatagaatatatggtctaatagttttttaaagcttttggactaaagtattccacaaatcttacctctttaggtcactgatggtcactccgattctgagtgccacattggtagactcctaaaatacagttgacaacttagccaattgcaactccagtgttgataattaaaatgaaatggtaaagcagcagactgtaaggtctttagagattttttttttaaggttcaggccgtaggttcctcaaggaatctcttaagttttgcccaaagactggtacttcctttcagtagggcgctaatgtatacacattaatgataagttgataacattaaaaatgtagctgacttatcctattaaacctcctctgctatgttcaca

SEQ ID NO: 318793 - DNA, 388 bp, Homo sapiens
ttgctctcatgccttccaggttgcccctctacctggcctccctcttcatcagccttgttttcctgttggtgaatttaacctgtgctgtgctggtaaagacgggaaattgggagaggaaggttatcgtctctgtgcgagtggccattaatgacacgctcttcgtgctgtgtgccgtctctctctccatctgtctctacaaaatctctaagatgtccttagccaacatttacttggagtccaaggtaggtggaaatgtggtcaagatccctcccatgaaacgtgttctaaaaagagtttcctggtttgcaaaagtacattttgatgaattttagacttgattttgccttgactttctccgttttattgtctcccacacaggggctactcg

SEQ ID NO: 318794 - DNA, 2117 bp, Homo sapiens
agtgcggcttgttttctttcctccagtctcggggctgcaggctgagcgcgatgcgcggagacccccgcgggggcggcggcggccgtgagccccgatgaggcccgagcgtccccggccgcgcggcagcgcccccggcccgatggagaccccgccgtgggacccagcccgcaacgactcgctgccgcccacgctgaccccggccgtgcccccctacgtgaagcttggcctcaccgtcgtctacaccgtgttctacgcgctgctcttcgtgttcatctacgtgcagctctggctggtgctgcgttaccgccacaagcggctcagctaccagagcgtcttcctctttctctgcctcttctgggcctccctgcggaccgtcctcttctccttctacttcaaagacttcgtggcggccaattcgctcagccccttcgtcttctggctgctctactgcttccctgtgtgcctgcagtttttcaccctcacgctgatgaacttgtacttcacgcaggtgattttcaaagccaagtcaaaatattctccagaattactcaaataccggttgcccctctacctggcctccctcttcatcagccttgttttcctgttggtgaatttaacctgtgctgtgctggtaaagacgggaaattgggagaggaaggttatcgtctctgtgcgagtggccattaatgacacgctcttcgtgctgtgtgccgtctctctctccatctgtctctacaaaatctctaagatgtccttagccaacatttacttggagtccaagggctcctccgtgtgtcaagtgactgccatcggtgtcaccgtgatactgctttacacctctcgggcctgctacaacctgttcatcctgtcattttctcagaacaagagcgtccattcctttgattatgactggtacaatgtatcagaccaggcagatttgaagaatcagctgggagatgctggatacgtattatttggagtggtgttatttgtttgggaactcttacctaccaccttagtcgtttatttcttccgagttagaaatcctacaaaggaccttacttttttgatgtaggaatttaatgctgtcaactttcctctcagccccacttttgctgtgcctcagaggtttggaccaaccctggaatggtccccagccatggattcagtcccagatcttatttctttgacaaccctcgaagatatgacagtgatgatgaccttgcctggaacattgcccctcagggacttcagggaggttttgctccagattactatgattggggacaacaaactaacagcttcctggcacaagcaggaactttgcaagactcaactttggatcctgacaaaccaagccttgggtagcatcagttaacagttttatggacgattcctcagatgaaaagcttcagaaaagcatagtgacagctgaatttttagggcacttttccttaagaaatagaacttgatttttatttgttacaggtttccaatggccccataggaataagcaataatgtagactgataaacccttattttagtactaaagagggagccttgctatttcagtgggtataatttaaactttttaaagaaaatctgtacttttataaagatgtattttgtataacttaaataataatgctaaagtatactagggtttttttttcttgagaatgttactgcaatcatgttgtagtttgcacagacttttatgcataattcactttaaaaatatagaatatatggtctaatagttttttaaagcttttggactaaagtattccacaaatcttacctctttaggtcactgatggtcactccgattctgagtgccacattggtagactcctaaaatacagttgacaacttagccaattgcaactccagtgttgataattaaaatgaaatggtaaagcagcagactgtaaggtctttagagattttttttttaaggttcaggccgtaggttcctcaaggaatctcttaagttttgcccaaagactggtacttcctttcagtagggcgctaatgtatacacattaatgataagttgataacattaaaaatgtagctgacttatcctattaaacctcctctgctatgttcaca

SEQ ID NO: 318795 - DNA, 1993 bp, Homo sapiens
agtgcggcttgttttctttcctccagtctcggggctgcaggctgagcgcgatgcgcggagacccccgcgggggcggcggcggccgtgagccccgatgaggcccgagcgtccccggccgcgcggcagcgcccccggcccgatggagaccccgccgtgggacccagcccgcaacgactcgctgccgcccacgctgaccccggccgtgcccccctacgtgaagcttggcctcaccgtcgtctacaccgtgttctacgcgctgctcttcgtgttcatctacgtgcagctctggctggtgctgcgttaccgccacaagcggctcagctaccagagcgtcttcctctttctctgcctcttctgggcctccctgcggaccgtcctcttctccttctacttcaaagacttcgtggcggccaattcgctcagccccttcgtcttctggctgctctactgcttccctgtgtgcctgcagtttttcaccctcacgctgatgaacttgtacttcacgcaggttgcccctctacctggcctccctcttcatcagccttgttttcctgttggtgaatttaacctgtgctgtgctggtaaagacgggaaattgggagaggaaggttatcgtctctgtgcgagtggccattaatgacacgctcttcgtgctgtgtgccgtctctctctccatctgtctctacaaaatctctaagatgtccttagccaacatttacttggagtccaagggctcctccgtgtgtcaagtgactgccatcggtgtcaccgtgatactgctttacacctctcgggcctgctacaacctgttcatcctgtcattttctcagaacaagagcgtccattcctttgattatgactggtacaatgtatcagaccaggcagatttgaagaatcagctgggagatgctggatacgtattatttggagtggtgttatttgtttgggaactcttacctaccaccttagtcgtttatttcttccgagttagaaatcctacaaaggaccttaccaaccctggaatggtccccagccatggattcagtcccagatcttatttctttgacaaccctcgaagatatgacagtgatgatgaccttgcctggaacattgcccctcagggacttcagggaggttttgctccagattactatgattggggacaacaaactaacagcttcctggcacaagcaggaactttgcaagactcaactttggatcctgacaaaccaagccttgggtagcatcagttaacagttttatggacgattcctcagatgaaaagcttcagaaaagcatagtgacagctgaatttttagggcacttttccttaagaaatagaacttgatttttatttgttacaggtttccaatggccccataggaataagcaataatgtagactgataaacccttattttagtactaaagagggagccttgctatttcagtgggtataatttaaactttttaaagaaaatctgtacttttataaagatgtattttgtataacttaaataataatgctaaagtatactagggtttttttttcttgagaatgttactgcaatcatgttgtagtttgcacagacttttatgcataattcactttaaaaatatagaatatatggtctaatagttttttaaagcttttggactaaagtattccacaaatcttacctctttaggtcactgatggtcactccgattctgagtgccacattggtagactcctaaaatacagttgacaacttagccaattgcaactccagtgttgataattaaaatgaaatggtaaagcagcagactgtaaggtctttagagattttttttttaaggttcaggccgtaggttcctcaaggaatctcttaagttttgcccaaagactggtacttcctttcagtagggcgctaatgtatacacattaatgataagttgataacattaaaaatgtagctgacttatcctattaaacctcctctgctatgttcaca

SEQ ID NO: 318796 - DNA, 1964 bp, Homo sapiens
agtgcggcttgttttctttcctccagtctcggggctgcaggctgagcgcgatgcgcggagacccccgcgggggcggcggcggccgtgagccccgatgaggcccgagcgtccccggccgcgcggcagcgcccccggcccgatggagaccccgccgtgggacccagcccgcaacgactcgctgccgcccacgctgaccccggccgtgcccccctacgtgaagcttggcctcaccgtcgtctacaccgtgttctacgcgctgctcttcgtgttcatctacgtgcagctctggctggtgctgcgttaccgccacaagcggctcagctaccagagcgtcttcctctttctctgcctcttctgggcctccctgcggaccgtcctcttctccttctacttcaaagacttcgtggcggccaattcgctcagccccttcgtcttctggctgctctactgcttccctgtgtgcctgcagtttttcaccctcacgctgatgaacttgtacttcacgcagaactctctgaagaaagtaccggtattgtccccattttccagaggaggaaactgaggctgagaggtcgtagatgacttgctcaaggtcacactgtcagtgcatggtggagctgggattcaacacacatctgtgctgtctgagtgtgtgattttcaaagccaagtcaaaatattctccagaattactcaaataccgggctcctccgtgtgtcaagtgactgccatcggtgtcaccgtgatactgctttacacctctcgggcctgctacaacctgttcatcctgtcattttctcagaacaagagcgtccattcctttgattatgactggtacaatgtatcagaccaggcagatttgaagaatcagctgggagatgctggatacgtattatttggagtggtgttatttgtttgggaactcttacctaccaccttagtcgtttatttcttccgagttagaaatcctacaaaggaccttaccaaccctggaatggtccccagccatggattcagtcccagatcttatttctttgacaaccctcgaagatatgacagtgatgatgaccttgcctggaacattgcccctcagggacttcagggaggttttgctccagattactatgattggggacaacaaactaacagcttcctggcacaagcaggaactttgcaagactcaactttggatcctgacaaaccaagccttgggtagcatcagttaacagttttatggacgattcctcagatgaaaagcttcagaaaagcatagtgacagctgaatttttagggcacttttccttaagaaatagaacttgatttttatttgttacaggtttccaatggccccataggaataagcaataatgtagactgataaacccttattttagtactaaagagggagccttgctatttcagtgggtataatttaaactttttaaagaaaatctgtacttttataaagatgtattttgtataacttaaataataatgctaaagtatactagggtttttttttcttgagaatgttactgcaatcatgttgtagtttgcacagacttttatgcataattcactttaaaaatatagaatatatggtctaatagttttttaaagcttttggactaaagtattccacaaatcttacctctttaggtcactgatggtcactccgattctgagtgccacattggtagactcctaaaatacagttgacaacttagccaattgcaactccagtgttgataattaaaatgaaatggtaaagcagcagactgtaaggtctttagagattttttttttaaggttcaggccgtaggttcctcaaggaatctcttaagttttgcccaaagactggtacttcctttcagtagggcgctaatgtatacacattaatgataagttgataacattaaaaatgtagctgacttatcctattaaacctcctctgctatgttcaca

SEQ ID NO: 318797 - DNA, 1482 bp, Homo sapiens
ctgttaaaggcatctccaaaccaagtcccagggtccatatgaagacacttgaaattgtaggaagaaggagtgtgaaaaggactctgatggaagacccaacaagatcacagtgctctgagatcccaaagggctttaccagactgatagcaggtgggggctggggaaggggctggtgtcttggacctggagtgtcccataccttctgctccctcttttccagggctcctccgtgtgtcaagtgactgccatcggtgtcaccgtgatactgctttacacctctcgggcctgctacaacctgttcatcctgtcattttctcagaacaagagcgtccattcctttgattatgactggtacaatgtatcagaccaggcagatttgaagaatcagctgggagatgctggatacgtattatttggagtggtgttatttgtttgggaactcttacctaccaccttagtcgtttatttcttccgagttagaaatcctacaaaggaccttaccaaccctggaatggtccccagccatggattcagtcccagatcttatttctttgacaaccctcgaagatatgacagtgatgatgaccttgcctggaacattgcccctcagggacttcagggaggttttgctccagattactatgattggggacaacaaactaacagcttcctggcacaagcaggaactttgcaagactcaactttggatcctgacaaaccaagccttgggtagcatcagttaacagttttatggacgattcctcagatgaaaagcttcagaaaagcatagtgacagctgaatttttagggcacttttccttaagaaatagaacttgatttttatttgttacaggtttccaatggccccataggaataagcaataatgtagactgataaacccttattttagtactaaagagggagccttgctatttcagtgggtataatttaaactttttaaagaaaatctgtacttttataaagatgtattttgtataacttaaataataatgctaaagtatactagggtttttttttcttgagaatgttactgcaatcatgttgtagtttgcacagacttttatgcataattcactttaaaaatatagaatatatggtctaatagttttttaaagcttttggactaaagtattccacaaatcttacctctttaggtcactgatggtcactccgattctgagtgccacattggtagactcctaaaatacagttgacaacttagccaattgcaactccagtgttgataattaaaatgaaatggtaaagcagcagactgtaaggtctttagagattttttttttaaggttcaggccgtaggttcctcaaggaatctcttaagttttgcccaaagactggtacttcctttcagtagggcgctaatgtatacacattaatgataagttgataacattaaaaatgtagctgacttatcctattaaacctcctctgctatgttcaca

SEQ ID NO: 318798 - DNA, 2394 bp, Homo sapiens
agtgcggcttgttttctttcctccagtctcggggctgcaggctgagcgcgatgcgcggagacccccgcgggggcggcggcggccgtgagccccgatgaggcccgagcgtccccggccgcgcggcagcgcccccggcccgatggagaccccgccgtgggacccagcccgcaacgactcgctgccgcccacgctgaccccggccgtgcccccctacgtgaagcttggcctcaccgtcgtctacaccgtgttctacgcgctgctcttcgtgttcatctacgtgcagctctggctggtgctgcgttaccgccacaagcggctcagctaccagagcgtcttcctctttctctgcctcttctgggcctccctgcggaccgtcctcttctccttctacttcaaagacttcgtggcggccaattcgctcagccccttcgtcttctggctgctctactgcttccctgtgtgcctgcagtttttcaccctcacgctgatgaacttgtacttcacgcaggtgattttcaaagccaagtcaaaatattctccagaattactcaaataccggttgcccctctacctggcctccctcttcatcagccttgttttcctgttggtgaatttaacctgtgctgtgctggtaaagacgggaaattgggagaggaaggttatcgtctctgtgcgagtggccattaatgacacgctcttcgtgctgtgtgccgtctctctctccatctgtctctacaaaatctctaagatgtccttagccaacatttacttggagtccaagggctcctccgtgtgtcaagtgactgccatcggtgtcaccgtgatactgctttacacctctcgggcctgctacaacctgttcatcctgtcattttctcagaacaagagcgtccattcctttgattatgactggtacaatgtatcagaccaggcagatttgaagaatcagctgggagatgctggatacgtattatttggagtggtgttatttgtttgggaactcttacctaccaccttagtcgtttatttcttccgagttagaaatcctacaaaggaccttaccaaccctggaatggtccccagccatggattcagtcccagatcttatttctttgacaaccctcgaagatatgacagtgatgatgaccttgcctggaacattgcccctcagggacttcagggaggttttgctccagattactatgattggggacaacaaactaacagcttcctggcacaagcaggaactttgcaagactcaactttggatcctgacaaaccaagccttgggtagcatcagttaacagttttatggacgattcctcagatgaaaagcttcagaaaagcatagtgacagctgaatttttagggcacttttccttaagaaatagaacttgatttttatttgttacaggtttccaatggccccataggaataagcaataatgtagactgataaacccttattttagtactaaagagggagccttgctatttcagtgggtataatttaaactttttaaagaaaatctgtacttttataaagatgtattttgtataacttaaataataatgctaaagtatactagggtttttttttcttgagaatgttactgcaatcatgttgtagtttgcacagacttttatgcataattcactttaaaaatatagaatatatggtctaatagttttttaaagcttttggactaaagtattccacaaatcttacctctttaggtcactgatggtcactccgattctgagtgccacattggtagactcctaaaatacagttgacaacttagccaattgcaactccagtgttgataattaaaatgaaatggtaaagcagcagactgtaaggtctttagagattttttttttaaggttcaggccgtaggttcctcaaggaatctcttaagttttgcccaaagactggtacttcctttcagtagggcgctaatgtatacacattaatgataagttgataacattaaaaatgtagctgacttatcctattaaacctcctctgctatgttcacaaaaaaaaaaaaaaaaaaaaaaaaaaaaaaaaaaaaaaaaaaaaaaaaaaaaaaaaaaaaaaaaaaaaaaaaaaaagaaaaataaaaaaaaaaaaaaaggaggggcggcggccgcaacaaaaataacctcgcgcggcgaggaggacaacataatgacgcccgcaccctgttgtttggtaaaaagagggggcgccacaagagaggggggtaattaaaaaataaaaggcaagggcaggggggtgaacacacagcacgtgggggaggagaaaaacaacgggaggggggagtgtgtgtgagagagacacaacatattcgggggggggaggagaaaagagggggggacaaagccaga

SEQ ID NO: 318799 - DNA, 1506 bp, Homo sapiens
gcatctcctattagttgctttcccctttaaacccatattctgctagagctgtcccaccctctcacctgccagaaatgacttagagctgagggagtcctcactaccgatatggtgaagacaagaccccctttctactacatagaggaacataattataatgaaaacgacttacgtgtattgagaattaactatatattagacactgttctaagcactttacagatgttaactcagtccccacaataggcccacgacgtagttactaatattactcccattctaagatgaggaaattgaggcatagaagttacttgtccaaagacaccaccacaggttgtgagctgtactccatgttaggattcagatgcagtttgttgctgaaaacatttcctatgcatagtgactggctgggttctctagtcatgctgtatactctgtgctctaaagagttcagtagagttgtcggtgggcatttcagccctgtgtgtagcatggttttgtgggaaaatggactttaagagccatttaaaagaactttagagttatctatagtttacataaaaatctcagctctgtctacctaaactagactatgtcatacatactatataatgtttcaagtcactgaaatatttttttctttttaagttttgctccagattactatgattggggacaacaaactaacagcttcctggcacaagcaggaactttgcaagactcaactttggatcctgacaaaccaagccttgggtagcatcagttaacagttttatggacgattcctcagatgaaaagcttcagaaaagcatagtgacagctgaatttttagggcacttttccttaagaaatagaacttgatttttatttgttacaggtttccaatggccccataggaataagcaataatgtagactgataaacccttattttagtactaaagagggagccttgctatttcagtgggtataatttaaactttttaaagaaaatctgtacttttataaagatgtattttgtataacttaaataataatgctaaagtatactagggtttttttttcttgagaatgttactgcaatcatgttgtagtttgcacagacttttatgcataattcactttaaaaatatagaatatatggtctaatagttttttaaagcttttggactaaagtattccacaaatcttacctctttaggtcactgatggtcactccgattctgagtgccacattggtagactcctaaaatacagttgacaacttagccaattgcaactccagtgttgataattaaaatgaaatggtaaagcagcagactgtaaggtctttagagattttttttttaaggttcaggccgtaggttcctcaaggaatctcttaagttttgcccaaagactggtacttcctttcagtagggcgctaatgtatacacattaatgataagttgataacattaaaaatgtagctgacttatcctattaaacctcctctgctatgttcaca

SEQ ID NO: 318800 - DNA, 1690 bp, Homo sapiens
agtgcggcttgttttctttcctccagtctcggggctgcaggctgagcgcgatgcgcggagacccccgcgggggcggcggcggccgtgagccccgatgaggcccgagcgtccccggccgcgcggcagcgcccccggcccgatggagaccccgccgtgggacccagcccgcaacgactcgctgccgcccacgctgaccccggccgtgcccccctacgtgaagcttggcctcaccgtcgtctacaccgtgttctacgcgctgctcttcgtgttcatctacgtgcagctctggctggtgctgcgttaccgccacaagcggctcagctaccagagcgtcttcctctttctctgcctcttctgggcctccctgcggaccgtcctcttctccttctacttcaaagacttcgtggcggccaattcgctcagccccttcgtcttctggctgctctactgcttccctgtgtgcctgcagtttttcaccctcacgctgatgaacttgtacttcacgcaggtgattttcaaagccaagtcaaaatattctccagaattactcaaataccggttgcccctctacctggcctccctcttcatcagccttgttttcctgttggtgaatttaacctgtgctgtgctggtaaagacgggaaattgggagaggaaggttatcgtctctgtgcgagtggccattaatgacacgctcttcgtgctgtgtgccgtctctctctccatctgtctctacaaaatctctaagatgtccttagccaacatttacttggagtccaagggctcctccgtgtgtcaagtgactgccatcggtgtcaccgtgatactgctttacacctctcgggcctgctacaacctgttcatcctgtcattttctcagaacaagagcgtccattcctttgattatgactggtacaatgtatcagaccaggcagatttgaagaatcagctgggagatgctggatacgtattatttggagtggtgttatttgtttgggaactcttacctaccaccttagtcgtttatttcttccgagttagaaatcctacaaaggaccttaccaaccctggaatggtccccagccatggattcagtcccagatcttatttctttgacaaccctcgaagatatgacagtgatgatgaccttgcctggaacattgcccctcagggacttcagggaggttttgctccagattactatgattggggacaacaaactaacagcttcctggcacaagcaggaactttgcaagactcaactttggatcctgacaaaccaagccttgggtagcatcagttaacagttttatggacgattcctcagatgaaaagcttcagaaaagcatagtgacagctgaatttttagggcacttttccttaagaaatagaacttgatttttatttgttacaggtttccaatggccccataggaataagcaataatgtagactgataaacccttattttagtactaaagagggagccttgctatttcagtgggtataatttaaactttttaaagaaaatctgtacttttataaagatgtattttgtataacttaaataataatgctaaagtatactagggtttttttttcttgagaatgttactgcaatcatgttgtagtttgcacagacttttatgcataattcactttaaaaatatagaatatatggtctaatagtt

SEQ ID NO: 318801 - DNA, 818 bp, Homo sapiens
agtgcggcttgttttctttcctccagtctcggggctgcaggctgagcgcgatgcgcggagacccccgcgggggcggcggcggccgtgagccccgatgaggcccgagcgtccccggccgcgcggcagcgcccccggcccgatggagaccccgccgtgggacccagcccgcaacgactcgctgccgcccacgctgaccccggccgtgcccccctacgtgaagcttggcctcaccgtcgtctacaccgtgttctacgcgctgctcttcgtgttcatctacgtgcagctctggctggtgctgcgttaccgccacaagcggctcagctaccagagcgtcttcctctttctctgcctcttctgggcctccctgcggaccgtcctcttctccttctacttcaaagacttcgtggcggccaattcgctcagccccttcgtcttctggctgctctactgcttccctgtgtgcctgcagtttttcaccctcacgctgatgaacttgtacttcacgcagggctcctccgtgtgtcaagtgactgccatcggtgtcaccgtgatactgctttacacctctcgggcctgctacaacctgttcatcctgtcattttctcagaacaagagcgtccattcctttgattatgactggtacaatgtatcagaccaggtcagtgggggcgctgaggaggtgtcacctgaccagggactcttggtatcctcgaggcattggttccaggaccccagaaaataccaaaatctggatgctcaagtccctgatataaaatggtgtagtatctgcatataacctacacgcatccttctgtata

SEQ ID NO: 318802 - DNA, 2187 bp, Homo sapiens
agtgcggcttgttttctttcctccagtctcggggctgcaggctgagcgcgatgcgcggagacccccgcgggggcggcggcggccgtgagccccgatgaggcccgagcgtccccggccgcgcggcagcgcccccggcccgatggagaccccgccgtgggacccagcccgcaacgactcgctgccgcccacgctgaccccggccgtgcccccctacgtgaagcttggcctcaccgtcgtctacaccgtgttctacgcgctgctcttcgtgttcatctacgtgcagctctggctggtgctgcgttaccgccacaagcggctcagctaccagagcgtcttcctctttctctgcctcttctgggcctccctgcggaccgtcctcttctccttctacttcaaagacttcgtggcggccaattcgctcagccccttcgtcttctggctgctctactgcttccctgtgtgcctgcagtttttcaccctcacgctgatgaacttgtacttcacgcagaactctctgaagaaagtaccggtattgtccccattttccagaggaggaaactgaggctgagaggtcgtagatgacttgctcaaggtcacactgtcagtgcatggtggagctgggattcaacacacatctgtgctgtctgagtgtgtgattttcaaagccaagtcaaaatattctccagaattactcaaataccggttgcccctctacctggcctccctcttcatcagccttgttttcctgttggtgaatttaacctgtgctgtgctggtaaagacgggaaattgggagaggaaggttatcgtctctgtgcgagtggccattaatgacacgctcttcgtgctgtgtgccgtctctctctccatctgtctctacaaaatctctaagatgtccttagccaacatttacttggagtccaagggctcctccgtgtgtcaagtgactgccatcggtgtcaccgtgatactgctttacacctctcgggcctgctacaacctgttcatcctgtcattttctcagaacaagagcgtccattcctttgattatgactggtacaatgtatcagaccaggcagatttgaagaatcagctgggagatgctggatacgtattatttggagtggtgttatttgtttgggaactcttacctaccaccttagtcgtttatttcttccgagttagaaatcctacaaaggaccttaccaaccctggaatggtccccagccatggattcagtcccagatcttatttctttgacaaccctcgaagatatgacagtgatgatgaccttgcctggaacattgcccctcagggacttcagggaggttttgctccagattactatgattggggacaacaaactaacagcttcctggcacaagcaggaactttgcaagactcaactttggatcctgacaaaccaagccttgggtagcatcagttaacagttttatggacgattcctcagatgaaaagcttcagaaaagcatagtgacagctgaatttttagggcacttttccttaagaaatagaacttgatttttatttgttacaggtttccaatggccccataggaataagcaataatgtagactgataaacccttattttagtactaaagagggagccttgctatttcagtgggtataatttaaactttttaaagaaaatctgtacttttataaagatgtattttgtataacttaaataataatgctaaagtatactagggtttttttttcttgagaatgttactgcaatcatgttgtagtttgcacagacttttatgcataattcactttaaaaatatagaatatatggtctaatagttttttaaagcttttggactaaagtattccacaaatcttacctctttaggtcactgatggtcactccgattctgagtgccacattggtagactcctaaaatacagttgacaacttagccaattgcaactccagtgttgataattaaaatgaaatggtaaagcagcagactgtaaggtctttagagattttttttttaaggttcaggccgtaggttcctcaaggaatctcttaagttttgcccaaagactggtacttcctttcagtagggcgctaatgtatacacattaatgataagttgataacattaaaaatgtagctgacttatcctattaaacctcctctgctatgttcaca

SEQ ID NO: 318803 - DNA, 1747 bp, Homo sapiens
aagtctcaggagatctgatgggtttatcaggggtttccgcttttgcttcttcctcatttttttctcttgctgctgccatgtaagaagtgcctttcgccacccactgtgattctgaggcttccccagccatgtggaactgtgattttcaaagccaagtcaaaatattctccagaattactcaaataccggttgcccctctacctggcctccctcttcatcagccttgttttcctgttggtgaatttaacctgtgctgtgctggtaaagacgggaaattgggagaggaaggttatcgtctctgtgcgagtggccattaatgacacgctcttcgtgctgtgtgccgtctctctctccatctgtctctacaaaatctctaagatgtccttagccaacatttacttggagtccaagggctcctccgtgtgtcaagtgactgccatcggtgtcaccgtgatactgctttacacctctcgggcctgctacaacctgttcatcctgtcattttctcagaacaagagcgtccattcctttgattatgactggtacaatgtatcagaccaggcagatttgaagaatcagctgggagatgctggatacgtattatttggagtggtgttatttgtttgggaactcttacctaccaccttagtcgtttatttcttccgagttagaaatcctacaaaggaccttacttttttgatgtaggaatttaatgctgtcaactttcctctcagccccacttttgctgtgcctcagaggtttggaccaaccctggaatggtccccagccatggattcagtcccagatcttatttctttgacaaccctcgaagatatgacagtgatgatgaccttgcctggaacattgcccctcagggacttcagggaggttttgctccagattactatgattggggacaacaaactaacagcttcctggcacaagcaggaactttgcaagactcaactttggatcctgacaaaccaagccttgggtagcatcagttaacagttttatggacgattcctcagatgaaaagcttcagaaaagcatagtgacagctgaatttttagggcacttttccttaagaaatagaacttgatttttatttgttacaggtttccaatggccccataggaataagcaataatgtagactgataaacccttattttagtactaaagagggagccttgctatttcagtgggtataatttaaactttttaaagaaaatctgtacttttataaagatgtattttgtataacttaaataataatgctaaagtatactagggtttttttttcttgagaatgttactgcaatcatgttgtagtttgcacagacttttatgcataattcactttaaaaatatagaatatatggtctaatagttttttaaagcttttggactaaagtattccacaaatcttacctctttaggtcactgatggtcactccgattctgagtgccacattggtagactcctaaaatacagttgacaacttagccaattgcaactccagtgttgataattaaaatgaaatggtaaagcagcagactgtaaggtctttagagattttttttttaaggttcaggccgtaggttcctcaaggaatctcttaagttttgcccaaagactggtacttcctttcagtagggcgctaatgtatacacattaatgataagttgataacattaaaaatgtagctgacttatcctattaaacctcctctgctatgttcaca

SEQ ID NO: 318804 - DNA, 1260 bp, Homo sapiens
agtgcggcttgttttctttcctccagtctcggggctgcaggctgagcgcgatgcgcggagacccccgcgggggcggcggcggccgtgagccccgatgaggcccgagcgtccccggccgcgcggcagcgcccccggcccgatggagaccccgccgtgggacccagcccgcaacgactcgctgccgcccacgctgaccccggccgtgcccccctacgtgaagcttggcctcaccgtcgtctacaccgtgttctacgcgctgctcttcgtgttcatctacgtgcagctctggctggtgctgcgttaccgccacaagcggctcagctaccagagcgtcttcctctttctctgcctcttctgggcctccctgcggaccgtcctcttctccttctacttcaaagacttcgtggcggccaattcgctcagccccttcgtcttctggctgctctactgcttccctgtgtgcctgcagtttttcaccctcacgctgatgaacttgtacttcacgcaggtgattttcaaagccaagtcaaaatattctccagaattactcaaataccggttgcccctctacctggcctccctcttcatcagccttgttttcctgttggtgaatttaacctgtgctgtgctggtaaagacgggaaattgggagaggaaggttatcgtctctgtgcgagtggccattaatgacacgctcttcgtgctgtgtgccgtctctctctccatctgtctctacaaaatctctaagatgtccttagccaacatttacttggagtccaagggctcctccgtgtgtcaagtgactgccatcggtgtcaccgtgatactgctttacacctctcgggcctgctacaacctgttcatcctgtcattttctcagaacaagagcgtccattcctttgattatgactggtacaatgtatcagaccaggcagatttgaagaatcagctgggagatgctggatacgtattatttggagtggtgttatttgtttgggaactcttacctaccaccttagtcgtttatttcttccgagttagaaatcctacaaaggaccttaccaaccctggaatggtccccagccatggattcagtcccagatcttatttctttgacaaccctcgaagatatgacagtgatgatgaccttgcctggaacattgcccctcagggacttcagggaggaaaaaacaccttggatctgcctattcctaaattctaattcaatgaacaatgaggacattttaataaaaagcttgg

SEQ ID NO: 318805 - DNA, 1618 bp, Homo sapiens
  misc_feature (31)..(31): n is a, c, g, or t
acgctgcccagactcactacccgccctctcngtcccgcagccacgaggaggacgctgcccagactcactacccgccggctccctcccccgcgtccctgtggtggtgggcgaagatgacctgttgtgcatcagatgcctttgagacatacaactggagatgtgagataggaaattgaatgtaaagactggaagctcggcagagcagaactctgaacaacgtgcctcaggagtgcaagttgctgatgaagtgtgtcgcattttttatgacatgagagttcgtaaatgctccacaccagaagaaatcaagaaaagaacaaaggctgtcatttttttgtctcagtgcagacaaaaagtgcatcatgtagaaggcaaagagatcttggttggagatgttggtgtaactataagtgagcctttcaagcattttgtgggaatgcttcctgaaaaagattgttgctatgctttgtatgatgcaagctttgaaacaaaagaatccagaagaattgatgttttcttgtgggcatcagaactagcacctttgaaaagtaaaatgatctatacaagctccaaggatgcaatcaaaaagaaatttcaaggcataaaacatgaatggcaaacaaacggaccagaagatctcaatcgggcttgtactgctgaaaagttaggtggatcctttttttttttttttgagatggagtcttgatctgtcgcccaggctggagtgcagtgacaggatctcggctcactgcaacctctgcctcccgggttcaagtgattttcctgcccagcctcctgagtagctgggattataggcgtgcgccaccacacctggctaatttttgtattcttagtagagtcagggtttcaccatattggtcaggctggtctcgaactcctgacctcgtgatttgccctccttggcctcccaaagtgctgggattacaggcgtgagccagcatgcctggccagtggatccttaattgtagcctttgaaggatgccctgtgtagatcatcattcagtgccacaaattgaaagcttccacgtttaatgttatcctcttgctatataaataaagcaaatatatttaggccagggtctcactgaggggagctgtcttgtcatcttttagagtaaactaaatactctataaacatatgcaaacagccctaaatatatctgtaggggtgggttgcccctccacacctgtgggtgtttctcgtaaggtgggacgagagacttgggaaagaaaaagacacaaagtatagagaaagaaataaggggacccggggaagcagcgttcagcatatggaggatcctgccagcctctgagttcccttagtatttattaatcatttgtgggtgttctcgaagagggggatgtgtcagggtcacaagacaattgtggggagagggtcagcagacaaacacgtgaacaaaggtctttgcatcatagacaatgtaaaggattaagtgctgtgcttttagatatgcatacacataaacatctcaatgctttacaaagcagtattgctgcccgcaggtcccacctccagccctaaggcggtttttccctatctcagtagatggagcatacaatcgggttttataccaagaca

SEQ ID NO: 318806 - DNA, 579 bp, Homo sapiens
  misc_feature (546)..(547): n is a, c, g, or t
  misc_feature (550)..(550): n is a, c, g, or t
ttgggcaaggctgggccgggacagggcgtgggttgggttgaggagaggctccagacccgcacgccgcgcgcacagagctctcagcgccgctcccagccacagcctcccgcgcctcgctcagctccaacatggcaaaaatctccagccctacagagactgagcggtgcatcgagtccctgattgctgtcttccagaagtatgctggaaaggatggttataactacactctctccaagacagagttcctaagcttcatgaatacagaactagctgccttcacaaagaaccagaaggaccctggtgtccttgaccgcatgatgaagaaactggacaccaacagtgatggtcagctagatttctcagaatttcttaatctgattggtggcctagctatggcttgccatgactccttcctcaaggctgtcccttcccagaagcggacctgaggaccccttggccctggccttcaaacccaccccctttccttccagcctttctgtcatcatctccacagcccacccatccctccacagtcgaaggggatcnntcnagagtcagactcgcacgcatcaactgcaa

SEQ ID NO: 318807 - DNA, 692 bp, Homo sapiens
ttgggcaaggctgggccgggacagggcgtgggttgggttgaggagaggctccagacccgcacgccgcgcgcacagagctctcagcgccgctcccagccacagcctcccgcgcctcgctcagctccaacatggcaaaaatctccagccctacagagactgagcggtgcatcgagtccctgattgctgtcttccagaagtatgctggaaaggatggttataactacactctctccaagacagagttcctaagcttcatgaatacagaactagctgccttcacaaagaaccagaaggaccctggtgtccttgaccgcatgatgaagaaactggacaccaacagtgatggtcagctagatttctcagaatttcttaatctgattggtggcctagctatggcttgccatgactccttcctcaaggctgtcccttcccagaagcggacctgaggaccccttggccctggccttcaaacccaccccctttccttccagcctttctgtcatcatctccacagcccacccatcccccaagctttggtcagggctattggttgaatgagtaggctgatggtttcgataataactagtatggggataaggggtgtaggtgtgccttgtggtaagaagtgggctaggcattttaatcttagagcgaaagcctatctgaccaaagcttgggatcctctgaacagc

SEQ ID NO: 318808 - DNA, 874 bp, Homo sapiens
ttgggcaaggctgggccgggacagggcgtgggttgggttgaggagaggctccagacccgcacgccgcgcgcacagagctctcagcgccgctcccagccacagcctcccgcgcctcgctcagctccaacatggcaaaaatctccagccctacagagactgagcggtgcatcgagtccctgattgctgtcttccagaagtatgctggaaaggatggttataactacactctctccaagacagagttcctaagcttcatgaatacagaactagctgccttcacaaagaaccagaaggaccctggtgtccttgaccgcatgatgaagaaactggacaccaacagtgatggtcagctagatttctcagaatttcttaatctgattggtggcctagctatggcttgccatgactccttcctcaaggctgtcccttcccagaagcggacctgaggaccccttggccctggccttcaaacccaccccctttccttccagcctttctgtcatcatctccacagcccacccatcccctgagcacactaaccacctcatgcaggccccacctgccaatagtaataaagcaatgtcacttttttaaaacaaaaaaaaaaaaaaaaaaaaaaaaaaaaaaaaaaatctgctgggcgccggcacccggccccatcaaagaaaggttctttcaaaaccatcgcgtgtggggcgcgcggggcccactcatcggaacatcggagccatcggcgccacaagtggggccccaaggaaatcctggcgcaagagcaatgcggtgggcgtctcccccacataaaaaaacccccggcgggaccccggaggtgtccgaaacaatcccaaaagggggttccgggagccaaaccgggtca

SEQ ID NO: 318809 - DNA, 1120 bp, Homo sapiens
ttgggcaaggctgggccgggacagggcgtgggttgggttgaggagaggctccagacccgcacgccgcgcgcacagagctctcagcgccgctcccagccacagcctcccgcgcctcgctcagctccaacatggcaaaaatctccagccctacagagactgagcggtgcatcgagtccctgattgctgtcttccagaagtatgctggaaaggatggttataactacactctctccaagacagagttcctaagcttcatgaatacagaactagctgccttcacaaagaaccagaaggaccctggtgtccttgaccgcatgatgaagaaactggacaccaacagtgatggtcagctagatttctcagaatttcttaatctgattggtggcctagctatggcttgccatgactccttcctcaaggctgtcccttcccagaagcggacctgaggaccccttggccctggccttcaaacccaccccctttccttccagcctttctgtcatcatctccacagcccacccatcccctgagcacactaaccacctcatgcaggccccacctgccaatagtaataaagcaatgtcacttttttaaaacaaaaaaaaaaaaaaaaaaaaaaaaaaaaaaaaaaagggggggcctctggtgggggggggggaaaaagggggaaggaagggggcgggggcacaaggggttccgcggcccccaagttattgtgtgggcacgaacggggggacaccactgcggagggcctcccgataaaggagacgcgggaataaatttgcgaagaagccccggggtctaccgcgcggtttacagaacccggggaagaaactgccgcaggagcatataagaccccgcactggaaggacgcggcaggattgtaagggtgcgacaggaagaagataggccatggcggcagacgccttcttgtcgcgggacagtgaaacaccggggcgcctatgagagacaaaaagaaccaccggaacgcaccacgcggaggtgaggacacgggggcagcaggagggcacccacttcctggccgcagaggcaacgggccggcacagcagcccacaacccctgtgagggccgcacaagggagaccgaagaaggcggccac

SEQ ID NO: 318810 - DNA, 793 bp, Homo sapiens
ttgggcaaggctgggccgggacagggcgtgggttgggttgaggagaggctccagacccgcacgccgcgcgcacagagctctcagcgccgctcccagccacagcctcccgcgcctcgctcagctccaacatggcaaaaatctccagccctacagagactgagcggtgcatcgagtccctgattgctgtcttccagaagtatgctggaaaggatggttataactacactctctccaagacagagttcctaagcttcatgaatacagaactagctgccttcacaaagaaccagaaggaccctggtgtccttgaccgcatgatgaagaaactggacaccaacagtgatggtcagctagatttctcagaatttcttaatctgattggtggcctagctatggcttgccatgactccttcctcaaggctgtcccttcccagaagcggacctgaggaccccttggccctggccttcaaacccaccccctttccttccagcctttctgtcatcatctccacagcccacccatcccctgagcacactaaccacctcatgcaggccccacctgccaatagtaataaagcaatgtcacttttttaaaacaaacaaaaaaacaacatacagcacaacaaaaaaaccgtgtggcgcgagcgagactatgaggcaccctaggaaacagcgtagaatacaacaaatcggatgggggagcaggaggcccacagagggagaaggtgaaacctgtgggccatacgcgggtcccctaaggaagaacccgggggcatagaacaaaaggggctgg

SEQ ID NO: 318811 - DNA, 498 bp, Homo sapiens
  misc_feature (27)..(29): n is a, c, g, or t
ttcgagttcggtaccctcatagggcannntggcaaaaatctccagccctacagagactgagcggtgcatcgagtccctgattgctgtcttccagaagtatgctggaaaggatggttataactacactctctccaagacagagttcctaagcttcatgaatacagaactagctgccttcacaaagaaccagaaggaccctggtgtccttgaccgcatgatgaagaaactggacaccaacagtgatggtcagctagatttctcagaatttcttaatctgattggtggcctagctatggcttgccatgactccttcctcaaggctgtcccttcccagaagcggacctgaggaccccttggccctggccttcaaacccaccccctttccttccagcctttctgtcatcatctccacagcccacccatcccctgagcacactaaccacctcatgcaggccccacctgccaatagtaataaagcaatgtcacttttttaaaaca

SEQ ID NO: 318812 - DNA, 543 bp, Homo sapiens
tgatgacttcatcattcactgtaactccagaagccatagtgccctcggctgtggctgcgtcggcagctccaacatggcaaaaatctccagccctacagagactgagcggtgcatcgagtccctgattgctgtcttccagaagtatgctggaaaggatggttataactacactctctccaagacagagttcctaagcttcatgaatacagaactagctgccttcacaaagaaccagaaggaccctggtgtccttgaccgcatgatgaagaaactggacaccaacagtgatggtcagctagatttctcagaatttcttaatctgattggtggcctagctatggcttgccatgactccttcctcaaggctgtcccttcccagaagcggacctgaggaccccttggccctggccttcaaacccaccccctttccttccagcctttctgtcatcatctccacagcccacccatcccctgagcacactaaccacctcatgcaggccccacctgccaatagtaataaagcaatgtcacttttttaaaaca

SEQ ID NO: 318813 - DNA, 760 bp, Homo sapiens
tatttctgaaaacaagttttatttaaataagggtttaaatacattacacataacattaaaactgaaggggaaaaaaaaaccaaaaaccagtttgttacttcacatggcattgggcagctgctgctattaagttgcaagctctacagctagctacatgactgatggatcagtttgagatttgttcccttgtcaaaagtttaactctgatagaaggttggcctcacattctgatgtttggacatcccttagctaggatatgtctggtcgaacagacctttgtggcaagccagatggcaaaaatctccagccctacagagactgagcggtgcatcgagtccctgattgctgtcttccagaagtatgctggaaaggatggttataactacactctctccaagacagagttcctaagcttcatgaatacagaactagctgccttcacaaagaaccagaaggaccctggtgtccttgaccgcatgatgaagaaactggacaccaacagtgatggtcagctagatttctcagaatttcttaatctgattggtggcctagctatggcttgccatgactccttcctcaaggctgtcccttcccagaagcggacctgaggaccccttggccctggccttcaaacccaccccctttccttccagcctttctgtcatcatctccacagcccacccatcccctgagcacactaaccacctcatgcaggccccacctgccaatagtaataaagcaatgtcacttttttaaaaca

SEQ ID NO: 318814 - DNA, 506 bp, Homo sapiens
ttgggcaaggctgggccgggacagggcgtgggttgggttgaggagaggctccagacccgcacgccgcgcgcacagagctctcagcgccgctcccagccacagcctcccgcgcctcgctcagctccaacatggcaaaaatctccagccctacagagactgagcggtgcatcgagtccctgattgctgtcttccagaagtatgctggaaaggatggttataactacactctctccaagacagagttcctaagcttcatgaatacagaactagctgccttcacaaagaaccagaaggaccctggtgtccttgaccgcatgatgaagaaactggacaccaacagtgatggtcagctagatttctcagaatttcttaatctgattggtggcctagctatggcttgccatgactccttcctcaaggctgtcccttcccagaagcggacctgaggaggacccgggcgctcggtgtctcttactaatcacctcttttcccagccagctcttgtc

SEQ ID NO: 318815 - DNA, 1423 bp, Homo sapiens
ttgggcaaggctgggccgggacagggcgtgggttgggttgaggagaggctccagacccgcacgccgcgcgcacagagctctcagcgccgctcccagccacagcctcccgcgcctcgctcagctccaacatggcaaaaatctccagccctacagagactgagcggtgcatcgagtccctgattgctgtcttccagaagtatgctggaaaggatggttataactacactctctccaagacagagttcctaagcttcatgaatacagaactagctgccttcacaaaggtactggtccctgtctcccccacttccccaaactacccacaacatgaaacaagaccctggcagaatggccaggaatgaaggagcagcaactgacaccccacactcttgcttcattttaactcactctaagccagggagtttttccatttaggaagagagatatatgaaatggtatatgacgtaatggaattattttcaaatttcattattctaccccagaggttctatggcagccctgtccagtagaactttctgcagtggtggaaatacattctatatctgctctatccaacatggtagccaccagccacatgtgtctgctgagtgcttgaaatgtggctagtgtgactaacagactgactttctaaattagttaatgtaaatgtaaatgtaaatagccatttgtaaccagtggctctaagtctgtatctgtgttggcagcttgggcaagtggaggatgagactgattaggcagggcctgtggcctttttccacctgaacccgctgtacttttatatagtttatctatgggagttgcatgcaacacttgaaagaagtgttccactggctttacaaaactgaatagcccctaatatcatagaaagagccctggactaggagtgggaaaacctttggttcaaggcccaggtctgccccttaggcaggtcacttcacctcttttagtctgtttctgcatctggcaaatgggaatattaataatccctatcctgtaccttatactcctgtgagaataaaatgtggcagcatatttgaaagcacattagaagatgcgatataaaggtgtaattattattttctctgcagaaccagaaggaccctggtgtccttgaccgcatgatgaagaaactggacaccaacagtgatggtcagctagatttctcagaatttcttaatctgattggtggcctagctatggcttgccatgactccttcctcaaggctgtcccttcccagaagcggacctgaggaccccttggccctggccttcaaacccaccccctttccttccagcctttctgtcatcatctccacagcccacccatcccctgagcacactaaccacctcatgcaggccccacctgccaatagtaataaagcaatgtcacttttttaaaaca

SEQ ID NO: 318816 - DNA, 1699 bp, Homo sapiens
ttgggcaaggctgggccgggacagggcgtgggttgggttgaggagaggctccagacccgcacgccgcgcgcacagagctctcagcgccgctcccagccacagcctcccgcgcctcgctcagctccaacatggcaaaaatctccagccctacagagactgagcggtgcatcgagtccctgattgctgtcttccagaagtatgctggaaaggatggttataactacactctctccaagacagagttcctaagcttcatgaatacagaactagctgccttcacaaaggtactggtccctgtctcccccacttccccaaactacccacaacatgaaacaagaccctggcagaatggccaggaatgaaggagcagcaactgacaccccacactcttgcttcattttaactcactctaagccagggagtttttccatttaggaagagagatatatgaaatggtatatgacgtaatggaattattttcaaatttcattattctaccccagaggttctatggcagccctgtccagtagaactttctgcagtggtggaaatacattctatatctgctctatccaacatggtagccaccagccacatgtgtctgctgagtgcttgaaatgtggctagtgtgactaacagactgactttctaaattagttaatgtaaatgtaaatgtaaatagccatttgtaaccagtggctctaagtctgtatctgtgttggcagcttgggcaagtggaggatgagactgattaggcagggcctgtggcctttttccacctgaacccgctgtacttttatatagtttatctatgggagttgcatgcaacacttgaaagaagtgttccactggctttacaaaactgaatagcccctaatatcatagaaagagccctggactaggagtgggaaaacctttggttcaaggcccaggtctgccccttaggcaggtcacttcacctcttttagtctgtttctgcatctggcaaatgggaatattaataatccctatcctgtaccttatactcctgtgagaataaaatgtggcagcatatttgaaagcacattagaagatgcgatataaaggtgtaattattattttctctgcagaaccagaaggaccctggtgtccttgaccgcatgatgaagaaactggacaccaacagtgatggtcagctagatttctcagaatttcttaatctgattggtggcctagctatggcttgccatgactccttcctcaaggctgtcccttcccagaagcggacctgaggaccccttggccctggccttcaaacccaccccctttccttccagcctttctgtcatcatctccacagcccacccatcccctgagcacactaaccacctcatgcaggccccacctgccaatagtaataaagcaatgtcacttttttaaaacaaaaaaaaaaaaaaaaaaaaaaaaaaaaaaaaaaatctgctgggcgccggcacccggccccatcaaagaaaggttctttcaaaaccatcgcgtgtggggcgcgcggggcccactcatcggaacatcggagccatcggcgccacaagtggggccccaaggaaatcctggcgcaagagcaatgcggtgggcgtctcccccacataaaaaaacccccggcgggaccccggaggtgtccgaaacaatcccaaaagggggttccgggagccaaaccgggtca

SEQ ID NO: 318817 - DNA, 598 bp, Homo sapiens
ttgggcaaggctgggccgggacagggcgtgggttgggttgaggagaggctccagacccgcacgccgcgcgcacagagctctcagcgccgctcccagccacagcctcccgcgcctcgctcagctccaacatggcaaaaatctccagccctacagagactgagcggtgcatcgagtccctgattgctgtcttccagaagtatgctggaaaggatggttataactacactctctccaagacagagttcctaagcttcatgaatacagaactagctgccttcacaaagaaccagaaggaccctggtgtccttgaccgcatgatgaagaaactggacaccaacagtgatggtcagctagatttctcagaatttcttaatctgattggtggcctagctatggcttgccatgactccttcctcaaggctgtcccttcccagaagcggacctgaggaccccttggccctggccttcaaacccaccccctttccttccagcctttctgtcatcatctccacagcccacccatcccctgagcacactaaccacctcatgcaggccccacctgccaatagtaataaagcaatgtcacttttttaaaaca

SEQ ID NO: 318818 - DNA, 619 bp, Homo sapiens
  misc_feature (14)..(14): n is a, c, g, or t
cggatccccggctncagaattccggcgcgtcgacacggctcgagagacgacagaagggttgaggagaggctccagacccgcacgccgcgcgcacagagctctcagcgccgctcccagccacagcctcccgcgcctcgctcagctccaacatggcaaaaatctccagccctacagagactgagcggtgcatcgagtccctgattgctgtcttccagaagtatgctggaaaggatggttataactacactctctccaagacagagttcctaagcttcatgaatacagaactagctgccttcacaaagaaccagaaggaccctggtgtccttgaccgcatgatgaagaaactggacaccaacagtgatggtcagctagatttctcagaatttcttaatctgattggtggcctagctatggcttgccatgactccttcctcaaggctgtcccttcccagaagcggacctgaggaccccttggccctggccttcaaacccaccccctttccttccagcctttctgtcatcatctccacagcccacccatcccctgagcacactaaccacctcatgcaggccccacctgccaatagtaataaagcaatgtcacttttttaaaaca

SEQ ID NO: 318819 - DNA, 526 bp, Homo sapiens
  misc_feature (54)..(54): n is a, c, g, or t
aaattaggctagtggaggccgggggtgaatcggccgaggcctcgctcagctccnacatggcaaaaatctccagccctacagagactgagcggtgcatcgagtccctgattgctgtcttccagaagtatgctggaaaggatggttataactacactctctccaagacagagttcctaagcttcatgaatacagaactagctgccttcacaaagaaccagaaggaccctggtgtccttgaccgcatgatgaagaaactggacaccaacagtgatggtcagctagatttctcagaatttcttaatctgattggtggcctagctatggcttgccatgactccttcctcaaggctgtcccttcccagaagcggacctgaggaccccttggccctggccttcaaacccaccccctttccttccagcctttctgtcatcatctccacagcccacccatcccctgagcacactaaccacctcatgcaggccccacctgccaatagtaataaagcaatgtcacttttttaaaaca

SEQ ID NO: 318820 - DNA, 553 bp, Homo sapiens
cacacccaccaaaacacaaggagaggccctgaaaagtaactggaaagtcacagaccgttctggcaagtggagttgatgagaaacaggcaaaaatctccagccctacagagactgagcggtgcatcgagtccctgattgctgtcttccagaagtatgctggaaaggatggttataactacactctctccaagacagagttcctaagcttcatgaatacagaactagctgccttcacaaagaaccagaaggaccctggtgtccttgaccgcatgatgaagaaactggacaccaacagtgatggtcagctagatttctcagaatttcttaatctgattggtggcctagctatggcttgccatgactccttcctcaaggctgtcccttcccagaagcggacctgaggaccccttggccctggccttcaaacccaccccctttccttccagcctttctgtcatcatctccacagcccacccatcccctgagcacactaaccacctcatgcaggccccacctgccaatagtaataaagcaatgtcacttttttaaaaca

SEQ ID NO: 318821 - DNA, 658 bp, Homo sapiens
  misc_feature (374)..(374): n is a, c, g, or t
cggcctgggctgcttttattcatggtggaaaggttattaattattattctggaaaatacgcaagattattgttttctgtttccaggggttatgtactgtgttccagatgattaaagcagaaaaagaggggattgagtagcatttccagatttcttaagtactttgctattcgatttgcctttcagtgtagtgtacattgtaaaactcagatattgtcatgatgtttcacttggacataagacttattaatgtggtcacttaaggggtaaggaatttaagaactggatgaggttatttcttcctttactcttcaaaatgtattttgatacatcagtatgagaggacgtcccatcaacaaagcatcgatgatgganagtctcacactatttttatcatatgtttctttgtcagccttctgcttctaatcccagtaagcaacttggacaggcattttaaaagctgaagaaaagtgacacaaggctgtcccttcccagaagcggacctgaggaccccttggccctggccttcaaacccaccccctttccttccagcctttctgtcatcatctccacagcccacccatcccctgagcacactaaccacctcatgcaggccccacctgccaatagtaataaagcaatgtcacttttttaaaaca

SEQ ID NO: 318822 - DNA, 319 bp, Homo sapiens
  misc_feature (290)..(290): n is a, c, g, or t
gcggccgactactactactactgctcgaattcaagcttctaacgatgtacggggacatggcaaaaatctccagccctacagagactgagcggtgcatcgagtccctgattgctgtcttccagaagtatgctggaaaggatggttataactacactctctccaagacagagttcctaagcttcatgtgcctgtaatcccagctactcaggaggctgaggcaggagaatcacttgaacccaggaggcagaggttgcagtgagcccagatcgtgccaccgcactctagcctgngcaacagagcaagactctgtcttaaaaaa

SEQ ID NO: 318823 - DNA, 1071 bp, Homo sapiens
ttgggcaaggctgggccgggacagggcgtgggttgggttgaggagaggctccagacccgcacgccgcgcgcacagagctctcagcgccgctcccagccacagcctcccgcgcctcgctcagctccaacatggcaaaaatctccagccctacagagactgagcggtgcatcgagtccctgattgctgtcttccagaagtatgctggaaaggatggttataactacactctctccaagacagagttcctaagcttcatgaatacagaactagctgccttcacaaagaaccagaaggaccctggtgtccttgaccgcatgatgaagaaactggacaccaacagtgatggtcagctagatttctcagaatttcttaatctgattggtggcctagctatggcttgccatgactccttcctcaaggctgtcccttcccagaagcggacctgaggaccccttggccctggccttcaaacccaccccctttccttccagcctttctgtcatcatctccacagcccacccatcccctgagcacactaaccacctcatgcaggccccacctgccaatagtaataaagcaatgtcacttttttaaaacaaaaaaaaaaaaaaaaaaaaaaaaaaaaaaaaaccccggggccctcttatggcgggggggggcaaaaaggggtccggaccgggccctgggtcaaacggggttctcctgaccccctttttttgcaccaggggtaaatcaggggcgccccaaaagggaggcgacaaaatcgcaaaagccggtactgtaatttcctcaccacacaacaccacacacaccaaagagggacagaggggggaccccctgtagaaacaaaaaaaggcacacaaaaaacatccccaccctacacacatatgtccatgatagacgataaaataacaccgagtatatatctattaatagatacacagacacatacaaacagtgacccaaagaagtgcgcgccccctgaaatagcaacaagatcacatgaaaaatgaacagcaacaaaggggctcaatacgctacaccacgatataagcagcataatacacaaga

SEQ ID NO: 318824 - DNA, 557 bp, Homo sapiens
ctaggtcacatcgagccgatatgaggaatccgctcgaatacaatcggggaggattccagcatgtacagtgagcctgatattacaaaagaggcaaaaatctccagccctacagagactgagcggtgcatcgagtccctgattgctgtcttccagaagtatgctggaaaggatggttataactacactctctccaagacagagttcctaagcttcatgaatacagaactagctgccttcacaaagaaccagaaggaccctggtgtccttgaccgcatgatgaagaaactggacaccaacagtgatggtcagctagatttctcagaatttcttaatctgattggtggcctagctatggcttgccatgactccttcctcaaggctgtcccttcccagaagcggacctgaggaccccttggccctggccttcaaacccaccccctttccttccagcctttctgtcatcatctccacagcccacccatcccctgagcacactaaccacctcatgcaggccccacctgccaatagtaataaagcaatgtcacttttttaaaaca

SEQ ID NO: 318825 - DNA, 748 bp, Homo sapiens
  misc_feature (14)..(14): n is a, c, g, or t
cggatccccggctncagaattccggcgcgtcgacacggctcgagagacgacagaagggttgaggagaggctccagacccgcacgccgcgcgcacagagctctcagcgccgctcccagccacagcccagttggcccacgccgtcctggccaagctgaacgccttcaaggcagacactcccagtctgggcgagggcccagagaaaacccgctcccagctgctgataatggaccgggcagctgaccccgtgtccccactactgcatgagctcagctccaacatggcaaaaatctccagccctacagagactgagcggtgcatcgagtccctgattgctgtcttccagaagtatgctggaaaggatggttataactacactctctccaagacagagttcctaagcttcatgaatacagaactagctgccttcacaaagaaccagaaggaccctggtgtccttgaccgcatgatgaagaaactggacaccaacagtgatggtcagctagatttctcagaatttcttaatctgattggtggcctagctatggcttgccatgactccttcctcaaggctgtcccttcccagaagcggacctgaggaccccttggccctggccttcaaacccaccccctttccttccagcctttctgtcatcatctccacagcccacccatcccctgagcacactaaccacctcatgcaggccccacctgccaatagtaataaagcaatgtcacttttttaaaaca

SEQ ID NO: 318826 - DNA, 927 bp, Homo sapiens
gatgcccgacgggcgcgaatctgctccacgacacgtgcgacacaggtcacggaaaatcgtgagcgcataaagtgaagaccacgccacatcttgcggccctaaaacagctgcctcagaaagagaacggctccataaattcaaagccgccgagctccacaaactggcgccaggaaccctcctgaatgcggggccccaggaatcctgcaacactggtgaagaaaccctcttggacccacactggggcctaaggggggcccgggcaaggccagcactgcccggcacgatcgctcggatcacaccccgacctcgggcttcctgaggccccgggcgcccggccgagctttgacatagagcggggctgctggcttcagttcacctcaggggagcagcaagagcgaagactctgggcgccacaatacttgggccaacagcctcccgcgcctcgctcagctccaacatggcaaaaatctccagccctacagagactgagcggtgcatcgagtccctgattgctgtcttccagaagtatgctggaaaggatggttataactacactctctccaagacagagttcctaagcttcatgaatacagaactagctgccttcacaaagaaccagaaggaccctggtgtccttgaccgcatgatgaagaaactggacaccaacagtgatggtcagctagatttctcagaatttcttaatctgattggtggcctagctatggcttgccatgactccttcctcaaggctgtcccttcccagaagcggacctgaggaccccttggccctggccttcaaacccaccccctttccttccagcctttctgtcatcatctccacagcccacccatcccctgagcacactaaccacctcatgcaggccccacctgccaatagtaataaagcaatgtcacttttttaaaaca

SEQ ID NO: 318827 - DNA, 596 bp, Homo sapiens
  misc_feature (18)..(18): n is a, c, g, or t
ttaagtcccggcacagcnacgagaatccgagcacctctccgagcccctcgctgccgctatcacaccaccctgctacccagagagccgctcccagccacagcctcccgcgcctcgctcagctccaacatggcaaaaatctccagccctacagagactgagcggtgcatcgagtccctgattgctgtcttccagaagtatgctggaaaggatggttataactacactctctccaagacagagttcctaagcttcatgaatacagaactagctgccttcacaaagaaccagaaggaccctggtgtccttgaccgcatgatgaagaaactggacaccaacagtgatggtcagctagatttctcagaatttcttaatctgattggtggcctagctatggcttgccatgactccttcctcaaggctgtcccttcccagaagcggacctgaggaccccttggccctggccttcaaacccaccccctttccttccagcctttctgtcatcatctccacagcccacccatcccctgagcacactaaccacctcatgcaggccccacctgccaatagtaataaagcaatgtcacttttttaaaaca

SEQ ID NO: 318828 - DNA, 646 bp, Homo sapiens
  misc_feature (646)..(646): n is a, c, g, or t
ttgggcaaggctgggccgggacagggcgtgggttgggttgaggagaggctccagacccgcacgccgcgcgcacagagctctcagcgccgctcccagccacagcctcccgcgcctcgctcagctccaacatggcaaaaatctccagccctacagagactgagcggtgcatcgagtccctgattgctgtcttccagaagtatgctggaaaggatggttataactacactctctccaagacagagttcctaagcttcatgaatacagaactagctgccttcacaaagaaccagaaggaccctggtgtccttgaccgcatgatgaagaaactggacaccaacagtgatggtcagctagatttctcagaatttcttaatctgattggtggcctagctatggcttgccatgactccttcctcaaggctgtcccttcccagaagcggacctgaggaccccttggccctggccttcaaacccaccccctttccttccagcctttctgtcatcatctccacagcccacccatcccctgagcacactaaccacctcatgcaggccccacctgccaatagtaataaagcaatgtcacttttttaaaacaaacatgaaaaaaaacaaacgaagcgcttatgcatgcggccggatttcn

SEQ ID NO: 318829 - DNA, 1006 bp, Homo sapiens
ttgggcaaggctgggccgggacagggcgtgggttgggttgaggagaggctccagacccgcacgccgcgcgcacagagctctcagcgccgctcccagccacagcctcccgcgcctcgctcagctccaacatggcaaaaatctccagccctacagagactgagcggtgcatcgagtccctgattgctgtcttccagaagtatgctggaaaggatggttataactacactctctccaagacagagttcctaagcttcatgaatacagaactagctgccttcacaaagaaccagaaggaccctggtgtccttgaccgcatgatgaagaaactggacaccaacagtgatggtcagctagatttctcagaatttcttaatctgattggtggcctagctatggcttgccatgactccttcctcaaggctgtcccttcccagaagcggacctgaggaccccttggccctggccttcaaacccaccccctttccttccagcctttctgtcatcatctccacagcccacccatcccctgagcacactaaccacctcatgcaggccccacctgccaatagtaataaagcaatgtcacttttttaaaacaaaaaaaaaaaaaaaaaaaaaaaaaaaaaaaaaaaaaaaaaaaaaaaaaaaaaaaaggggggggggggcaaaaaatttccccggggggggccctgggcccctttttggggaacggggggcgccccaaaggcgggcctcgtattaaatccctgaggcagacgggcgcggccgtaccaaaacacgccgcagtcgcaggggggacaaatggtctcatcgggggacatcttggtgggaggggccccaactcgtggggggggggggaaactatgggggaaacacacacaagaaatattaagaccctcgggagaattaacaaccttttgccgtcttatgggtggtcaccaggcgattttctgggcgcgtaaaattggacgagggtttcgtgacacatttccggggcttttaaatg

SEQ ID NO: 318830 - DNA, 646 bp, Homo sapiens
ttgggcaaggctgggccgggacagggcgtgggttgggttgaggagaggctccagacccgcacgccgcgcgcacagagctctcagcgccgctcccagccacagcctcccgcgcctcgctcagctccaacatggcaaaaatctccagccctacagagactgagcggtgcatcgagtccctgattgctgtcttccagaagtatgctggaaaggatggttataactacactctctccaagacagagttcctaagcttcatgaatacagaactagctgccttcacaaagaaccagaaggaccctggtgtccttgaccgcatgatgaagaaactggacaccaacagtgatggtcagctagatttctcagaatttcttaatctgattggtggcctagctatggcttgccatgactccttcctcaaggctgtcccttcccagaagcggacctgaggaccccttggccctggccttcaaacccaccccctttccttccagcctttctgtcatcatctccacagcccacccatcccctgagcacactaaccacctcatgcaggccccacctgccaatagtaataaagcaatgtcacttttttaaaacaaaaaaaaaaaaaaaaaaaaaaaaaaaaaaaaaaaaaaaaaaaaaaaac

SEQ ID NO: 318831 - DNA, 449 bp, Homo sapiens
aggggcggggcgtcccgccgagagtctgggtgcggtgcggttttcttttttcttgtgtcccactttattccctgagccacagggaatccgttttctagtacttctctgttataaagtctgcctgccttagacaaacacatttggaaaatagaagtgcaaccacaaggatgtgcagaccctatcagaataaaatcgtagaaccttaccagtcatccggtataatttccacattttccagatgaggtccggggaatgaggtgattcgcccaaaagcacactacaaattggagtcaccagcaggtctgctattttgccactaaaccaatctgccggtcacaccttggctgtaaagtgtcctaacagccacctacttatgattactgctttcttaccaataacctccccagcctgttgtgtggctcctacatcttgaacaaaagcgaccaagg

SEQ ID NO: 318832 - DNA, 409 bp, Homo sapiens
tactgtttagaaagtcatcatggtgtggtagaattacacagcttgtgttctccatctaggtaattttaaataaatcatttaactttttcatattaggtattcttacctattgaaagcgaagaactaataccttgttttcttactagagtggccatctgctggatttgccagcttgacagtcatttctccttcttcctaattttcctttgcacaaacatcccccacaacatgcagtccaggtattatgcttggtggtaactggaacctcactcaatctagaaaagtaagggttagccttgagacatttaatgcaacaacttgaaaagaggtgggctctttccactggtaacttaaagtggccagaggccatctttgccaccacttggggtaactccaggactgagacatg

SEQ ID NO: 318833 - DNA, 3943 bp, Homo sapiens
cgaggccccgaaagccatggcagcagaccttctcagaagtttttggcactcgttggaagatcctgtggttcattcctttcaggcagaggcaaccactgcgagttccctaccactttgccaatcatgtctaaacagatggatggtgggcacagatgggtcctccatgctggcaatgcgttacaggttttatgataatagaactatgacagtcttcaagtcaattaaaatccacccaccagtcttaggcatcataatgtgccccaggctttattttaatagtgatcttgatcctgttgtgggactaatacaagatctatatttaagttttaaagcatgtttactttcaaattagctttccacagggatttcttgaaatgcttttgttattaaactcaaaaggcagtgattaggatgaaataattgtacataatttattttagtactgacagtgttacagattctaatttatggtaaatttcagatgtttatttaaaattttcacttttaaacagtaaccaaatctaaatttaattattcaggttttacaaaagttgatacaccttcttatagtataggtaaattttctttttcaaatccaatttaaaataacctttccttttaaatgtgctgcaacgtttttaaaaatgcagcagcataggagtgaacaacagcaacacaaaacgggcattggtttcttaggagtggcttgcttacgttttcttcttttttcttcaccaaaaccaacatgaaagtaccactgaagtaaaacaccaactacctaccttactataaaggaaatgttaaaatttttttcacaataattttttcaattttcactattactgttgtaattattgattgtgattaaaatatttgctcccaggagaactcctgaccagtgggcatgtattcctattttatcctaagattttaatgagcaaaaaggggagagaatttgcaataacttcacaattaccttttctagtgcagttatattagaatgcatatgtttttaaaatgctagtataactagatagtatataatgtacagtataaagaggaatattgtgcttttgaaaagagtatactttttacttttatttatgtactagtagatgtaaaatttcacattgaaggtttatatatattggccaactcatatagaaattttatttataggaagctactactaaaaaaagtcactaactttgtgtacctataatccctaaattaaaattaaattttaattggctggctgtaatttgcattgagagaccttttactagtagctagtgttaggaagtgaacctaaaataagaaaatataatgatctgtgtttatcattagccttgtacaaatgtaaattactaatagtgatgttcttttgcaaggcatagaacatttgtatgaaaagacatttagtatgctttgaaaaaaactcagcttttagtttttttccattagaatactgcaaaacccatatatctttttaaaaaatttatgtactcacagtctttcccttgaagagaagattgaaaaagtctactgttcataaaccatgctaacattttccttttagctagttttgaaagtaaggaacaatacctgggaaataattaaacagaaggttaccattgtcagccagttggctatactgtggttagttctttcagaaattgtaaatatcttgtagcatattctgaaataatagagtaagttcttctcagagatgttaatatcatgtttttcatgttctaattagaatactttattacttacaaactcagaaatacgaacagaaatacagcagacgaacatatttattggtactgaaaagagacgtagtaaattaaatagaagaaatatatttataaagcttagtgaaacacaaaattagaatgttcatgtcaggcacaagggtttggattttgtgcaagctaatttggccacatttggcctggtgacagaactgttcataaggaagtaatatatagataaggtaggtagatatcagttgaatgccttatattgtatacattcctttcaaataaagaccttgagaaaacagcagagccaagtgaagatcacctaaagaactttgtggctaatttatacttcatgtagtagcagtgggtactgggcagggtctctttcccactctgatgatttgtgctcttatttttcctagatttacctcatctagggcatattcttttccctcttcctctttacctttcctggtcctgatccctctgtactcagttcccctaaattattggactacaaactaatatactagaaaagcatacacttattttatttgaatgcagaaatgctatctatcagtatatatacataagaatgtatattacagtatatctatatatacttaacactgtaactttcagtattccccagttagcgtacctaactctcctgtgggtttgttaattcttattagactactagagaaaaaccaactggcagtttgctaagcatatctactggtgttgtttctgcgccctcttttggctaattgatgtaattatactggctctaaagatttactgccccataagtaaatagtatagccacattctgaacatatcaaaagtacaaacttaggaggagtgtatgtacaaaaatgtaaaattttatgaaaatgaacatgtttttatgatgttatttctagttcataagaatgtgatgactgctttgcttcatttatgtacgttcccattatattcttgctgtcaatcaatcacaaatttatatcagattaggataaactaagccattttatgtattttattttaaaccttattttggcagagtaattccttagaattggaaaagctgttactttgaaattaccaatttattacaaaacatagaaatgtattgtagctacaaagacaaccaagcattttctgtgttttaatgaatatctaaaaaactacatttagtttattttactcagttttgaaatgatttttttactggctctattgccttaaaataactaagagattaatgattctttgtataattttccttttctttgttcttttttttacatttcgcagagttatatctatagttttagtaacaatttcttatgtattctggataactgaaaacaactaaaggtgttgggcattagaaaataattgtgagcagtaagattactgatgtaatatgtatgttggactgaagtatttctttataaacattctatttgattttaagcaaaatgtatgttaaagcatgtttttacatcagtaaagtcatttgtcgaccttctggaaatgaaaggtttttacctagatactgtaagttacacctccttaacaatcatatttgtcattgttgttttctgcaaacaaaaatgtttatgggcttcatgtaggcttaagattgtaggcaaaaatggactgagttcaggacccttcaagcagtaggcattcagttacagagcagttggtactttgtaacccagacttacagtttaaaaatatcaagttagctgatgtttcattataataaaaatactattttgcttaagagttgtattacaaatatttgtgcttaacattagaaatagctgttttaaattgtagttaacatattaactttttcagaaaaaaagcatggtttatttttaataatgaaatagagaacataatacgtaatgttcagtataacagctgagttaaaacatctgccaggattaacatcagtgcgtttttgccaatgcatagaggcatttttctctaagtatgatggctaatgataactattctttgttacacattcaagtcactcccatacaagtaactagtgggtgatatgtttcactccaaagggtgtattaattctgaatgctaatcatgaagacttaagttaggacaacacttcaaaccaggaagtgtgaactgattta

SEQ ID NO: 318834 - DNA, 859 bp, Homo sapiens
gcagtgaggtgagatcgcacccctgcactccagcctgagcgacagagcaaaactctatttaaaaaaaaaaaaaaaaatgcattttcctgattcctaatgaggctgagcatatttaaatgtttattggctgttcactggcatttgcgaactcctgtttaaactttttccactttttgctggatctttttcttactgctttgtatttcatttcaatattctggatgctaataatttgttgctagtgctgcatatattttctgctagtttgtgactcatcttcactcatctttcttcatgttgtttcaaaaatagtatcttttaatgcagatattttctgctttattactttgaggttataattgctgtagtgcattgctttttctcttctgaacattttatacactcacctttcacctttaatctaccggtcccaccaaaactaaaatacactgtttctgaatattgtgggtctgtttcaggagtttattgttctgcttgtctattttttttctgttcactaatgccacatcgtctgatactaagtcttgttattttgtagaacaaggacccccaaaactttttagtcttttggctgttcttggctttttgtttttccaagtaaattttagaaataggttgatcaagtctccccgcttccattggtttttttcccctttgttagaattgtgttaaatctaaatcaagttcgggaaaagatatatctcctcaccattgagataaactatccataaataatgttatctgcccaatttttaggtgtttttaaaatattttaataacttactaacgtgttccccataagtcttgtgctttgtttttttgagacagtgtctcactc

SEQ ID NO: 318835 - DNA, 806 bp, Homo sapiens
gcagtgaggtgagatcgcacccctgcactccagcctgagcgacagagcaaaactctatttaaaaaaaaaaaaaaaaatgcattttcctgattcctaatgaggctgagcatatttaaatgtttattggctgttcactggcatttgcgaactcctgtttaaactttttccactttttgctggatctttttcttactgctttgtatttcatttcaatattctggatgctaataatttgttgctagtgctgcatatattttctgctagtttgtgactcatcttcactcatctttcttcatgttgtttcaaaaatagtatcttttaatgcagatattttctgctttattactttgaggttataattgctgtagtgcattgctttttctcttctgaacattttatacactcacctttcacctttaatctaccggtcccaccaaaactaaaatacactgtttctgaatattgtgggtctgtttcaggagtttattgttctgcttgtctattttttttctgttcactaatgccacatcgtctgatactaagtcttgttattttgtagaacaaggacccccaaaaaaataggttgatcaagtctccccgcttccattggtttttttcccctttgttagaattgtgttaaatctaaatcaagttcgggaaaagatatatctcctcaccattgagataaactatccataaataatgttatctgcccaatttttaggtgtttttaaaatattttaataacttactaacgtgttccccataagtcttgtgctttgtttttttgagacagtgtctcactc

SEQ ID NO: 318836 - DNA, 762 bp, Homo sapiens
ctggtctcgaactcccgacctctggtgatctgcccgcctcggcctcccaaagtgctgggattaaaggcgtgagccaccgtgcccagcctaattcttcaattcttaataaacaatttatactgaagagaaaccctacaaacgtgaagaatgttgcaaagcttttaacgtcctcaaaccttactgaacataagataattcataatggaaactagccctacaaatatgaagaatgtggcaaacactgtaaccatttctcacatcttaccacacattaagataattcatactgaagagaaacccgacaaatgtgaagaatgtaacaaagtctttaactggtcttcaactcatactaaatataagagaattcatacagaagataaattttataaatatgaagaatgtgacaaaagctttaaaaacatttcaacccttattacacataagataatttatgttgtagagaaattctacaaatgtgaagaatgtggcaaagttttttttttttttttgaaatggagtctcactctgtcgcccaaattggagtgcaatggtgcaatctcagttcattgcaacctccgcctcctgggttcaagcgattctctggcctcaacctcccaagcagctgggattgcaggcgcctgccaccacgcccagctaatttttgtatttttagtagagacggggtttcaccattttgaccaggctggttttgaactcctgacctcaagtgatccacccgccttggcctcccaaagtgcccca

SEQ ID NO: 318837 - DNA, 1005 bp, Homo sapiens
tctccacgtgggtaccggcgctctcggcgcccgtagccacccgcccgccggaagccgacatctcgagttctggcagaagcaatttgcgcggcgaggagcggagcggcaggaacccaataagctgcttcgcctcggagctgaagcccgtactcaagatggcggctccgggcgggcgtggccagtgactagaaggcgaggcgccgcgggaccatggcggcggcggcggacgagcggagtccagaggacggagaagacgaggaagaggaggagcagttggttctggtggaattatcaggaattattgattcagacttcctctcaaaatgtgaaaataaatgcaaggttttgggcattgacactgagaggcccattctgcaagtggacagctgtgtctttgctggggagtatgaagacactctagggacctgtgttatatttgaagaaaatgttgaacatgctgatacagaaggcaataataaaacagtgctaaaatataaatgccatacaatgaagaagctcagcatgacaagaactctcctgacagagaagaaggaaggagaagaaaacataggtggggtggaatggctgcaaataaaggataatgatttctcctatcgacccaacatgatttgtaactttctacatgaaaatgaagacgaagaagtggtagcttcagccccagataaatctttggaattggaagaggaagagattcaaatgaacgacagttcaaacctgagttgtgaacaggagaaaccaatgcacttggaaatagaagattctggtcctcttattgatataccttctgagacagaaggttctgtttttatggaaactcaaatgctgccttagaaatcactcctagatgaaatgtttctcataataacttgtcaagaactttttagagttgttacataaaaataattgctgtgtagctttcagtcttttaatattttattgcattttattggctatacacacatatccagtcataacacaacttat

SEQ ID NO: 318838 - DNA, 1105 bp, Homo sapiens
tctccacgtgggtaccggcgctctcggcgcccgtagccacccgcccgccggaagccgacatctcgagttctggcagaagcaatttgcgcggcgaggagcggagcggcaggaacccaataagctgcttcgcctcggagctgaagcccgtactcaagatggcggctccgggcgggcgtggccagtgactagaaggcgaggcgccgcgggaccatggcggcggcggcggacgagcggagtccagaggacggagaagacgaggaagaggaggagcagttggttctggtggaattatcaggaattattgattcagacttcctctcaaaatgtgaaaataaatgcaaggttttgggcattgacactgagaggcccattctgcaagtggacagctgtgtctttgctggggagtatgaagacactctagggacctgtgttatatttgaagaaaatgttgaacatgctgatacagaaggcaataataaaacagtgctaaaatataaatgccatacaatgaagaagctcagcatgacaagaactctcctgacagagaagaaggaaggagaagaaaacataggtggggtggaatggctgcaaataaaggataatgatttctcctatcgacccaacatgatttgtaactttctacatgaaaatgaagacgaagaagtggtagcttcagccccagataaatctttggaattggaagaggaagagattcaaatgaacgacagttcaaacctgagttgtgaacaggagaaaccaatgcacttggaaatagaagattctggtcctcttattgatataccttctgagacagaaggttctgtttatgggaactccaatgtgtgcctgaaaacctccctgaagaaaggttccctaaatacggccgaacctctcagcggtcccaacaaactcgggggcttacacacacaccccacacacgcaccgagaacaacacggggggcgcccaacccagtaaacgaaacggcgacagacggacacaccccaaaactacacccgcgttaaaacacacagcaggagtatcttgccgaggcaccgtatcaccacagcaccgcgagacacagcacgcaaccacgcccgtcgccgc

SEQ ID NO: 318839 - DNA, 504 bp, Homo sapiens
cctgaacatgatcatgccactgcattccagcctgggtgacagagctagacactgtctcaaaaaataaatagatgacagatagactctttgcactactgttgacaaaacttcctctgtttttagcttactcttgaacaggatgttgattgaaataaaccttgttacttgagtatgaattaagtagtcttcaggttgtaactgctgtgatcagagcagttgtagtttatcctgtacttggtaggacaagatgctctagaggttccccagttttggagattagtttccttggtagcaaggttacaatgttgaagcctttttctaattatgttttttttttatgatcctttattctgttgtagggcattgacactgagaggcccattctgcaagtggacagctgtgtctttgctggggagtatgaaggtaggaggatgtcagatagatggactctttctgatatgggcttttcagagatggtagctcttctcaacaatttgcctttgt

SEQ ID NO: 318840 - DNA, 406 bp, Homo sapiens
tctccacgtgggtaccggcgctctcggcgcccgtagccacccgcccgccggaagccgacatctcgagttctggcagaagcaatttgcgcggcgaggagcggagcggcaggaacccaataagctgcttcgcctcggagctgaagcccgtactcaagatggcggctccgggcgggcgtggccagtgactagaaggcgaggcgccgcgggaccatggcggcggcggcggacgagcggagtccagaggacggagaagacgaggaagaggaggagcagttggttctggtggaattatcaggaattattgattcagacttcctctcaaaatgtgaaaataaatgcaaggttttgggcattgacactgagagcccattctgcaagtgacacgaatgttcggtaccgaactcga

SEQ ID NO: 318841 - DNA, 790 bp, Homo sapiens
gacccacgcgtccggacccacgcgtccggacggagaagacgaggaagaggaggagcagttggttctggtggaattatcaggaattattgattcagacttcctctcaaaatgtgaaaataaatgcaaggttttgggcattgacactgagaggcccattctgcaagtggacagctgtgtctttgctggggagtatgaagacactctagggacctgtgttatatttgaagaaaatgttgaacatgctgatacagaaggcaataataaaacagtgctaaaatataaatgccatacaatgaagaagctcagcatgacaagaactctcctgacagagaagaaggaaggagaagaaaacataggtggggtggaatggctgcaaataaaggataatgatttctcctatcgacccaacatgatttgtaactttctacatgaaaatgaagacgaagaagtggtagcttcagccccagataaatctttggaattggaagaggaagagattcaaatgaacgacagttcaaacctgagttgtgaacaggagaaaccaatgcacttggaaatagaagattctggtcctcttattgatataccttctgagacagaaggttctgtttttatggaaactcaaatgctgccttagaaatcactcctagatgaaatgtttctcataataacttgtcaagaactttttagagttgttacataaaaataattgctgtgtagctttcagtcttttaatattttattgcattttattggctatacacacatatccagtcataacacaacttat

SEQ ID NO: 318842 - DNA, 1016 bp, Homo sapiens
cctgaacatgatcatgccactgcattccagcctgggtgacagagctagacactgtctcaaaaaataaatagatgacagatagactctttgcactactgttgacaaaacttcctctgtttttagcttactcttgaacaggatgttgattgaaataaaccttgttacttgagtatgaattaagtagtcttcaggttgtaactgctgtgatcagagcagttgtagtttatcctgtacttggtaggacaagatgctctagaggttccccagttttggagattagtttccttggtagcaaggttacaatgttgaagcctttttctaattatgttttttttttatgatcctttattctgttgtagggcattgacactgagaggcccattctgcaagtggacagctgtgtctttgctggggagtatgaagacactctagggacctgtgttatatttgaagaaaatgttgaacatgctgatacagaaggcaataataaaacagtgctaaaatataaatgccatacaatgaagaagctcagcatgacaagaactctcctgacagagaagaaggaaggagaagaaaacataggtggggtggaatggctgcaaataaaggataatgatttctcctatcgacccaacatgatttgtaactttctacatgaaaatgaagacgaagaagtggtagcttcagccccagataaatctttggaattggaagaggaagagattcaaatgaacgacagttcaaacctgagttgtgaacaggagaaaccaatgcacttggaaatagaagattctggtcctcttattgatataccttctgagacagaaggttctgtttttatggaaactcaaatgctgccttagaaatcactcctagatgaaatgtttctcataataacttgtcaagaactttttagagttgttacataaaaataattgctgtgtagctttcagtcttttaatattttattgcattttattggctatacacacatatccagtcataacacaacttat

SEQ ID NO: 318843 - DNA, 879 bp, Homo sapiens
tctccacgtgggtaccggcgctctcggcgcccgtagccacccgcccgccggaagccgacatctcgagttctggcagaagcaatttgcgcggcgaggagcggagcggcaggaacccaataagctgcttcgcctcggagctgaagcccgtactcaagatggcggctccgggcgggcgtggccagtgactagaaggcgaggcgccgcgggaccatggcggcggcggcggacgagcggagtccagaggacggagaagacgaggaagaggaggagcagttggttctggtggaattatcaggaattattgattcagacttcctctcaaaatgtgaaaataaatgcaaggttttgggcattgacactgagaggcccattctgcaagtggacagctgtgtctttgctggggagtatgaagacactctagggacctgtgttatatttgaagaaaatgttgaacatgctgatacagaaggcaataataaaacagtgctaaaatataaatgccatacaatgaagaagctcagcatgacaagaactctcctgacagagaagaaggaaggagaagaaaacataggtggggtggaatggctgcaaataaaggataatgatttctcctatcgacccaacatgatttgtaactttctacatgaaaatgaagacgaagaagtggtagcttcagccccagataaatctttggaattggaagaggaagagattcaaatgaacgacagttcaaacctgagttgtgaacaggagaaaccaatgcacttggaaattatggaaactcaaatgctgccttagaaatcactcctagatgaaatgtttctcataataacttgtcaagaactttttagagttgttacataaaaataattgctgtgt

SEQ ID NO: 318844 - DNA, 726 bp, Homo sapiens
gcgtttacctgattgacgtcaagttcaacggcacccacatccctggaagccccttcaagatccgagttggggagcctgggcatggaggggacccaggcttggtgtctgcttacggagcagttggttctggtggaattatcaggaattattgattcagacttcctctcaaaatgtgaaaataaatgcaaggttttgggcattgacactgagaggcccattctgcaagtggacagctgtgtctttgctggggagtatgaagacactctagggacctgtgttatatttgaagaaaatgttgaacatgctgatacagaaggcaataataaaacagtgctaaaatataaatgccatacaatgaagaagctcagcatgacaagaactctcctgacagagaagaaggaaggagaagaaaacataggtggggtggaatggctgcaaataaaggataatgatttctcctatcgacccaacatgatttgtaactttctacatgaaaatgaagacgaagaagtggtagcttcagccccagataaatctttggaattggaagaggaagagattcaaatgaacgacagttcaaacctgagttgtgaacaggagaaaccaatgcacttggaaattatggaaactcaaatgctgccttagaaatcactcctagatgaaatgtttctcataataacttgtcaagaactttttagagttgttacataaaaataattgctgtgt

SEQ ID NO: 318845 - DNA, 933 bp, Homo sapiens
tctccacgtgggtaccggcgctctcggcgcccgtagccacccgcccgccggaagccgacatctcgagttctggcagaagcaatttgcgcggcgaggagcggagcggcaggaacccaataagctgcttcgcctcggagctgaagcccgtactcaagatggcggctccgggcgggcgtggccagtgactagaaggcgaggcgccgcgggaccatggcggcggcggcggacgagcggagtccagaggacggagaagacgaggaagaggaggagcagttggttctggtggaattatcaggaattattgattcagacttcctctcaaaatgtgaaaataaatgcaaggttttgggcattgacactgagaggcccattctgcaagtggacagctgtgtctttgctggggagtatgaagacactctagggacctgtgttatatttgaagaaaatgttgaacatgctgatacagaaggcaataataaaacagtgctaaaatataaatgccatacaatgaagaagctcagcatgacaagaactctcctgacagagaagaaggaaggagaagaaaacataggtggggtggaatggctgcaaataaaggataatgatttctcctatcgacccaacatgatttgtaactttctacatgaaaatgaagacgaagaagtggtagcttcagccccagataaatctttggaattggaagaggaagagattcaaatgaacgacagttcaaacctgagttgtgaacaggagaaaccaatgcacttggaaatagaagattctggtcctcttattgatataccttctgagacagaaggttctgtttttatggaaactcaaatgctgccttagaaatcactcctagatgaaatgtttctcataataacttgtcaagaactttttagagttgttacataaaaataattgctgtgt

SEQ ID NO: 318846 - DNA, 1125 bp, Homo sapiens
  misc_feature (957)..(971): n is a, c, g, or t
  misc_feature (976)..(977): n is a, c, g, or t
  misc_feature (979)..(979): n is a, c, g, or t
  misc_feature (985)..(985): n is a, c, g, or t
  misc_feature (987)..(988): n is a, c, g, or t
  misc_feature (990)..(990): n is a, c, g, or t
  misc_feature (994)..(994): n is a, c, g, or t
  misc_feature (1005)..(1005): n is a, c, g, or t
  misc_feature (1041)..(1041): n is a, c, g, or t
  misc_feature (1062)..(1062): n is a, c, g, or t
  misc_feature (1066)..(1067): n is a, c, g, or t
  misc_feature (1082)..(1082): n is a, c, g, or t
  misc_feature (1084)..(1085): n is a, c, g, or t
  misc_feature (1089)..(1089): n is a, c, g, or t
  misc_feature (1095)..(1095): n is a, c, g, or t
  misc_feature (1106)..(1106): n is a, c, g, or t
  misc_feature (1109)..(1109): n is a, c, g, or t
  misc_feature (1112)..(1112): n is a, c, g, or t
  misc_feature (1116)..(1116): n is a, c, g, or t
  misc_feature (1119)..(1119): n is a, c, g, or t
tctccacgtgggtaccggcgctctcggcgcccgtagccacccgcccgccggaagccgacatctcgagttctggcagaagcaatttgcgcggcgaggagcggagcggcaggaacccaataagctgcttcgcctcggagctgaagcccgtactcaagatggcggctccgggcgggcgtggccagtgactagaaggcgaggcgccgcgggaccatggcggcggcggcggacgagcggagtccagaggacggagaagacgaggaagaggaggagcagttggttctggtggaattatcaggaattattgattcagacttcctctcaaaatgtgaaaataaatgcaaggttttgggcattgacactgagaggcccattctgcaagtggacagctgtgtctttgctggggagtatgaagacactctagggacctgtgttatatttgaagaaaatgttgaacatgctgatacagaaggcaataataaaacagtgctaaaatataaatgccatacaatgaagaagctcagcatgacaagaactctcctgacagagaagaaggaaggagaagaaaacataggtggggtggaatggctgcaaataaaggataatgatttctcctatcgacccaacatgatttgtaactttctacatgaaaatgaagacgaagaagtggtagcttcagccccagataaatctttggaattggaagaggaagagattcaaatgaacgacagttcaaacctgagttgtgaacaggagaaaccaatgcacttggaaatagaagattctggtcctcttattgatataccttctgagacagaaggttctgtttttatggaaactcaaatgctgccttagaaatcactcctagatgaaatgtttctcataataacttgtcaagaactttttagagttgttacataaaaataattgctgtgtaaaaaaaaaaaaaaaaaaaaaaannnnnnnnnnnnnnnggggnnanaaatananngngggnttaaattaatnaaaagtattatattttaaataaaatttatatttttnttttttttttttttttttttntaannttaaaattttttttnannatanattttngagtatttttnatnaanattntanattaat

SEQ ID NO: 318847 - DNA, 530 bp, Homo sapiens
tctccacgtgggtaccggcgctctcggcgcccgtagccacccgcccgccggaagccgacatctcgagttctggcagaagcaatttgcgcggcgaggagcggagcggcaggaacccaataagctgcttcgcctcggagctgaagcccgtactcaagatggcggctccgggcgggcgtggccagtgactagaaggcgaggcgccgcgggaccatggcggcggcggcggacgagcggagtccagaggacggagaagacgaggaagaggaggagcagttggttctggtggaattatcaggaattattgattcagacttcctctcaaaatgtgaaaataaatgcaaggttttgggcattgacactgagaggcccattctgcaagtggacagctgtgtctttgctggggagtatgaagacactctagggacctgtgttatatttgaagaaaatgttgaacatgctgatccagaaaggcaatattaaaacacgggcctaaaaattaataaataagcccccttcccacacaaatttgg

SEQ ID NO: 318848 - DNA, 853 bp, Homo sapiens
cccactgctcctcaccggcttcttgctcctgggcgcgaggagccgggcagcttgggaccttagccctaatcgtcaccccgtacttgggatgggaagtaccgggaagttaccttaggagcagttggttctggtggaattatcaggaattattgattcagacttcctctcaaaatgtgaaaataaatgcaaggttttgggcattgacactgagaggcccattctgcaagtggacagctgtgtctttgctggggagtatgaagacactctagggacctgtgttatatttgaagaaaatgttgaacatgctgatacagaaggcaataataaaacagtgctaaaatataaatgccatacaatgaagaagctcagcatgacaagaactctcctgacagagaagaaggaaggagaagaaaacataggtggggtggaatggctgcaaataaaggataatgatttctcctatcgacccaacatgatttgtaactttctacatgaaaatgaagacgaagaagtggtagcttcagccccagataaatctttggaattggaagaggaagagattcaaatgaacgacagttcaaacctgagttgtgaacaggagaaaccaatgcacttggaaatagaagattctggtcctcttattgatataccttctgagacagaaggttctgtttttatggaaactcaaatgctgccttagaaatcactcctagatgaaatgtttctcataataacttgtcaagaactttttagagttgttacataaaaataattgctgtgtagctttcagtcttttaatattttattgcattttattggctatacacacatatccagtcataacacaacttat

SEQ ID NO: 318849 - DNA, 1000 bp, Homo sapiens
tctccacgtgggtaccggcgctctcggcgcccgtagccacccgcccgccggaagccgacatctcgagttctggcagaagcaatttgcgcggcgaggagcggagcggcaggaacccaataagctgcttcgcctcggagctgaagcccgtactcaagatggcggctccgggcgggcgtggccagtgactagaaggcgaggcgccgcgggaccatggcggcggcggcggacgagcggagtccagaggacggagaagacgaggaagaggaggagcagttggttctggtggaattatcaggaattattgattcagacttcctctcaaaatgtgaaaataaatgcaaggttttgggcattgacactgagaggcccattctgcaagtggacagctgtgtctttgctggggagtatgaagacactctagggacctgtgttatatttgaagaaaatgttgaacatgctgatacagaaggcaataataaaacagtgctaaaatataaatgccatacaatgaagaagctcagcatgacaagaactctcctgacagagaagaaggaaggagaagaaaacataggtggggtggaatggctgcaaataaaggataatgatttctcctatcgacccaacatgatttgtaactttctacatgaaaatgaagacgaagaagtggtagcttcagccccagataaatctttggaattggaagaggaagagattcaaatgaacgacagttcaaacctgagttgtgaacaggagaaaccaatgcacttggaaatagaagattctggtcctcttattgatataccttctgagacagaaggttctgtttttatggaaactcaaatgctgccttagaaatcactcctagatgaaatgtttctcataataacttgtcaagaactttttagagttgttacataaaaataattgctgtgttaattaacctcgctgcgccccttctgttttttcctgaaaataaatactgggccttgttggcctcagg

SEQ ID NO: 318850 - DNA, 361 bp, Homo sapiens
tttgtttattcctcatcccctccaaattaggtggggtggaatggctgcaaataaaggataatgatttctcctatcgacccaacatgatttgtaactttctacatgaaaatgaagacgaagaagtggtagcttcagccccagataaatctttggaattggaagaggaagagattcaaatgaacgacagttcaaacctgagttgtgaacaggagaaaccaatgcacttggaaatagaagattctggtcctcttattgatataccttctgagacagaaggttctgtttttatggaaactcaaatgctgccttagaaatcactcctagatgaaatgtttctcataataacttgtcaagaactttt

SEQ ID NO: 318851 - DNA, 3288 bp, Homo sapiens
  misc_feature (6)..(6): n is a, c, g, or t
  misc_feature (8)..(8): n is a, c, g, or t
  misc_feature (13)..(13): n is a, c, g, or t
  misc_feature (1282)..(1282): n is a, c, g, or t
ggctgnantcagnctggcagaccgaagcgcttcactgagcgctcgccgccgcccagcctctcctctcgcgcctcctagctcttcgcagagcaaccaggagccaggagtggtctagagcccgagggtgggaagggggagtctgtctggcttttctcctatcttgcttctttttcctcttcccttcccactcttgttcaagcgagtgtgtgagctatggagcgaagagcctggagtctgcagtgcactgctttcgtcctcttttgcgcttggtgtgcactgaacagtgcaaaagcgaaaaggcaatttgtcaatgaatgggcagcggagatccccgggggcccggaagcagcctcggccatcgccgaggagctgggctatgaccttttgggtcagattggttcacttgaaaatcactacttattcaaacataaaaaccaccccagaaggtctcgaaggagtgcctttcatatcactaagagattatctgatgatgatcgtgtgatatgggctgaacaacagtatgaaaaagaaagaagtaaacgttcagctctaagggactcagcactaaatctcttcaatgatcccatgtggaatcagcaatggtacttgcaagataccaggatgacggcagccctgcccaagctggaccttcatgtgatacctgtttggcaaaaaggcattacgggcaaaggagttgttatcaccgtactggatgatggtttggagtggaatcacacggacatttatgccaactatgatccagaggctagctatgattttaatgataatgaccatgatccatttccccgatatgatcccacaaacgagaacaaacacgggaccagatgtgcaggagaaattgccatgcaagcaaataatcacaaatgcggggttggagttgcatacaattccaaagttggaggcataagaatgctggatggcattgtgacggatgctattgaggccagttcaattggattcaatcctggacacgtggatatttacagtgcaagctggggccctaatgatgatgggaaaactgtggaggggcctggccggctagcccagaaggcttttgaatatggtgtcaaacaggggagacaggggaaggggtccatcttcgtctgggcttcgggaaacggggggcgtcagggagataattgtgactgtgatggctacacagacagcatctacaccatctccatcagcagtgcctcccagcaaggcctatccccctggtacgctgagaagtgctcctccacactggccacctcttacagcngcggagattacaccgaccagagaatcacgagcgctgacctgcacaatgactgcacggagacgcacacaggcacctcggcctctgcacctctggctgctggcatcttcgctctggccctggaagcaaacccaaatctcacctggcgagatatgcagcacctggttgtctggacctctgagtatgacccgctggccaataaccctggatggaaaaagaatggagcaggcttgatggtgaatagtcgatttggatttggcttgctaaatgccaaagctctggtggatttagctgaccccaggacctggaggagcgtgcctgagaagaaagagtgtgttgtaaaggacaatgactttgagcccagagccctgaaagctaatggagaagttatcattgaaattccaacaagagcttgtgaaggacaagaaaatgctatcaagtccctggagcatgtacaatttgaagcaacaattgaatattcccgaagaggagaccttcatgtcacacttacttctgctgctggaactagcactgtgctcttggctgaaagagaacgggatacatctcctaatggctttaagaactgggacttcatgtctgttcacacatggggagagaaccctataggtacttggactttgagaattacagacatgtctggaagaattcaaaatgaaggaagaattgtgaactggaagctgattttgcacgggacctcttctcagccagagcatatgaagcagcctcgtgtgtacacgtcctacaacactgttcagaatgacagaagaggggtggagaagatggtggatccaggggaggagcagcccacacaagagaaccctaaggagaacaccctggtgtccaaaagccccagcagcagcagcgtagggggccggagggatgagttggaggagggagccccttcccaggccatgctgcgactcctgcaaagtgctttcagtaaaaactcaccgccaaagcaatcaccaaagaagtccccaagtgcaaagctcaacatcccttatgaaaacttctacgaagccctggaaaagctgaacaaaccttcccagcttaaagactctgaagacagtctgtataatgactatgttgatgttttttataacactaaaccttacaagcacagagacgaccggctgcttcaagctctggtggacattctgaatgaggaaaattaaaataagtgtgtggtcccaagttggaaatattcatgcttcttccttaccctgcgattttgcctgtgtctgaagtggttgttttgtcatgaattcttatgcttataatatcctttgtggcaccttttctttttctccctaaactgtacatgtgaaggggatgagctcaagcaggaagttcaacttccagaattgatcataggtatttcaaaacacatctttcctgtctgcacaagtgaagtgttttgttctttctggagtcacagttgacaaaaagctcttacactacattagaacactgcattagagcccatttcaattctcaaaagaaaaggcaaaacctgggatatcaattaatttgaaaacataatctgcaaagaatgagaaggagtcagaaactgtttctgtagcttgttccctgtcttgtccatgtggttcttcaaattttgatgccaagaaagtatttggtaggcctaatgaaggagttcactgtaagactcattccctagatctttctattccaaagtgccactcattcctgtagtcaaaatctggtcatgttggtcaaaagctggattatttagatctagaaacagatcttgaaatctgaatgctctggtttgagcaattttcgaacattctttgcctggtgcactgtgtctgtggtgccagaggcgtccgtggatccagaggtggttatgactcgtgctgcatgcctggtctttcctctgtttctccttctgaaagttttctatacctgtctcctttctcagccacaaaataaatgttgggagaaatgatatataccactttccc

SEQ ID NO: 318852 - DNA, 2327 bp, Homo sapiens
  misc_feature (6)..(6): n is a, c, g, or t
  misc_feature (8)..(8): n is a, c, g, or t
  misc_feature (13)..(13): n is a, c, g, or t
ggctgnantcagnctggcagaccgaagcgcttcactgagcgctcgccgccgcccagcctctcctctcgcgcctcctagctcttcgcagagcaaccaggagccaggagtggtctagagcccgagggtgggaagggggagtctgtctggcttttctcctatcttgcttctttttcctcttcccttcccacttcattcctgtagtcaaaatctggtcatgttggtcaaaagctggattatttagatctagaaacagatcttgaaatctgaatgctctggtttgagcaattttcgaacattctttgcctggtgcactgtgtctgtggtgccagaggcgtccgtggatccagaggtggttatgactcgtgctgcatgcctggtctttcctctgtttctccttctgaaagttttctatacctgtctcctttctcagccacaaaataaatgttgggagaaatgatatataccactttcccagaaaaaaaaaaacttacacttgggacttggcaaattcctagtcacaatttttttcagcagtaacaggaaaccacttatcacatggagacctaatgtaataatagaaaaatactcataatagggagaaaccaagagaagttttgtttttgtttttttccaactgtgttcattagaacagcgtgttctaagtatttgaaactgaatgtttattccttgatactaaaagttcttctccaatcctatcactgatagtgtccaaattctcaccaaattgctcctaagcttcaaatcagaagcagaaactggcaggccatggaccttaattgtccctcaggtagattttgtttggtatgcagaatgtttttaaaatatgagtggttattgaaaatatgatgtttcacataaaacctcattctcggacccatctttgctcatggcaacagttagctggagctgagtagcagctgcctgattagatgactctcagtccccatggcaccctgctccatgttacctagagcaggcacttgattccttgctgggcagtatccaataggcatttgattttgcccactcctacactaagcgaatgtgtacaaagtgtaaatgcattaggaaaaacaaactacccgcatcttctgttaggcaggatctgtacaataataattatgagtttgcttatgtaatctcacctcacctggatgatcactaatactaattcatttattactaaccttctggcttccttctctcaatatgcttacaaagtctccagtcacctacaatgctggctttctcccactgagtttgctgtttgcaatttttccatgaagtttgaacttcataaggtaattcatggcattgaactggttcatgaaaagaacactagagtctgtcatttgctttggcttgaagtatggttggtaacacaaattttcacctgctcttctaccatttgaatttgtgtagagggtgtttgcagagcaatgcccgtaatgcttagagaatgttctcctaaaagacttgcggaatcactctgtccttggaagtttcatatattgtttgatatgaagtgttagatagaatttccaatattggagcatatcaaaaagtattaaaactaaaaaggaccagagaattcttagattggcccggaaaggccaataaagagttagaatgaaaactcattacttttccattcccaatctagtgctagatgtataaatctttcttttgattcttcctaacaaaatattttctgggttaaaaccccagccaactcattgggttgtagccaaaggttcactctcaagaagctttaatatttaaataaaatcatattgaatgtttccaacctggagtataatattcagatataaaacagttttgtcagtctttcttagtgcctgtgtggatttttgtgaaaatgtcaaagagaaaacttatatactatttcccttgaaattttaaactatattttctttacaggtatttataatataccaatgcttttatcaaacagaattttaaagagcataataaattatattaaagaaccaaaagttttcctgagaataagaaagtttcacccaataaaatatttttgaaaggcatgttcctctgtcaatgaaaaaaagtacatgtatgtgttgtgatattaaaagtgacatttgtctaatagcctaatacaacatgtagctgagtttaacatgtgtggtcttggtattcttaagggaacttccacattatacatttgatgtattgaccagaatatgtaaaatatgcttataaatcagaaaaataaattgtttctcactaagtcaaaaaaaaaaaagctcatgtttccaccacaa

SEQ ID NO: 318853 - DNA, 801 bp, Homo sapiens
  misc_feature (6)..(6): n is a, c, g, or t
  misc_feature (8)..(8): n is a, c, g, or t
  misc_feature (13)..(13): n is a, c, g, or t
ggctgnantcagnctggcagaccgaagcgcttcactgagcgctcgccgccgcccagcctctcctctcgcgcctcctagctcttcgcagagcaaccaggagccaggagtggtctagagcccgagggtgggaagggggagtctgtctggcttttctcctatcttgcttctttttcctcttcccttcccactcttgttcaagcgagtgtgtgagctatggagcgaagagcctggagtctgcagtgcactgctttcgtcctcttttgcgcttggtgtgcactgaacagtgcaaaagcgaaaaggcaatttgtcaatgaatgggcagcggagatccccgggggcccggaagcagcctcggccatcgccgaggagctgggctatgaccttttgggtcagattggttcacttgaaaatcactacttattcaaacataaaaaccaccccagaaggtctcgaaggagtgcctttcatatcactaagagattatctgatgatgatcgtgtgatatgggctgaacaacagtatgaaaaagaaagaagtaaacgttcagctctaagggactcagcactaaatctcttcaatgatcccatgtggaatcagcaatggtacttgcaagataccaggatgacggcagccctgcccaagctggaccttcatgtgatacctgtttggcaaaaaggcattacgggcaaaggagttgttatcaccgtactggatgatggtttggagtggaatcacacggacatttatgccaactatgatccagtacggtgataacaactccttgcccgtgtagaaattgaa

SEQ ID NO: 318854 - DNA, 5142 bp, Homo sapiens
  misc_feature (6)..(6): n is a, c, g, or t
  misc_feature (8)..(8): n is a, c, g, or t
  misc_feature (13)..(13): n is a, c, g, or t
  misc_feature (1282)..(1282): n is a, c, g, or t
ggctgnantcagnctggcagaccgaagcgcttcactgagcgctcgccgccgcccagcctctcctctcgcgcctcctagctcttcgcagagcaaccaggagccaggagtggtctagagcccgagggtgggaagggggagtctgtctggcttttctcctatcttgcttctttttcctcttcccttcccactcttgttcaagcgagtgtgtgagctatggagcgaagagcctggagtctgcagtgcactgctttcgtcctcttttgcgcttggtgtgcactgaacagtgcaaaagcgaaaaggcaatttgtcaatgaatgggcagcggagatccccgggggcccggaagcagcctcggccatcgccgaggagctgggctatgaccttttgggtcagattggttcacttgaaaatcactacttattcaaacataaaaaccaccccagaaggtctcgaaggagtgcctttcatatcactaagagattatctgatgatgatcgtgtgatatgggctgaacaacagtatgaaaaagaaagaagtaaacgttcagctctaagggactcagcactaaatctcttcaatgatcccatgtggaatcagcaatggtacttgcaagataccaggatgacggcagccctgcccaagctggaccttcatgtgatacctgtttggcaaaaaggcattacgggcaaaggagttgttatcaccgtactggatgatggtttggagtggaatcacacggacatttatgccaactatgatccagaggctagctatgattttaatgataatgaccatgatccatttccccgatatgatcccacaaacgagaacaaacacgggaccagatgtgcaggagaaattgccatgcaagcaaataatcacaaatgcggggttggagttgcatacaattccaaagttggaggcataagaatgctggatggcattgtgacggatgctattgaggccagttcaattggattcaatcctggacacgtggatatttacagtgcaagctggggccctaatgatgatgggaaaactgtggaggggcctggccggctagcccagaaggcttttgaatatggtgtcaaacaggggagacaggggaaggggtccatcttcgtctgggcttcgggaaacggggggcgtcagggagataattgtgactgtgatggctacacagacagcatctacaccatctccatcagcagtgcctcccagcaaggcctatccccctggtacgctgagaagtgctcctccacactggccacctcttacagcngcggagattacaccgaccagagaatcacgagcgctgacctgcacaatgactgcacggagacgcacacaggcacctcggcctctgcacctctggctgctggcatcttcgctctggccctggaagcaaacccaaatctcacctggcgagatatgcagcacctggttgtctggacctctgagtatgacccgctggccaataaccctggatggaaaaagaatggagcaggcttgatggtgaatagtcgatttggatttggcttgctaaatgccaaagctctggtggatttagctgaccccaggacctggaggagcgtgcctgagaagaaagagtgtgttgtaaaggacaatgactttgagcccagagccctgaaagctaatggagaagttatcattgaaattccaacaagagcttgtgaaggacaagaaaatgctatcaagtccctggagcatgtacaatttgaagcaacaattgaatattcccgaagaggagaccttcatgtcacacttacttctgctgctggaactagcactgtgctcttggctgaaagagaacgggatacatctcctaatggctttaagaactgggacttcatgtctgttcacacatggggagagaaccctataggtacttggactttgagaattacagacatgtctggaagaattcaaaatgaaggaagaattgtgaactggaagctgattttgcacgggacctcttctcagccagagcatatgaagcagcctcgtgtgtacacgtcctacaacactgttcagaatgacagaagaggggtggagaagatggtggatccaggggaggagcagcccacacaagagaaccctaaggagaacaccctggtgtccaaaagccccagcagcagcagcgtagggggccggagggatgagttggaggagggagccccttcccaggccatgctgcgactcctgcaaagtgctttcagtaaaaactcaccgccaaagcaatcaccaaagaagtccccaagtgcaaagctcaacatcccttatgaaaacttctacgaagccctggaaaagctgaacaaaccttcccagcttaaagactctgaagacagtctgtataatgactatgttgatgttttttataacactaaaccttacaagcacagagacgaccggctgcttcaagctctggtggacattctgaatgaggaaaattaaaataagtgtgtggtcccaagttggaaatattcatgcttcttccttaccctgcgattttgcctgtgtctgaagtggttgttttgtcatgaattcttatgcttataatatcctttgtggcaccttttctttttctccctaaactgtacatgtgaaggggatgagctcaagcaggaagttcaacttccagaattgatcataggtatttcaaaacacatctttcctgtctgcacaagtgaagtgttttgttctttctggagtcacagttgacaaaaagctcttacactacattagaacactgcattagagcccatttcaattctcaaaagaaaaggcaaaacctgggatatcaattaatttgaaaacataatctgcaaagaatgagaaggagtcagaaactgtttctgtagcttgttccctgtcttgtccatgtggttcttcaaattttgatgccaagaaagtatttggtaggcctaatgaaggagttcactgtaagactcattccctagatctttctattccaaagtgccactcattcctgtagtcaaaatctggtcatgttggtcaaaagctggattatttagatctagaaacagatcttgaaatctgaatgctctggtttgagcaattttcgaacattctttgcctggtgcactgtgtctgtggtgccagaggcgtccgtggatccagaggtggttatgactcgtgctgcatgcctggtctttcctctgtttctccttctgaaagttttctatacctgtctcctttctcagccacaaaataaatgttgggagaaatgatatataccactttcccagaaaaaaaaaaacttacacttgggacttggcaaattcctagtcacaatttttttcagcagtaacaggaaaccacttatcacatggagacctaatgtaataatagaaaaatactcataatagggagaaaccaagagaagttttgtttttgtttttttccaactgtgttcattagaacagcgtgttctaagtatttgaaactgaatgtttattccttgatactaaaagttcttctccaatcctatcactgatagtgtccaaattctcaccaaattgctcctaagcttcaaatcagaagcagaaactggcaggccatggaccttaattgtccctcaggtagattttgtttggtatgcagaatgtttttaaaatatgagtggttattgaaaatatgatgtttcacataaaacctcattctcggacccatctttgctcatggcaacagttagctggagctgagtagcagctgcctgattagatgactctcagtccccatggcaccctgctccatgttacctagagcaggcacttgattccttgctgggcagtatccaataggcatttgattttgcccactcctacactaagcgaatgtgtacaaagtgtaaatgcattaggaaaaacaaactacccgcatcttctgttaggcaggatctgtacaataataattatgagtttgcttatgtaatctcacctcacctggatgatcactaatactaattcatttattactaaccttctggcttccttctctcaatatgcttacaaagtctccagtcacctacaatgctggctttctcccactgagtttgctgtttgcaatttttccatgaagtttgaacttcataaggtaattcatggcattgaactggttcatgaaaagaacactagagtctgtcatttgctttggcttgaagtatggttggtaacacaaattttcacctgctcttctaccatttgaatttgtgtagagggtgtttgcagagcaatgcccgtaatgcttagagaatgttctcctaaaagacttgcggaatcactctgtccttggaagtttcatatattgtttgatatgaagtgttagatagaatttccaatattggagcatatcaaaaagtattaaaactaaaaaggaccagagaattcttagattggcccggaaaggccaataaagagttagaatgaaaactcattacttttccattcccaatctagtgctagatgtataaatctttcttttgattcttcctaacaaaatattttctgggttaaaaccccagccaactcattgggttgtagccaaaggttcactctcaagaagctttaatatttaaataaaatcatattgaatgtttccaacctggagtataatattcagatataaaacagttttgtcagtctttcttagtgcctgtgtggatttttgtgaaaatgtcaaagagaaaacttatatactatttcccttgaaattttaaactatattttctttacaggtatttataatataccaatgcttttatcaaacagaattttaaagagcataataaattatattaaagaaccaaaagttttcctgagaataagaaagtttcacccaataaaatatttttgaaaggcatgttcctctgtcaatgaaaaaaagtacatgtatgtgttgtgatattaaaagtgacatttgtctaatagcctaatacaacatgtagctgagtttaacatgtgtggtcttggtattcttaagggaacttccacattatacatttgatgtattgaccagaatatgtaaaatatgcttataaatcagaaaaataaattgtttctcactaagtcaaaaaaaaaaaagctcatgtttccaccacaa

SEQ ID NO: 318855 - DNA, 780 bp, Homo sapiens
ccctcgcccccgcctccggcccgaggccgcacgggtgtcctcgcgctgctagtccgcgcgcagcctggcagtttgccgcttcctcgtcctccatcctgcgtccatggccaccgctgcgactgaggagcccttcccttttcacggtctcctgccgaagaaggagaccggagccgcctccttcctctgccgctacccggagtatgatgggcggggggtgctcatcgcagtcctggacacgggggtcgacccgggggctccgggcatgcaggttacaactgatggaaaaccaaaaatcgttgatatcattgatacaacaggaagtggcgatgtgaatactgctacagaagtagagccaaaggatggtgagattgttggcctttcaggaagagtgcttaaggttgaagtacaatggcacaatctcggctcacctcgacctctgcttcctgtattcaagtgattcttctgcctcagcctcccgagtagctgggattacaggcatgcgccatgacacttggctaatttttttgtgtgtttttagtagagatggaattttgccatgttggccaggctggtctcaaactcctgacctcaagtgatccacccacctcgacctcccaaagtgctggtattataggcatgagccaccatgcctggcctcatttatttttaaatagctgcagtaatcccggctttagataaaccacatgaactaataatatcactagtgttcaaaggtagaattatatgtgtaccatatgtattgctattaaataaagtcaa

SEQ ID NO: 318856 - DNA, 424 bp, Homo sapiens
cggccgcaaatgttttttagaaaggtaagaaaataaattttactgtctccatttctttttaattaatagagcctgcattgattctaatgaagatggggacttgagtaaatctaccgtgttgagaaactacaaagaagcccaagaatatggctcttttggcacagctgagatgttgaattactccgttaatatatacgatgatggaaacctgctctccattgtgaccagtggaggtatcccatttcagattgaccaatgagatatagatttatgaggtgataaagtggtacgttgcgatagctcacagcaaccttctagagaattttaagctagagatcgtagctaaaggactaggtccagaatcataaaggtgatttgatttacctgcaagatgttgttttttaaggtcataaccatgtgggat

SEQ ID NO: 318857 - DNA, 780 bp, Homo sapiens
  misc_feature (16)..(16): n is a, c, g, or t
  misc_feature (36)..(36): n is a, c, g, or t
cacatatgatatgttnatctttacaatacctgatanagattcagctgtctggcacttacacatgtattgtaaagatacacatatgatatgtttattaaaattgaaataatgtaaaacacatgaataaatttgcaaaaccaagatcacagtacaccatatgcactctggtaccttaatttttttttataaataataaaagtgaatattgaagcttcttaaaagaaagaagcatagaataagacaaagaaacaagccagggagcggttgcgaccctgacaattatttcgcccctcgcacgggcgcccacaatgttgacgcgcttcgcctgttcttctctttgtcacacatgggtggccctcctatgtggatgccgcaaatttactagagcactaggctcgtgggacccgtgtgttatccagagtggcagcaacgggaggaaagcggcatacttggggagtctattcggccaccgaaagagcctatatcattcctcgaggcggcgcggcactaaattcggcgtagagcatatcattccaatgtgttcttaaacgcgcctgctaggagttacacctattgcgattgtgtttagcggcgtttaaatctgagcgggctaaacatcgatgacgcgggaatgtatcgcgttcgatgcgcatacaaaagtcttggctgtacggggacctcttggttctttgacgattcttgttcccggagtgcttctttatataaacgaaccggatgcagccttttggattgagactatagggtataccccatattcca

SEQ ID NO: 318858 - DNA, 220 bp, Homo sapiens
  misc_feature (16)..(16): n is a, c, g, or t
  misc_feature (36)..(36): n is a, c, g, or t
cacatatgatatgttnatctttacaatacctgatanagattcagctgtctggcacttacacatgtattgtaaagatacacatatgatatgtttattaaaattgaaataatgtaaaacacatgaataaatttgcaaaaccaagatcacagtacaccatatgcactctggtaccttaatttttttttataaataataaaagtgaatattgaagcttcttaaa

SEQ ID NO: 318859 - DNA, 4962 bp, Homo sapiens
ccctcgcccccgcctccggcccgaggccgcacgggtgtcctcgcgctgctagtccgcgcgcagcctggcagtttgccgcttcctcgtcctccatcctgcgtccatggccaccgctgcgactgaggagcccttcccttttcacggtctcctgccgaagaaggagaccggagccgcctccttcctctgccgctacccggagtatgatgggcggggggtgctcatcgcagtcctggacacgggggtcgacccgggggctccgggcatgcaggttacaactgatggaaaaccaaaaatcgttgatatcattgatacaacaggaagtggcgatgtgaatactgctacagaagtagagccaaaggatggtgagattgttggcctttcaggaagagtgcttaagattcctgcaagctggacaaatccctcaggcaaatatcatattggcataaaaaatggctatgacttctatcctaaggcactcaaggaaaggatacagaaagaacggaaggaaaaaatctgggaccctgttcacagagtggcccttgcagaagcctgtagaaaacaggaagaatttgatgttgccaacaacggctcttctcaagcaaataaactaatcaaggaggaacttcaaagtcaagtggaattgctaaattcttttgagaagaaatacagcgatcctggccctgtatatgactgcttggtatggcatgatggcgaagtctggagagcctgcattgattctaatgaagatggggacttgagtaaatctaccgtgttgagaaactacaaagaagcccaagaatatggctcttttggcacagctgagatgttgaattactccgttaatatatacgatgatggaaacctgctctccattgtgaccagtggaggagctcatgggacacatgtagctagtatagctgctggacactttccagaagaacctgaacggaatggggtagctcctggtgctcaaattctttccatcaagattggtgatacaagactaagcacaatggaaacaggcacaggcctcataagagctatgatagaagttataaatcataagtgtgatcttgtcaactacagttacggagaagcaactcactggccaaattctgggagaatttgtgaagtaattaatgaagcagtatggaagcataatataatttatgtttcaagtgctggaaataatggtccatgcctgtctacagttggttgtccaggtggaactacatcaagtgtgataggtgttggtgcttatgtttctcctgatatgatggttgctgagtattcactgagagagaaattacctgcaaatcaatatacttggtcttctagaggacctagtgctgacggggcccttggtgtgagtatcagtgcgccaggaggagccattgcttctgttcctaactggacactgagagggacgcagctgatgaatggaacatctatgtcttcccccaatgcatgtggaggcattgccctgatcctttcaggtctgaaagctaataacattgactacacagttcattcagtcagaagagctctagaaaacactgcagtgaaggctgacaatatagaagtatttgctcaaggacatggtattattcaggttgataaagcctatgactacctcgttcagaatacatcatttgctaataaattaggttttactgttactgttggaaataaccgtggcatctacctccgagatcctgttcaggtggctgcaccttcagatcatggcgttggcattgaacctgtatttccggagaacacagaaaactctgaaaaaatatcccttcagcttcatttagctctgacttcaaattcatcttgggttcagtgtcccagccatttggaactcatgaatcaatgtagacacataaacatacgtgtggatcccaggggcttaagagaaggattgcattatacagaggtatgtggctatgatatagcatcccctaacgcaggtccgctcttcagagttccgatcactgcagttatagcagcaaaagtaaatgaatcatcacattatgatctagcctttacagatgtacactttaaacctggtcaaattcgaaggcattttattgaggttcctgagggtgcaacatgggctgaagtgacagtgtgttcgtgttcttctgaggtgtcagcaaagtttgttctacatgcagtccagcttgtgaagcaaagagcatatcgaagccatgaattctataagttttgttctcttccagagaaaggaacactgactgaagcttttcctgtcctaggtggaaaagcaattgaattttgcattgctcgttggtgggcaagtctcagtgatgtcaacattgattataccatttctttccatgggatagtgtgtactgctcctcagttaaacattcatgcatcggaaggaatcaaccgctttgatgttcagtcctccttgaaatacgaagatctggctccctgcataactttgaagaactgggtccaaacactgcgcccagtgagtgcaaaaacaaaacctttaggatcaagagatgttttgccaaataaccgtcaactttatgagatggtcctgacatataactttcatcaacccaagagtggggaagtaactccaagctgcccactactttgtgaactattatatgaatctgaatttgacagccaactgtggattatttttgaccagaacaaaagacagatgggttcaggcgatgcctatccacatcagtattctttgaaactggagaaaggagattatacaattcgactacagattcgccatgagcaaatcagtgatttggaacgccttaaagaccttccatttattgtttctcatagattgtctaataccttgagcttagatattcatgaaaatcatagttttgcacttctagggaagaagaaatcaagcaatttgacattaccacccaaatataaccagccattctttgttacttccttacctgatgataagtaagtgataacattgcttatacttactgcccatcgtatacactgtagtccttttaatgtcagtttatgacatctaggctaaatttagaggatgtagtcattttttttttggctgaagtatttcttcctttgatttttgaagtcttagctatgggaatgaattcagtgtggaattgttttcatgtttttccccttacttgtctttgtgaaactttctcttttgttgctttttttctctttgaattctcttgtttagaatacctaaaggggcaggacctggatgctatcttgcaggatccttaacattgtcaaagactgaactaggaaagaaagctgatgtaatccctgttcattactacttaatacctccaccaacaaagactaagaatggcagcaaagataaggaaaaagattcagaaaaagagaaagatttaaaagaagagtttactgaagcattacgagatcttaaaattcagtggatgacaaagctggattctagtgacatttataacgaattgaaagaaacatatcctaattatcttcctctgtacgttgcacgacttcatcaattggatgctgaaaaggaacgaatgaaaagacttaatgaaattgttgatgcggcaaatgctgttatttctcatatagatcaaacagccctagcagtttatattgcaatgaagactgatcccaggcctgatgcagctactataaaaaatgacatggacaaacaaaaatccaccctcgtagatgccctttgtaggaaaggttgtgccctggcagaccatcttcttcacacccaggctcaagacggagccatttccactgatgcagaaggaaaggaggaggaaggagaaagtcctttggattctctggcagaaacattttgggaaactactaaatggactgatctctttgacaataaggttttgacatttgcatataaacatgcattagtaaataaaatgtatgggagaggccttaaatttgcaactaaacttgtggaagaaaaaccaacaaaagaaaactggaaaaattgtattcaactgatgaagttacttggatggacccattgtgcatcttttactgaaaactggctccccatcatgtatcctcccgattattgcgtattctaaaataggaaacaagactttaaattttaaaaaaggaagttttatagtgaatggatataaaaacaaatttgtggcatttttagtctaatgcatgttttcatccactatccagtactgattattaaaatgacatgtatttatcagagaattcactgacgtgtggcttaatacatgtaaatctagacctctgacatcatggtgttttcttaatgcctcacattgctggcacggggatgtgccctgcctgccagcacctaggacttcgagttgggttgcagcttatgacatgcatgataggttttggaaggtaacttttaactgcaaacctataaagtactattttttattttataaatgaacagggttttaacgtgctcaactttaatttttttcaattgtatgaaggccttaaaaaagctacattaagcgtagctaaaattatttattggactaaaaactaacagaacttcatttccagaatttttttttttttttttttggcaaatgtttacattcaattaaggggaaaaagtagaaccagcacaaatgagtggcagttgctggagcataactgcttcaataaatcttcatcttggggtaattacaggcaagtcattttcacatcctcttgaggttcagagcatcagaatgaactctatgaatacatgtgtaagtgccagacagctgaatctttatcaggtattgtaaagatacacatatgatatgtttattaaaattgaaataatgtaaaacacatgaataaatttgcaaaaccaagatcacagtacaccatatgcactctggtaccttaatttttttttataaataataaaagtgaatattgaagcttcttaaa

SEQ ID NO: 318860 - DNA, 3931 bp, Homo sapiens
gtagcagagtaatgtgtattctttttatcatgattaataatatgcaaattgaattgaataaactttcagtccatgagaatgttttgtcatttccccacctttgtgtctctaggagctcatgggacacatgtagctagtatagctgctggacactttccagaagaacctgaacggaatggggtagctcctggtgctcaaattctttccatcaagattggtgatacaagactaagcacaatggaaacaggcacaggcctcataagagctatgatagaagttataaatcataagtgtgatcttgtcaactacagttacggagaagcaactcactggccaaattctgggagaatttgtgaagtaattaatgaagcagtatggaagcataatataatttatgtttcaagtgctggaaataatggtccatgcctgtctacagttggttgtccaggtggaactacatcaagtgtgataggtgttggtgcttatgtttctcctgatatgatggttgctgagtattcactgagagagaaattacctgcaaatcaatatacttggtcttctagaggacctagtgctgacggggcccttggtgtgagtatcagtgcgccaggaggagccattgcttctgttcctaactggacactgagagggacgcagctgatgaatggaacatctatgtcttcccccaatgcatgtggaggcattgccctgatcctttcaggtctgaaagctaataacattgactacacagttcattcagtcagaagagctctagaaaacactgcagtgaaggctgacaatatagaagtatttgctcaaggacatggtattattcaggttgataaagcctatgactacctcgttcagaatacatcatttgctaataaattaggttttactgttactgttggaaataaccgtggcatctacctccgagatcctgttcaggtggctgcaccttcagatcatggcgttggcattgaacctgtatttccggagaacacagaaaactctgaaaaaatatcccttcagcttcatttagctctgacttcaaattcatcttgggttcagtgtcccagccatttggaactcatgaatcaatgtagacacataaacatacgtgtggatcccaggggcttaagagaaggattgcattatacagaggtatgtggctatgatatagcatcccctaacgcaggtccgctcttcagagttccgatcactgcagttatagcagcaaaagtaaatgaatcatcacattatgatctagcctttacagatgtacactttaaacctggtcaaattcgaaggcattttattgaggttcctgagggtgcaacatgggctgaagtgacagtgtgttcgtgttcttctgaggtgtcagcaaagtttgttctacatgcagtccagcttgtgaagcaaagagcatatcgaagccatgaattctataagttttgttctcttccagagaaaggaacactgactgaagcttttcctgtcctaggtggaaaagcaattgaattttgcattgctcgttggtgggcaagtctcagtgatgtcaacattgattataccatttctttccatgggatagtgtgtactgctcctcagttaaacattcatgcatcggaaggaatcaaccgctttgatgttcagtcctccttgaaatacgaagatctggctccctgcataactttgaagaactgggtccaaacactgcgcccagtgagtgcaaaaacaaaacctttaggatcaagagatgttttgccaaataaccgtcaactttatgagatggtcctgacatataactttcatcaacccaagagtggggaagtaactccaagctgcccactactttgtgaactattatatgaatctgaatttgacagccaactgtggattatttttgaccagaacaaaagacagatgggttcaggcgatgcctatccacatcagtattctttgaaactggagaaaggagattatacaattcgactacagattcgccatgagcaaatcagtgatttggaacgccttaaagaccttccatttattgtttctcatagattgtctaataccttgagcttagatattcatgaaaatcatagttttgcacttctagggaagaagaaatcaagcaatttgacattaccacccaaatataaccagccattctttgttacttccttacctgatgataaaatacctaaaggggcaggacctggatgctatcttgcaggatccttaacattgtcaaagactgaactaggaaagaaagctgatgtaatccctgttcattactacttaatacctccaccaacaaagactaagaatggcagcaaagataaggaaaaagattcagaaaaagagaaagatttaaaagaagagtttactgaagcattacgagatcttaaaattcagtggatgacaaagctggattctagtgacatttataacgaattgaaagaaacatatcctaattatcttcctctgtacgttgcacgacttcatcaattggatgctgaaaaggaacgaatgaaaagacttaatgaaattgttgatgcggcaaatgctgttatttctcatatagatcaaacagccctagcagtttatattgcaatgaagactgatcccaggcctgatgcagctactataaaaaatgacatggacaaacaaaaatccaccctcgtagatgccctttgtaggaaaggttgtgccctggcagaccatcttcttcacacccaggctcaagacggagccatttccactgatgcagaaggaaaggaggaggaaggagaaagtcctttggattctctggcagaaacattttgggaaactactaaatggactgatctctttgacaataaggttttgacatttgcatataaacatgcattagtaaataaaatgtatgggagaggccttaaatttgcaactaaacttgtggaagaaaaaccaacaaaagaaaactggaaaaattgtattcaactgatgaagttacttggatggacccattgtgcatcttttactgaaaactggctccccatcatgtatcctcccgattattgcgtattctaaaataggaaacaagactttaaattttaaaaaaggaagttttatagtgaatggatataaaaacaaatttgtggcatttttagtctaatgcatgttttcatccactatccagtactgattattaaaatgacatgtatttatcagagaattcactgacgtgtggcttaatacatgtaaatctagacctctgacatcatggtgttttcttaatgcctcacattgctggcacggggatgtgccctgcctgccagcacctaggacttcgagttgggttgcagcttatgacatgcatgataggttttggaaggtaacttttaactgcaaacctataaagtactattttttattttataaatgaacagggttttaacgtgctcaactttaatttttttcaattgtatgaaggccttaaaaaagctacattaagcgtagctaaaattatttattggactaaaaactaacagaacttcatttccagaatttttttttttttttttttggcaaatgtttacattcaattaaggggaaaaagtagaaccagcacaaatgagtggcagttgctggagcataactgcttcaataaatcttcatcttggggtaattacaggcaagtcattttcacatcctcttgaggttcagagcatcagaatgaactctatgaatacatgtgtaagtgccagacagctgaatctttatcaggtattgtaaagatacacatatgatatgtttattaaaattgaaataatgtaaaacacatgaataaatttgcaaaaccaagatcacagtacaccatatgcactctggtaccttaatttttttttataaataataaaagtgaatattgaagcttcttaaa

SEQ ID NO: 318861 - DNA, 3372 bp, Homo sapiens
cagctttattaaattgtggataataaaatatcaaatttcttttccactttacctacttaggtataagacagagctttctgttgaagaatgaaaagtagaagcagtctaggagaactgcagctcgattaggtgtgaacaaaaataatcatcgctattatctggctgtcttcatttcagttgaatactatgacctgtgtgcagtaatgaaaacattcacttaaactctttattttaaggtcataccagtgcttggtgaaagtataaatgaatcatgagtaatctaaattgtaaggaagattatttgactgttttatttaagctgtgttttggatgcattttacagccaaccaaaccaagtcgctaaatttttttggaaagatgtaacatttttaaatggaaaaaaggaaaaaaatactcatctttaatttttggtctttttcgtgccagaaaactctgaaaaaatatcccttcagcttcatttagctctgacttcaaattcatcttgggttcagtgtcccagccatttggaactcatgaatcaatgtagacacataaacatacgtgtggatcccaggggcttaagagaaggattgcattatacagaggtatgtggctatgatatagcatcccctaacgcaggtccgctcttcagagttccgatcactgcagttatagcagcaaaagtaaatgaatcatcacattatgatctagcctttacagatgtacactttaaacctggtcaaattcgaaggcattttattgaggttcctgagggtgcaacatgggctgaagtgacagtgtgttcgtgttcttctgaggtgtcagcaaagtttgttctacatgcagtccagcttgtgaagcaaagagcatatcgaagccatgaattctataagttttgttctcttccagagaaaggaacactgactgaagcttttcctgtcctaggtggaaaagcaattgaattttgcattgctcgttggtgggcaagtctcagtgatgtcaacattgattataccatttctttccatgggatagtgtgtactgctcctcagttaaacattcatgcatcggaaggaatcaaccgctttgatgttcagtcctccttgaaatacgaagatctggctccctgcataactttgaagaactgggtccaaacactgcgcccagtgagtgcaaaaacaaaacctttaggatcaagagatgttttgccaaataaccgtcaactttatgagatggtcctgacatataactttcatcaacccaagagtggggaagtaactccaagctgcccactactttgtgaactattatatgaatctgaatttgacagccaactgtggattatttttgaccagaacaaaagacagatgggttcaggcgatgcctatccacatcagtattctttgaaactggagaaaggagattatacaattcgactacagattcgccatgagcaaatcagtgatttggaacgccttaaagaccttccatttattgtttctcatagattgtctaataccttgagcttagatattcatgaaaatcatagttttgcacttctagggaagaagaaatcaagcaatttgacattaccacccaaatataaccagccattctttgttacttccttacctgatgataaaatacctaaaggggcaggacctggatgctatcttgcaggatccttaacattgtcaaagactgaactaggaaagaaagctgatgtaatccctgttcattactacttaatacctccaccaacaaagactaagaatggcagcaaagataaggaaaaagattcagaaaaagagaaagatttaaaagaagagtttactgaagcattacgagatcttaaaattcagtggatgacaaagctggattctagtgacatttataacgaattgaaagaaacatatcctaattatcttcctctgtacgttgcacgacttcatcaattggatgctgaaaaggaacgaatgaaaagacttaatgaaattgttgatgcggcaaatgctgttatttctcatatagatcaaacagccctagcagtttatattgcaatgaagactgatcccaggcctgatgcagctactataaaaaatgacatggacaaacaaaaatccaccctcgtagatgccctttgtaggaaaggttgtgccctggcagaccatcttcttcacacccaggctcaagacggagccatttccactgatgcagaaggaaaggaggaggaaggagaaagtcctttggattctctggcagaaacattttgggaaactactaaatggactgatctctttgacaataaggttttgacatttgcatataaacatgcattagtaaataaaatgtatgggagaggccttaaatttgcaactaaacttgtggaagaaaaaccaacaaaagaaaactggaaaaattgtattcaactgatgaagttacttggatggacccattgtgcatcttttactgaaaactggctccccatcatgtatcctcccgattattgcgtattctaaaataggaaacaagactttaaattttaaaaaaggaagttttatagtgaatggatataaaaacaaatttgtggcatttttagtctaatgcatgttttcatccactatccagtactgattattaaaatgacatgtatttatcagagaattcactgacgtgtggcttaatacatgtaaatctagacctctgacatcatggtgttttcttaatgcctcacattgctggcacggggatgtgccctgcctgccagcacctaggacttcgagttgggttgcagcttatgacatgcatgataggttttggaaggtaacttttaactgcaaacctataaagtactattttttattttataaatgaacagggttttaacgtgctcaactttaatttttttcaattgtatgaaggccttaaaaaagctacattaagcgtagctaaaattatttattggactaaaaactaacagaacttcatttccagaatttttttttttttttttttggcaaatgtttacattcaattaaggggaaaaagtagaaccagcacaaatgagtggcagttgctggagcataactgcttcaataaatcttcatcttggggtaattacaggcaagtcattttcacatcctcttgaggttcagagcatcagaatgaactctatgaatacatgtgtaagtgccagacagctgaatctttatcaggtattgtaaagatacacatatgatatgtttattaaaattgaaataatgtaaaacacatgaataaatttgcaaaaccaagatcacagtacaccatatgcactctggtaccttaatttttttttataaataataaaagtgaatattgaagcttcttaaa

SEQ ID NO: 318862 - DNA, 2047 bp, Homo sapiens
taatttgatggggcttgttcgcacaaagaaggaagagctagcggcagcgactctcttattctccccgctacatattctttgaaactggagaaaggagattatacaattcgactacagattcgccatgagcaaatcagtgatttggaacgccttaaagaccttccatttattgtttctcatagattgtctaataccttgagcttagatattcatgaaaatcatagttttgcacttctagggaagaagaaatcaagcaatttgacattaccacccaaatataaccagccattctttgttacttccttacctgatgataaaatacctaaaggggcaggacctggatgctatcttgcaggatccttaacattgtcaaagactgaactaggaaagaaagctgatgtaatccctgttcattactacttaatacctccaccaacaaagactaagaatggcagcaaagataaggaaaaagattcagaaaaagagaaagatttaaaagaagagtttactgaagcattacgagatcttaaaattcagtggatgacaaagctggattctagtgacatttataacgaattgaaagaaacatatcctaattatcttcctctgtacgttgcacgacttcatcaattggatgctgaaaaggaacgaatgaaaagacttaatgaaattgttgatgcggcaaatgctgttatttctcatatagatcaaacagccctagcagtttatattgcaatgaagactgatcccaggcctgatgcagctactataaaaaatgacatggacaaacaaaaatccaccctcgtagatgccctttgtaggaaaggttgtgccctggcagaccatcttcttcacacccaggctcaagacggagccatttccactgatgcagaaggaaaggaggaggaaggagaaagtcctttggattctctggcagaaacattttgggaaactactaaatggactgatctctttgacaataaggttttgacatttgcatataaacatgcattagtaaataaaatgtatgggagaggccttaaatttgcaactaaacttgtggaagaaaaaccaacaaaagaaaactggaaaaattgtattcaactgatgaagttacttggatggacccattgtgcatcttttactgaaaactggctccccatcatgtatcctcccgattattgcgtattctaaaataggaaacaagactttaaattttaaaaaaggaagttttatagtgaatggatataaaaacaaatttgtggcatttttagtctaatgcatgttttcatccactatccagtactgattattaaaatgacatgtatttatcagagaattcactgacgtgtggcttaatacatgtaaatctagacctctgacatcatggtgttttcttaatgcctcacattgctggcacggggatgtgccctgcctgccagcacctaggacttcgagttgggttgcagcttatgacatgcatgataggttttggaaggtaacttttaactgcaaacctataaagtactattttttattttataaatgaacagggttttaacgtgctcaactttaatttttttcaattgtatgaaggccttaaaaaagctacattaagcgtagctaaaattatttattggactaaaaactaacagaacttcatttccagaatttttttttttttttttttggcaaatgtttacattcaattaaggggaaaaagtagaaccagcacaaatgagtggcagttgctggagcataactgcttcaataaatcttcatcttggggtaattacaggcaagtcattttcacatcctcttgaggttcagagcatcagaatgaactctatgaatacatgtgtaagtgccagacagctgaatctttatcaggtattgtaaagatacacatatgatatgtttattaaaattgaaataatgtaaaacacatgaataaatttgcaaaaccaagatcacagtacaccatatgcactctggtaccttaatttttttttataaataataaaagtgaatattgaagcttcttaaa

SEQ ID NO: 318863 - DNA, 2223 bp, Homo sapiens
acgcgttactccgggcggtgggattctctagagtcgtgctggagtggcttgcctgttaggtagtgggccgctcgttttgcacgtttcgctgattggggacattacctggcacatcgcggggactcagtaagtcctgttggttggactcagtaagtcctgttggttgaatgaaggcataagcgtccccttaaatttacttagagaatcttttcttagtttgaacttatttcatccccttctcagatttaaaatgtgaaaggtcagtgtacttttgtcatctgtctgccaagtaaagccaagaataccaaatatactcaaatggagaaaagtatgttcttatctcttttattttaaaggagatatttgaagtatcagtactcagcatcagtttgtgagaaaattactgtgaccagagattggaatttttggtgtattgtgacccttagaatctagaatacagtgtagtacaacttaggtgcagcccatgttacatgacatgtagctgttgaagatgattttgatgtatgtaaaattaagcatattaatctaagaatctctctccacattcgtaggatgtaatccctgttcattactacttaatacctccaccaacaaagactaagaatggcagcaaagataaggaaaaagattcagaaaaagagaaagatttaaaagaagagtttactgaagcattacgagatcttaaaattcagtggatgacaaagctggattctagtgacatttataacgaattgaaagaaacatatcctaattatcttcctctgtacgttgcacgacttcatcaattggatgctgaaaaggaacgaatgaaaagacttaatgaaattgttgatgcggcaaatgctgttatttctcatatagatcaaacagccctagcagtttatattgcaatgaagactgatcccaggcctgatgcagctactataaaaaatgacatggacaaacaaaaatccaccctcgtagatgccctttgtaggaaaggttgtgccctggcagaccatcttcttcacacccaggctcaagacggagccatttccactgatgcagaaggaaaggaggaggaaggagaaagtcctttggattctctggcagaaacattttgggaaactactaaatggactgatctctttgacaataaggttttgacatttgcatataaacatgcattagtaaataaaatgtatgggagaggccttaaatttgcaactaaacttgtggaagaaaaaccaacaaaagaaaactggaaaaattgtattcaactgatgaagttacttggatggacccattgtgcatcttttactgaaaactggctccccatcatgtatcctcccgattattgcgtattctaaaataggaaacaagactttaaattttaaaaaaggaagttttatagtgaatggatataaaaacaaatttgtggcatttttagtctaatgcatgttttcatccactatccagtactgattattaaaatgacatgtatttatcagagaattcactgacgtgtggcttaatacatgtaaatctagacctctgacatcatggtgttttcttaatgcctcacattgctggcacggggatgtgccctgcctgccagcacctaggacttcgagttgggttgcagcttatgacatgcatgataggttttggaaggtaacttttaactgcaaacctataaagtactattttttattttataaatgaacagggttttaacgtgctcaactttaatttttttcaattgtatgaaggccttaaaaaagctacattaagcgtagctaaaattatttattggactaaaaactaacagaacttcatttccagaatttttttttttttttttttggcaaatgtttacattcaattaaggggaaaaagtagaaccagcacaaatgagtggcagttgctggagcataactgcttcaataaatcttcatcttggggtaattacaggcaagtcattttcacatcctcttgaggttcagagcatcagaatgaactctatgaatacatgtgtaagtgccagacagctgaatctttatcaggtattgtaaagatacacatatgatatgtttattaaaattgaaataatgtaaaacacatgaataaatttgcaaaaccaagatcacagtacaccatatgcactctggtaccttaatttttttttataaataataaaagtgaatattgaagcttcttaaa

SEQ ID NO: 318864 - DNA, 2347 bp, Homo sapiens
tcggctccccctcgttacctgacagtcattctatccttttctgtttgttttcttcctatcagatgtcagcatctggtctgttctttacctattctagcattacctggcacatcgcggggactcagtaagtcctgttggttggactcagtaagtcctgttggttgaatgaaggcataagcgtccccttaaatttacttagagaatcttttcttagtttgaacttatttcatccccttctcagatttaaaatgtgaaaggtcagtgtacttttgtcatctgtctgccaagtaaagccaagaataccaaatatactcaaatggagaaaagtatgttcttatctcttttattttaaaggagatatttgaagtatcagtactcagcatcagtttgtgagaaaattactgtgaccagagattggaatttttggtgtattgtgacccttagaatctagaatacagtgtagtacaacttaggtgcagcccatgttacatgacatgtagctgttgaagatgattttgatgtatgtaaaattaagcatattaatctaagaatctctctccacattcgtaggatgtaatccctgttcattactacttaatacctccaccaacaaagactaagaatggcagcaaagataaggaaaaagattcagaaaaagagaaagatttaaaagaagagtttactgaagcattacgagatcttaaaattcagtggatgacaaagctggattctagtgacatttataacgaattgaaagaaacatatcctaattatcttcctctgtacgttgcacgacttcatcaattggatgctgaaaaggaacgaatgaaaagacttaatgaaattgttgatgcggcaaatgctgttatttctcatatagatcaaacagccctagcagtttatattgcaatgaagactgatcccaggcctgatgcagctactataaaaaagttgccttctgatttctgcatcattccagcccttctctgggcagccaggatccatcaggcagcatttgccgagtctgccctgcagactctggccgagcgacggatgaaaggagtgctcagacacagtgacatggacaaacaaaaatccaccctcgtagatgccctttgtaggaaaggttgtgccctggcagaccatcttcttcacacccaggctcaagacggagccatttccactgatgcagaaggaaaggaggaggaaggagaaagtcctttggattctctggcagaaacattttgggaaactactaaatggactgatctctttgacaataaggttttgacatttgcatataaacatgcattagtaaataaaatgtatgggagaggccttaaatttgcaactaaacttgtggaagaaaaaccaacaaaagaaaactggaaaaattgtattcaactgatgaagttacttggatggacccattgtgcatcttttactgaaaactggctccccatcatgtatcctcccgattattgcgtattctaaaataggaaacaagactttaaattttaaaaaaggaagttttatagtgaatggatataaaaacaaatttgtggcatttttagtctaatgcatgttttcatccactatccagtactgattattaaaatgacatgtatttatcagagaattcactgacgtgtggcttaatacatgtaaatctagacctctgacatcatggtgttttcttaatgcctcacattgctggcacggggatgtgccctgcctgccagcacctaggacttcgagttgggttgcagcttatgacatgcatgataggttttggaaggtaacttttaactgcaaacctataaagtactattttttattttataaatgaacagggttttaacgtgctcaactttaatttttttcaattgtatgaaggccttaaaaaagctacattaagcgtagctaaaattatttattggactaaaaactaacagaacttcatttccagaatttttttttttttttttttggcaaatgtttacattcaattaaggggaaaaagtagaaccagcacaaatgagtggcagttgctggagcataactgcttcaataaatcttcatcttggggtaattacaggcaagtcattttcacatcctcttgaggttcagagcatcagaatgaactctatgaatacatgtgtaagtgccagacagctgaatctttatcaggtattgtaaagatacacatatgatatgtttattaaaattgaaataatgtaaaacacatgaataaatttgcaaaaccaagatcacagtacaccatatgcactctggtaccttaatttttttttataaataataaaagtgaatattgaagcttcttaaa

SEQ ID NO: 318865 - DNA, 1717 bp, Homo sapiens
agagtaaagcattacatttatttgtcctagtcatgaactgaaagttttaagacataacctctgggtatacacatagacaaatgtgtaatgattactatttataagaaaactgaaaactcaaaagtcgtttacctgattaagagttatatagctaaaaaaatttagaatagtgattaacctttcaactctgttgcttctggcattccgtttcaaccaggtgcagctaccctaactcatttaatctatatgtgtaatatagtagctcatttgatgtttattaataaggcatcatatttgatgtacaatacaattgtacgtacctggatatacagtatttctgcattataaatcttaggcaaaagaatacatgaatttaaattcagataagaatttacttttaaagacattttactgatatctgaaatattttttaatttgctgtacagtgacatggacaaacaaaaatccaccctcgtagatgccctttgtaggaaaggttgtgccctggcagaccatcttcttcacacccaggctcaagacggagccatttccactgatgcagaaggaaaggaggaggaaggagaaagtcctttggattctctggcagaaacattttgggaaactactaaatggactgatctctttgacaataaggttttgacatttgcatataaacatgcattagtaaataaaatgtatgggagaggccttaaatttgcaactaaacttgtggaagaaaaaccaacaaaagaaaactggaaaaattgtattcaactgatgaagttacttggatggacccattgtgcatcttttactgaaaactggctccccatcatgtatcctcccgattattgcgtattctaaaataggaaacaagactttaaattttaaaaaaggaagttttatagtgaatggatataaaaacaaatttgtggcatttttagtctaatgcatgttttcatccactatccagtactgattattaaaatgacatgtatttatcagagaattcactgacgtgtggcttaatacatgtaaatctagacctctgacatcatggtgttttcttaatgcctcacattgctggcacggggatgtgccctgcctgccagcacctaggacttcgagttgggttgcagcttatgacatgcatgataggttttggaaggtaacttttaactgcaaacctataaagtactattttttattttataaatgaacagggttttaacgtgctcaactttaatttttttcaattgtatgaaggccttaaaaaagctacattaagcgtagctaaaattatttattggactaaaaactaacagaacttcatttccagaatttttttttttttttttttggcaaatgtttacattcaattaaggggaaaaagtagaaccagcacaaatgagtggcagttgctggagcataactgcttcaataaatcttcatcttggggtaattacaggcaagtcattttcacatcctcttgaggttcagagcatcagaatgaactctatgaatacatgtgtaagtgccagacagctgaatctttatcaggtattgtaaagatacacatatgatatgtttattaaaattgaaataatgtaaaacacatgaataaatttgcaaaaccaagatcacagtacaccatatgcactctggtaccttaatttttttttataaataataaaagtgaatattgaagcttcttaaa

SEQ ID NO: 318866 - DNA, 1332 bp, Homo sapiens
  misc_feature (28)..(28): n is a, c, g, or t
  misc_feature (31)..(31): n is a, c, g, or t
  misc_feature (37)..(37): n is a, c, g, or t
atattcgtcgtgactgggtacgacctgncgntgatcnggcctgatgcagtactataaaaaatgacatggacaaacaaaaatccaccctcgtagatgccctttgtaggaaaggttgtgccctggcagaccatcttcttcacacccaggctcaagacggagccatttccactgatgcagaaggaaaggaggaggaaggagaaagtcctttggattctctggcagaaacattttgggaaactactaaatggactgatctctttgacaataaggttttgacatttgcatataaacatgcattagtaaataaaatgtatgggagaggccttaaatttgcaactaaacttgtggaagaaaaaccaacaaaagaaaactggaaaaattgtattcaactgatgaagttacttggatggacccattgtgcatcttttactgaaaactggctccccatcatgtatcctcccgattattgcgtattctaaaataggaaacaagactttaaattttaaaaaaggaagttttatagtgaatggatataaaaacaaatttgtggcatttttagtctaatgcatgttttcatccactatccagtactgattattaaaatgacatgtatttatcagagaattcactgacgtgtggcttaatacatgtaaatctagacctctgacatcatggtgttttcttaatgcctcacattgctggcacggggatgtgccctgcctgccagcacctaggacttcgagttgggttgcagcttatgacatgcatgataggttttggaaggtaacttttaactgcaaacctataaagtactattttttattttataaatgaacagggttttaacgtgctcaactttaatttttttcaattgtatgaaggccttaaaaaagctacattaagcgtagctaaaattatttattggactaaaaactaacagaacttcatttccagaatttttttttttttttttttggcaaatgtttacattcaattaaggggaaaaagtagaaccagcacaaatgagtggcagttgctggagcataactgcttcaataaatcttcatcttggggtaattacaggcaagtcattttcacatcctcttgaggttcagagcatcagaatgaactctatgaatacatgtgtaagtgccagacagctgaatctttatcaggtattgtaaagatacacatatgatatgtttattaaaattgaaataatgtaaaacacatgaataaatttgcaaaaccaagatcacagtacaccatatgcactctggtaccttaatttttttttataaataataaaagtgaatattgaagcttcttaaa

SEQ ID NO: 318867 - DNA, 3469 bp, Homo sapiens
ccctcgcccccgcctccggcccgaggccgcacgggtgtcctcgcgctgctagtccgcgcgcagcctggcagtttgccgcttcctcgtcctccatcctgcgtccatggccaccgctgcgactgaggagcccttcccttttcacggtctcctgccgaagaaggagaccggagccgcctccttcctctgccgctacccggagtatgatgggcggggggtgctcatcgcagtcctggacacgggggtcgacccgggggctccgggcatgcaggttacaactgatggaaaaccaaaaatcgttgatatcattgatacaacaggaagtggcgatgtgaatactgctacagaagtagagccaaaggatggtgagattgttggcctttcaggaagagtgcttaagattcctgcaagctggacaaatccctcaggcaaatatcatattggcataaaaaatggctatgacttctatcctaaggcactcaaggaaaggatacagaaagaacggaaggaaaaaatctgggaccctgttcacagagtggcccttgcagaagcctgtagaaaacaggaagaatttgatgttgccaacaacggctcttctcaagcaaataaactaatcaaggaggaacttcaaagtcaagtggaattgctaaattcttttgagaagaaatacagcgatcctggccctgtatatgactgcttggtatggcatgatggcgaagtctggagagcctgcattgattctaatgaagatggggacttgagtaaatctaccgtgttgagaaactacaaagaagcccaagaatatggctcttttggcacagctgagatgttgaattactccgttaatatatacgatgatggaaacctgctctccattgtgaccagtggaggagctcatgggacacatgtagctagtatagctgctggacactttccagaagaacctgaacggaatggggtagctcctggtgctcaaattctttccatcaagattggtgatacaagactaagcacaatggaaacaggcacaggcctcataagagctatgatagaagttataaatcataagtgtgatcttgtcaactacagttacggagaagcaactcactggccaaattctgggagaatttgtgaagtaattaatgaagcagtatggaagcataatataatttatgtttcaagtgctggaaataatggtccatgcctgtctacagttggttgtccaggtggaactacatcaagtgtgataggtgttggtgcttatgtttctcctgatatgatggttgctgagtattcactgagagagaaattacctgcaaatcaatatacttggtcttctagaggacctagtgctgacggggcccttggtgtgagtatcagtgcgccaggaggagccattgcttctgttcctaactggacactgagagggacgcagctgatgaatggaacatctatgtcttcccccaatgcatgtggaggcattgccctgatcctttcaggtctgaaagctaataacattgactacacagttcattcagtcagaagagctctagaaaacactgcagtgaaggctgacaatatagaagtatttgctcaaggacatggtattattcaggttgataaagcctatgactacctcgttcagaatacatcatttgctaataaattaggttttactgttactgttggaaataaccgtggcatctacctccgagatcctgttcaggtggctgcaccttcagatcatggcgttggcattgaacctgtatttccggagaacacagaaaactctgaaaaaatatcccttcagcttcatttagctctgacttcaaattcatcttgggttcagtgtcccagccatttggaactcatgaatcaatgtagacacataaacatacgtgtggatcccaggggcttaagagaaggattgcattatacagaggtatgtggctatgatatagcatcccctaacgcaggtccgctcttcagagttccgatcactgcagttatagcagcaaaagtaaatgaatcatcacattatgatctagcctttacagatgtacactttaaacctggtcaaattcgaaggcattttattgaggttcctgagggtgcaacatgggctgaagtgacagtgtgttcgtgttcttctgaggtgtcagcaaagtttgttctacatgcagtccagcttgtgaagcaaagagcatatcgaagccatgaattctataagttttgttctcttccagagaaaggaacactgactgaagcttttcctgtcctaggtggaaaagcaattgaattttgcattgctcgttggtgggcaagtctcagtgatgtcaacattgattataccatttctttccatgggatagtgtgtactgctcctcagttaaacattcatgcatcggaaggaatcaaccgctttgatgttcagtcctccttgaaatacgaagatctggctccctgcataactttgaagaactgggtccaaacactgcgcccagtgagtgcaaaaacaaaacctttaggatcaagagatgttttgccaaataaccgtcaactttatgagatggtcctgacatataactttcatcaacccaagagtggggaagtaactccaagctgcccactactttgtgaactattatatgaatctgaatttgacagccaactgtggattatttttgaccagaacaaaagacagatgggttcaggcgatgcctatccacatcagtattctttgaaactggagaaaggagattatacaattcgactacagattcgccatgagcaaatcagtgatttggaacgccttaaagaccttccatttattgtttctcatagattgtctaataccttgagcttagatattcatgaaaatcatagttttgcacttctagggaagaagaaatcaagcaatttgacattaccacccaaatataaccagccattctttgttacttccttacctgatgataaaatacctaaaggggcaggacctggatgctatcttgcaggatccttaacattgtcaaagactgaactaggaaagaaagctgatgtaatccctgttcattactacttaatacctccaccaacaaagactaagaatggcagcaaagataaggaaaaagattcagaaaaagagaaagatttaaaagaagagtttactgaagcattacgagatcttaaaattcagtggatgacaaagtaggtttttaaatgtattttaattctttaaatgtttagttctattttcccaactataacaatattgtgtatatatacatagaccgtatttaaaattattaacagcagttggtaggattataggtgcttttaaattttcctctttttatataaatgtgtaatttatttaaattataaatatataattttgtgattaaatgttttaatttttattttaatcactctaatttgttcttggaagataattttattggaaagtata

SEQ ID NO: 318868 - DNA, 385 bp, Homo sapiens
ttttactgatatctgaaatattttttaatttgctgtacagtgacatggacaaacaaaaatccaccctcgtagatgccctttgtaggaaaggttgtgccctggcagaccatcttcttcacacccaggctcaagacggagccatttccactgatgcagaaggaaaggaggaggaaggagaaagtcctttggattctctggcagaaacattttgggaaactactaaatggactgatctctttgacaataaggtaacgtttctgcttcttgtttcagcaaagttcttggggttacctcacagacctctcttgtgccccattgctggttaaaagaggaagaagataaatggaaagaatctacgctgggctctgaatatgacatgtttagc

SEQ ID NO: 318869 - DNA, 4706 bp, Homo sapiens
ccctcgcccccgcctccggcccgaggccgcacgggtgtcctcgcgctgctagtccgcgcgcagcctggcagtttgccgcttcctcgtcctccatcctgcgtccatggccaccgctgcgactgaggagcccttcccttttcacggtctcctgccgaagaaggagaccggagccgcctccttcctctgccgctacccggagtatgatgggcggggggtgctcatcgcagtcctggacacgggggtcgacccgggggctccgggcatgcaggttacaactgatggaaaaccaaaaatcgttgatatcattgatacaacaggaagtggcgatgtgaatactgctacagaagtagagccaaaggatggtgagattgttggcctttcaggaagagtgcttaagattcctgcaagctggacaaatccctcaggcaaatatcatattggcataaaaaatggctatgacttctatcctaaggcactcaaggaaaggatacagaaagaacggaaggaaaaaatctgggaccctgttcacagagtggcccttgcagaagcctgtagaaaacaggaagaatttgatgttgccaacaacggctcttctcaagcaaataaactaatcaaggaggaacttcaaagtcaagtggaattgctaaattcttttgagaagaaatacagcgatcctggccctgtatatgactgcttggtatggcatgatggcgaagtctggagagcctgcattgattctaatgaagatggggacttgagtaaatctaccgtgttgagaaactacaaagaagcccaagaatatggctcttttggcacagctgagatgttgaattactccgttaatatatacgatgatggaaacctgctctccattgtgaccagtggaggagctcatgggacacatgtagctagtatagctgctggacactttccagaagaacctgaacggaatggggtagctcctggtgctcaaattctttccatcaagattggtgatacaagactaagcacaatggaaacaggcacaggcctcataagagctatgatagaagttataaatcataagtgtgatcttgtcaactacagttacggagaagcaactcactggccaaattctgggagaatttgtgaagtaattaatgaagcagtatggaagcataatataatttatgtttcaagtgctggaaataatggtccatgcctgtctacagttggttgtccaggtggaactacatcaagtgtgataggtgttggtgcttatgtttctcctgatatgatggttgctgagtattcactgagagagaaattacctgcaaatcaatatacttggtcttctagaggacctagtgctgacggggcccttggtgtgagtatcagtgcgccaggaggagccattgcttctgttcctaactggacactgagagggacgcagctgatgaatggaacatctatgtcttcccccaatgcatgtggaggcattgccctgatcctttcaggtctgaaagctaataacattgactacacagttcattcagtcagaagagctctagaaaacactgcagtgaaggctgacaatatagaagtatttgctcaaggacatggtattattcaggttgataaagcctatgactacctcgttcagaatacatcatttgctaataaattaggttttactgttactgttggaaataaccgtggcatctacctccgagatcctgttcaggtggctgcaccttcagatcatggcgttggcattgaacctgtatttccggagaacacagaaaactctgaaaaaatatcccttcagcttcatttagctctgacttcaaattcatcttgggttcagtgtcccagccatttggaactcatgaatcaatgtagacacataaacatacgtgtggatcccaggggcttaagagaaggattgcattatacagaggtatgtggctatgatatagcatcccctaacgcaggtccgctcttcagagttccgatcactgcagttatagcagcaaaagtaaatgaatcatcacattatgatctagcctttacagatgtacactttaaacctggtcaaattcgaaggcattttattgaggttcctgagggtgcaacatgggctgaagtgacagtgtgttcgtgttcttctgaggtgtcagcaaagtttgttctacatgcagtccagcttgtgaagcaaagagcatatcgaagccatgaattctataagttttgttctcttccagagaaaggaacactgactgaagcttttcctgtcctaggtggaaaagcaattgaattttgcattgctcgttggtgggcaagtctcagtgatgtcaacattgattataccatttctttccatgggatagtgtgtactgctcctcagttaaacattcatgcatcggaaggaatcaaccgctttgatgttcagtcctccttgaaatacgaagatctggctccctgcataactttgaagaactgggtccaaacactgcgcccagtgagtgcaaaaacaaaacctttaggatcaagagatgttttgccaaataaccgtcaactttatgagatggtcctgacatataactttcatcaacccaagagtggggaagtaactccaagctgcccactactttgtgaactattatatgaatctgaatttgacagccaactgtggattatttttgaccagaacaaaagacagatgggttcaggcgatgcctatccacatcagtattctttgaaactggagaaaggagattatacaattcgactacagattcgccatgagcaaatcagtgatttggaacgccttaaagaccttccatttattgtttctcatagattgtctaataccttgagcttagatattcatgaaaatcatagttttgcacttctagggaagaagaaatcaagcaatttgacattaccacccaaatataaccagccattctttgttacttccttacctgatgataaaatacctaaaggggcaggacctggatgctatcttgcaggatccttaacattgtcaaagactgaactaggaaagaaagctgatgtaatccctgttcattactacttaatacctccaccaacaaagactaagaatggcagcaaagataaggaaaaagattcagaaaaagagaaagatttaaaagaagagtttactgaagcattacgagatcttaaaattcagtggatgacaaagctggattctagtgacatttataacgaattgaaagaaacatatcctaattatcttcctctgtacgttgcacgacttcatcaattggatgctgaaaaggaacgaatgaaaagacttaatgaaattgttgatgcggcaaatgctgttatttctcatatagatcaaacagccctagcagtttatattgcaatgaagactgatcccaggcctgatgcagctactataaaaaatgacatggacaaacaaaaatccaccctcgtagatgccctttgtaggaaaggttgtgccctggcagaccatcttcttcacacccaggctcaagacggagccatttccactgatgcagaaggaaaggaggaggaaggagaaagtcctttggattctctggcagaaacattttgggaaactactaaatggactgatctctttgacaataaggttttgacatttgcatataaacatgcattagtaaataaaatgtatgggagaggccttaaatttgcaactaaacttgtggaagaaaaaccaacaaaagaaaactggaaaaattgtattcaactgatgaagttacttggatggacccattgtgcatcttttactgaaaactggctccccatcatgtatcctcccgattattgcgtattctaaaataggaaacaagactttaaattttaaaaaaggaagttttatagtgaatggatataaaaacaaatttgtggcatttttagtctaatgcatgttttcatccactatccagtactgattattaaaatgacatgtatttatcagagaattcactgacgtgtggcttaatacatgtaaatctagacctctgacatcatggtgttttcttaatgcctcacattgctggcacggggatgtgccctgcctgccagcacctaggacttcgagttgggttgcagcttatgacatgcatgataggttttggaaggtaacttttaactgcaaacctataaagtactattttttattttataaatgaacagggttttaacgtgctcaactttaatttttttcaattgtatgaaggccttaaaaaagctacattaagcgtagctaaaattatttattggactaaaaactaacagaacttcatttccagaatttttttttttttttttttggcaaatgtttacattcaattaaggggaaaaagtagaaccagcacaaatgagtggcagttgctggagcataactgcttcaataaatcttcatcttggggtaattacaggcaagtcattttcacatcctcttgaggttcagagcatcagaatgaactctatgaatacatgtgtaagtgccagacagctgaatctttatcaggtattgtaaagatacacatatgatatgtttattaaaattgaaataatgtaaaacacatgaataaatttgcaaaaccaagatcacagtacaccatatgcactctggtaccttaatttttttttataaataataaaagtgaatattgaagcttcttaaa

SEQ ID NO: 318870 - DNA, 4961 bp, Homo sapiens
ccctcgcccccgcctccggcccgaggccgcacgggtgtcctcgcgctgctagtccgcgcgcagcctggcagtttgccgcttcctcgtcctccatcctgcgtccatggccaccgctgcgactgaggagcccttcccttttcacggtctcctgccgaagaaggagaccggagccgcctccttcctctgccgctacccggagtatgatgggcggggggtgctcatcgcagtcctggacacgggggtcgacccgggggctccgggcatgcaggttacaactgatggaaaaccaaaaatcgttgatatcattgatacaacaggaagtggcgatgtgaatactgctacagaagtagagccaaaggatggtgagattgttggcctttcaggaagagtgcttaagattcctgcaagctggacaaatccctcaggcaaatatcatattggcataaaaaatggctatgacttctatcctaaggcactcaaggaaaggatacagaaagaacggaaggaaaaaatctgggaccctgttcacagagtggcccttgcagaagcctgtagaaaacaggaagaatttgatgttgccaacaacggctcttctcaagcaaataaactaatcaaggaggaacttcaaagtcaagtggaattgctaaattcttttgagaagaaatacagcgatcctggccctgtatatgactgcttggtatggcatgatggcgaagtctggagagcctgcattgattctaatgaagatggggacttgagtaaatctaccgtgttgagaaactacaaagaagcccaagaatatggctcttttggcacagctgagatgttgaattactccgttaatatatacgatgatggaaacctgctctccattgtgaccagtggaggagctcatgggacacatgtagctagtatagctgctggacactttccagaagaacctgaacggaatggggtagctcctggtgctcaaattctttccatcaagattggtgatacaagactaagcacaatggaaacaggcacaggcctcataagagctatgatagaagttataaatcataagtgtgatcttgtcaactacagttacggagaagcaactcactggccaaattctgggagaatttgtgaagtaattaatgaagcagtatggaagcataatataatttatgtttcaagtgctggaaataatggtccatgcctgtctacagttggttgtccaggtggaactacatcaagtgtgataggtgttggtgcttatgtttctcctgatatgatggttgctgagtattcactgagagagaaattacctgcaaatcaatatacttggtcttctagaggacctagtgctgacggggcccttggtgtgagtatcagtgcgccaggaggagccattgcttctgttcctaactggacactgagagggacgcagctgatgaatggaacatctatgtcttcccccaatgcatgtggaggcattgccctgatcctttcaggtctgaaagctaataacattgactacacagttcattcagtcagaagagctctagaaaacactgcagtgaaggctgacaatatagaagtatttgctcaaggacatggtattattcaggttgataaagcctatgactacctcgttcagaatacatcatttgctaataaattaggttttactgttactgttggaaataaccgtggcatctacctccgagatcctgttcaggtggctgcaccttcagatcatggcgttggcattgaacctgtatttccggagaacacagaaaactctgaaaaaatatcccttcagcttcatttagctctgacttcaaattcatcttgggttcagtgtcccagccatttggaactcatgaatcaatgtagacacataaacatacgtgtggatcccaggggcttaagagaaggattgcattatacagaggtatgtggctatgatatagcatcccctaacgcaggtccgctcttcagagttccgatcactgcagttatagcagcaaaagtaaatgaatcatcacattatgatctagcctttacagatgtacactttaaacctggtcaaattcgaaggcattttattgaggttcctgagggtgcaacatgggctgaagtgacagtgtgttcgtgttcttctgaggtgtcagcaaagtttgttctacatgcagtccagcttgtgaagcaaagagcatatcgaagccatgaattctataagttttgttctcttccagagaaaggaacactgactgaagcttttcctgtcctaggtggaaaagcaattgaattttgcattgctcgttggtgggcaagtctcagtgatgtcaacattgattataccatttctttccatgggatagtgtgtactgctcctcagttaaacattcatgcatcggaaggaatcaaccgctttgatgttcagtcctccttgaaatacgaagatctggctccctgcataactttgaagaactgggtccaaacactgcgcccagtgagtgcaaaaacaaaacctttaggatcaagagatgttttgccaaataaccgtcaactttatgagatggtcctgacatataactttcatcaacccaagagtggggaagtaactccaagctgcccactactttgtgaactattatatgaatctgaatttgacagccaactgtggattatttttgaccagaacaaaagacagatgggttcaggcgatgcctatccacatcagtattctttgaaactggagaaaggagattatacaattcgactacagattcgccatgagcaaatcagtgatttggaacgccttaaagaccttccatttattgtttctcatagattgtctaataccttgagcttagatattcatgaaaatcatagttttgcacttctagggaagaagaaatcaagcaatttgacattaccacccaaatataaccagccattctttgttacttccttacctgatgataaaatacctaaaggggcaggacctggatgctatcttgcaggatccttaacattgtcaaagactgaactaggaaagaaagctgatgtaatccctgttcattactacttaatacctccaccaacaaagactaagaatggcagcaaagataaggaaaaagattcagaaaaagagaaagatttaaaagaagagtttactgaagcattacgagatcttaaaattcagtggatgacaaagctggattctagtgacatttataacgaattgaaagaaacatatcctaattatcttcctctgtacgttgcacgacttcatcaattggatgctgaaaaggaacgaatgaaaagacttaatgaaattgttgatgcggcaaatgctgttatttctcatatagatcaaacagccctagcagtttatattgcaatgaagactgatcccaggcctgatgcagctactataaaaaatgacatggacaaacaaaaatccaccctcgtagatgccctttgtaggaaaggttgtgccctggcagaccatcttcttcacacccaggctcaagacggagccatttccactgatgcagaaggaaaggaggaggaaggagaaagtcctttggattctctggcagaaacattttgggaaactactaaatggactgatctctttgacaataaggttttgacatttgcatataaacatgcattagtaaataaaatgtatgggagaggccttaaatttgcaactaaacttgtggaagaaaaaccaacaaaagaaaactggaaaaattgtattcaactgatgaagttacttggatggacccattgtgcatcttttactgaaaactggctccccatcatgtatcctcccgattattgcgtattctaaaataggaaacaagactttaaattttaaaaaaggaagttttatagtgaatggatataaaaacaaatttgtggcatttttagtctaatgcatgttttcatccactatccagtactgattattaaaatgacatgtatttatcagagaattcactgacgtgtggcttaatacatgtaaatctagacctctgacatcatggtgttttcttaatgcctcacattgctggcacggggatgtgccctgcctgccagcacctaggacttcgagttgggttgcagcttatgacatgcatgataggttttggaaggtaacttttaactgcaaacctataaagtactattttttattttataaatgaacagggttttaacgtgctcaactttaatttttttcaattgtatgaaggccttaaaaaagctacattaagcgtagctaaaattatttattggactaaaaactaacagaacttcatttccagaatttttttttttttttttttggcaaatgtttacattcaattaaggggaaaaagtagaaccagcacaaatgagtggcagttgctggagcataactgcttcaataaatcttcatcttggggtaattacaggcaagtcattttcacatcctcttgaggttcagagcatcagaatgaactctatgaatacatgtgtaagtgccagacagctgaatctttatcaggtattgtaaagatacacatatgatatgtttattaaaattgaaataatgtaaaacacatgaataaatttgcaaaaccaagatcacagtacaccatatgcactctggtaccttaatttttttttataaataataaaagtgaatattgaagcttcttaaagttggtcttaatttttcataaataaaatttggggttataacagaaataatacattaaatacatagacaaaaaaagttaaacataagataatctattttacagtgtttcttataggcttacaattatttgaatgtatttccagttcttgtatgattaacttttgtgcatatctaactttttattatttttatctttggctactgcacgtgcatctctcgtcattcctccaccaaataaacagacaaaagtagtatt

SEQ ID NO: 318871 - DNA, 4627 bp, Homo sapiens
ccctcgcccccgcctccggcccgaggccgcacgggtgtcctcgcgctgctagtccgcgcgcagcctggcagtttgccgcttcctcgtcctccatcctgcgtccatggccaccgctgcgactgaggagcccttcccttttcacggtctcctgccgaagaaggagaccggagccgcctccttcctctgccgctacccggagtatgatgggcggggggtgctcatcgcagtcctggacacgggggtcgacccgggggctccgggcatgcaggttacaactgatggaaaaccaaaaatcgttgatatcattgatacaacaggaagtggcgatgtgaatactgctacagaagtagagccaaaggatggtgagattgttggcctttcaggaagagtgcttaagattcctgcaagctggacaaatccctcaggcaaatatcatattggcataaaaaatggctatgacttctatcctaaggcactcaaggaaaggatacagaaagaacggaaggaaaaaatctgggaccctgttcacagagtggcccttgcagaagcctgtagaaaacaggaagaatttgatgttgccaacaacggctcttctcaagcaaataaactaatcaaggaggaacttcaaagtcaagtggaattgctaaattcttttgagaagaaatacagcgatcctggccctgtatatgactgcttggtatggcatgatggcgaagtctggagagcctgcattgattctaatgaagatggggacttgagtaaatctaccgtgttgagaaactacaaagaagcccaagaatatggctcttttggcacagctgagatgttgaattactccgttaatatatacgatgatggaaacctgctctccattgtgaccagtggaggagctcatgggacacatgtagctagtatagctgctggacactttccagaagaacctgaacggaatggggtagctcctggtgctcaaattctttccatcaagattggtgatacaagactaagcacaatggaaacaggcacaggcctcataagagctatgatagaagttataaatcataagtgtgatcttgtcaactacagttacggagaagcaactcactggccaaattctgggagaatttgtgaagtaattaatgaagcagtatggaagcataatataatttatgtttcaagtgctggaaataatggtccatgcctgtctacagttggttgtccaggtggaactacatcaagtgtgataggtgttggtgcttatgtttctcctgatatgatggttgctgagtattcactgagagagaaattacctgcaaatcaatatacttggtcttctagaggacctagtgctgacggggcccttggtgtgagtatcagtgcgccaggaggagccattgcttctgttcctaactggacactgagagggacgcagctgatgaatggaacatctatgtcttcccccaatgcatgtggaggcattgccctgatcctttcaggtctgaaagctaataacattgactacacagttcattcagtcagaagagctctagaaaacactgcagtgaaggctgacaatatagaagtatttgctcaaggacatggtattattcaggttgataaagcctatgactacctcgttcagaatacatcatttgctaataaattaggttttactgttactgttggaaataaccgtggcatctacctccgagatcctgttcaggtggctgcaccttcagatcatggcgttggcattgaacctgtatttccggagaacacagaaaactctgaaaaaatatcccttcagcttcatttagctctgacttcaaattcatcttgggttcagtgtcccagccatttggaactcatgaatcaatgtagacacataaacatacgtgtggatcccaggggcttaagagaaggattgcattatacagaggtatgtggctatgatatagcatcccctaacgcaggtccgctcttcagagttccgatcactgcagttatagcagcaaaagtaaatgaatcatcacattatgatctagcctttacagatgtacactttaaacctggtcaaattcgaaggcattttattgaggttcctgagggtgcaacatgggctgaagtgacagtgtgttcgtgttcttctgaggtgtcagcaaagtttgttctacatgcagtccagcttgtgaagcaaagagcatatcgaagccatgaattctataagttttgttctcttccagagaaaggaacactgactgaagcttttcctgtcctaggtggaaaagcaattgaattttgcattgctcgttggtgggcaagtctcagtgatgtcaacattgattataccatttctttccatgggatagtgtgtactgctcctcagttaaacattcatgcatcggaaggaatcaaccgctttgatgttcagtcctccttgaaatacgaagatctggctccctgcataactttgaagaactgggtccaaacactgcgcccagtgagtgcaaaaacaaaacctttaggatcaagagatgttttgccaaataaccgtcaactttatgagatggtcctgacatataactttcatcaacccaagagtggggaagtaactccaagctgcccactactttgtgaactattatatgaatctgaatttgacagccaactgtggattatttttgaccagaacaaaagacagatgggttcaggcgatgcctatccacatcagtattctttgaaactggagaaaggagattatacaattcgactacagattcgccatgagcaaatcagtgatttggaacgccttaaagaccttccatttattgtttctcatagattgtctaataccttgagcttagatattcatgaaaatcatagttttgcacttctagggaagaagaaatcaagcaatttgacattaccacccaaatataaccagccattctttgttacttccttacctgatgataagatgtaatccctgttcattactacttaatacctccaccaacaaagactaagaatggcagcaaagataaggaaaaagattcagaaaaagagaaagatttaaaagaagagtttactgaagcattacgagatcttaaaattcagtggatgacaaagctggattctagtgacatttataacgaattgaaagaaacatatcctaattatcttcctctgtacgttgcacgacttcatcaattggatgctgaaaaggaacgaatgaaaagacttaatgaaattgttgatgcggcaaatgctgttatttctcatatagatcaaacagccctagcagtttatattgcaatgaagactgatcccaggcctgatgcagctactataaaaaatgacatggacaaacaaaaatccaccctcgtagatgccctttgtaggaaaggttgtgccctggcagaccatcttcttcacacccaggctcaagacggagccatttccactgatgcagaaggaaaggaggaggaaggagaaagtcctttggattctctggcagaaacattttgggaaactactaaatggactgatctctttgacaataaggttttgacatttgcatataaacatgcattagtaaataaaatgtatgggagaggccttaaatttgcaactaaacttgtggaagaaaaaccaacaaaagaaaactggaaaaattgtattcaactgatgaagttacttggatggacccattgtgcatcttttactgaaaactggctccccatcatgtatcctcccgattattgcgtattctaaaataggaaacaagactttaaattttaaaaaaggaagttttatagtgaatggatataaaaacaaatttgtggcatttttagtctaatgcatgttttcatccactatccagtactgattattaaaatgacatgtatttatcagagaattcactgacgtgtggcttaatacatgtaaatctagacctctgacatcatggtgttttcttaatgcctcacattgctggcacggggatgtgccctgcctgccagcacctaggacttcgagttgggttgcagcttatgacatgcatgataggttttggaaggtaacttttaactgcaaacctataaagtactattttttattttataaatgaacagggttttaacgtgctcaactttaatttttttcaattgtatgaaggccttaaaaaagctacattaagcgtagctaaaattatttattggactaaaaactaacagaacttcatttccagaatttttttttttttttttttggcaaatgtttacattcaattaaggggaaaaagtagaaccagcacaaatgagtggcagttgctggagcataactgcttcaataaatcttcatcttggggtaattacaggcaagtcattttcacatcctcttgaggttcagagcatcagaatgaactctatgaatacatgtgtaagtgccagacagctgaatctttatcaggtattgtaaagatacacatatgatatgtttattaaaattgaaataatgtaaaacacatgaataaatttgcaaaaccaagatcacagtacaccatatgcactctggtaccttaatttttttttataaataataaaagtgaatattgaagcttcttaaa

SEQ ID NO: 318872 - DNA, 4375 bp, Homo sapiens
ccctcgcccccgcctccggcccgaggccgcacgggtgtcctcgcgctgctagtccgcgcgcagcctggcagtttgccgcttcctcgtcctccatcctgcgtccatggccaccgctgcgactgaggagcccttcccttttcacggtctcctgccgaagaaggagaccggagccgcctccttcctctgccgctacccggagtatgatgggcggggggtgctcatcgcagtcctggacacgggggtcgacccgggggctccgggcatgcaggttacaactgatggaaaaccaaaaatcgttgatatcattgatacaacaggaagtggcgatgtgaatactgctacagaagtagagccaaaggatggtgagattgttggcctttcaggaagagtgcttaagattcctgcaagctggacaaatccctcaggcaaatatcatattggcataaaaaatggctatgacttctatcctaaggcactcaaggaaaggatacagaaagaacggaaggaaaaaatctgggaccctgttcacagagtggcccttgcagaagcctgtagaaaacaggaagaatttgatgttgccaacaacggctcttctcaagcaaataaactaatcaaggaggaacttcaaagtcaagtggaattgctaaattcttttgagaagaaatacagcgatcctggccctgtatatgactgcttggtatggcatgatggcgaagtctggagagcctgcattgattctaatgaagatggggacttgagtaaatctaccgtgttgagaaactacaaagaagcccaagaatatggctcttttggcacagctgagatgttgaattactccgttaatatatacgatgatggaaacctgctctccattgtgaccagtggaggagctcatgggacacatgtagctagtatagctgctggacactttccagaagaacctgaacggaatggggtagctcctggtgctcaaattctttccatcaagattggtgatacaagactaagcacaatggaaacaggcacaggcctcataagagctatgatagaagttataaatcataagtgtgatcttgtcaactacagttacggagaagcaactcactggccaaattctgggagaatttgtgaagtaattaatgaagcagtatggaagcataatataatttatgtttcaagtgctggaaataatggtccatgcctgtctacagttggttgtccaggtggaactacatcaagtgtgataggtgttggtgcttatgtttctcctgatatgatggttgctgagtattcactgagagagaaattacctgcaaatcaatatacttggtcttctagaggacctagtgctgacggggcccttggtgtgagtatcagtgcgccaggaggagccattgcttctgttcctaactggacactgagagggacgcagctgatgaatggaacatctatgtcttcccccaatgcatgtggaggcattgccctgatcctttcaggtctgaaagctaataacattgactacacagttcattcagtcagaagagctctagaaaacactgcagtgaaggctgacaatatagaagtatttgctcaaggacatggtattattcaggttgataaagcctatgactacctcgttcagaatacatcatttgctaataaattaggttttactgttactgttggaaataaccgtggcatctacctccgagatcctgttcaggtggctgcaccttcagatcatggcgttggcattgaacctgtatttccggagaacacagaaaactctgaaaaaatatcccttcagcttcatttagctctgacttcaaattcatcttgggttcagtgtcccagccatttggaactcatgaatcaatgtagacacataaacatacgtgtggatcccaggggcttaagagaaggattgcattatacagaggtatgtggctatgatatagcatcccctaacgcaggtccgctcttcagagttccgatcactgcagttatagcagcaaaagtaaatgaatcatcacattatgatctagcctttacagatgtacactttaaacctggtcaaattcgaaggcattttattgaggttcctgagggtgcaacatgggctgaagtgacagtgtgttcgtgttcttctgaggtgtcagcaaagtttgttctacatgcagtccagcttgtgaagcaaagagcatatcgaagccatgaattctataagttttgttctcttccagagaaaggaacactgactgaagcttttcctgtcctaggtggaaaagcaattgaattttgcattgctcgttggtgggcaagtctcagtgatgtcaacattgattataccatttctttccatgggatagtgtgtactgctcctcagttaaacattcatgcatcggaaggaatcaaccgctttgatgttcagtcctccttgaaatacgaagatctggctccctgcataactttgaagaactgggtccaaacactgcgcccagtgagtgcaaaaacaaaacctttaggatcaagagatgttttgccaaataaccgtcaactttatgagatggtcctgacatataactttcatcaacccaagagtggggaagtaactccaagctgcccactactttgtgaactattatatgaatctgaatttgacagccaactgtggattatttttgaccagaacaaaagacagatgggttcaggcgatgcctatccacatcagtattctttgaaactggagaaaggagattatacaattcgactacagattcgccatgagcaaatcagtgatttggaacgccttaaagaccttccatttattgtttctcatagattgtctaataccttgagcttagatattcatgaaaatcatagttttgcacttctagggaagaagaaatcaagcaatttgacattaccacccaaatataaccagccattctttgttacttccttacctgatgataaaatacctaaaggggcaggacctggatgctatcttgcaggatccttaacattgtcaaagactgaactaggaaagaaagctgatgtaatccctgttcattactacttaatacctccaccaacaaagactaagaatggcagcaaagataaggaaaaagattcagaaaaagagaaagatttaaaagaagagtttactgaagcattacgagatcttaaaattcagtggatgacaaagctggattctagtgacatttataacgaattgaaagaaacatatcctaattatcttcctctgtacgttgcacgacttcatcaattggatgctgaaaaggaacgaatgaaaagacttaatgaaattgttgatgcggcaaatgctgttatttctcatatagatcaaacagccctagcagtttatattgcaatgaagactgatcccaggcctgatgcagctactataaaaaatgacatggacaaacaaaaatccaccctcgtagatgccctttgtaggaaaggttgtgccctggcagaccatcttcttcacacccaggctcaagacggagccatttccactgatgcagaaggaaaggaggaggaaggagaaagtcctttggattctctggcagaaacattttgggaaactactaaatggactgatctctttgacaataaggttttgacatttgcatataaacatgcattagtaaataaaatgtatgggagaggccttaaatttgcaactaaacttgtggaagaaaaaccaacaaaagaaaactggaaaaattgtattcaactgatgaagttacttggatggacccattgtgcatcttttactgaaaactggctccccatcatgtatcctcccgattattgcgtattctaaaataggaaacaagactttaaattttaaaaaaggaagttttatagtgaatggatataaaaacaaatttgtggcatttttagtctaatgcatgttttcatccactatccagtactgattattaaaatgacatgtatttatcagaaaaaaaaaagaaaaaaaaggcaggaccgctcaaaaggaatacccgcaaggggcccaaagataaagagcatccaagacataactggtacaaaggtggaccacaataggacagagcaataaaaaggcagagcaaggacgtcgaaaacaaagcagtgacagggagaaaaatggacagcactgggaaaacactgggagaacaggaacacaacacaccggagagcggacacaaaatggggcaagaacaaccaccggaacatcaaggcccacacggaaatatcaaacataaagaggagagcaaagcagaagacacaacagcgatagcatacaggagaaagttggacaacggacacatagcggagaaatcttccacggagcgtaata

SEQ ID NO: 318873 - DNA, 2221 bp, Homo sapiens
tcggctccccctcgttacctgacagtcattctatccttttctgtttgttttcttcctatcagatgtcagcatctggtctgttctttacctattctagcattacctggcacatcgcggggactcagtaagtcctgttggttggactcagtaagtcctgttggttgaatgaaggcataagcgtccccttaaatttacttagagaatcttttcttagtttgaacttatttcatccccttctcagatttaaaatgtgaaaggtcagtgtacttttgtcatctgtctgccaagtaaagccaagaataccaaatatactcaaatggagaaaagtatgttcttatctcttttattttaaaggagatatttgaagtatcagtactcagcatcagtttgtgagaaaattactgtgaccagagattggaatttttggtgtattgtgacccttagaatctagaatacagtgtagtacaacttaggtgcagcccatgttacatgacatgtagctgttgaagatgattttgatgtatgtaaaattaagcatattaatctaagaatctctctccacattcgtaggatgtaatccctgttcattactacttaatacctccaccaacaaagactaagaatggcagcaaagataaggaaaaagattcagaaaaagagaaagatttaaaagaagagtttactgaagcattacgagatcttaaaattcagtggatgacaaagctggattctagtgacatttataacgaattgaaagaaacatatcctaattatcttcctctgtacgttgcacgacttcatcaattggatgctgaaaaggaacgaatgaaaagacttaatgaaattgttgatgcggcaaatgctgttatttctcatatagatcaaacagccctagcagtttatattgcaatgaagactgatcccaggcctgatgcagctactataaaaaatgacatggacaaacaaaaatccaccctcgtagatgccctttgtaggaaaggttgtgccctggcagaccatcttcttcacacccaggctcaagacggagccatttccactgatgcagaaggaaaggaggaggaaggagaaagtcctttggattctctggcagaaacattttgggaaactactaaatggactgatctctttgacaataaggttttgacatttgcatataaacatgcattagtaaataaaatgtatgggagaggccttaaatttgcaactaaacttgtggaagaaaaaccaacaaaagaaaactggaaaaattgtattcaactgatgaagttacttggatggacccattgtgcatcttttactgaaaactggctccccatcatgtatcctcccgattattgcgtattctaaaataggaaacaagactttaaattttaaaaaaggaagttttatagtgaatggatataaaaacaaatttgtggcatttttagtctaatgcatgttttcatccactatccagtactgattattaaaatgacatgtatttatcagagaattcactgacgtgtggcttaatacatgtaaatctagacctctgacatcatggtgttttcttaatgcctcacattgctggcacggggatgtgccctgcctgccagcacctaggacttcgagttgggttgcagcttatgacatgcatgataggttttggaaggtaacttttaactgcaaacctataaagtactattttttattttataaatgaacagggttttaacgtgctcaactttaatttttttcaattgtatgaaggccttaaaaaagctacattaagcgtagctaaaattatttattggactaaaaactaacagaacttcatttccagaatttttttttttttttttttggcaaatgtttacattcaattaaggggaaaaagtagaaccagcacaaatgagtggcagttgctggagcataactgcttcaataaatcttcatcttggggtaattacaggcaagtcattttcacatcctcttgaggttcagagcatcagaatgaactctatgaatacatgtgtaagtgccagacagctgaatctttatcaggtattgtaaagatacacatatgatatgtttattaaaattgaaataatgtaaaacacatgaataaatttgcaaaaccaagatcacagtacaccatatgcactctggtaccttaatttttttttataaataataaaagtgaatattgaagcttcttaaa

SEQ ID NO: 318874 - DNA, 1721 bp, Homo sapiens
aggcagctgggtcctgaaagagctagcccaagcaatagacctgtttccttttcccagtctcatgtttcacgatgtaatccctgttcattactacttaatacctccaccaacaaagactaagaatggcagcaaagataaggaaaaagattcagaaaaagagaaagatttaaaagaagagtttactgaagcattacgagatcttaaaattcagtggatgacaaagctggattctagtgacatttataacgaattgaaagaaacatatcctaattatcttcctctgtacgttgcacgacttcatcaattggatgctgaaaaggaacgaatgaaaagacttaatgaaattgttgatgcggcaaatgctgttatttctcatatagatcaaacagccctagcagtttatattgcaatgaagactgatcccaggcctgatgcagctactataaaaaatgacatggacaaacaaaaatccaccctcgtagatgccctttgtaggaaaggttgtgccctggcagaccatcttcttcacacccaggctcaagacggagccatttccactgatgcagaaggaaaggaggaggaaggagaaagtcctttggattctctggcagaaacattttgggaaactactaaatggactgatctctttgacaataaggttttgacatttgcatataaacatgcattagtaaataaaatgtatgggagaggccttaaatttgcaactaaacttgtggaagaaaaaccaacaaaagaaaactggaaaaattgtattcaactgatgaagttacttggatggacccattgtgcatcttttactgaaaactggctccccatcatgtatcctcccgattattgcgtattctaaaataggaaacaagactttaaattttaaaaaaggaagttttatagtgaatggatataaaaacaaatttgtggcatttttagtctaatgcatgttttcatccactatccagtactgattattaaaatgacatgtatttatcagagaattcactgacgtgtggcttaatacatgtaaatctagacctctgacatcatggtgttttcttaatgcctcacattgctggcacggggatgtgccctgcctgccagcacctaggacttcgagttgggttgcagcttatgacatgcatgataggttttggaaggtaacttttaactgcaaacctataaagtactattttttattttataaatgaacagggttttaacgtgctcaactttaatttttttcaattgtatgaaggccttaaaaaagctacattaagcgtagctaaaattatttattggactaaaaactaacagaacttcatttccagaatttttttttttttttttttggcaaatgtttacattcaattaaggggaaaaagtagaaccagcacaaatgagtggcagttgctggagcataactgcttcaataaatcttcatcttggggtaattacaggcaagtcattttcacatcctcttgaggttcagagcatcagaatgaactctatgaatacatgtgtaagtgccagacagctgaatctttatcaggtattgtaaagatacacatatgatatgtttattaaaattgaaataatgtaaaacacatgaataaatttgcaaaaccaagatcacagtacaccatatgcactctggtaccttaatttttttttataaataataaaagtgaatattgaagcttcttaaa

SEQ ID NO: 318875 - DNA, 3387 bp, Homo sapiens
ccctcgcccccgcctccggcccgaggccgcacgggtgtcctcgcgctgctagtccgcgcgcagcctggcagtttgccgcttcctcgtcctccatcctgcgtccatggccaccgctgcgactgaggagcccttcccttttcacggtctcctgccgaagaaggagaccggagccgcctccttcctctgccgctacccggagtatgatgggcggggggtgctcatcgcagtcctggacacgggggtcgacccgggggctccgggcatgcaggttacaactgatggaaaaccaaaaatcgttgatatcattgatacaacaggaagtggcgatgtgaatactgctacagaagtagagccaaaggatggtgagattgttggcctttcaggaagagtgcttaagattcctgcaagctggacaaatccctcaggcaaatatcatattggcataaaaaatggctatgacttctatcctaaggcactcaaggaaaggatacagaaagaacggaaggaaaaaatctgggaccctgttcacagagtggcccttgcagaagcctgtagaaaacaggaagaatttgatgttgccaacaacggctcttctcaagcaaataaactaatcaaggaggaacttcaaagtcaagtggaattgctaaattcttttgagaagaaatacagcgatcctggccctgtatatgactgcttggtatggcatgatggcgaagtctggagagcctgcattgattctaatgaagatggggacttgagtaaatctaccgtgttgagaaactacaaagaagcccaagaatatggctcttttggcacagctgagatgttgaattactccgttaatatatacgatgatggaaacctgctctccattgtgaccagtggaggagctcatgggacacatgtagctagtatagctgctggacactttccagaagaacctgaacggaatggggtagctcctggtgctcaaattctttccatcaagattggtgatacaagactaagcacaatggaaacaggcacaggcctcataagagctatgatagaagttataaatcataagtgtgatcttgtcaactacagttacggagaagcaactcactggccaaattctgggagaatttgtgaagtaattaatgaagcagtatggaagcataatataatttatgtttcaagtgctggaaataatggtccatgcctgtctacagttggttgtccaggtggaactacatcaagtgtgataggtgttggtgcttatgtttctcctgatatgatggttgctgagtattcactgagagagaaattacctgcaaatcaatatacttggtcttctagaggacctagtgctgacggggcccttggtgtgagtatcagtgcgccaggaggagccattgcttctgttcctaactggacactgagagggacgcagctgatgaatggaacatctatgtcttcccccaatgcatgtggaggcattgccctgatcctttcaggtctgaaagctaataacattgactacacagttcattcagtcagaagagctctagaaaacactgcagtgaaggctgacaatatagaagtatttgctcaaggacatggtattattcaggttgataaagcctatgactacctcgttcagaatacatcatttgctaataaattaggttttactgttactgttggaaataaccgtggcatctacctccgagatcctgttcaggtggctgcaccttcagatcatggcgttggcattgaacctgtatttccggagaacacagaaaactctgaaaaaatatcccttcagcttcatttagctctgacttcaaattcatcttgggttcagtgtcccagccatttggaactcatgaatcaatgtagacacataaacatacgtgtggatcccaggggcttaagagaaggattgcattatacagaggtatgtggctatgatatagcatcccctaacgcaggtccgctcttcagagttccgatcactgcagttatagcagcaaaagtaaatgaatcatcacattatgatctagcctttacagatgtacactttaaacctggtcaaattcgaaggcattttattgaggttcctgagggtgcaacatgggctgaagtgacagtgtgttcgtgttcttctgaggtgtcagcaaagtttgttctacatgcagtccagcttgtgaagcaaagagcatatcgaagccatgaattctataagttttgttctcttccagagaaaggaacactgactgaagcttttcctgtcctaggtggaaaagcaattgaattttgcattgctcgttggtgggcaagtctcagtgatgtcaacattgattataccatttctttccatgggatagtgtgtactgctcctcagttaaacattcatgcatcggaaggaatcaaccgctttgatgttcagtcctccttgaaatacgaagatctggctccctgcataactttgaagaactgggtccaaacactgcgcccagtgagtgcaaaaacaaaacctttaggatcaagagatgttttgccaaataaccgtcaactttatgagatggtcctgacatataactttcatcaacccaagagtggggaagtaactccaagctgcccactactttgtgaactattatatgaatctgaatttgacagccaactgtggattatttttgaccagaacaaaagacagatgggttcaggcgatgcctatccacatcagtattctttgaaactggagaaaggagattatacaattcgactacagattcgccatgagcaaatcagtgatttggaacgccttaaagaccttccatttattgtttctcatagattgtctaataccttgagcttagatattcatgaaaatcatagttttgcacttctagggaagaagaaatcaagcaatttgacattaccacccaaatataaccagccattctttgttacttccttacctgatgataaaatacctaaaggggcaggacctggatgctatcttgcaggatccttaacattgtcaaagactgaactaggaaagaaagctgatgtaatccctgttcattactacttaatacctccaccaacaaagactaagaatggcagcaaagataaggaaaaagattcagaaaaagagaaagatttaaaagaagagtttactgaagcattacgagatcttaaaattcagtggatgacaaagctggattctagtgacatttataacgaattgaaagaaacatatcctaattatcttcctctgtacgttgcacgacttcatcaattggatgctgaaaaggaacgaatgaaaaaacttaataaaacttgatgcggccaggcctcctccccttccgtccccccggggtgacatggaataagtgg

SEQ ID NO: 318876 - DNA, 1596 bp, Homo sapiens
ccctcgcccccgcctccggcccgaggccgcacgggtgtcctcgcgctgctagtccgcgcgcagcctggcagtttgccgcttcctcgtcctccatcctgcgtccatggccaccgctgcgactgaggagcccttcccttttcacggtctcctgccgaagaaggagaccggagccgcctccttcctctgccgctacccggagtatgatgggcggggggtgctcatcgcagtcctggacacgggggtcgacccgggggctccgggcatgcaggttacaactgatggaaaaccaaaaatcgttgatatcattgatacaacaggaagtggcgatgtgaatactgctacagaagtagagccaaaggatggtgagattgttggcctttcaggaagagtgcttaagattcctgcaagctggacaaatccctcaggcaaatatcatattggcataaaaaatggctatgacttctatcctaaggcactcaaggaaaggatacagaaagaacggaaggaaaaaatctgggaccctgttcacagagtggcccttgcagaagcctgtagaaaacaggaagaatttgatgttgccaacaacggctcttctcaagcaaataaactaatcaaggaggaacttcaaagtcaagtggaattgctaaattcttttgagaagaaatacagcgatcctggccctgtatatgactgcttggtatggcatgatggcgaagtctggagagcctgcattgattctaatgaagatggggacttgagtaaatctaccgtgttgagaaactacaaagaagcccaagaatatggctcttttggcacagctgagatgttgaattactccgttaatatatacgatgatggaaacctgctctccattgtgaccagtggaggagctcatgggacacatgtagctagtatagctgctggacactttccagaagaacctgaacggaatggggtagctcctggtgctcaaattctttccatcaagattggtgatacaagactaagcacaatggaaacaggcacaggcctcataagagctatgatagaagttataaatcataagtgtgatcttgtcaactacagttacggagaagcaactcactggccaaattctgggagaatttgtgaagtaattaatgaagcagtatggaagcataatataatttatgtttcaagtgctggaaataatggtccatgcctgtctacagttggttgtccaggtggaactacatcaagtgtgataggtgttggtgcttatgtttctcctgatatgatggttgctgagtattcactgagagagaaattacctgcaaatcaatatacttggtcttctagaggacctaggtggtttcctctttaaaaaataaacttatcttagtagcttattataaagtgtcattgaaaacaaccaggccgtggatatccacatggatcagaaagctttgctttgcgctgtcattgtagactgcccctgccagcccagctaaagacactcaataagagtggcttaggagaagagccaaaagtcagcaaagcttgatgtgtttttgttcagttaataaaagtgtaaaattattaaacttattctcttct

SEQ ID NO: 318877 - DNA, 472 bp, Homo sapiens
agggatgccatgcaagggcagtacacagaagtttatctgtgtttcattttataatcttagtattttgtgtgtccatactcagtctgcccttggttcccactccccactttgctcttctttgtatataatttgatttgtgcctcatcttcttactagtctgaacatgttgttgaggtaggatatccaaccatcctggtttggctgaagttgggagacctcctgggatgcaggacttttagtgctgaaaccaagccccaggtacctgggacaaattggtcaccctactttgagggcaaggactatgtatgttgcatctttgcaccatgtacaactcattttacaatgtttacacatagacagtagtttttaaatggattttgcattaagttggaaggcactcagttctgacatggatccttccagtcattcttgcaagttatgtttattttctagcatctgatttcatgaagct

SEQ ID NO: 318878 - DNA, 2072 bp, Homo sapiens
gtcacagggtctctggtctgcacacctcccttactgggctttttctggcaggtcattgtgcagcgctgcctctcagccaagaatatgtctcacgtgaagggtggctgcatcctgtgtgggtatctaaagctgatgcccatgttcatcatggtgatgccaggaatgatcagccgcattctgtacacagaaaaaattgcctgtgtcgtcccttcagaatgtgagaaatattgcggtaccaaggttggctgtaccaacatcgcctatccaaccttagtggtggagctcatgcccaatggactgcgaggcctgatgctatcagtcatgctggcctccctcatgagctccctgacctccatcttcaacagcgccagcaccctcttcaccatggacatctacgccaaggtccgcaagagagcatctgagaaagagctcatgattgccggaaggttgtttatcctggtgctgattggcatcagcatcgcctgggtgcccattgtgcagtcagcacaaagtgggcaactcttcgattacatccagtccatcaccagttacttgggaccacccattgcggctgtcttcctgcttgctattttctggaagagagtcaatgagccaggagccttttggggactgatcctaggacttctgattgggatttcacgtatgattactgagtttgcttatggaaccgggagctgcatggagcccagcaactgtcccacgattatctgtggggtgcactacttgtactttgccattatcctcttcgccatttctttcatcaccatcgtggtcatctccctcctcaccaaacccattccggatgtgcatctctaccgtctgtgttggagcctgcgcaacagcaaagaggagcgtattgacctggatgcggaagaggagaacatccaagaaggccctaaggagaccattgaaatagaaacacaagttcctgagaagaaaaaaggaatcttcaggagagcctatgacctattttgtgggctagagcagcacggtgcacccaagatgactgaggaagaggagaaagccatgaagatgaagatgacggacacctctgagaagcctttgtggaggacagtgttgaacgtcaatggcatcatcctggtgaccgtggctgtcttttgccatgcatattttgcctgagtcctaccttttgctgtagatttaccatggctggactcttactcaccttcctttagtctcgtcctgtggtgttgaagggaaatcagccagttgtaaattttgcccaggtggataaatgtgtacatgtgtaattataggctagctggaagaaaaccattagtttgctgttaatttatgcatttgaagccagtgtgatacagccatctgtacctactggagccgcagaagggaagtccactcagtcacatccagaaaaaggcagactaagaatcagaagccatgtgattgatgtctgacgtgagtctgtctcaggtagattccgggtgtcagtgtggtttataatccttgaatattgttttagaaactttggtctccctggttcctgccacttttcctgtccgtcctcctccccattttttttttaaaagaaagctgttttcccctcatcatatccctcttgagttttgcctggactttccctctcaagtgtgtcaatcaggtaaactgaggaatgcatggaagctgaggatggagcttgatgggctccctgtcctgggtgtttgctctctgaagtggaggcctgaggaaggtagtacttccacaaaagggagggacccgggccccagcctcaagctagtgggggaggcagatagcctgaatccaggggattttctgggcttcttaaaatgtccattgtgagttccccgtgtttgggattccactcattttggcattcacagtgcctggaatgtcttagattttcagcaatgcgtgttgaataaatgaatgacataggcatttatttttaaatctttgcttgctttttacatgagcctggcctctgtgtcctaaaagggaccctcctgtggtttttgtcttgattttttttaataaacggtgctatccccgca

SEQ ID NO: 318879 - DNA, 2874 bp, Homo sapiens
acagtgagccgagatcatgccactgcactcctgcctgggcgacagaaaaagactctgtcccaaaagtgggctctttgaaggctagaaggtatttggggcagcagacttgtgtggaagcagttatcaaagtggggatgtgacacgcaccaggagaggggaacagacaacacatgagattggagcctccctctttgctagtaacattggaagtggccactttgtggggctggccgggactggggcagcttcaggcatcgccattggaggctttgaatggaatgccctggttttggtggttgtgctgggctggctgtttgtccccatctatattaaggctggggtggtgacaatgccagagtacctgaggaagcggtttggaggccagcggatccaggtctacctttcccttctgtccctgctgctctacattttcaccaagatctcggcagacatcttctcgggggccatattcatcaatctggccttaggcctgaatctgtatttagccatctttctcttattggcaatcactgccctttacacaattacagggggcctggcggcggtgatttacacggacaccttgcagacggtgatcatgctggtggggtctttaatcctgactgggtttgcttttcacgaagtgggaggctatgacgccttcatggaaaagtacatgaaagccattccaaccatagtgtctgatggcaacaccacctttcaggaaaaatgctacactccaagggccgactccttccacatcttccgagatcccctcacgggagacctcccatggcctgggttcatctttgggatgtccatccttaccttgtggtactggtgcacagatcaggtcattgtgcagcgctgcctctcagccaagaatatgtctcacgtgaagggtggctgcatcctgtgtgggtatctaaagctgatgcccatgttcatcatggtgatgccaggaatgatcagccgcattctgtacacagaaaaaattgcctgtgtcgtcccttcagaatgtgagaaatattgcggtaccaaggttggctgtaccaacatcgcctatccaaccttagtggtggagctcatgcccaatggactgcgaggcctgatgctatcagtcatgctggcctccctcatgagctccctgacctccatcttcaacagcgccagcaccctcttcaccatggacatctacgccaaggtccgcaagagagcatctgagaaagagctcatgattgccggaaggttgtttatcctggtgctgattggcatcagcatcgcctgggtgcccattgtgcagtcagcacaaagtgggcaactcttcgattacatccagtccatcaccagttacttgggaccacccattgcggctgtcttcctgcttgctattttctggaagagagtcaatgagccaggagccttttggggactgatcctaggacttctgattgggatttcacgtatgattactgagtttgcttatggaaccgggagctgcatggagcccagcaactgtcccacgattatctgtggggtgcactacttgtactttgccattatcctcttcgccatttctttcatcaccatcgtggtcatctccctcctcaccaaacccattccggatgtgcatctctaccgtctgtgttggagcctgcgcaacagcaaagaggagcgtattgacctggatgcggaagaggagaacatccaagaaggccctaaggagaccattgaaatagaaacacaagttcctgagaagaaaaaaggaatcttcaggagagcctatgacctattttgtgggctagagcagcacggtgcacccaagatgactgaggaagaggagaaagccatgaagatgaagatgacggacacctctgagaagcctttgtggaggacagtgttgaacgtcaatggcatcatcctggtgaccgtggctgtcttttgccatgcatattttgcctgagtcctaccttttgctgtagatttaccatggctggactcttactcaccttcctttagtctcgtcctgtggtgttgaagggaaatcagccagttgtaaattttgcccaggtggataaatgtgtacatgtgtaattataggctagctggaagaaaaccattagtttgctgttaatttatgcatttgaagccagtgtgatacagccatctgtacctactggagccgcagaagggaagtccactcagtcacatccagaaaaaggcagactaagaatcagaagccatgtgattgatgtctgacgtgagtctgtctcaggtagattccgggtgtcagtgtggtttataatccttgaatattgttttagaaactttggtctccctggttcctgccacttttcctgtccgtcctcctccccattttttttttaaaagaaagctgttttcccctcatcatatccctcttgagttttgcctggactttccctctcaagtgtgtcaatcaggtaaactgaggaatgcatggaagctgaggatggagcttgatgggctccctgtcctgggtgtttgctctctgaagtggaggcctgaggaaggtagtacttccacaaaagggagggacccgggccccagcctcaagctagtgggggaggcagatagcctgaatccaggggattttctgggcttcttaaaatgtccattgtgagttccccgtgtttgggattccactcattttggcattcacagtgcctggaatgtcttagattttcagcaatgcgtgttgaataaatgaatgacataggcatttatttttaaatctttgcttgctttttacatgagcctggcctctgtgtcctaaaagggaccctcctgtggtttttgtcttgattttttttaataaacggtgctatccccgca

SEQ ID NO: 318880 - DNA, 448 bp, Homo sapiens
aaatctttgcttgctttttacatgagcctggcccttagttaaccttttcttgtggctacacaaagtatgctcactggttactaatgacttgggatgcatttgtcaaactgattatattagttttctagggatgccataacaaagtagcacagaccagatggctcaagcagcagacatttattttctcacagttctagaggctagaagttggaggccaagatgtcagcagggttggtttcttctgaggcctctctccttggttgcagatggtcatatctcactctgtcttccgtggccttccttttgtctgtgtcctaaatctactcttctgataaggacatcagtcatattggaataggacccaccctaatgtcttcattttaatcacctctttaaagcccctacctccaaatacagtcacactgtgagaaactgagggttaggaagt

SEQ ID NO: 318881 - DNA, 2907 bp, Homo sapiens
catggacagtagcacctggagccccaagaccaccgcggtcacccggcctgttgagacccacgagctcattcgcaatgcagccgatatctccatcatcgttatctacttcgtggtagtgatggccgtcggactgtgggctatgttttccaccaatcgtgggactgttggaggcttcttcctggcaggccgaagtatggtgtggtggccgattggagcctccctctttgctagtaacattggaagtggccactttgtggggctggccgggactggggcagcttcaggcatcgccattggaggctttgaatggaatgccctggttttggtggttgtgctgggctggctgtttgtccccatctatattaaggctggggtggtgacaatgccagagtacctgaggaagcggtttggaggccagcggatccaggtctacctttcccttctgtccctgctgctctacattttcaccaagatctcggcagacatcttctcgggggccatattcatcaatctggccttaggcctgaatctgtatttagccatctttctcttattggcaatcactgccctttacacaattacagggggcctggcggcggtgatttacacggacaccttgcagacggtgatcatgctggtggggtctttaatcctgactgggtttgcttttcacgaagtgggaggctatgacgccttcatggaaaagtacatgaaagccattccaaccatagtgtctgatggcaacaccacctttcaggaaaaatgctacactccaagggccgactccttccacatcttccgagatcccctcacgggagacctcccatggcctgggttcatctttgggatgtccatccttaccttgtggtactggtgcacagatcaggtcattgtgcagcgctgcctctcagccaagaatatgtctcacgtgaagggtggctgcatcctgtgtgggtatctaaagctgatgcccatgttcatcatggtgatgccaggaatgatcagccgcattctgtacacagaaaaaattgcctgtgtcgtcccttcagaatgtgagaaatattgcggtaccaaggttggctgtaccaacatcgcctatccaaccttagtggtggagctcatgcccaatggactgcgaggcctgatgctatcagtcatgctggcctccctcatgagctccctgacctccatcttcaacagcgccagcaccctcttcaccatggacatctacgccaaggtccgcaagagagcatctgagaaagagctcatgattgccggaaggttgtttatcctggtgctgattggcatcagcatcgcctgggtgcccattgtgcagtcagcacaaagtgggcaactcttcgattacatccagtccatcaccagttacttgggaccacccattgcggctgtcttcctgcttgctattttctggaagagagtcaatgagccaggagccttttggggactgatcctaggacttctgattgggatttcacgtatgattactgagtttgcttatggaaccgggagctgcatggagcccagcaactgtcccacgattatctgtggggtgcactacttgtactttgccattatcctcttcgccatttctttcatcaccatcgtggtcatctccctcctcaccaaacccattccggatgtgcatctctaccgtctgtgttggagcctgcgcaacagcaaagaggagcgtattgacctggatgcggaagaggagaacatccaagaaggccctaaggagaccattgaaatagaaacacaagttcctgagaagaaaaaaggaatcttcaggagagcctatgacctattttgtgggctagagcagcacggtgcacccaagatgactgaggaagaggagaaagccatgaagatgaagatgacggacacctctgagaagcctttgtggaggacagtgttgaacgtcaatggcatcatcctggtgaccgtggctgtcttttgccatgcatattttgcctgagtcctaccttttgctgtagatttaccatggctggactcttactcaccttcctttagtctcgtcctgtggtgttgaagggaaatcagccagttgtaaattttgcccaggtggataaatgtgtacatgtgtaattataggctagctggaagaaaaccattagtttgctgttaatttatgcatttgaagccagtgtgatacagccatctgtacctactggagccgcagaagggaagtccactcagtcacatccagaaaaaggcagactaagaatcagaagccatgtgattgatgtctgacgtgagtctgtctcaggtagattccgggtgtcagtgtggtttataatccttgaatattgttttagaaactttggtctccctggttcctgccacttttcctgtccgtcctcctccccattttttttttaaaagaaagctgttttcccctcatcatatccctcttgagttttgcctggactttccctctcaagtgtgtcaatcaggtaaactgaggaatgcatggaagctgaggatggagcttgatgggctccctgtcctgggtgtttgctctctgaagtggaggcctgaggaaggtagtacttccacaaaagggagggacccgggccccagcctcaagctagtgggggaggcagatagcctgaatccaggggattttctgggcttcttaaaatgtccattgtgagttccccgtgtttgggattccactcattttggcattcacagtgcctggaatgtcttagattttcagcaatgcgtgttgaataaatgaatgacataggcatttatttttaaatctttgcttgctttttacatgagcctggcctctgtgtcctaaaagggaccctcctgtggtttttgtcttgattttttttaataaacggtgctatccccgca

SEQ ID NO: 318882 - DNA, 1529 bp, Homo sapiens
acagtgagccgagatcatgccactgcactcctgcctgggcgacagaaaaagactctgtcccaaaagtgggctctttgaaggctagaaggtatttggggcagcagacttgtgtggaagcagttatcaaagtggggatgtgacacgcaccaggagaggggaacagacaacacatgagattggagcctccctctttgctagtaacattggaagtggccactttgtggggctggccgggactggggcagcttcaggcatcgccattggaggctttgaatggaatgccctggttttggtggttgtgctgggctggctgtttgtccccatctatattaaggctggggtggtgacaatgccagagtacctgaggaagcggtttggaggccagcggatccaggtctacctttcccttctgtccctgctgctctacattttcaccaagatctcggcagacatcttctcgggggccatattcatcaatctggccttaggcctgaatctgtatttagccatctttctcttattggcaatcactgccctttacacaattacagggggcctggcggcggtgatttacacggacaccttgcagacggtgatcatgctggtggggtctttaatcctgactgggtttgcttttcacgaagtgggaggctatgacgccttcatggaaaagtacatgaaagccattccaaccatagtgtctgatggcaacaccacctttcaggaaaaatgctacactccaagggccgactccttccacatcttccgagatcccctcacgggagacctcccatggcctgggttcatctttgggatgtccatccttaccttgtggtactggtgcacagatcaggtcattgtgcagcgctgcctctcagccaagaatatgtctcacgtgaagggtggctgcatcctgtgtgggtatctaaagctgatgcccatgttcatcatggtgatgccaggaatgatcagccgcattctgtacacagaaaaaattgcctgtgtcgtcccttcagaatgtgagaaatattgcggtaccaaggttggctgtaccaacatcgcctatccaaccttagtggtggagctcatgcccaatggactgcgaggcctgatgctatcagtcatgctggcctccctcatgagctccctgacctccatcttcaacagcgccagcaccctcttcaccatggacatctacgccaaggtccgcaagagagcatctgagaaagaaactctgtctagccacagtgtggggatggggagctcccgccgacagactctgttgctttctggcttggccgctggttgtcccttgctcctggaaggtcaccatattgatgccaaactcagtgtggatgcccaattggtagagtgcactacagcccagaactcatggactcaagtcagcctcccaagtccctgggactacagattcctgaatgatccggcggcatggcagaggtggtgcctactgatatggctccgatgactggaggaacaccagggtccttggtcttgcgccaatgtag

SEQ ID NO: 318883 - DNA, 1550 bp, Homo sapiens
gagcccagccggccaacgcctggactctggccgagagactctcggcagcaaatccagtggagccccccgacttctgacaccagaaaccgtctgtgagtgcaggtctgcgttctcaagccgctaaactcacggagatttctacgcagctgcagaagatgaatgcatctcccttctacgccttctgctgtggcggccgtgagtgttaacccactgcttctaaacccgtgaagcctgtcatgtgacgctgatgtcctgtgactctggtggtccctaccccccaaggcctccacacccccctctctgtgctgtgttctgtgggccacggccacccctcatcagagcagccccctggggatcccttccagtggttggaagcaaacactttctattttcctgtgtctggaaatgcttgtattttgacttcatttttacaggatatttttcctggatataagatagttggttactgagcaatgacataaattacaatattattgacttcaagcccaaaggaaaaatgaatatacaggagtccacgttgatttgattaatgattgaatatgtaaattcataagaaggggcaactcttaactacagaaaaattccaatggataaatgtaaaaggaataagggaaatagaaaatcattgttatgacattacagtaataattgctgctgtcaccactgataaatgctaaaattagtggacagaattttaaggaaaaacaggatatttacgtaactcaacatagcagttattgcagtggctgtagcatgcgtcctcaccctcatttatctccctgtttctaggagacggagcttaatgtcactccccttgagtgtggactgaatttagtgactcaatttccaagaattgagcaagaaaagggaaaaataataactttatgttggagaaatgcacagagttcaccttgcccaagtgatcaaaggtgacttcacagtggtaagtcaggacaataccctgcaccctgacgtgatgtcgtgaaagggcactggcgtacgtggtattctctccacaagtccataacccacggcaattgtgagtaagcctcagacaaacccccaccgcgggtcactctccgacattgctggcaatcctcttcaagagtgtgcaggtcatgaaaggccaggacacactgagaaagggtcccagatgtgaggagacgaaggagatttgacaggagaagcatgatgggatcctggaacagagcaagaacgttagtgaagaacaggtgaaatgctgctagagcctgttggttctttgataatagcgtaccaaaaacaattttttagttttgataactgtaccatggttatgtaatacattaacactggggaagctcagtgaatatgtggactcttggactatttttataacgcttcttgtgtagaaggtctaaaatgatctcagaatacaaatttaaataaattaatttaatgctcaaaacacccttgattggaacttacagctggccctctgtattcgtgggttcaaccaatcactaattaaaaatattggaaacaaaaat

SEQ ID NO: 318884 - DNA, 728 bp, Homo sapiens
gcctggaaacacatgatggggttcaggaggaagtgaaagatcagttatatcaaatgacacttactgagatttgatcgctagattggcaatgtagaagccactggtgaccttgtgagagcactgatggggaggagtgggagcaatgcctaattggagtgggtttgtgagagaacaggagagaaggaattggagaccataggaactcttgaggggttttgctgtagaggggagcagagccatggcaacaactgtaaggggaaatagtgggtttttgtttcgttttgtttaagatgggagaagattatagtgtgcaggtcatgaaaggccaggacacactgagaaagggtcccagatgtgaggagacgaaggagatttgacaggagaagcatgatgggatcctggaacagagcaagaacgttagtgaagaacaggtgaaatgctgctagagcctgttggttctttgataatagcgtaccaaaaacaattttttagttttgataactgtaccatggttatgtaatacattaacactggggaagctcagtgaatatgtggactcttggactatttttataacgcttcttgtgtagaaggtctaaaatgatctcagaatacaaatttaaataaattaatttaatgctcaaaacacccttgattggaacttacagctggccctctgtattcgtgggttcaaccaatcactaattaaaaatattggaaacaaaaat

SEQ ID NO: 318885 - DNA, 1278 bp, Homo sapiens
gagcccagccggccaacgcctggactctggccgagagactctcggcagcaaatccagtggagccccccgacttctgacaccagaaaccgtctgtgagtgcaggtctgcgttctcaagccgctaaactcacggagatttctacgcagctgcagaagatgaatgcatctcccttctacgccttctgctgtggcggccgtgagtgttaacccactgcttctaaacccgtgaagcctgtcatgtgacgctgatgtcctgtgactctggtggtccctaccccccaaggcctccacacccccctctctgtgctgtgttctgtgggccacggccacccctcatcagagcagccccctggggatcccttccagtggttggaagcaaacactttctattttcctgtgtctggaaatgcttgtattttgacttcatttttacaggatatttttcctggatataagatagttggttactgagcaatgacataaattacaatattattgacttcaagcccaaaggaaaaatgaatatacaggagtccacgttgatttgattaatgattgaatatgtaaattcataagaaggggcaactcttaactacagaaaaattccaatggataaatgtaaaaggaataagggaaatagaaaatcattgttatgacattacagtaataattgctgctgtcaccactgataaatgctaaaattagtggacagaattttaaggaaaaacaggatatttacgtaactcaacatagcagttattgcagtggctgtagcatgcgtcctcaccctcatttatctccctgtttctaggagacggagcttaatgtcactccccttgagtgtggactgaatttagtgactcaatttccaagaattgagcaagaaaagggaaaaataataactttatgttggagaaatgcacagagttcaccttgcccaagtgatcaaaggtgacttcacagtggtaagtcaggacaataccctgcaccctgacgtgatgtcgtgaaagggcactggcgtacgtggtattctctccacaagtccataacccacggcaattgtgagtaagcctcagacaaacccccaccgcgggtcactctccgacattgctggcaatcctcttcaagagtgtgcaggtcatgaaaggccaggacacactgagaaagggtcccagatgtgaggagacgaaggagatttgacaggagaagcatgatggcttgggtagcctgagcgggccctctattttctttgtgtggagggtgggtgtgggggaaagcg

SEQ ID NO: 318886 - DNA, 680 bp, Homo sapiens
gaattggctctgtcattgcttagttgaaagaccttaagttactgtctttctctaagcctttaaattttaaataagatattgaacttggctctgtcttgtcccaaatttttataatcctagaagagagtcagccttcaatatattcattttagagatatttagtatactgacatattacttaaaatagcagatgggaaaaattaaatataatctcatagatttatgtggaaaattcaacatcatcttagagttctggaaattgtgtttaactttaccatttatagaaactatgttagatttcatttctcttactctttgtcagatcgacaccttgactgtgtgagacgtgattaacaaaaaggaaaactacccccactggaagttgttaaaggaaaggcaatgcaaatgaaaaaaaagaaaaagaatttctaaaagttttatcagacaaaaatttaattgaatcaatggggcaatctggagttctggatgattctgttaattgaagtttacaatcacttttattttatttttatttatttacttattttgagacagagtctcactctgttaccaggctggaatgcagtggcgcgatctcagcttactgcaacctccgcctccctggaccaagcgattctcatgtctcagcttcctgagtagctgggattacatgcgtgcac

SEQ ID NO: 318887 - DNA, 2608 bp, Homo sapiens
tctctggcccggatgcgtccctctttctccaccccgccgagcctaaactagtgacggggagggagacgggatagtgtttctgtttccgtggtctttgaatccacaacctctagtctgaacacagagaacacaaatttgtcgattacttcaggaagcccagggggaaccgcgccccgctgaagggctcggggaaggcgcgctcccgcgtcccgccccctcctcccccagcactcacactgtggtagcggcggagggcggagggatccggaggcggcggagggagacgtcattgcagggttgtttgtcagtctcggcggcggcggcggcggcggcggcggcggcggcgatccacagtgattcggccgccgcgccggggggtgggggggctgcgcgggacttttttttttttcagactgaccgcggggcagctgcggagcatgtcgaccccggcccggaggaggctcatgcgggatttcaagcggttacaagaggacccacctgtgggtgtcagtggcgcaccatctgaaaacaacatcatgcagtggaatgcagttatatttggaccagaagggacaccttttgaagatggtacttttaaactagtaatagaattttctgaagaatatccaaataaaccaccaactgttaggtttttatccaaaatgtttcatccaaatgtgtatgctgatggtagcatatgtttagatatccttcagaatcgatggagtccaacatatgatgtatcttctatcttaacatcaattcagtctctgctggatgaaccgaatcctaacagtccagccaatagccaggcagcacagctttatcaggaaaacaaacgagaatatgagaaaagagtttcggccattgttgaacaaagctggaatgattcataatagacaactggtctgttaatctttttcatcattgttgtgtataatttacctctcattagaaaggctaacaaattttaagtgccacaggttttaaggattctgcagaaaaaaaagaaaaaagtccttcagtttagaacctacaaaagcttgtgtatcttgattaatgtactttttattgcatggtgtgaactaagttattgctgcataaatttgtaatatatcctgtttgtatttttttccaagtgtataatgttggtgtggagttttcatgacagaatatacacattttgtaaatctgtacttttttcaaatattgaatgccttatttttgaattctttagatttttaaattggagaaaagcacttaaagttttttatatatgaatattacatgtaaagctgttaaaatacataacttcagtgcaagagactttgtcacttatttccttatgtgtgtaggaggggttaataagtctctagctctccatctattgatagtttcatttacaatttcaaaagaacattcttatattttatcaaggaagtcttcaaatttgattctaaatagcgattataatctccaactttattttgaatgtacctctattagtttcaattgagtaattctagacataactggtttgactctgtccaactctgtatttaggccatttgttacagtttcttcatgcattacttactgttaaaactgtaccttttgcgatttcacagttggcacttctgccatgagcagagaactgatgcgacttgttttgctgcttggtagcactttaaaaaattttttgattaatgaagaaagtaaaaccataaacatttgccaaaaattcatgccccagtattagcaatgaattagttgcattggtttgagaaaggcacatattggagggaaatcttggtgtaacttaaatatttgaaaattacctttaatgcaatgcatatctgtttattctgggaaatgttttaatgccagggcctgctgagttgcttcttcttgtggagattttttttttaatctcctgagttgtataaaagttgtactgcatcttagtttactggataaatttaaaacacagtattgtagaaagctaatacaaaactatcctatgccttcaaatagtatagaaaatggaaaatatacaagtaaattctgttgaaccacctgtgtagtctctctagtagttaaaacagctattttagtaaccccaagagtttcttctcatatccataaaattggattacagtatggcaatatctacagcttctattcattatgcaacgtttaacattgattggataaatgcttataggctgggccaggtggctcccacctgtagtcccagcactttgggaggcaaaggcgggaggatcacttgaggccaggactttgagaccagccagggcaacataataagacttttctctactttaaattttttaaaaaattagttgggcatagtggcacttgcctgtagtctcagctacttaggaggctgaggtggcagaatagcttatgcctaggaggttgaggctgcagtgagctgtgattatgccattgcactccagcctgggtgacagagcaataccctgtctttaaaaataaaagctattacttggcaaaaaattccgcactatataattcgcacacattaattagggtttatgtaccatacaaaaaaaaattaattagggct

SEQ ID NO: 318888 - DNA, 730 bp, Homo sapiens
  misc_feature (722)..(724): n is a, c, g, or t
  misc_feature (726)..(728): n is a, c, g, or t
ctcttgccggttacccggcttttcgaagttattcggcccccctatgggagccccgccgatttccccccttgaccccggaaactgggtccgggacacgctttgcccccgggccccttccgtacccctttttccccccccccccttgatccccccggtttttttttttttttttttttttttttcagactgaccgcggggcagctgcggagcatgtcgaccccggcccggaggaggctcatgcgggatttcaagcggtaagggccttcaccttcgcctagatgacggcccctcaaagctgcggggctgcagggcgtggatcccagacaccttcccctttgtgaccctcagagggccggctgtgggcccagcgggactggcggaagccgggtcctagcctcggccctactcccataagctttgccgctcgttctggcgcccgaagaaattttgatactgcttcccctccccacaaaaagtaaaacggtgtcgatcgactggtctagggttccctgctgcccatttcggccagctgcccggcgtctcgcccaggcgatcagacattatccgcccgcccctgcaccctgcggcgcccccttcttgtcccctcaaagtgagctcctgcgggagcttgttcctctccggcagcaccagtcagctttgtttcacggccccgccgtcttctccgaggagccgtgttggggcgaacccctctcccgactccnnncnnncc

SEQ ID NO: 318889 - DNA, 1187 bp, Homo sapiens
gtatatacccagtaatgggatggctgggtcaaatggtatttctagttctagatccctgaggaatcgccatactgtcttccacaatggttgaactagtttacagtcccaccaacagtgtaaaagtgttcctatgcatcaattcttgaagagataatattgaaagagggatgattctcaagccctttcaatttttagataatttggagaggtatttaataagtatatatacctggttaatatatttaagtcatatggttcattttagttcacaataacaaggaaatggagttagtctgtgtctcaaaatagatggtatagtgtctgtaggtgtttacgtggcctccttagtggccttaatgttcaactttttaaattaccacgctggatttccaggttacaagaggacccacctgtgggtgtcagtggcgcaccatctgaaaacaacatcatgcagtggaatgcagttatatttgggtgagttgaaaggtttaacaaataataggtgtgtgctgaatctttaagaaaagtaaacatataacaactgtctaggaaaagaaactgaggtggaatgagagatcttaaggactaaaactgcaagataaattagaaaaaaaaaatatttcaattagagttttggcccagcacagtagtagctcaacgcctgggaggatcgctggagcccaggagttcaccagcctgggcgatatagtgagacagtgagactctgtcccctccccaccaaaaaaagttttggcccagtctgggcaacatagtgagcccttgtctctacaaaaagtataaaactagctgagcatggtggtgcatacctgtggtcccagctacttggaaggctgaggcaggaggatcacttgagcccagaagtttgaggctgcagtgtgccatgattgtgccactgccctccaacatgggcagccagcagagccaagatcctgtatcaaaaaaaaaaggaaaaagtttcagcagttatataaagtttatttgctctttgatgttattacatatggttttataatctcttggggttttacttttaaaatactattcaaaactaaatggaatggaataataaaggagaaacaataagttactttatataaaacatatcacgcaaatgctctcattctgttggagctgttaaaaggtttggaaccaaaaatattaagaac

SEQ ID NO: 318890 - DNA, 464 bp, Homo sapiens
agcctgggtgacagagcgagactccatctcaaaaaaaaagaaaaagaaaagaggatcatctggtgtgagccactgcgcctggccttctactcttataagtagtattatagtgaacatcctgtaagtaaatctttgtgcatgtccacgtttatttccttaatttctaggagtgtaattgctatgtcaaaaataagcagttttttaaaagctttaagaatatttagaaatacggaatttaaatagattgctaaatgatgtgtgttgaagaaatttaactcaaagcctcctgatcataacatgctgtcttagttcattttctgctacaacagaatagcagggactgataatttgtaaatttgtaaataatagtagtttgtttggctcatggttctggagactgggcagtccaagagcatggcgccagcacctaagcaaggtccttggtgctgtgacatcccatggtg

SEQ ID NO: 318891 - DNA, 2749 bp, Homo sapiens
tctctggcccggatgcgtccctctttctccaccccgccgagcctaaactagtgacggggagggagacgggatagtgtttctgtttccgtggtctttgaatccacaacctctagtctgaacacagagaacacaaatttgtcgattacttcaggaagcccagggggaaccgcgccccgctgaagggctcggggaaggcgcgctcccgcgtcccgccccctcctcccccagcactcacactgtggtagcggcggagggcggagggatccggaggcggcggagggagacgtcattgcagggttgtttgtcagtctcggcggcggcggcggcggcggcggcggcggcggcgatccacagtgattcggccgccgcgccggggggtgggggggctgcgcgggacttttttttttttcagactgaccgcggggcagctgcggagcatgtcgaccccggcccggaggaggctcatgcgggatttcaagcggttacaagaggacccacctgtgggtgtcagtggcgcaccatctgaaaacaacatcatgcagtggaatgcagttatatttggaccagaagggacaccttttgaagatggtacttttaaactagtaatagaattttctgaagaatatccaaataaaccaccaactgttaggtttttatccaaaatgtttcatccaaatgtgtatgctgatggtagcatatgtttagatatccttcagaatcgatggagtccaacatatgatgtatcttctatcttaacatcaattcagtctctgctggatgaaccgaatcctaacagtccagccaatagccaggcagcacagctttatcaggaaaacaaacgagaatatgagaaaagagtttcggccattgttgaacaaagctggaatgattcataatagacaactggtctgttaatctttttcatcattgttgtgtataatttacctctcattagaaaggctaacaaattttaagtgccacaggttttaaggattctgcagaaaaaaaagaaaaaagtccttcagtttagaacctacaaaagcttgtgtatcttgattaatgtactttttattgcatggtgtgaactaagttattgctgcataaatttgtaatatatcctgtttgtatttttttccaagtgtataatgttggtgtggagttttcatgacagaatatacacattttgtaaatctgtacttttttcaaatattgaatgccttatttttgaattctttagatttttaaattggagaaaagcacttaaagttttttatatatgaatattacatgtaaagctgttaaaatacataacttcagtgcaagagactttgtcacttatttccttatgtgtgtaggaggggttaataagtctctagctctccatctattgatagtttcatttacaatttcaaaagaacattcttatattttatcaaggaagtcttcaaatttgattctaaatagcgattataatctccaactttattttgaatgtacctctattagtttcaattgagtaattctagacataactggtttgactctgtccaactctgtatttaggccatttgttacagtttcttcatgcattacttactgttaaaactgtaccttttgcgatttcacagttggcacttctgccatgagcagagaactgatgcgacttgttttgctgcttggtagcactttaaaaaattttttgattaatgaagaaagtaaaaccataaacatttgccaaaaattcatgccccagtattagcaatgaattagttgcattggtttgagaaaggcacatattggagggaaatcttggtgtaacttaaatatttgaaaattacctttaatgcaatgcatatctgtttattctgggaaatgttttaatgccagggcctgctgagttgcttcttcttgtggagattttttttttaatctcctgagttgtataaaagttgtactgcatcttagtttactggataaatttaaaacacagtattgtagaaagctaatacaaaactatcctatgccttcaaatagtatagaaaatggaaaatatacaagtaaattctgttgaaccacctgtgtagtctctctagtagttaaaacagctattttagtaaccccaagagtttcttctcatatccataaaattggattacagtatggcaatatctacagcttctattcattatgcaacgtttaacattgattggataaatgcttataggctgggccaggtggctcccacctgtagtcccagcactttgggaggcaaaggcgggaggatcacttgaggccaggactttgagaccagccagggcaacataataagacttttctctactttaaattttttaaaaaattagttgggcatagtggcacttgcctgtagtctcagctacttaggaggctgaggtggcagaatagcttatgcctaggaggttgaggctgcagtgagctgtgattatgccattgcactccagcctgggtgacagagcaataccctgtctttaaaaataaaagctattacttggcaaattctgaggtaagtgtatgatcttagggaactttgatacaaatgggaattcactcactggaatcgtggctcccaaaaagatgctttaattgtgtggtgcttttatagtttagctccaaaacaaactatagacattcactccagtaactcctagattaaatatacagtagctatgagggtctgccctcttatttcattaaatgctatttggttact

SEQ ID NO: 318892 - DNA, 1736 bp, Homo sapiens
tctctggcccggatgcgtccctctttctccaccccgccgagcctaaactagtgacggggagggagacgggatagtgtttctgtttccgtggtctttgaatccacaacctctagtctgaacacagagaacacaaatttgtcgattacttcaggaagcccagggggaaccgcgccccgctgaagggctcggggaaggcgcgctcccgcgtcccgccccctcctcccccagcactcacactgtggtagcggcggagggcggagggatccggaggcggcggagggagacgtcattgcagggttgtttgtcagtctcggcggcggcggcggcggcggcggcggcggcggcgatccacagtgattcggccgccgcgccggggggtgggggggctgcgcgggacttttttttttttcagactgaccgcggggcagctgcggagcatgtcgaccccggcccggaggaggctcatgcgggatttcaagcggttacaagaggacccacctgtgggtgtcagtggcgcaccatctgaaaacaacatcatgcagtggaatgcagttatatttggaccagaagggacaccttttgaagatggtacttttaaactagtaatagaattttctgaagaatatccaaataaaccaccaactgttaggtttttatccaaaatgtttcatccaaatgtgtatgctgatggtagcatatgtttagatatccttcagaatcgatggagtccaacatatgatgtatcttctatcttaacatcaattcagtctctgctggatgaaccgaatcctaacagtccagccaatagccaggcagcacagctttatcaggaaaacaaacgagaatatgagaaaagagtttcggccattgttgaacaaagctggaatgattcataatagacaactggtctgttaatctttttcatcattgttgtgtataatttacctctcattagaaaggctaacaaattttaagtgccacaggttttaaggattctgcagaaaaaaaagaaaaaagtccttcagtttagaacctacaaaagcttgtgtatcttgattaatgtactttttattgcatggtgtgaactaagttattgctgcataaatttgtaatatatcctgtttgtatttttttccaagtgtataatgttggtgtggagttttcatgacagaatatacacattttgtaaatctgtacttttttcaaatattgaatgccttatttttgaattctttagatttttaaattggagaaaagcacttaaagttttttatatatgaatattacatgtaaagctgttaaaatacataacttcagtgcaagagactttgtcacttatttccttatgtgtgtaggaggggttaataagtctctagctctccatctattgatagtttcatttacaatttcaaaagaacattcttatattttatcaaggaagtcttcaaatttgattctaaatagcgattataatctccaactttattttgaatgtacctctattagtttcaattgagtaattctagacataactggtttgactctgtccaactctgtatttaggccatttgttacagtttcttcatgcattacttactgttaaaactgtaccttttgcgatttcacagttggcacttctgccatgagcagagaactgatgcgacttgttttgctgcttggtagcactttaaaaaattttttgattaatgaagaaagtaaaaccataaacatttgcc

SEQ ID NO: 318893 - DNA, 1704 bp, Homo sapiens
  misc_feature (1)..(1): n is a, c, g, or t
  misc_feature (16)..(16): n is a, c, g, or t
  misc_feature (23)..(23): n is a, c, g, or t
nattcggcatgagccncggattnaaattttttttttttcagactgaccgcggggcagctgcggagcatgtcgaccccggcccggaggaggctcatgcgggatttcaagcggttacaagaggacccacctgtgggtgtcagtggcgcaccatctgaaaacaacatcatgcagtggaatgcagttatatttggaccagaagggacaccttttgaagatggtacttttaaactagtaatagaattttctgaagaatatccaaataaaccaccaactgttaggtttttatccaaaatgtttcatccaaatgtgtatgctgatggtagcatatgtttagatatccttcagaatcgatggagtccaacatatgatgtatcttctatcttaacatcaattcagtctctgctggatgaaccgaatcctaacagtccagccaatagccaggcagcacagctttatcaggaaaacaaacgagaatatgagaaaagagtttcggccattgttgaacaaagctggaatgattcataatagacaactggtctgttaatctttttcatcattgttgtgtataatttacctctcattagaaaggctaacaaattttaagtgccacaggttttaaggattctgcagaaaaaaaagaaaaaagtccttcagtttagaacctacaaaagcttgtgtatcttgattaatgtactttttattgcatggtgtgaactaagttattgctgcataaatttgtaatatatcctgtttgtatttttttccaagtgtataatgttggtgtggagttttcatgacagaatatacacattttgtaaatctgtacttttttcaaatattgaatgccttatttttgaattctttagatttttaaattggagaaaagcacttaaagttttttatatatgaatattacatgtaaagctgttaaaatacataacttcagtgcaagagactttgtcacttatttccttatgtgtgtaggaggggttaataagtctctagctctccatctattgatagtttcatttacaatttcaaaagaacattcttatattttatcaaggaagtcttcaaatttgattctaaatagcgattataatctccaactttattttgaatgtacctctattagtttcaattgagtaattctagacataactggtttgactctgtccaactctgtatttaggccatttgttacagtttcttcatgcattacttactgttaaaactgtaccttttgcgatttcacagttggcacttctgccatgagcagagaactgatgcgacttgttttgctgcttggtagcactttaaaaaattttttgattaatgaagaaagtaaaaccataaacatttgccaaaaattcatgccccagtattagcaatgaattagttgcattggtttgagaaaggcacatattggagggaaatcttggtgtaacttaaatatttgaaaattacctttaatgcaatgcatatctgtttattctgggaaatgttttaatgccagggcctgctgagttgcttcttcttgtggagattttttttttaatctcctgagttgtataaaagttgtactgcatcttagtttactggataaatttaaaacacagtattgtagaaagctaatacaaaactatcctatgccttcaaatagtatagaaaatggaaaatatacaagtaaattctgttgaacca

SEQ ID NO: 318894 - DNA, 1530 bp, Homo sapiens
tctctggcccggatgcgtccctctttctccaccccgccgagcctaaactagtgacggggagggagacgggatagtgtttctgtttccgtggtctttgaatccacaacctctagtctgaacacagagaacacaaatttgtcgattacttcaggaagcccagggggaaccgcgccccgctgaagggctcggggaaggcgcgctcccgcgtcccgccccctcctcccccagcactcacactgtggtagcggcggagggcggagggatccggaggcggcggagggagacgtcattgcagggttgtttgtcagtctcggcggcggcggcggcggcggcggcggcggcggcgatccacagtgattcggccgccgcgccggggggtgggggggctgcgcgggacttttttttttttcagactgaccgcggggcagctgcggagcatgtcgaccccggcccggaggaggctcatgcgggatttcaagcggttacaagaggacccacctgtgggtgtcagtggcgcaccatctgaaaacaacatcatgcagtggaatgcagttatatttggaccagaagggacaccttttgaagatggtacttttaaactagtaatagaattttctgaagaatatccaaataaaccaccaactgttaggtttttatccaaaatgtttcatccaaatgtgtatgctgatggtagcatatgtttagatatccttcagaatcgatggagtccaacatatgatgtatcttctatcttaacatcaattcagtctctgctggatgaaccgaatcctaacagtccagccaatagccaggcagcacagctttatcaggaaaacaaacgagaatatgagaaaagagtttcggccattgttgaacaaagctggaatgattcataatagacaactggtctgttaatctttttcatcattgttgtgtataatttacctctcattagaaaggctaacaaattttaagtgccacaggttttaaggattctgcagaaaaaaaagaaaaaagtccttcagtttagaacctacaaaagcttgtgtatcttgattaatgtactttttattgcatggtgtgaactaagttattgctgcataaatttgtaatatatcctgtttgtatttttttccaagtgtataatgttggtgtggagttttcatgacagaatatacacattttgtaaatctgtacttttttcaaatattgaatgccttatttttgaattctttagatttttaaattggagaaaagcacttaaagttttttatatatgaatattacatgtaaagctgttaaaatacataacttcagctgaaaaaaaaaaaaaaaaaaaaaaaaaaaaaacaaaaacaaaacaaaaaacacaaaagcacaaaaacacaaaaaaagacacgaaaacaaatacacaacaagctgcgacaacacacctctaccacgccactcccagcgcctcaccaccccgtcctcaccccccgccgccctaccccttcccgccaccctccaccaacagcgtgccccccactt

SEQ ID NO: 318895 - DNA, 1480 bp, Homo sapiens
gcacgaggattcttcagaaaattctattactagtttaaaagtaccaactgttaggtttttatccaaaatgtttcatccaaatgtgtatgctgatggtagcatatgtttagatatccttcagaatcgatggagtccaacatatgatgtatcttctatcttaacatcaattcagtctctgctggatgaaccgaatcctaacagtccagccaatagccaggcagcacagctttatcaggaaaacaaacgagaatatgagaaaagagtttcggccattgttgaacaaagctggaatgattcataatagacaactggtctgttaatctttttcatcattgttgtgtataatttacctctcattagaaaggctaacaaattttaagtgccacaggttttaaggattctgcagaaaaaaaagaaaaaagtccttcagtttagaacctacaaaagcttgtgtatcttgattaatgtactttttattgcatggtgtgaactaagttattgctgcataaatttgtaatatatcctgtttgtatttttttccaagtgtataatgttggtgtggagttttcatgacagaatatacacattttgtaaatctgtacttttttcaaatattgaatgccttatttttgaattctttagatttttaaattggagaaaagcacttaaagttttttatatatgaatattacatgtaaagctgttaaaatacataacttcagtgcaagagactttgtcacttatttccttatgtgtgtaggaggggttaataagtctctagctctccatctattgatagtttcatttacaatttcaaaagaacattcttatattttatcaaggaagtcttcaaatttgattctaaatagcgattataatctccaactttattttgaatgtacctctattagtttcaattgagtaattctagacataactggtttgactctgtccaactctgtatttaggccatttgttacagtttcttcatgcattacttactgttaaaactgtaccttttgcgatttcacagttggcacttctgccatgagcagagaactgatgcgacttgttttgctgcttggtagcactttaaaaaattttttgattaatgaagaaagtaaaaccataaacatttgccaaaaattcatgccccagtattagcaatgaattagttgcattggtttgagaaaggcacatattggagggaaatcttggtgtaacttaaatatttgaaaattacctttaatgcaatgcatatctgtttattctgggaaatgttttaatgccagggcctgctgagttgcttcttcttgtggagattttttttttaatctcctgagttgtataaaagttgtactgcatcttagtttactggataaatttaaaacacagtattgtagaaagctaatacaaaactatcctatgccttcaaatagtatagaaaatggaaaatatacaagtaaattctgttgaacca

SEQ ID NO: 318896 - DNA, 1985 bp, Homo sapiens
tctctggcccggatgcgtccctctttctccaccccgccgagcctaaactagtgacggggagggagacgggatagtgtttctgtttccgtggtctttgaatccacaacctctagtctgaacacagagaacacaaatttgtcgattacttcaggaagcccagggggaaccgcgccccgctgaagggctcggggaaggcgcgctcccgcgtcccgccccctcctcccccagcactcacactgtggtagcggcggagggcggagggatccggaggcggcggagggagacgtcattgcagggttgtttgtcagtctcggcggcggcggcggcggcggcggcggcggcggcgatccacagtgattcggccgccgcgccggggggtgggggggctgcgcgggacttttttttttttcagactgaccgcggggcagctgcggagcatgtcgaccccggcccggaggaggctcatgcgggatttcaagcggttacaagaggacccacctgtgggtgtcagtggcgcaccatctgaaaacaacatcatgcagtggaatgcagttatatttggaccagaagggacaccttttgaagatgtgtatgctgatggtagcatatgtttagatatccttcagaatcgatggagtccaacatatgatgtatcttctatcttaacatcaattcagtctctgctggatgaaccgaatcctaacagtccagccaatagccaggcagcacagctttatcaggaaaacaaacgagaatatgagaaaagagtttcggccattgttgaacaaagctggaatgattcataatagacaactggtctgttaatctttttcatcattgttgtgtataatttacctctcattagaaaggctaacaaattttaagtgccacaggttttaaggattctgcagaaaaaaaagaaaaaagtccttcagtttagaacctacaaaagcttgtgtatcttgattaatgtactttttattgcatggtgtgaactaagttattgctgcataaatttgtaatatatcctgtttgtatttttttccaagtgtataatgttggtgtggagttttcatgacagaatatacacattttgtaaatctgtacttttttcaaatattgaatgccttatttttgaattctttagatttttaaattggagaaaagcacttaaagttttttatatatgaatattacatgtaaagctgttaaaatacataacttcagtgcaagagactttgtcacttatttccttatgtgtgtaggaggggttaataagtctctagctctccatctattgatagtttcatttacaatttcaaaagaacattcttatattttatcaaggaagtcttcaaatttgattctaaatagcgattataatctccaactttattttgaatgtacctctattagtttcaattgagtaattctagacataactggtttgactctgtccaactctgtatttaggccatttgttacagtttcttcatgcattacttactgttaaaactgtaccttttgcgatttcacagttggcacttctgccatgagcagagaactgatgcgacttgttttgctgcttggtagcactttaaaaaattttttgattaatgaagaaagtaaaaccataaacatttgccaaaaattcatgccccagtattagcaatgaattagttgcattggtttgagaaaggcacatattggagggaaatcttggtgtaacttaaatatttgaaaattacctttaatgcaatgcatatctgtttattctgggaaatgttttaatgccagggcctgctgagttgcttcttcttgtggagattttttttttaatctcctgagttgtataaaagttgtactgcatcttagtttactggataaatttaaaacacagtattgtagaaagctaatacaaaactatcctatgccttcaaatagtatagaaaatggaaaatatacaagtaaattctgttgaacca

SEQ ID NO: 318897 - DNA, 2080 bp, Homo sapiens
gcagaatgacaagtgagcacacaagacataagaaaaggtgccaaactcatccttttatctggagtacactcctgccctgagcactcatgacctaagcacttcttaaaggtcccacttctcaacagtgttacaatggcaattaatttttttttatttaatttttttacttttatttttttgagacaggttcttaccctgtcatccaggctggagtgcagtggtgtgatctcggctcactgcaacccctgcctcctgggttcaagcgattctcctgcctcagccttccaagtagctgggattacaggcatgtgccaccatgcccggctaatttttataattttagtagagatggggtttcactgtgttggcccgactggtctcagactcctgacctcaagcaatcctgcctgcctcggcctcccaaagtgttcaggactggcgtgagccaccgtgcccagcctccagcaattacatttcaacatgagatttggagggaacattcaaaccatagcaggtgcaaaataagagaccttagttttaagacaggttatcctgtgatacagaagaatttagttattacctaatatttaaaacttctaagccaagcattctgtttggtaaagatttctcttaactgttagatatggcagagtgtgtaactaattttagtattgtctttgcagtgtatgctgatggtagcatatgtttagatatccttcagaatcgatggagtccaacatatgatgtatcttctatcttaacatcaattcagtctctgctggatgaaccgaatcctaacagtccagccaatagccaggcagcacagctttatcaggaaaacaaacgagaatatgagaaaagagtttcggccattgttgaacaaagctggaatgattcataatagacaactggtctgttaatctttttcatcattgttgtgtataatttacctctcattagaaaggctaacaaattttaagtgccacaggttttaaggattctgcagaaaaaaaagaaaaaagtccttcagtttagaacctacaaaagcttgtgtatcttgattaatgtactttttattgcatggtgtgaactaagttattgctgcataaatttgtaatatatcctgtttgtatttttttccaagtgtataatgttggtgtggagttttcatgacagaatatacacattttgtaaatctgtacttttttcaaatattgaatgccttatttttgaattctttagatttttaaattggagaaaagcacttaaagttttttatatatgaatattacatgtaaagctgttaaaatacataacttcagtgcaagagactttgtcacttatttccttatgtgtgtaggaggggttaataagtctctagctctccatctattgatagtttcatttacaatttcaaaagaacattcttatattttatcaaggaagtcttcaaatttgattctaaatagcgattataatctccaactttattttgaatgtacctctattagtttcaattgagtaattctagacataactggtttgactctgtccaactctgtatttaggccatttgttacagtttcttcatgcattacttactgttaaaactgtaccttttgcgatttcacagttggcacttctgccatgagcagagaactgatgcgacttgttttgctgcttggtagcactttaaaaaattttttgattaatgaagaaagtaaaaccataaacatttgccaaaaattcatgccccagtattagcaatgaattagttgcattggtttgagaaaggcacatattggagggaaatcttggtgtaacttaaatatttgaaaattacctttaatgcaatgcatatctgtttattctgggaaatgttttaatgccagggcctgctgagttgcttcttcttgtggagattttttttttaatctcctgagttgtataaaagttgtactgcatcttagtttactggataaatttaaaacacagtattgtagaaagctaatacaaaactatcctatgccttcaaatagtatagaaaatggaaaatatacaagtaaattctgttgaacca

SEQ ID NO: 318898 - DNA, 1978 bp, Homo sapiens
ttaaccaaagacagccatgtatgtggcagaggtaattgggttcttagtattcttttttgttttccttttatttttttgagacaggttcttaccctgtcatccaggctggagtgcagtggtgtgatctcggctcactgcaacccctgcctcctgggttcaagcgattctcctgcctcagccttccaagtagctgggattacaggcatgtgccaccatgcccggctaatttttataattttagtagagatggggtttcactgtgttggcccgactggtctcagactcctgacctcaagcaatcctgcctgcctcggcctcccaaagtgttcaggactggcgtgagccaccgtgcccagcctccagcaattacatttcaacatgagatttggagggaacattcaaaccatagcaggtgcaaaataagagaccttagttttaagacaggttatcctgtgatacagaagaatttagttattacctaatatttaaaacttctaagccaagcattctgtttggtaaagatttctcttaactgttagatatggcagagtgtgtaactaattttagtattgtctttgcagtgtatgctgatggtagcatatgtttagatatccttcagaatcgatggagtccaacatatgatgtatcttctatcttaacatcaattcagtctctgctggatgaaccgaatcctaacagtccagccaatagccaggcagcacagctttatcaggaaaacaaacgagaatatgagaaaagagtttcggccattgttgaacaaagctggaatgattcataatagacaactggtctgttaatctttttcatcattgttgtgtataatttacctctcattagaaaggctaacaaattttaagtgccacaggttttaaggattctgcagaaaaaaaagaaaaaagtccttcagtttagaacctacaaaagcttgtgtatcttgattaatgtactttttattgcatggtgtgaactaagttattgctgcataaatttgtaatatatcctgtttgtatttttttccaagtgtataatgttggtgtggagttttcatgacagaatatacacattttgtaaatctgtacttttttcaaatattgaatgccttatttttgaattctttagatttttaaattggagaaaagcacttaaagttttttatatatgaatattacatgtaaagctgttaaaatacataacttcagtgcaagagactttgtcacttatttccttatgtgtgtaggaggggttaataagtctctagctctccatctattgatagtttcatttacaatttcaaaagaacattcttatattttatcaaggaagtcttcaaatttgattctaaatagcgattataatctccaactttattttgaatgtacctctattagtttcaattgagtaattctagacataactggtttgactctgtccaactctgtatttaggccatttgttacagtttcttcatgcattacttactgttaaaactgtaccttttgcgatttcacagttggcacttctgccatgagcagagaactgatgcgacttgttttgctgcttggtagcactttaaaaaattttttgattaatgaagaaagtaaaaccataaacatttgccaaaaattcatgccccagtattagcaatgaattagttgcattggtttgagaaaggcacatattggagggaaatcttggtgtaacttaaatatttgaaaattacctttaatgcaatgcatatctgtttattctgggaaatgttttaatgccagggcctgctgagttgcttcttcttgtggagattttttttttaatctcctgagttgtataaaagttgtactgcatcttagtttactggataaatttaaaacacagtattgtagaaagctaatacaaaactatcctatgccttcaaatagtatagaaaatggaaaatatacaagtaaattctgttgaacca

SEQ ID NO: 318899 - DNA, 1959 bp, Homo sapiens
tctctggcccggatgcgtccctctttctccaccccgccgagcctaaactagtgacggggagggagacgggatagtgtttctgtttccgtggtctttgaatccacaacctctagtctgaacacagagaacacaaatttgtcgattacttcaggaagcccagggggaaccgcgccccgctgaagggctcggggaaggcgcgctcccgcgtcccgccccctcctcccccagcactcacactgtggtagcggcggagggcggagggatccggaggcggcggagggagacgtcattgcagggttgtttgtcagtctcggcggcggcggcggcggcggcggcggcggcggcgatccacagtgattcggccgccgcgccggggggtgggggggctgcgcgggacttttttttttttcagactgaccgcggggcagctgcggagcatgtcgaccccggcccggaggaggctcatgcgggatttcaagcggttacaagaggacccacctgtgggtgtcagtggcgcaccatctgaaaacaacatcatgcagtggaatgcagttatatttggtgtatgctgatggtagcatatgtttagatatccttcagaatcgatggagtccaacatatgatgtatcttctatcttaacatcaattcagtctctgctggatgaaccgaatcctaacagtccagccaatagccaggcagcacagctttatcaggaaaacaaacgagaatatgagaaaagagtttcggccattgttgaacaaagctggaatgattcataatagacaactggtctgttaatctttttcatcattgttgtgtataatttacctctcattagaaaggctaacaaattttaagtgccacaggttttaaggattctgcagaaaaaaaagaaaaaagtccttcagtttagaacctacaaaagcttgtgtatcttgattaatgtactttttattgcatggtgtgaactaagttattgctgcataaatttgtaatatatcctgtttgtatttttttccaagtgtataatgttggtgtggagttttcatgacagaatatacacattttgtaaatctgtacttttttcaaatattgaatgccttatttttgaattctttagatttttaaattggagaaaagcacttaaagttttttatatatgaatattacatgtaaagctgttaaaatacataacttcagtgcaagagactttgtcacttatttccttatgtgtgtaggaggggttaataagtctctagctctccatctattgatagtttcatttacaatttcaaaagaacattcttatattttatcaaggaagtcttcaaatttgattctaaatagcgattataatctccaactttattttgaatgtacctctattagtttcaattgagtaattctagacataactggtttgactctgtccaactctgtatttaggccatttgttacagtttcttcatgcattacttactgttaaaactgtaccttttgcgatttcacagttggcacttctgccatgagcagagaactgatgcgacttgttttgctgcttggtagcactttaaaaaattttttgattaatgaagaaagtaaaaccataaacatttgccaaaaattcatgccccagtattagcaatgaattagttgcattggtttgagaaaggcacatattggagggaaatcttggtgtaacttaaatatttgaaaattacctttaatgcaatgcatatctgtttattctgggaaatgttttaatgccagggcctgctgagttgcttcttcttgtggagattttttttttaatctcctgagttgtataaaagttgtactgcatcttagtttactggataaatttaaaacacagtattgtagaaagctaatacaaaactatcctatgccttcaaatagtatagaaaatggaaaatatacaagtaaattctgttgaacca

SEQ ID NO: 318900 - DNA, 1904 bp, Homo sapiens
agcctgggtgacagagcgagactccatctcaaaaaaaaagaaaaagaaaagaggatcatctggtgtgagccactgcgcctggccttctactcttataagtagtattatagtgaacatcctgtaagtaaatctttgtgcatgtccacgtttatttccttaatttctaggagtgtaattgctatgtcaaaaataagcagttttttaaaagctttaagaatatttagaaatacggaatttaaatagattgctaaatgatgtgtgttgaagaaatttaactcaaagcctccagcaattacatttcaacatgagatttggagggaacattcaaaccatagcaggtgcaaaataagagaccttagttttaagacaggttatcctgtgatacagaagaatttagttattacctaatatttaaaacttctaagccaagcattctgtttggtaaagatttctcttaactgttagatatggcagagtgtgtaactaattttagtattgtctttgcagtgtatgctgatggtagcatatgtttagatatccttcagaatcgatggagtccaacatatgatgtatcttctatcttaacatcaattcagtctctgctggatgaaccgaatcctaacagtccagccaatagccaggcagcacagctttatcaggaaaacaaacgagaatatgagaaaagagtttcggccattgttgaacaaagctggaatgattcataatagacaactggtctgttaatctttttcatcattgttgtgtataatttacctctcattagaaaggctaacaaattttaagtgccacaggttttaaggattctgcagaaaaaaaagaaaaaagtccttcagtttagaacctacaaaagcttgtgtatcttgattaatgtactttttattgcatggtgtgaactaagttattgctgcataaatttgtaatatatcctgtttgtatttttttccaagtgtataatgttggtgtggagttttcatgacagaatatacacattttgtaaatctgtacttttttcaaatattgaatgccttatttttgaattctttagatttttaaattggagaaaagcacttaaagttttttatatatgaatattacatgtaaagctgttaaaatacataacttcagtgcaagagactttgtcacttatttccttatgtgtgtaggaggggttaataagtctctagctctccatctattgatagtttcatttacaatttcaaaagaacattcttatattttatcaaggaagtcttcaaatttgattctaaatagcgattataatctccaactttattttgaatgtacctctattagtttcaattgagtaattctagacataactggtttgactctgtccaactctgtatttaggccatttgttacagtttcttcatgcattacttactgttaaaactgtaccttttgcgatttcacagttggcacttctgccatgagcagagaactgatgcgacttgttttgctgcttggtagcactttaaaaaattttttgattaatgaagaaagtaaaaccataaacatttgccaaaaattcatgccccagtattagcaatgaattagttgcattggtttgagaaaggcacatattggagggaaatcttggtgtaacttaaatatttgaaaattacctttaatgcaatgcatatctgtttattctgggaaatgttttaatgccagggcctgctgagttgcttcttcttgtggagattttttttttaatctcctgagttgtataaaagttgtactgcatcttagtttactggataaatttaaaacacagtattgtagaaagctaatacaaaactatcctatgccttcaaatagtatagaaaatggaaaatatacaagtaaattctgttgaacca

SEQ ID NO: 318901 - DNA, 2017 bp, Homo sapiens
tctctggcccggatgcgtccctctttctccaccccgccgagcctaaactagtgacggggagggagacgggatagtgtttctgtttccgtggtctttgaatccacaacctctagtctgaacacagagaacacaaatttgtcgattacttcaggaagcccagggggaaccgcgccccgctgaagggctcggggaaggcgcgctcccgcgtcccgccccctcctcccccagcactcacactgtggtagcggcggagggcggagggatccggaggcggcggagggagacgtcattgcagggttgtttgtcagtctcggcggcggcggcggcggcggcggcggcggcggcgatccacagtgattcggccgccgcgccggggggtgggggggctgcgcgggacttttttttttttcagactgaccgcggggcagctgcggagcatgtcgaccccggcccggaggaggctcatgcgggatttcaagcggttacaagaggacccacctgtgggtgtcagtggcgcaccatctgaaaacaacatcatgcagtggaatgcagttatatttggaccagaagggacaccttttgaagatggtacttttaaactagtaatagaattttctgaagaatatccaaataaaccaccaactgttaggtttttatccaaaatgtttcatccaaatgtgtatgctgatggtagcatatgtttagatatccttcagaatcgatggagtccaacatatgatgtatcttctatcttaacatcaattcagtctctgctggatgaaccgaatcctaacagtccagccaatagccaggcagcacagctttatcaggaaaacaaacgagaatatgagaaaagagtttcggccattgttgaacaaagctggaatgattcataatagacaactggtctgttaatctttttcatcattgttgtgtataatttacctctcattagaaaggctaacaaattttaagtgccacaggttttaaggattctgcagatgtactttttattgcatggtgtgaactaagttattgctgcataaatttgtaatatatcctgtttgtatttttttccaagtgtataatgttggtgtggagttttcatgacagaatatacacattttgtaaatctgtacttttttcaaatattgaatgccttatttttgaattctttagatttttaaattggagaaaagcacttaaagttttttatatatgaatattacatgtaaagctgttaaaatacataacttcagtgcaagagactttgtcacttatttccttatgtgtgtaggaggggttaataagtctctagctctccatctattgatagtttcatttacaatttcaaaagaacattcttatattttatcaaggaagtcttcaaatttgattctaaatagcgattataatctccaactttattttgaatgtacctctattagtttcaattgagtaattctagacataactggtttgactctgtccaactctgtatttaggccatttgttacagtttcttcatgcattacttactgttaaaactgtaccttttgcgatttcacagttggcacttctgccatgagcagagaactgatgcgacttgttttgctgcttggtagcactttaaaaaattttttgattaatgaagaaagtaaaaccataaacatttgccaaaaattcatgccccagtattagcaatgaattagttgcattggtttgagaaaggcacatattggagggaaatcttggtgtaacttaaatatttgaaaattacctttaatgcaatgcatatctgtttattctgggaaatgttttaatgccagggcctgctgagttgcttcttcttgtggagattttttttttaatctcctgagttgtataaaagttgtactgcatcttagtttactggataaatttaaaacacagtattgtagaaagctaatacaaaactatcctatgccttcaaatagtatagaaaatggaaaatatacaagtaaattctgttgaacca

SEQ ID NO: 318902 - DNA, 1572 bp, Homo sapiens
acaagccactgtacccagctgaaattataggtcttaaggcaattgagaactttatttcagaagcttaagttccttagcagcaggaaaccccatagtatttatcaaatcatttctaaaagtatttagacccaaaattatatgacatgttaatctctgaagtaatttgttgttttgtataacttttctgtaatatattccatatctgacccctgttggtataaagaacaactatgcaaatctgttttttcttttctttcctcctagtctctgctggatgaaccgaatcctaacagtccagccaatagccaggcagcacagctttatcaggaaaacaaacgagaatatgagaaaagagtttcggccattgttgaacaaagctggaatgattcataatagacaactggtctgttaatctttttcatcattgttgtgtataatttacctctcattagaaaggctaacaaattttaagtgccacaggttttaaggattctgcagaaaaaaaagaaaaaagtccttcagtttagaacctacaaaagcttgtgtatcttgattaatgtactttttattgcatggtgtgaactaagttattgctgcataaatttgtaatatatcctgtttgtatttttttccaagtgtataatgttggtgtggagttttcatgacagaatatacacattttgtaaatctgtacttttttcaaatattgaatgccttatttttgaattctttagatttttaaattggagaaaagcacttaaagttttttatatatgaatattacatgtaaagctgttaaaatacataacttcagtgcaagagactttgtcacttatttccttatgtgtgtaggaggggttaataagtctctagctctccatctattgatagtttcatttacaatttcaaaagaacattcttatattttatcaaggaagtcttcaaatttgattctaaatagcgattataatctccaactttattttgaatgtacctctattagtttcaattgagtaattctagacataactggtttgactctgtccaactctgtatttaggccatttgttacagtttcttcatgcattacttactgttaaaactgtaccttttgcgatttcacagttggcacttctgccatgagcagagaactgatgcgacttgttttgctgcttggtagcactttaaaaaattttttgattaatgaagaaagtaaaaccataaacatttgccaaaaattcatgccccagtattagcaatgaattagttgcattggtttgagaaaggcacatattggagggaaatcttggtgtaacttaaatatttgaaaattacctttaatgcaatgcatatctgtttattctgggaaatgttttaatgccagggcctgctgagttgcttcttcttgtggagattttttttttaatctcctgagttgtataaaagttgtactgcatcttagtttactggataaatttaaaacacagtattgtagaaagctaatacaaaactatcctatgccttcaaatagtatagaaaatggaaaatatacaagtaaattctgttgaacca

SEQ ID NO: 318903 - DNA, 1870 bp, Homo sapiens
tctctggcccggatgcgtccctctttctccaccccgccgagcctaaactagtgacggggagggagacgggatagtgtttctgtttccgtggtctttgaatccacaacctctagtctgaacacagagaacacaaatttgtcgattacttcaggaagcccagggggaaccgcgccccgctgaagggctcggggaaggcgcgctcccgcgtcccgccccctcctcccccagcactcacactgtggtagcggcggagggcggagggatccggaggcggcggagggagacgtcattgcagggttgtttgtcagtctcggcggcggcggcggcggcggcggcggcggcggcgatccacagtgattcggccgccgcgccggggggtgggggggctgcgcgggacttttttttttttcagactgaccgcggggcagctgcggagcatgtcgaccccggcccggaggaggctcatgcgggatttcaagcggttacaagaggacccacctgtgggtgtcagtggcgcaccatctgaaaacaacatcatgcagtggaatgcagttatatttggtctctgctggatgaaccgaatcctaacagtccagccaatagccaggcagcacagctttatcaggaaaacaaacgagaatatgagaaaagagtttcggccattgttgaacaaagctggaatgattcataatagacaactggtctgttaatctttttcatcattgttgtgtataatttacctctcattagaaaggctaacaaattttaagtgccacaggttttaaggattctgcagaaaaaaaagaaaaaagtccttcagtttagaacctacaaaagcttgtgtatcttgattaatgtactttttattgcatggtgtgaactaagttattgctgcataaatttgtaatatatcctgtttgtatttttttccaagtgtataatgttggtgtggagttttcatgacagaatatacacattttgtaaatctgtacttttttcaaatattgaatgccttatttttgaattctttagatttttaaattggagaaaagcacttaaagttttttatatatgaatattacatgtaaagctgttaaaatacataacttcagtgcaagagactttgtcacttatttccttatgtgtgtaggaggggttaataagtctctagctctccatctattgatagtttcatttacaatttcaaaagaacattcttatattttatcaaggaagtcttcaaatttgattctaaatagcgattataatctccaactttattttgaatgtacctctattagtttcaattgagtaattctagacataactggtttgactctgtccaactctgtatttaggccatttgttacagtttcttcatgcattacttactgttaaaactgtaccttttgcgatttcacagttggcacttctgccatgagcagagaactgatgcgacttgttttgctgcttggtagcactttaaaaaattttttgattaatgaagaaagtaaaaccataaacatttgccaaaaattcatgccccagtattagcaatgaattagttgcattggtttgagaaaggcacatattggagggaaatcttggtgtaacttaaatatttgaaaattacctttaatgcaatgcatatctgtttattctgggaaatgttttaatgccagggcctgctgagttgcttcttcttgtggagattttttttttaatctcctgagttgtataaaagttgtactgcatcttagtttactggataaatttaaaacacagtattgtagaaagctaatacaaaactatcctatgccttcaaatagtatagaaaatggaaaatatacaagtaaattctgttgaacca

SEQ ID NO: 318904 - DNA, 1193 bp, Homo sapiens
gcagaatgacaagtgagcacacaagacataagaaaaggtgccaaactcatccttttatctggagtacactcctgccctgagcactcatgacctaagcacttcttaaaggtcccacttctcaacagtgttacaatggcaattaatttttttttatttaatttttttacttttatttttttgagacaggttcttaccctgtcatccaggctggagtgcagtggtgtgatctcggctcactgcaacccctgcctcctgggttcaagcgattctcctgcctcagccttccaagtagctgggattacaggcatgtgccaccatgcccggctaatttttataattttagtagagatggggtttcactgtgttggcccgactggtctcagactcctgacctcaagcaatcctgcctgcctcggcctcccaaagtgttcaggactggcgtgagccaccgtgcccagcctccagcaattacatttcaacatgagatttggagggaacattcaaaccatagcaggtgcaaaataagagaccttagttttaagacaggttatcctgtgatacagaagaatttagttattacctaatatttaaaacttctaagccaagcattctgtttggtaaagatttctcttaactgttagatatggcagagtgtgtaactaattttagtattgtctttgcagtgtatgctgatggtagcatatgtttagatatccttcagaatcgatggagtccaacatatgatgtatcttctatcttaacatcaattcaggtaagtgtgtgttaggatgtattataatttgtcagtattctgtaggatatagtcagctccttagcacacaggtaaccaatggcagagcttggacaagaatccatgcttttcagctaacttttctctttcagtagtgcctacttgggatccagtctgcagtccctttcctgattgtgtaagttacatgttctcacaggtcaaacctaatttgtgtccatgaagcatagccaagggttgtggaaaagaaaaaatggcttggaaaaaccataggaacctaaagaaactgccaagtgtagataagcattgagtatgttaccccatccaagaaattctattttaaaaaaagaaaggaaaactaatgtaagtatatattttttttccagaagactgttagtagtatggtcaacatatgaatcaggaa

SEQ ID NO: 318905 - DNA, 1275 bp, Homo sapiens
tctctggcccggatgcgtccctctttctccaccccgccgagcctaaactagtgacggggagggagacgggatagtgtttctgtttccgtggtctttgaatccacaacctctagtctgaacacagagaacacaaatttgtcgattacttcaggaagcccagggggaaccgcgccccgctgaagggctcggggaaggcgcgctcccgcgtcccgccccctcctcccccagcactcacactgtggtagcggcggagggcggagggatccggaggcggcggagggagacgtcattgcagggttgtttgtcagtctcggcggcggcggcggcggcggcggcggcggcggcgatccacagtgattcggccgccgcgccggggggtgggggggctgcgcgggacttttttttttttcagactgaccgcggggcagctgcggagcatgtcgaccccggcccggaggaggctcatgcgggatttcaagcggttacaagaggacccacctgtgggtgtcagtggcgcaccatctgaaaacaacatcatgcagtggaatgcagttatatttgggtgagttgaaaggtttaacaaataataggtgtgtgctgaatctttaagaaaagtaaacatataacaactgtctaggaaaagaaactgaggtggaatgagagatcttaaggactaaaactgcaagataaattagaaaaaaaaaatatttcaattagagttttggcccagcacagtagtagctcaacgcctgggaggatcgctggagcccaggagttcaccagcctgggcgatatagtgagacagtgagactctgtcccctccccaccaaaaaaagttttggcccagtctgggcaacatagtgagcccttgtctctacaaaaagtataaaactagctgagcatggtggtgcatacctgtggtcccagctacttggaaggctgaggcaggaggatcacttgagcccagaagtttgaggctgcagtgtgccatgattgtgccactgccctccaacatgggcagccagcagagccaagatcctgtatcaaaaaaaaaaggaaaaagtttcagcagttatataaagtttatttgctctttgatgttattacatatggttttataatctcttggggttttacttttaaaatactattcaaaactaaatggaatggaataataaaggagaaacaataagttactttatataaaacatatcacgcaaatgctctcattctgttggagctgttaaaaggtttggaaccaaaaatattaagaac

SEQ ID NO: 318906 - DNA, 1217 bp, Homo sapiens
tctctggcccggatgcgtccctctttctccaccccgccgagcctaaactagtgacggggagggagacgggatagtgtttctgtttccgtggtctttgaatccacaacctctagtctgaacacagagaacacaaatttgtcgattacttcaggaagcccagggggaaccgcgccccgctgaagggctcggggaaggcgcgctcccgcgtcccgccccctcctcccccagcactcacactgtggtagcggcggagggcggagggatccggaggcggcggagggagacgtcattgcagggttgtttgtcagtctcggcggcggcggcggcggcggcggcggcggcggcgatccacagtgattcggccgccgcgccggggggtgggggggctgcgcgggacttttttttttttcagactgaccgcggggcagctgcggagcatgtcgaccccggcccggaggaggctcatgcgggatttcaagcggttacaagaggacccacctgtgggtgtcagtggcgcaccatctgaaaacaacatcatgcagtggaatgcagttatatttgggtgagttgaaaggtttaacaaataataggtgtgtgctgaatctttaagaaaagtaaacatataacaactgtctaggaaaagaaactgaggtggaatgagagatcttaaggactaaaactgcaagataaattagaaagatcgctggagcccaggagttcaccagcctgggcgatatagtgagacagtgagactctgtcccctccccaccaaaaaaagttttggcccagtctgggcaacatagtgagcccttgtctctacaaaaagtataaaactagctgagcatggtggtgcatacctgtggtcccagctacttggaaggctgaggcaggaggatcacttgagcccagaagtttgaggctgcagtgtgccatgattgtgccactgccctccaacatgggcagccagcagagccaagatcctgtatcaaaaaaaaaaggaaaaagtttcagcagttatataaagtttatttgctctttgatgttattacatatggttttataatctcttggggttttacttttaaaatactattcaaaactaaatggaatggaataataaaggagaaacaataagttactttatataaaacatatcacgcaaatgctctcattctgttggagctgttaaaaggtttggaaccaaaaatattaagaac

SEQ ID NO: 318907 - DNA, 2075 bp, Homo sapiens
tctctggcccggatgcgtccctctttctccaccccgccgagcctaaactagtgacggggagggagacgggatagtgtttctgtttccgtggtctttgaatccacaacctctagtctgaacacagagaacacaaatttgtcgattacttcaggaagcccagggggaaccgcgccccgctgaagggctcggggaaggcgcgctcccgcgtcccgccccctcctcccccagcactcacactgtggtagcggcggagggcggagggatccggaggcggcggagggagacgtcattgcagggttgtttgtcagtctcggcggcggcggcggcggcggcggcggcggcggcgatccacagtgattcggccgccgcgccggggggtgggggggctgcgcgggacttttttttttttcagactgaccgcggggcagctgcggagcatgtcgaccccggcccggaggaggctcatgcgggatttcaagcggttacaagaggacccacctgtgggtgtcagtggcgcaccatctgaaaacaacatcatgcagtggaatgcagttatatttggaccagaagggacaccttttgaagatggtacttttaaactagtaatagaattttctgaagaatatccaaataaaccaccaactgttaggtttttatccaaaatgtttcatccaaatgtgtatgctgatggtagcatatgtttagatatccttcagaatcgatggagtccaacatatgatgtatcttctatcttaacatcaattcagtctctgctggatgaaccgaatcctaacagtccagccaatagccaggcagcacagctttatcaggaaaacaaacgagaatatgagaaaagagtttcggccattgttgaacaaagctggaatgattcataatagacaactggtctgttaatctttttcatcattgttgtgtataatttacctctcattagaaaggctaacaaattttaagtgccacaggttttaaggattctgcagaaaaaaaagaaaaaagtccttcagtttagaacctacaaaagcttgtgtatcttgattaatgtactttttattgcatggtgtgaactaagttattgctgcataaatttgtaatatatcctgtttgtatttttttccaagtgtataatgttggtgtggagttttcatgacagaatatacacattttgtaaatctgtacttttttcaaatattgaatgccttatttttgaattctttagatttttaaattggagaaaagcacttaaagttttttatatatgaatattacatgtaaagctgttaaaatacataacttcagtgcaagagactttgtcacttatttccttatgtgtgtaggaggggttaataagtctctagctctccatctattgatagtttcatttacaatttcaaaagaacattcttatattttatcaaggaagtcttcaaatttgattctaaatagcgattataatctccaactttattttgaatgtacctctattagtttcaattgagtaattctagacataactggtttgactctgtccaactctgtatttaggccatttgttacagtttcttcatgcattacttactgttaaaactgtaccttttgcgatttcacagttggcacttctgccatgagcagagaactgatgcgacttgttttgctgcttggtagcactttaaaaaattttttgattaatgaagaaagtaaaaccataaacatttgccaaaaattcatgccccagtattagcaatgaattagttgcattggtttgagaaaggcacatattggagggaaatcttggtgtaacttaaatatttgaaaattacctttaatgcaatgcatatctgtttattctgggaaatgttttaatgccagggcctgctgagttgcttcttcttgtggagattttttttttaatctcctgagttgtataaaagttgtactgcatcttagtttactggataaatttaaaacacagtattgtagaaagctaatacaaaactatcctatgccttcaaatagtatagaaaatggaaaatatacaagtaaattctgttgaacca

SEQ ID NO: 318908 - DNA, 2022 bp, Homo sapiens
tctctggcccggatgcgtccctctttctccaccccgccgagcctaaactagtgacggggagggagacgggatagtgtttctgtttccgtggtctttgaatccacaacctctagtctgaacacagagaacacaaatttgtcgattacttcaggaagcccagggggaaccgcgccccgctgaagggctcggggaaggcgcgctcccgcgtcccgccccctcctcccccagcactcacactgtggtagcggcggagggcggagggatccggaggcggcggagggagacgtcattgcagggttgtttgtcagtctcggcggcggcggcggcggcggcggcggcggcggcgatccacagtgattcggccgccgcgccggggggtgggggggctgcgcgggacttttttttttttcagactgaccgcggggcagctgcggagcatgtcgaccccggcccggaggaggctcatgcgggatttcaagcggttacaagaggacccacctgtgggtgtcagtggcgcaccatctgaaaacaacatcatgcagtggaatgcagttatatttggaccagaagggacaccttttgaagatggtacttttaaactagtaatagaattttctgaagaatatccaaataaaccaccaactgttaggtttttatccaaaatgtttcatccaaatgtgtatgctgatggtagcatatgtttagatatccttcagaatcgatggagtccaacatatgatgtatcttctatcttaacatcaattcagtctctgctggatgaaccgaatcctaacagtccagccaatagccaggcagcacagctttatcaggaaaacaaacgagaatatgagaaaagagtttcggccattgttgaacaaagctggaatgattcataatagacaactggtctgttaatctttttcatcattgttgtgtataatttacctctcattagaaaggctaacaaattttaagtgccacaggttttaaggattctgcagaaaaaaaagaaaaaagtccttcagtttagaacctacaaaagcttgtgtatcttgattaatgtactttttattgcatggtgtgaactaagttattgctgcataaatttgtaatatatcctgtttgtatttttttccaagtgtataatgttggtgtggagttttcatgacagaatatacacattttgtaaatctgtacttttttcaaatattgaatgccttatttttgaattctttagatttttaaattggagaaaagcacttaaagttttttatatatgaatattacatgtaaagctgttaaaatacataacttcagtgcaagagactttgtcacttatttccttatgtgtgtaggaggggttaataagtctctagctctccatctattgatagtttcatttacaatttcaaaagaacattctccaactttattttgaatgtacctctattagtttcaattgagtaattctagacataactggtttgactctgtccaactctgtatttaggccatttgttacagtttcttcatgcattacttactgttaaaactgtaccttttgcgatttcacagttggcacttctgccatgagcagagaactgatgcgacttgttttgctgcttggtagcactttaaaaaattttttgattaatgaagaaagtaaaaccataaacatttgccaaaaattcatgccccagtattagcaatgaattagttgcattggtttgagaaaggcacatattggagggaaatcttggtgtaacttaaatatttgaaaattacctttaatgcaatgcatatctgtttattctgggaaatgttttaatgccagggcctgctgagttgcttcttcttgtggagattttttttttaatctcctgagttgtataaaagttgtactgcatcttagtttactggataaatttaaaacacagtattgtagaaagctaatacaaaactatcctatgccttcaaatagtatagaaaatggaaaatatacaagtaaattctgttgaacca

SEQ ID NO: 318909 - DNA, 1683 bp, Homo sapiens
acacaactcaggggcgagctgctaactcaggggcagctgcggagcatgtcgaccccggcccggaggaggctcatgcgggatttcaagcggttacaagaggacccacctgtgggtgtcagtggcgcaccatctgaaaacaacatcatgcagtggaatgcagttatatttggaccagaagggacaccttttgaagatggtacttttaaactagtaatagaattttctgaagaatatccaaataaaccaccaactgttaggtttttatccaaaatgtttcatccaaatgtgtatgctgatggtagcatatgtttagatatccttcagaatcgatggagtccaacatatgatgtatcttctatcttaacatcaattcagtctctgctggatgaaccgaatcctaacagtccagccaatagccaggcagcacagctttatcaggaaaacaaacgagaatatgagaaaagagtttcggccattgttgaacaaagctggaatgattcataatagacaactggtctgttaatctttttcatcattgttgtgtataatttacctctcattagaaaggctaacaaattttaagtgccacaggttttaaggattctgcagaaaaaaaagaaaaaagtccttcagtttagaacctacaaaagcttgtgtatcttgattaatgtactttttattgcatggtgtgaactaagttattgctgcataaatttgtaatatatcctgtttgtatttttttccaagtgtataatgttggtgtggagttttcatgacagaatatacacattttgtaaatctgtacttttttcaaatattgaatgccttatttttgaattctttagatttttaaattggagaaaagcacttaaagttttttatatatgaatattacatgtaaagctgttaaaatacataacttcagtgcaagagactttgtcacttatttccttatgtgtgtaggaggggttaataagtctctagctctccatctattgatagtttcatttacaatttcaaaagaacattcttatattttatcaaggaagtcttcaaatttgattctaaatagcgattataatctccaactttattttgaatgtacctctattagtttcaattgagtaattctagacataactggtttgactctgtccaactctgtatttaggccatttgttacagtttcttcatgcattacttactgttaaaactgtaccttttgcgatttcacagttggcacttctgccatgagcagagaactgatgcgacttgttttgctgcttggtagcactttaaaaaattttttgattaatgaagaaagtaaaaccataaacatttgccaaaaattcatgccccagtattagcaatgaattagttgcattggtttgagaaaggcacatattggagggaaatcttggtgtaacttaaatatttgaaaattacctttaatgcaatgcatatctgtttattctgggaaatgttttaatgccagggcctgctgagttgcttcttcttgtggagattttttttttaatctcctgagttgtataaaagttgtactgcatcttagtttactggataaatttaaaacacagtattgtagaaagctaatacaaaactatcctatgccttcaaatagtatagaaaatggaaaatatacaagtaaattctgttgaacca

SEQ ID NO: 318910 - DNA, 2049 bp, Homo sapiens
tctctggcccggatgcgtccctctttctccaccccgccgagcctaaactagtgacggggagggagacgggatagtgtttctgtttccgtggtctttgaatccacaacctctagtctgaacacagagaacacaaatttgtcgattacttcaggaagcccagggggaaccgcgccccgctgaagggctcggggaaggcgcgctcccgcgtcccgccccctcctcccccagcactcacactgtggtagcggcggagggcggagggatccggaggcggcggagggagacgtcattgcagggttgtttgtcagtctcggcggcggcggcggcggcggcggcggcggcggcgatccacagtgattcggccgccgcgccggggggtgggggggctgcgcgggacttttttttttttcagactgaccgcggggcagctgcggagcatgtcgaccccggcccggaggaggctcatgcgggatttcaagcggttacaagaggacccacctgtgggtgtcagtggcgcaccatctgaaaacaacatcatgcagtggaatgcagttatatttgggtacttttaaactagtaatagaattttctgaagaatatccaaataaaccaccaactgttaggtttttatccaaaatgtttcatccaaatgtgtatgctgatggtagcatatgtttagatatccttcagaatcgatggagtccaacatatgatgtatcttctatcttaacatcaattcagtctctgctggatgaaccgaatcctaacagtccagccaatagccaggcagcacagctttatcaggaaaacaaacgagaatatgagaaaagagtttcggccattgttgaacaaagctggaatgattcataatagacaactggtctgttaatctttttcatcattgttgtgtataatttacctctcattagaaaggctaacaaattttaagtgccacaggttttaaggattctgcagaaaaaaaagaaaaaagtccttcagtttagaacctacaaaagcttgtgtatcttgattaatgtactttttattgcatggtgtgaactaagttattgctgcataaatttgtaatatatcctgtttgtatttttttccaagtgtataatgttggtgtggagttttcatgacagaatatacacattttgtaaatctgtacttttttcaaatattgaatgccttatttttgaattctttagatttttaaattggagaaaagcacttaaagttttttatatatgaatattacatgtaaagctgttaaaatacataacttcagtgcaagagactttgtcacttatttccttatgtgtgtaggaggggttaataagtctctagctctccatctattgatagtttcatttacaatttcaaaagaacattcttatattttatcaaggaagtcttcaaatttgattctaaatagcgattataatctccaactttattttgaatgtacctctattagtttcaattgagtaattctagacataactggtttgactctgtccaactctgtatttaggccatttgttacagtttcttcatgcattacttactgttaaaactgtaccttttgcgatttcacagttggcacttctgccatgagcagagaactgatgcgacttgttttgctgcttggtagcactttaaaaaattttttgattaatgaagaaagtaaaaccataaacatttgccaaaaattcatgccccagtattagcaatgaattagttgcattggtttgagaaaggcacatattggagggaaatcttggtgtaacttaaatatttgaaaattacctttaatgcaatgcatatctgtttattctgggaaatgttttaatgccagggcctgctgagttgcttcttcttgtggagattttttttttaatctcctgagttgtataaaagttgtactgcatcttagtttactggataaatttaaaacacagtattgtagaaagctaatacaaaactatcctatgccttcaaatagtatagaaaatggaaaatatacaagtaaattctgttgaacca

SEQ ID NO: 318911 - DNA, 2151 bp, Homo sapiens
tctctggcccggatgcgtccctctttctccaccccgccgagcctaaactagtgacggggagggagacgggatagtgtttctgtttccgtggtctttgaatccacaacctctagtctgaacacagagaacacaaatttgtcgattacttcaggaagcccagggggaaccgcgccccgctgaagggctcggggaaggcgcgctcccgcgtcccgccccctcctcccccagcactcacactgtggtagcggcggagggcggagggatccggaggcggcggagggagacgtcattgcagggttgtttgtcagtctcggcggcggcggcggcggcggcggcggcggcggcgatccacagtgattcggccgccgcgccggggggtgggggggctgcgcgggacttttttttttttcagactgaccgcggggcagctgcggagcatgtcgaccccggcccggaggaggctcatgcgggatttcaagcggttacaagaggacccacctgtgggtgtcagtggcgcaccatctgaaaacaacatcatgcagtggaatgcagttatatttggaccagaagggacaccttttgaagatggtacttttaaactagtaatagaattttctgaagaatatccaaataaaccaccaactgttaggtttttatccaaaatgtttcatccaaatgtgtatgctgatggtagcatatgtttagatatccttcagaatcgatggagtccaacatatgatgtatcttctatcttaacatcaattcagtgtcttgctctgttgcccagactggagtgcaatggcacaatcttggctcaccgcaacctctgcctcccgggttcaatctctgctggatgaaccgaatcctaacagtccagccaatagccaggcagcacagctttatcaggaaaacaaacgagaatatgagaaaagagtttcggccattgttgaacaaagctggaatgattcataatagacaactggtctgttaatctttttcatcattgttgtgtataatttacctctcattagaaaggctaacaaattttaagtgccacaggttttaaggattctgcagaaaaaaaagaaaaaagtccttcagtttagaacctacaaaagcttgtgtatcttgattaatgtactttttattgcatggtgtgaactaagttattgctgcataaatttgtaatatatcctgtttgtatttttttccaagtgtataatgttggtgtggagttttcatgacagaatatacacattttgtaaatctgtacttttttcaaatattgaatgccttatttttgaattctttagatttttaaattggagaaaagcacttaaagttttttatatatgaatattacatgtaaagctgttaaaatacataacttcagtgcaagagactttgtcacttatttccttatgtgtgtaggaggggttaataagtctctagctctccatctattgatagtttcatttacaatttcaaaagaacattcttatattttatcaaggaagtcttcaaatttgattctaaatagcgattataatctccaactttattttgaatgtacctctattagtttcaattgagtaattctagacataactggtttgactctgtccaactctgtatttaggccatttgttacagtttcttcatgcattacttactgttaaaactgtaccttttgcgatttcacagttggcacttctgccatgagcagagaactgatgcgacttgttttgctgcttggtagcactttaaaaaattttttgattaatgaagaaagtaaaaccataaacatttgccaaaaattcatgccccagtattagcaatgaattagttgcattggtttgagaaaggcacatattggagggaaatcttggtgtaacttaaatatttgaaaattacctttaatgcaatgcatatctgtttattctgggaaatgttttaatgccagggcctgctgagttgcttcttcttgtggagattttttttttaatctcctgagttgtataaaagttgtactgcatcttagtttactggataaatttaaaacacagtattgtagaaagctaatacaaaactatcctatgccttcaaatagtatagaaaatggaaaatatacaagtaaattctgttgaacca

SEQ ID NO: 318912 - DNA, 1194 bp, Homo sapiens
tctctggcccggatgcgtccctctttctccaccccgccgagcctaaactagtgacggggagggagacgggatagtgtttctgtttccgtggtctttgaatccacaacctctagtctgaacacagagaacacaaatttgtcgattacttcaggaagcccagggggaaccgcgccccgctgaagggctcggggaaggcgcgctcccgcgtcccgccccctcctcccccagcactcacactgtggtagcggcggagggcggagggatccggaggcggcggagggagacgtcattgcagggttgtttgtcagtctcggcggcggcggcggcggcggcggcggcggcggcgatccacagtgattcggccgccgcgccggggggtgggggggctgcgcgggacttttttttttttcagactgaccgcggggcagctgcggagcatgtcgaccccggcccggaggaggctcatgcgggatttcaagcggttacaagaggacccacctgtgggtgtcagtggcgcaccatctgaaaacaacatcatgcagtggaatgcagttatatttggaccagaagggacaccttttgaagatggtacttttaaactagtaatagaattttctgaagaatatccaaataaaccaccaactgttaggtttttatccaaaatgtttcatccaaatgtgtatgctgatggtagcatatgtttagatatccttcagaatcgatggagtccaacatatgatgtatcttctatcttaacatcaattcagtctctgctggatgaaccgaatcctaacagtccagccaatagccaggcagcacagctttatcaggaaaacaaacgagaatatgagaaaagagtttcggccattgttgaacaaagctggaatgattcataatagacaactgttatgtgaaagtttggcgctggaggatctacctctgagatggctcattcacatggctgtttgcagcagatctcagttcattactacatggatctctccacaagactgcttgagtgtcctcacatggcaggaggtcttccttcccgtctctattaaaaatacaaaaattaggcagggcgcagtggctcatgcctgtaatgccagcactttgggaggctgaggcgggtggatcatgaggtcaggagattgaaaccatcctggctaacacagtgaaaccctgtctctacta

SEQ ID NO: 318913 - DNA, 494 bp, Homo sapiens
ctaaaatagatataggaatataagaggtattttgttttgttttttacttgaaaaggaagaaaaacatggaagccttatggaaaagatccaggatagatggaaaaattgattgatacaggagagaggagggaaatttaggaaacaatccttgagtaggtaagcaaggatgggacttaccgcacaagtataaatgttggttacatctaggagcacatcgttcggaatgacaagaaagaccacagaatatatcaaaatatgttggtataaatactgataagtggaggatgtggttagtgggagcctttggaaagtatatctccttgttctttttatatttttcagtaaacttaaaaacagagtaatttgtgctgggattacaggcgtgagccaccgcgcccggcccttaattcttttgacagcatttttacttatgtgtcagttttctccctgtaatgtatttaagctattattttgataggttagtgtttaaacgt

SEQ ID NO: 318914 - DNA, 701 bp, Homo sapiens
caacatctgctatagataccatgaccagagaaaatacagtgctttggaatatgagtcctaaagtgaaagctacagggcatatgctctgacttcacactgactgacttcacatctgactccaggatgaatagcagcagaaatttattcatttgatattggttaagacttgtcctcaacaacatcttaaaggtcagctggtgtgatgtaaagtaaagctctgaaactcaaagttttacttcagatggcaaataacatttattcattaaattagctatattgataaagatgcttttagaatgttgtggaattatttttatttctagtcatctatccgaaggcattttgtaattgtgcttgtgtgtgtgtgtatatgtgtgtgtttgtgttacagtttaaaatcttactgtattacctacatcattgaaagaatcatcatgcagcctttctcaacaaaggcttatctagagaattataccctaatatcctaaagtatatttaatgaattaataaatatttaatgaattaacttactcattcctgggagaattgagaatagagtcattcaaatcattttctatggggttaaattctttggctgaacccgagttgagaaaggctgctagagaatgcattgaagaccaaagacttggttactgtttatgccaaacttcttaaagattaccaccaccataaaaacaaaa

SEQ ID NO: 318915 - DNA, 513 bp, Homo sapiens
caacatctgctatagataccatgaccagagaaaatacagtgctttggaatatgagtcctaaagtgaaagctacagggcatatgctctgacttcacactgactgacttcacatctgactccaggatgaatagcagcagaaatttattcatttgatattggttaagacttgtcctcaacaacatcttaaaggtcagctggtgtgatgtaaagtaaagctctgaaactcaaagttttacttcagatggcaaataacatttattcattaaattagctatattgataaagatgcttttagaatgttgtggaattatttttatttctagtcatctatccgaaggcattttgtaattgtgcttgtgtgtgtgtgtatatgtgtgtgtttgtgttacagtttaaaatcttactgtattacctacatcattgaaaggctgctagagaatgcattgaagaccaaagacttggttactgtttatgccaaacttcttaaagattaccaccaccataaaaacaaaa

SEQ ID NO: 318916 - DNA, 1100 bp, Homo sapiens
gcccagcacctgcagggccgaccagctccagtcccaggtccaatcctgagtggccaaaagccggaaacccggagttggaattggatcttgcacaagctggaccacccctcagaatctaggatagcacctggcacacatggtgagcactcacttcatggctgtcggataaacaatggagcaaggaaggtggagatggatgcttacacatggggaattgtatcaggaaggagtgtatgtgtgattaaaacctgttctacataaatagaaaagttgatcattcaacacatggacggctaagactatatgcagactatccattctcaggaggaaaagggaagcaatctacctgacttccccaaatggattccgtattttgatatgaattgttatcatgtgggaaatgcgatggcctccaggtatactacctctcagagatcagtgagcagaaaagctcacagatcaaattaaaatgcttgaatctcttagtttatttaaatcaatttaaagagacagtgaaaagcaagaggaaagagatgggataagtaaacgctgtcaagagacggtgcaaatctggtggaagatgcctgctacctaaagcctacctcatacaatgttcaggggccaccatcccccacctgccccaacctccacccctctctgtgatattgactttcctgtggatcgtggtgctgaagacgacaggtttgagcaaggagactcaaagaggcaaggtgccccacgccaatgacacaaacttgctctgtccgagatgcaggtacaagcaagcctggcaaagagctgagctttgcctgttggcctgtggagcaaccatgggttttactgtgtttcttggacagaggacacttggggacagaagtgaatagcatgactatttcatgcttatgtgtattttatgcactgtatttagtgcctcttggacatttaatgtatcaaatatttcatgctcaggtgtctcatgtatacttggtagctaggaatgttaggtatcctggactttctattcctttctgtgtctaacacatgttctacttactacttaacacatctaataaaatctgcctatgttttaaaaactaaga

SEQ ID NO: 318917 - DNA, 685 bp, Homo sapiens
gctcctcttctgtgtttcctgcaccaccattcgctcagttgctctacactaaaatttgctgtcatcgttgacttctccctctccttcatcccctacaagtatcaacatagacaactccgatcaatataatcatcagtgaataaagcaaattgcagcgcatattcttaaagacaaactttccacttgcagcagcacctaccttccagatagctaaattgaagcccgtgtttatcatagctgcttctaaccagccagagctgataataactaagaacttgcaggaattgcagtatgccagaccttcaatttaattgaagactttcctgaacaattaatgagacttgtcttaaccagcagggaatggctttagggactcattcttccctatgcaggtgcaagcctcaaaccttaattaggatcatccaccatgatcctcgagcccttccccaccttatacttgaagaggctgaacctcagagaattaaattacctacagtcctggtcactggtagagctattatttaaagtaaggtctaatgtcaaagcctgcgtccttaattctaccatatgctgcttcttgcagtgtcgttcctcaaccagaacacatagctcttctgtgtaggtaaagtccatcaaaacatgtcataaaataaattaaagaaattggtttctgctctatttcaat

SEQ ID NO: 318918 - DNA, 852 bp, Homo sapiens
ggcggggagtgaggcggggcatcgcggctagcgccgttggcggggaaccgggcggggaatctctgtgcttcctcagtccccaggcccagcacctgcagggccgaccagctccagtcccaggtccaatcctgagtggccaaaagccggaaacccggagttggaattggatcttgcacaagctggaccacgtaagctgggccaggccagaggtggaggccaccgctgcgggaggagggcatctgatgattttgaaggaccccattaatagagggtataaaccaggtgcgggccatcagggaggattgtcactctggcccgatcttgtttgtttacaccaggaagggcctgccttccacctgcaagaaaatatggcagctgcagaataatgtggcgcaatgccaaatatccgtttgttttagggagtgaggctacttgagaagcatcttaaatggggagagagagcaagttaaatctgatttccacgcagctctgtggattccgaatgtccacagtatgatgttatctccattcccacttccgagccgctcctcttctgtgtttcctgcaccaccattcgctcagttgctctacactaaaatttgctgtcatcgttgacttctccctctccttcatcccctacaagtatcaacatagacaactccgatcaatataatcatcagtgaataaagcaaattgcagcgcatattcttaaagacaaactttccacttgcagcagcacctaccttccagatagctaaattgaagcccgtgtttatcatagctgcttctaaccagccagagctgataataactaagaacttgcaggaattgcagtatgccagaccttcaatt

SEQ ID NO: 318919 - DNA, 3289 bp, Homo sapiens
ggtgtgctgccacccattggctcaggccgataccacgcgccccgatacccggcacaggagccacctcccagagccccgcagtccatgcctcagtcggcctgcgctcctcagcctggcggttctacctccgagggttcgcccgcccttggttttccttacaccttagcctttggctcctttgaccactcgaagccccacagcgtgttccagcggacttcaccagcagacccagaagtggtgggtgaaacactgcctctgttcctccttgagcctgtcgggagctgctgcctgccaccaccatgtctgctgcaaatcctgagactccaaactcaaccatctccagagaggccagcacccagtcttcatcagctgcagctagccaaggctgggtgttaccagaaggcaaaatcgtgccaaacactgtttttgttggtggaattgatgctaggatggatgaaactgagattggaagctgctttggtagatacggttcagtgaaagaagtgaagataatcacgaatcgaactggtgtgtccaaaggctatggatttgtttcgtttgttaatgacgtggatgtccagaagatagtaggatcacagatacatttccatggtaaaaagctgaagctgggccctgcaatcaggaaacaaaagttatgtgctcgtcatgtgcagccacgtcctttggtagttaatcctcctcctccaccacagtttcagaacgtctggcggaatccaaacactgaaacctacctgcagccccaaatcacgccgaatcctgtaactcagcacgttcaggcttactctgcttatccacattcaccaggtcaggtcatcactggatgtcagttgcttgtatataattatcaggaatatcctacttatcccgattcagcatttcaggtcaccactggatatcagttgcctgtatataattatcagccatttcctgcttatccaagttcaccatttcaggtcactgctggatatcagttgcctgtatataattatcaggcatttcctgcttatccaagttcaccatttcaggtcaccactggatatcagttgcctgtatataattatcaggcatttcctgcttatccaagttcaccatttcaggtcaccactggatatcagttgcctgtatataattatcaggcatttcctgcttatccaagttcaccatttcaggtcaccactggatatcagttgcctgtatataattatcaggcatttcctgcttatccaaattcagcagttcaggtcaccactggatatcagttccatgtatacaattaccagatgccaccgcagtgccctgttggggagcaaaggagaaatctgtggaccgaagcatacaaatggtggtatcttgtctgtttaatccagagaagagactgataaattccgttgttactcaagatgactgcttcaagggtaaaagagtgcatcgctttagaagaagtttggcagtatttaaatctgttggatcctctcagctatctagtttcatgggaagttgctggttttgaatattaagctaaaagttttccactattacagaaattctgaattttggtaaatcacactgaaactttctgtataacttgtattattagactctctagttttatcttaacactgaaactgttcttcattagatgtttatttagaacctggttctgtgtttaatatatagtttaaagtaacaaataatcgagactgaaagaatgttaagatttatctgcaaggatttttaaaaaattgaaacttgcattttaaagtgtttaaaagcaaattactgactttcaaaaaagtttttaaaacctgatttgaaagctaacaattttggatagtctgaacacaagcatttcacttctccaagaagtacctgtgaacagtacaatatttcagtattgagctttgcatttatgatttatctagaaatttacctcaaaagcagaatttttaaaactgcatttttaatcagtggaactcaatgtatagttagctttattgaagtcttatccaaacccagtaaaacagattctaagcaaacagtccaatcagtgagtcataatgtttattcaaagtattttatcttttatctagaatccacatatgtatgtccaatttgattgggatagtagttaggataactaaaattctgggcctaattttttaaagaatccaagacaaactaaactttactgggtatataaccttctcaatgagttaccattcttttttataaaaaaaattgttccttgaaatgctaaacttaatggctgtatgtgaaatttgcaaaatactggtattaaagaacgctgcagcttttttatgtcactcaaaggttaatcggagtatctgaaaggaattgtttttataaaaacattgaagtattagttacttgctataaatagatttttatttttgttttttagcctgttatatttccttctgtaaaataaaatatgtccagaagaggcatgttgtttctagattaggtagtgtcctcattttatattgtgaccacacagctagagcaccagagcccttttgctatactcacagtcttgttttcccagcctcttttactagtctttcaggaggtttgctcttagaactggtgatgtaaagaatggaagtagctgtatgagcagttccaaggccaagccgtggaatggtagcaatgggatataatacccttctaagggaaacatttgtatcagtatcatttgatctgccatggacatgtgtttaaagtggctttctggcccttctttcaatggcttcttccctaaaacgtggagactctaagttaatgtcgttactatgggccatattactaatgcccactggggtctatgatttctcaaaattttcattcggaatccgaaggatacagtctttaaactttagaattcccaagaaggctttattacacctcagaaattgaaagcaccatgactttgtccattaaaaaattatccatagtttttttagtgcttttaacattccgacatacatcattctgtgattaaatctccagatctctgtaaatgatacctacattctaaagagttaattctaattattccgatatgaccttaaggaaaagtaaaggaataaatttttgtctttgttgaagtatttaatagagtaaggtaaagaagatattaagtccctttcaaaatggaaaattaattctaaactgagaaaaatgttcctactacctattgctgatactgtctttgcataaatgaataaaaataaactttttttcttca

SEQ ID NO: 318920 - DNA, 3928 bp, Homo sapiens
ggtgtgctgccacccattggctcaggccgataccacgcgccccgatacccggcacaggagccacctcccagagccccgcagtccatgcctcagtcggcctgcgctcctcagcctggcggttctacctccgagggttcgcccgcccttggttttccttacaccttagcctttggctcctttgaccactcgaagccccacagcgtgttccagcggacttcaccagcagacccagaagtggtgggtgaaacactgcctctgttcctccttgagcctgtcgggagctgctgcctgccaccaccatgtctgctgcaaatcctgagactccaaactcaaccatctccagagaggccagcacccagtcttcatcagctgcagctagccaaggctgggtgttaccagaaggcaaaatcgtgccaaacactgtttttgttggtggaattgatgctaggatggatgaaactgagattggaagctgctttggtagatacggttcagtgaaagaagtgaagataatcacgaatcgaactggtgtgtccaaaggctatggatttgtttcgtttgttaatgacgtggatgtccagaagatagtaggatcacagatacatttccatggtaaaaagctgaagctgggccctgcaatcaggaaacaaaagttatgtgctcgtcatgtgcagccacgtcctttggtagttaatcctcctcctccaccacagtttcagaacgtctggcggaatccaaacactgaaacctacctgcagccccaaatcacgccgaatcctgtaactcagcacgttcagtctgctgcaaatcctgagactccaaactcaaccatctccagagaggccagcacccagtcttcatcagctgcagctagccaaggctgggtgttaccagaaggcaaaatcgtgccaaacactgtttttgttggtggaattgatgctaggatggatgaaactgagattggaagctgctttggtagatacggttcagtgaaagaagtgaagataatcacgaatcgaactggtgtgtccaaaggctatggatttgtttcgtttgttaatgacgtggatgtccagaagatagtaggatcacagatacatttccatggtaaaaagctgaagctgggccctgcaatcaggaaacaaaagttatgtgctcgtcatgtgcagccacgtcctttggtagttaatcctcctcctccaccacagtttcagaacgtctggcggaatccaaacactgaaacctacctgcagccccaaatcacgccgaatcctgtaactcagcacgttcaggcttactctgcttatccacattcaccaggtcaggtcatcactggatgtcagttgcttgtatataattatcaggaatatcctacttatcccgattcagcatttcaggtcaccactggatatcagttgcctgtatataattatcagccatttcctgcttatccaagatcaccatttcaggtcactgctggatatcagttgcctgtatataattatcaggcatttcctgcttatccaaattcaccatttcaagtcgccactggatatcagttccctgtatacaattatcagccatttcctgcttatccaagttcaccatttcaggtcactgctggatatcagttgcctgtatataattatcaggcatttcctgcttatccaaattcaccatttcaagtcgccactggatatcagttccctgtatacaattatcaggcatttcctgcttatccaaattcaccagttcaggtcaccactggatatcagttgcctgtatacaattatcaggcatttcctgcttatccaagttcaccatttcaggtcaccactggatatcagttgcctgtatataattatcaggcatttcctgcttatccaaattcagcagttcaggtcaccactggatatcagttccatgtatacaattaccagatgccaccgcagtgccctgttggggagcaaaggagaaatctgtggaccgaagcatacaaatggtggtatcttgtctgtttaatccagagaagagactgataaattccgttgttactcaagatgactgcttcaagggtaaaagagtgcatcgctttagaagaagtttggcagtatttaaatctgttggatcctctcagctatctagtttcatgggaagttgctggttttgaatattaagctaaaagttttccactattacagaaattctgaattttggtaaatcacactgaaactttctgtataacttgtattattagactctctagttttatcttaacactgaaactgttcttcattagatgtttatttagaacctggttctgtgtttaatatatagtttaaagtaacaaataatcgagactgaaagaatgttaagatttatctgcaaggatttttaaaaaattgaaacttgcattttaaagtgtttaaaagcaaattactgactttcaaaaaagtttttaaaacctgatttgaaagctaacaattttggatagtctgaacacaagcatttcacttctccaagaagtacctgtgaacagtacaatatttcagtattgagctttgcatttatgatttatctagaaatttacctcaaaagcagaatttttaaaactgcatttttaatcagtggaactcaatgtatagttagctttattgaagtcttatccaaacccagtaaaacagattctaagcaaacagtccaatcagtgagtcataatgtttattcaaagtattttatcttttatctagaatccacatatgtatgtccaatttgattgggatagtagttaggataactaaaattctgggcctaattttttaaagaatccaagacaaactaaactttactgggtatataaccttctcaatgagttaccattcttttttataaaaaaaattgttccttgaaatgctaaacttaatggctgtatgtgaaatttgcaaaatactggtattaaagaacgctgcagcttttttatgtcactcaaaggttaatcggagtatctgaaaggaattgtttttataaaaacattgaagtattagttacttgctataaatagatttttatttttgttttttagcctgttatatttccttctgtaaaataaaatatgtccagaagaggcatgttgtttctagattaggtagtgtcctcattttatattgtgaccacacagctagagcaccagagcccttttgctatactcacagtcttgttttcccagcctcttttactagtctttcaggaggtttgctcttagaactggtgatgtaaagaatggaagtagctgtatgagcagttccaaggccaagccgtggaatggtagcaatgggatataatacccttctaagggaaacatttgtatcagtatcatttgatctgccatggacatgtgtttaaagtggctttctggcccttctttcaatggcttcttccctaaaacgtggagactctaagttaatgtcgttactatgggccatattactaatgcccactggggtctatgatttctcaaaattttcattcggaatccgaaggatacagtctttaaactttagaattcccaagaaggctttattacacctcagaaattgaaagcaccatgactttgtccattaaaaaattatccatagtttttttagtgcttttaacattccgacatacatcattctgtgattaaatctccagatctctgtaaatgatacctacattctaaagagttaattctaattattccgatatgaccttaaggaaaagtaaaggaataaatttttgtctttgttgaagtatttaatagagtaaggtaaagaagatattaagtccctttcaaaatggaaaattaattctaaactgagaaaaatgttcctactacctattgctgatactgtctttgcataaatgaataaaaataaactttttttcttca

SEQ ID NO: 318921 - DNA, 4453 bp, Homo sapiens
ggtgtgctgccacccattggctcaggccgataccacgcgccccgatacccggcacaggagccacctcccagagccccgcagtccatgcctcagtcggcctgcgctcctcagcctggcggttctacctccgagggttcgcccgcccttggttttccttacaccttagcctttggctcctttgaccactcgaagccccacagcgtgttccagcggacttcaccagcagacccagaagtggtgggtgaaacactgcctctgttcctccttgagcctgtcgggagctgctgcctgccaccaccatgtctgctgcaaatcctgagactccaaactcaaccatctccagagaggccagcacccagtcttcatcagctgcagctagccaaggctgggtgttaccagaaggcaaaatcgtgccaaacactgtttttgttggtggaattgatgctaggatggatgaaactgagattggaagctgctttggtagatacggttcagtgaaagaagtgaagataatcacgaatcgaactggtgtgtccaaaggctatggatttgtttcgtttgttaatgacgtggatgtccagaagatagtaggatcacagatacatttccatggtaaaaagctgaagctgggccctgcaatcaggaaacaaaagttatgtgctcgtcatgtgcagccacgtcctttggtagttaatcctcctcctccaccacagtttcagaacgtctggcggaatccaaacactgaaacctacctgcagccccaaatcacgccgaatcctgtaactcagcacgttcagtctgctgcaaatcctgagactccaaactcaaccatctccagagaggccagcacccagtcttcatcagctgcagctagccaaggctgggtgttaccagaaggcaaaatcgtgccaaacactgtttttgttggtggaattgatgctaggatggatgaaactgagattggaagctgctttggtagatacggttcagtgaaagaagtgaagataatcacgaatcgaactggtgtgtccaaaggctatggatttgtttcgtttgttaatgacgtggatgtccagaagatagtaggagtaagtaatctaatagaaaaatctcttatttatcttattgctacaacgtttagtgtcagtgatacactcggacttgtgtaaaatttggggaaagacacacttcctgttcaaaatccaaactcagagtaacctcacgtagcttgtttgatcctgtttatttttgactggacacctagtttcatgaactacagacaggaagggttggagacagggtgatggaaagtttttgatcaactttcacttgatgcctcttgacactgattagagtagtaagggtaagtaaggtagcttcgtgatgacaaattttaatttggtgcgtagttgtccccgatcttctatgatgataggtactttagaagacttcaggtgtttacccaagtcttggaagctaacacttgaaaattgattctagttttgttaacggttctattttcagtcacagatacatttccatggtaaaaagctgaagctgggccctgcaatcaggaaacaaaagttatgtgagtaggaaaagaaatggttcttttctgacccgtgtagcttttcaaataactaaaaataggcttttttcttcttgctttttaaaaaggtgctcgtcatgtgcagccacgtcctttggtagttaatcctcctcctccaccacagtttcagaacgtctggcggaatccaaacactgaaacctacctgcagccccaaatcacgccgaatcctgtaactcagcacgttcaggcttactctgcttatccacattcaccaggtcaggtcatcactggatgtcagttgcttgtatataattatcaggaatatcctacttatcccgattcagcatttcaggtcaccactggatatcagttgcctgtatataattatcagccatttcctgcttatccaagatcaccatttcaggtcactgctggatatcagttgcctgtatataattatcaggcatttcctgcttatccaaattcaccatttcaagtcgccactggatatcagttccctgtatacaattatcagccatttcctgcttatccaagttcaccatttcaggtcactgctggatatcagttgcctgtatataattatcaggcatttcctgcttatccaaattcaccatttcaagtcgccactggatatcagttccctgtatacaattatcaggcatttcctgcttatccaaattcaccagttcaggtcaccactggatatcagttgcctgtatacaattatcaggcatttcctgcttatccaagttcaccatttcaggtcaccactggatatcagttgcctgtatataattatcaggcatttcctgcttatccaaattcagcagttcaggtcaccactggatatcagttccatgtatacaattaccagatgccaccgcagtgccctgttggggagcaaaggagaaatctgtggaccgaagcatacaaatggtggtatcttgtctgtttaatccagagaagagactgataaattccgttgttactcaagatgactgcttcaagggtaaaagagtgcatcgctttagaagaagtttggcagtatttaaatctgttggatcctctcagctatctagtttcatgggaagttgctggttttgaatattaagctaaaagttttccactattacagaaattctgaattttggtaaatcacactgaaactttctgtataacttgtattattagactctctagttttatcttaacactgaaactgttcttcattagatgtttatttagaacctggttctgtgtttaatatatagtttaaagtaacaaataatcgagactgaaagaatgttaagatttatctgcaaggatttttaaaaaattgaaacttgcattttaaagtgtttaaaagcaaattactgactttcaaaaaagtttttaaaacctgatttgaaagctaacaattttggatagtctgaacacaagcatttcacttctccaagaagtacctgtgaacagtacaatatttcagtattgagctttgcatttatgatttatctagaaatttacctcaaaagcagaatttttaaaactgcatttttaatcagtggaactcaatgtatagttagctttattgaagtcttatccaaacccagtaaaacagattctaagcaaacagtccaatcagtgagtcataatgtttattcaaagtattttatcttttatctagaatccacatatgtatgtccaatttgattgggatagtagttaggataactaaaattctgggcctaattttttaaagaatccaagacaaactaaactttactgggtatataaccttctcaatgagttaccattcttttttataaaaaaaattgttccttgaaatgctaaacttaatggctgtatgtgaaatttgcaaaatactggtattaaagaacgctgcagcttttttatgtcactcaaaggttaatcggagtatctgaaaggaattgtttttataaaaacattgaagtattagttacttgctataaatagatttttatttttgttttttagcctgttatatttccttctgtaaaataaaatatgtccagaagaggcatgttgtttctagattaggtagtgtcctcattttatattgtgaccacacagctagagcaccagagcccttttgctatactcacagtcttgttttcccagcctcttttactagtctttcaggaggtttgctcttagaactggtgatgtaaagaatggaagtagctgtatgagcagttccaaggccaagccgtggaatggtagcaatgggatataatacccttctaagggaaacatttgtatcagtatcatttgatctgccatggacatgtgtttaaagtggctttctggcccttctttcaatggcttcttccctaaaacgtggagactctaagttaatgtcgttactatgggccatattactaatgcccactggggtctatgatttctcaaaattttcattcggaatccgaaggatacagtctttaaactttagaattcccaagaaggctttattacacctcagaaattgaaagcaccatgactttgtccattaaaaaattatccatagtttttttagtgcttttaacattccgacatacatcattctgtgattaaatctccagatctctgtaaatgatacctacattctaaagagttaattctaattattccgatatgaccttaaggaaaagtaaaggaataaatttttgtctttgttgaagtatttaatagagtaaggtaaagaagatattaagtccctttcaaaatggaaaattaattctaaactgagaaaaatgttcctactacctattgctgatactgtctttgcataaatgaataaaaataaactttttttcttca

SEQ ID NO: 318922 - DNA, 289 bp, Homo sapiens
cattcaattaatttgtcacatgtgttgaaagccttttgtgggctcaggtgctggagtcggctccccagaaggcaactgggagtgacacagagctcactccacttttgtgaaatggaaggtgtagtggccacggaaaacaaatcgttacaaactgctccaagaggtctgcgtagcactcagcggttcagattgtcatagggacctctttagatggagccatcagagaaggccacattgaggaaggagatttaaaggcaagattggaaagttgagaagaagccacagagac

SEQ ID NO: 318923 - DNA, 2076 bp, Homo sapiens
agcccagagacacattggggctgacctgccgctgctgtcagtgggaggccagtggtgctggccaagaagtgtcatggctggtgtcgtgcacgtttccctggctgctcactgcggggcctgtccgtggggccggggcagactccgcaaaggacgcgcagcctgcaagtccgcggcccagagacacattggggctgacctgccgctgctgtcagtgggaggccagtggtgctggccaagaagtgtcatggctggtgtcgtgcacgtttccctggctgctctcctcctgctgcctatggcccctgccatgcattctgactgcatcttcaagaaggagcaagccatgtgcctggagaagatccagagggccaatgagctgatgggcttcaatgattcctctccaggctgtcctgggatgtgggacaacatcacgtgttggaagcccgcccatgtgggtgagatggtcctggtcagctgccctgagctcttccgaatcttcaacccagaccaagtctgggagaccgaaaccattggagagtctgattttggtgacagtaactccttagatctctcagacatgggagtggtgagccggaactgcacggaggatggctggtcggaacccttccctcattactttgatgcctgtgggtttgatgaatatgaatctgagactggggaccaggattattactacctgtcagtgaaggccctctacacggttggctacagcacatccctcgtcaccctcaccactgccatggtcatcctttgtcgcttccggaagctgcactgcacacgcaacttcatccacatgaacctgtttgtgtcgttcatgctgagggcgatctccgtcttcatcaaagactggattctgtatgcggagcaggacagcaaccactgcttcatctccactgtggaatgtaaggccgtcatggttttcttccactactgtgttgtgtccaactacttctggctgttcatcgagggcctgtacctcttcactctgctggtggagaccttcttccctgaaaggagatacttctactggtacaccatcattggctgggggaccccaactgtgtgtgtgacagtgtgggctacgctgagactctactttgatgacacaggctgctgggatatgaatgacagcacagctctgtggtgggtgatcaaaggccctgtggttggctctatcatggttaactttgtgctttttattggcattatcgtcatccttgtgcagaaacttcagtctccagacatgggaggcaatgagtccagcatctacttgcgactggcccggtccaccctgctgctcatcccactattcggaatccactacacagtatttgccttctccccagagaatgtcagcaaaagggaaagactcgtgtttgagctggggctgggctccttccagggctttgtggtggctgttctctactgttttctgaatggtgaggtacaagcggagatcaagcgaaaatggcgaagctggaaggtgaaccgttacttcgctgtggacttcaagcaccgacacccgtctctggccagcagtggggtgaatgggggcacccagctctccatcctgagcaagagcagctcccaaatccgcatgtctggcctccctgctgacaatctggccacctgagccatgctcccctcctcctcctctcctccatccacaggctgggaccgcaggcaggtgccagcccacgcatgtttgcgcctcttccctccccttgggcaggccctgggctggaagcttggctcctgaggggggagaaggaggcagggcacagactggaattgtcccctccttgttttggtactggtcccacccactgtggtcccctgggccctgaccccagacatgtaaatactcctcaaatttggaaaagttgtcccatcccttccccctttgccccagtgtccctgctcacttccagtcaggtctcagctccaccccactgtttcttggtcagcctcagtgatggcctgaccccagctgtgaggccttgtgagctaaggctgaagagaccttgcctgtgggagctggggtggtacctgccccaa

SEQ ID NO: 318924 - DNA, 2055 bp, Homo sapiens
cagccggccacacaggcgcggagacccggctcggcgcgcgctcctcggcgcacacgctccccatccccgcgccgcgcgggccgcggacttgcaggctgcgcgtcctttgcggagtctgccccggccccacggacaggccccgcagtgagcagcccagagacacattggggctgacctgccgctgctgtcagtgggaggccagtggtgctggccaagaagtgtcatggctggtgtcgtgcacgtttccctggctgctctcctcctgctgcctatggcccctgccatgcattctgactgcatcttcaagaaggagcaagccatgtgcctggagaagatccagagggccaatgagctgatgggcttcaatgattcctctccaggctgtcctgggatgtgggacaacatcacgtgttggaagcccgcccatgtgggtgagatggtcctggtcagctgccctgagctcttccgaatcttcaacccagaccaagtctgggagaccgaaaccattggagagtctgattttggtgacagtaactccttagatctctcagacatgggagtggtgagccggaactgcacggaggatggctggtcggaacccttccctcattactttgatgcctgtgggtttgatgaatatgaatctgagactggggaccaggattattactacctgtcagtgaaggccctctacacggttggctacagcacatccctcgtcaccctcaccactgccatggtcatcctttgtcgcttccggaagctgcactgcacacgcaacttcatccacatgaacctgtttgtgtcgttcatgctgagggcgatctccgtcttcatcaaagactggattctgtatgcggagcaggacagcaaccactgcttcatctccactgtggaatgtaaggccgtcatggttttcttccactactgtgttgtgtccaactacttctggctgttcatcgagggcctgtacctcttcactctgctggtggagaccttcttccctgaaaggagatacttctactggtacaccatcattggctgggggaccccaactgtgtgtgtgacagtgtgggctacgctgagactctactttgatgacacaggctgctgggatatgaatgacagcacagctctgtggtgggtgatcaaaggccctgtggttggctctatcatggttaactttgtgctttttattggcattatcgtcatccttgtgcagaaacttcagtctccagacatgggaggcaatgagtccagcatctacttgcgactggcccggtccaccctgctgctcatcccactattcggaatccactacacagtatttgccttctccccagagaatgtcagcaaaagggaaagactcgtgtttgagctggggctgggctccttccagggctttgtggtggctgttctctactgttttctgaatggtgaggtacaagcggagatcaagcgaaaatggcgaagctggaaggtgaaccgttacttcgctgtggacttcaagcaccgacacccgtctctggccagcagtggggtgaatgggggcacccagctctccatcctgagcaagagcagctcccaaatccgcatgtctggcctccctgctgacaatctggccacctgagccatgctcccctcctcctcctctcctccatccacaggctgggaccgcaggcaggtgccagcccacgcatgtttgcgcctcttccctccccttgggcaggccctgggctggaagcttggctcctgaggggggagaaggaggcagggcacagactggaattgtcccctccttgttttggtactggtcccacccactgtggtcccctgggccctgaccccagacatgtaaatactcctcaaatttggaaaagttgtcccatcccttccccctttgccccagtgtccctgctcacttccagtcaggtctcagctccaccccactgtttcttggtcagcctcagtgatggcctgaccccagctgtgaggccttgtgagctaaggctgaagagaccttgcctgtgggagctggggtggtacctgccccaa

SEQ ID NO: 318925 - DNA, 1992 bp, Homo sapiens
cagccggccacacaggcgcggagacccggctcggcgcgcgctcctcggcgcacacgctccccatccccgcgccgcgcgggccgcggacttgcaggctgcgcgtcctttgcggagtctgccccggccccacggacaggccccgcagtgagcagcccagagacacattggggctgacctgccgctgctgtcagtgggaggccagtggtgctggccaagaagtgtcatggctggtgtcgtgcacgtttccctggctgctctcctcctgctgcctatggcccctgccatgcattctgactgcatcttcaagaaggagcaagccatgtgcctggagaagatccagagggccaatgagctgatgggcttcaatgattcctctccaggctgtcctgggatgtgggacaacatcacgtgttggaagcccgcccatgtgggtgagatggtcctggtcagctgccctgagctcttccgaatcttcaacccagaccaagacatgggagtggtgagccggaactgcacggaggatggctggtcggaacccttccctcattactttgatgcctgtgggtttgatgaatatgaatctgagactggggaccaggattattactacctgtcagtgaaggccctctacacggttggctacagcacatccctcgtcaccctcaccactgccatggtcatcctttgtcgcttccggaagctgcactgcacacgcaacttcatccacatgaacctgtttgtgtcgttcatgctgagggcgatctccgtcttcatcaaagactggattctgtatgcggagcaggacagcaaccactgcttcatctccactgtggaatgtaaggccgtcatggttttcttccactactgtgttgtgtccaactacttctggctgttcatcgagggcctgtacctcttcactctgctggtggagaccttcttccctgaaaggagatacttctactggtacaccatcattggctgggggaccccaactgtgtgtgtgacagtgtgggctacgctgagactctactttgatgacacaggctgctgggatatgaatgacagcacagctctgtggtgggtgatcaaaggccctgtggttggctctatcatggttaactttgtgctttttattggcattatcgtcatccttgtgcagaaacttcagtctccagacatgggaggcaatgagtccagcatctacttgcgactggcccggtccaccctgctgctcatcccactattcggaatccactacacagtatttgccttctccccagagaatgtcagcaaaagggaaagactcgtgtttgagctggggctgggctccttccagggctttgtggtggctgttctctactgttttctgaatggtgaggtacaagcggagatcaagcgaaaatggcgaagctggaaggtgaaccgttacttcgctgtggacttcaagcaccgacacccgtctctggccagcagtggggtgaatgggggcacccagctctccatcctgagcaagagcagctcccaaatccgcatgtctggcctccctgctgacaatctggccacctgagccatgctcccctcctcctcctctcctccatccacaggctgggaccgcaggcaggtgccagcccacgcatgtttgcgcctcttccctccccttgggcaggccctgggctggaagcttggctcctgaggggggagaaggaggcagggcacagactggaattgtcccctccttgttttggtactggtcccacccactgtggtcccctgggccctgaccccagacatgtaaatactcctcaaatttggaaaagttgtcccatcccttccccctttgccccagtgtccctgctcacttccagtcaggtctcagctccaccccactgtttcttggtcagcctcagtgatggcctgaccccagctgtgaggccttgtgagctaaggctgaagagaccttgcctgtgggagctggggtggtacctgccccaa

SEQ ID NO: 318926 - DNA, 1936 bp, Homo sapiens
ggcacgagggagagagaggaggaggaaagcaggaggaggtggcggcggcgggaagatgctgctctttggcgtaaattgcaatcgattagggatcgtttctcagaatcaagttagaagtgagagttcagataagtgaggccgccattgctgctttgaacacctcagaaggggagaatggatttatcaggagtgaaaaagaagagcttgctaggagtcaaagaaaataataaaaagtccagcactagggctccttcacctaccaaacgcaaagaccgctcagatgagaagtccaaggatcgctcaaaagataaaggggccaccaaggagtcgagtgagaaggatcgcggccgggacaaaacccgaaagaggcgcagcgcttccagtggtagcagcagtaccaggtctcggtccagctcgacttccagctcaggctccagcaccagcactggctcaagcagtggctccagctcttcctcagcatccagccgctcaggaagctccagcacctcccgcagctccagctctagcagctcttctggctctccaagtccttctcggcgcagacacgacaacaggaggcgctcccgctccaaatccaaaccacctaaaagagatgaaaaggagaggaaaaggcggagcccatctcctaagcccaccaaagtgcacattgggagactcacccggaatgtgacaaaggatcacatcatggagatattttccacctatgggaaaattaaaatgattgacatgcccgtggaaaggatgcatccccatctgtccaaaggctatgcgtacgtagagtttgagaatccagatgaagccgagaaggcgctgaagcacatggatggaggacaaattgatggccaggagatcactgccaccgccgtgctggccccctggcctaggccaccccccaggagattcagccctcccaggagaatgttgccaccaccgcctatgtggcgcaggtctcccccacggatgaggagaaggtcccgctccccgaggcgcaggtcccccgtgcgccggagatcacggtccccgggccgccgccgccacaggagccgctccagctccaactcctcccgataaacaggccactgaagctctcgcccctgtaacttataccccacccagctcagttttgtcacttttctagccaaaggaagaccagtaggaaagcaaacccttgactctggcaggatttgcaggcagcaggcagcacccctctgccagccgggccccggctgcagaagtgctgttggtttggatgctgtgtgcctgtcaagattccctccggttttctggctagaaagctcatccgtttccggtttctaagagtcagttcagtggcagagccaccagggaaaagtgaggctcttgggggtggtttgaccctgcttacctgggagcacacttttcccttccccgatgacctgggatggtggccaggccgtgcccttgctgttgctgggcagtgtccttttggaaagggagctgccccaggctttagtgcagctgccaaccctgttaggcctggcctctcgaggcctcttctgacctcaagggtcacaccccctcaaagatcctctcacccatggtagttgctgctcgtggttctgtctgtccgtgcaccgatgcacacaccgcaccccaccactgtactctgaaattggcgagtgagtggagagccagctctgcggagtcatcacgcagccatggttgtgcctgccgttcatggtggtctttcaggttatcttggcaacatgtacattgcttttattttttttcttttttgctttcattgtacagtcagtactataaaatttctcttttgagttttatacctttgtagcattttagatgacattgtgtttgtactttgttgtgtagagtggaagaattgtgttgaataaacccaagatcggaatgcaaa

SEQ ID NO: 318927 - DNA, 767 bp, Homo sapiens
gtggtaggggccgctgcggacggaagggcgcctgtgcttcgtccgctcggcggtggcccagccaggcccgcgggactcagaccagcggggagcgcggcctccgcccttggggccctcccgccgggccggagacccaagcccccaacgccaggccctgccctggaagcgctcgcggcccggcgcctggacgggggagttgctgctctttggcgtaaattgcaatcgattagggatcgtttctcagaatcaagttagaagtgagagttcagataagtgaggccgccattgctgctttgaacacctcagaaggggagaatggatttatcaggagtgaaaaagaagagcttgctaggagtcaaagaaaataataaaaagtccagcactagggctccttcacctaccaaacgcaaagaccgctcagatgagaagtccaaggatcgctcaaaagataaaggggccaccaaggagtcgagtgagaaggatcgcggccgggacaaaacccgaaagaggcgcagcgcttccagtggtagcagcagtaccaggtctcggtccagctcgacttccagctcaggctccagcaccagcactggctcaagcagtggctccagctcttcctcagcatccagccgctcaggaagctccagcacctcccgcagctccagctctagcagctcttctggctctccaagtccttctcggcgcagacacgacaacaggaggcgctcccgctccaaatccaaaccaccctcatccgcttatccaatgcc

SEQ ID NO: 318928 - DNA, 580 bp, Homo sapiens
  misc_feature (27)..(27): n is a, c, g, or t
  misc_feature (31)..(31): n is a, c, g, or t
  misc_feature (51)..(51): n is a, c, g, or t
  misc_feature (86)..(86): n is a, c, g, or t
  misc_feature (101)..(101): n is a, c, g, or t
  misc_feature (104)..(104): n is a, c, g, or t
  misc_feature (127)..(127): n is a, c, g, or t
  misc_feature (137)..(137): n is a, c, g, or t
  misc_feature (143)..(143): n is a, c, g, or t
  misc_feature (169)..(169): n is a, c, g, or t
  misc_feature (198)..(198): n is a, c, g, or t
  misc_feature (223)..(223): n is a, c, g, or t
  misc_feature (259)..(259): n is a, c, g, or t
ggggggccaaggccgggccctttgctngttnttgggcaagtgtcccttttnggaaaaaggaaacttgccccccagggcttttaaantgccaagcttggccnaanccccttggttaaaggccctgggncccttcctcngaaggncccttcttttcttgaacccttccaanggggttccaccaccccccccctccaaaangaatcccttcttccaccccaatggntaagtttggcttggttcggtgggttcctggtcctgntcccggtgccacccgaatggcacaacacccggcaccccccaccactgtactctgaaattggcgagtgagtggagagccagctctgcggagtcatcacgcagccatggttgtgcctgccgttcatggtggtctttcaggttatcttggcaacatgtacattgcttttattttttttcttttttgctttcattgtacagtcagtactataaaatttctcttttgagttttatacctttgtagcattttagatgacattgtgtttgtactttgttgtgtagagtggaagaattgtgttgaataaacccaagatcggaatgcaaa

SEQ ID NO: 318929 - DNA, 357 bp, Homo sapiens
ccccccccccccaaaattttcacaccagattggtgtgtgtttgttgtccgtgcacaaaaaaaaaaccccccccccccccccccccccctgtttttaaattgaagaaggagagccagctctgcggagtcatcacgcagccatggttgtgcctgccgttcatggtggtctttcaggttatcttggcaacatgtacattgcttttattttttttcttttttgctttcattgtacagtcagtactataaaatttctcttttgagttttatacctttgtagcattttagatgacattgtgtttgtactttgttgtgtagagtggaagaattgtgttgaataaacccaagatcggaatgcaaa

SEQ ID NO: 318930 - DNA, 292 bp, Homo sapiens
  misc_feature (38)..(38): n is a, c, g, or t
ggacgcgtgggtcggacgcgtgggtcgacccacgcgtncggggagagccagctctgcggagtcatcacgcagccatggttgtgcctgccgttcatggtggtctttcaggttatcttggcaacatgtacattgcttttattttttttcttttttgctttcattgtacagtcagtactataaaatttctcttttgagttttatacctttgtagcattttagatgacattgtgtttgtactttgttgtgtagagtggaagaattgtgttgaataaacccaagatcggaatgcaaa

SEQ ID NO: 318931 - DNA, 616 bp, Homo sapiens
tgagacggagtttcgctcttgttacccaggctggagtgtagtggcacgatctctgcttactgcagcctctgcctcccgggttcacgccattctcctgcctcagcctcccgagtagctggtactataggcgcccgccacctcgcacagctgatttattgtctttttagtagagacattttcaccatgttagccaggatggtctcgatctcctgacctcgtgatccacctgcctcagcttcccaaagtgctgggattacaggagtgagccaccatgcccggccctgtttctgtgattatcttacattgtcattgtccccccaggcctgtctttcactgtggcatgcattgtctagggtagatgcttgttagatattttatgacttgctgtctttttcaacagacaaattgatggccaggagatcactgccaccgccgtgctggccccctggcctaggccaccccccaggagattcagccctcccaggagaatgttgccaccaccgcctatgtggcgcaggtctcccccacggatgaggagaagaaggtaaacaatttgtagtttcagtggactgatcaggccacaaacctcatgtgaccgcagtgactttcagaccct

SEQ ID NO: 318932 - DNA, 229 bp, Homo sapiens
gcggccgcctactactactactactgctcgaattcaagcttctaacgatgtacggggacatgtacattgcttttattttttttcttttttgctttcattgtacagtcagtactataaaatttctcttttgagttttatacctttgtagcattttagatgacattgtgtttgtactttgttgtgtagagtggaagaattgtgttgaataaacccaagatcggaatgcaaa

SEQ ID NO: 318933 - DNA, 2196 bp, Homo sapiens
ggaggacgagcctcggtcatcgcgctgccctcccaggttcaacagcctacccatgtgcccgctccagtaagcgtgcaaccagcccggtcagtcccagggactttaccggctaggagacaccttgaacgtccccagcgcgactcccacaaactgccttgactctttaacgcttcctcgctggcgcccattgggccaggcgtttacgtcatcgctgcgcgccgggcggcggcgacttcccgctccttgactctgacgtcagagcggcgccggcctcggcggctgaggaaagcaggaggaggtggcggcggcgggaagatgctgctctttggcgtaaattgcaatcgattagggatcgtttctcagaatcaagttagaagtgagagttcagataagtgaggccgccattgctgctttgaacacctcagaaggggagaatggatttatcaggagtgaaaaagaagagcttgctaggagtcaaagaaaataataaaaagtccagcactagggctccttcacctaccaaacgcaaagaccgctcagatgagaagtccaaggatcgctcaaaagataaaggggccaccaaggagtcgagtgagaaggatcgcggccgggacaaaacccgaaagaggcgcagcgcttccagtggtagcagcagtaccaggtctcggtccagctcgacttccagctcaggctccagcaccagcactggctcaagcagtggctccagctcttcctcagcatccagccgctcaggaagctccagcacctcccgcagctccagctctagcagctcttctggctctccaagtccttctcggcgcagacacgacaacaggaggcgctcccgctccaaatccaaaccacctaaaagagatgaaaaggagaggaaaaggcggagcccatctcctaagcccaccaaagtgcacattgggagactcacccggaatgtgacaaaggatcacatcatggagatattttccacctatgggaaaattaaaatgattgacatgcccgtggaaaggatgcatccccatctgtccaaaggctatgcgtacgtagagtttgagaatccagatgaagccgagaaggcgctgaagcacatggatggaggacaaattgatggccaggagatcactgccaccgccgtgctggccccctggcctaggccaccccccaggagattcagccctcccaggagaatgttgccaccaccgcctatgtggcgcaggtctcccccacggatgaggagaaggtcccgctccccgaggcgcaggtcccccgtgcgccggagatcacggtccccgggccgccgccgccacaggagccgctccagctccaactcctcccgataaacaggccactgaagctctcgcccctgtaacttataccccacccagctcagttttgtcacttttctagccaaaggaagaccagtaggaaagcaaacccttgactctggcaggatttgcaggcagcaggcagcacccctctgccagccgggccccggctgcagaagtgctgttggtttggatgctgtgtgcctgtcaagattccctccggttttctggctagaaagctcatccgtttccggtttctaagagtcagttcagtggcagagccaccagggaaaagtgaggctcttgggggtggtttgaccctgcttacctgggagcacacttttcccttccccgatgacctgggatggtggccaggccgtgcccttgctgttgctgggcagtgtccttttggaaagggagctgccccaggctttagtgcagctgccaaccctgttaggcctggcctctcgaggcctcttctgacctcaagggtcacaccccctcaaagatcctctcacccatggtagttgctgctcgtggttctgtctgtccgtgcaccgatgcacacaccgcaccccaccactgtactctgaaattggcgagtgagtggagagccagctctgcggagtcatcacgcagccatggttgtgcctgccgttcatggtggtctttcaggttatcttggcaacatgtacattgcttttattttttttcttttttgctttcattgtacagtcagtactataaaatttctcttttgagttttatacctttgtagcattttagatgacattgtgtttgtactttgttgtgtagagtggaagaattgtgttgaataaacccaagatcggaatgcaaa

SEQ ID NO: 318934 - DNA, 1919 bp, Homo sapiens
cgacaagcagagggcaaggtagaggatgatgacccgggaacagggctgaagagaaagtctgcgctgggagctgcaggctgggcccatcaggagcctgggggctcggctctggaggggctgaagagaaagtctgcgctgggagctgcaggctgggcccatcaggagcctgggggctcgccggcctcggcggctgaggaaagcaggaggaggtggcggcggcgggaagatggctccttcacctaccaaacgcaaagaccgctcagatgagaagtccaaggatcgctcaaaagataaaggggccaccaaggagtcgagtgagaaggatcgcggccgggacaaaacccgaaagaggcgcagcgcttccagtggtagcagcagtaccaggtctcggtccagctcgacttccagctcaggctccagcaccagcactggctcaagcagtggctccagctcttcctcagcatccagccgctcaggaagctccagcacctcccgcagctccagctctagcagctcttctggctctccaagtccttctcggcgcagacacgacaacaggaggcgctcccgctccaaatccaaaccacctaaaagagatgaaaaggagaggaaaaggcggagcccatctcctaagcccaccaaagtgcacattgggagactcacccggaatgtgacaaaggatcacatcatggagatattttccacctatgggaaaattaaaatgattgacatgcccgtggaaaggatgcatccccatctgtccaaaggctatgcgtacgtagagtttgagaatccagatgaagccgagaaggcgctgaagcacatggatggaggacaaattgatggccaggagatcactgccaccgccgtgctggccccctggcctaggccaccccccaggagattcagccctcccaggagaatgttgccaccaccgcctatgtggcgcaggtctcccccacggatgaggagaaggtcccgctccccgaggcgcaggtcccccgtgcgccggagatcacggtccccgggccgccgccgccacaggagccgctccagctccaactcctcccgataaacaggccactgaagctctcgcccctgtaacttataccccacccagctcagttttgtcacttttctagccaaaggaagaccagtaggaaagcaaacccttgactctggcaggatttgcaggcagcaggcagcacccctctgccagccgggccccggctgcagaagtgctgttggtttggatgctgtgtgcctgtcaagattccctccggttttctggctagaaagctcatccgtttccggtttctaagagtcagttcagtggcagagccaccagggaaaagtgaggctcttgggggtggtttgaccctgcttacctgggagcacacttttcccttccccgatgacctgggatggtggccaggccgtgcccttgctgttgctgggcagtgtccttttggaaagggagctgccccaggctttagtgcagctgccaaccctgttaggcctggcctctcgaggcctcttctgacctcaagggtcacaccccctcaaagatcctctcacccatggtagttgctgctcgtggttctgtctgtccgtgcaccgatgcacacaccgcaccccaccactgtactctgaaattggcgagtgagtggagagccagctctgcggagtcatcacgcagccatggttgtgcctgccgttcatggtggtctttcaggttatcttggcaacatgtacattgcttttattttttttcttttttgctttcattgtacagtcagtactataaaatttctcttttgagttttatacctttgtagcattttagatgacattgtgtttgtactttgttgtgtagagtggaagaattgtgttgaataaacccaagatcggaatgcaaa

SEQ ID NO: 318935 - DNA, 3629 bp, Homo sapiens
gtggtaggggccgctgcggacggaagggcgcctgtgcttcgtccgctcggcggtggcccagccaggcccgcgggactcagaccagcggggagcgcggcctccgcccttggggccctcccgccgggccggagacccaagcccccaacgccaggccctgccctggaagcgctcgcggcccggcgcctggacgggggagttgtgagtgaacgcggacgggtagcggcgaggtcggcgtgtcgggccggtgtcggcgggcgcggagtttctttgtgggatgcggtggaaggtcggccgatccccccttcggagtcattaattcaaacgtgtacccgcgaacgtttcccggactcccgtgtgcaattatcggcgctaggccgtggggatacggcccactatggaccgagcacggtggccgagctcagtttgatgggttaccccagaggggcggatacgggaaggttaagtttgttggaggagaaacgtggagtaggctttttgtcttgattccgcatgaactgtgcctgaaatgtacttttaaatggggaaggtgctctgaagatttgtgccgaaacgccctctcctcgagatttaactaattgttctctcctctctctggctgttggacgcgcacctttccggaggatgggggaggtaaccgaggtcctgagccggtacctgaacttgggtgaacagagaacctcaacttttgctttctagcactcgaccgcacccagcaaggcgtccgcttactcagtggttcttagtgtttggagtgcttaagaataactggtggtgtttgatttcaccaagtacattcgggcagatcttagttcttgggggggtggggctggaatctgcgggtgtgacctccactctaggtctgtgctgtccagccaagtagccattggccacatgtggctgctaagcatgtgaaatacagctaatcaagactgaaatattaaaacacacaccagttttagaagactaggaaaaaagcaaacttttattagatgtttatgttgattatatgttggaaagataatattttggatgtgtcaaacgttaaaaattaatttcacccatttttgtgacgtggctactaaggaatttcaggtgatgcttgtggctcctcacacggtttctattggacagtgctgctgcaggtgattcgaaggcgggtgggtgcaggaacccagctgagagttcagaaattagtgtaactttggagacaagtgtctgtgggggaaggagcctccggacgtggagatacaactcttgctcctaacatttatcgagtctttaattaatgccctgggtaactataaggttggaactgtaattgtcaccatattgatgatgagaaacttgagaaaggataagtgacttgtctaaaatcacacagtaaaacctcaaatcaaacccaggccctctggctccagactctaaattatactctgaatgatactcactgattgtccgaggacacaaagagtgtcgaggcactatctgctgggtgtctgcagaaccttactgttctaaagcaaaacattttacccctggacaagagcagcaaaggtggcgttcggccctccttggctctcatttgactgttcaaagccaggtgcttttctttcttgggtcagaacgtattttcagcagcattttgaagcacccctggcgtgcactgcacagggaaaccaggaccacattggtgtgctgtgtcctccttaccaactggctcttggagaaggctgctctttggcgtaaattgcaatcgattagggatcgtttctcagaatcaagttagaagtgagagttcagataagtgaggccgccattgctgctttgaacacctcagaaggggagaatggatttatcaggagtgaaaaagaagagcttgctaggagtcaaagaaaataataaaaagtccagcactagggctccttcacctaccaaacgcaaagaccgctcagatgagaagtccaaggatcgctcaaaagataaaggggccaccaaggagtcgagtgagaaggatcgcggccgggacaaaacccgaaagaggcgcagcgcttccagtggtagcagcagtaccaggtctcggtccagctcgacttccagctcaggctccagcaccagcactggctcaagcagtggctccagctcttcctcagcatccagccgctcaggaagctccagcacctcccgcagctccagctctagcagctcttctggctctccaagtccttctcggcgcagacacgacaacaggaggcgctcccgctccaaatccaaaccacctaaaagagatgaaaaggagaggaaaaggcggagcccatctcctaagcccaccaaagtgcacattgggagactcacccggaatgtgacaaaggatcacatcatggagatattttccacctatgggaaaattaaaatgattgacatgcccgtggaaaggatgcatccccatctgtccaaaggctatgcgtacgtagagtttgagaatccagatgaagccgagaaggcgctgaagcacatggatggaggacaaattgatggccaggagatcactgccaccgccgtgctggccccctggcctaggccaccccccaggagattcagccctcccaggagaatgttgccaccaccgcctatgtggcgcaggtctcccccacggatgaggagaaggtcccgctccccgaggcgcaggtcccccgtgcgccggagatcacggtccccgggccgccgccgccacaggagccgctccagctccaactcctcccgataaacaggccactgaagctctcgcccctgtaacttataccccacccagctcagttttgtcacttttctagccaaaggaagaccagtaggaaagcaaacccttgactctggcaggatttgcaggcagcaggcagcacccctctgccagccgggccccggctgcagaagtgctgttggtttggatgctgtgtgcctgtcaagattccctccggttttctggctagaaagctcatccgtttccggtttctaagagtcagttcagtggcagagccaccagggaaaagtgaggctcttgggggtggtttgaccctgcttacctgggagcacacttttcccttccccgatgacctgggatggtggccaggccgtgcccttgctgttgctgggcagtgtccttttggaaagggagctgccccaggctttagtgcagctgccaaccctgttaggcctggcctctcgaggcctcttctgacctcaagggtcacaccccctcaaagatcctctcacccatggtagttgctgctcgtggttctgtctgtccgtgcaccgatgcacacaccgcaccccaccactgtactctgaaattggcgagtgagtggagagccagctctgcggagtcatcacgcagccatggttgtgcctgccgttcatggtggtctttcaggttatcttggcaacatgtacattgcttttattttttttcttttttgctttcattgtacagtcagtactataaaatttctcttttgagttttatacctttgtagcattttagatgacattgtgtttgtactttgttgtgtagagtggaagaattgtgttgaataaacccaagatcggaatgcaaa

SEQ ID NO: 318936 - DNA, 2165 bp, Homo sapiens
gtggtaggggccgctgcggacggaagggcgcctgtgcttcgtccgctcggcggtggcccagccaggcccgcgggactcagaccagcggggagcgcggcctccgcccttggggccctcccgccgggccggagacccaagcccccaacgccaggccctgccctggaagcgctcgcggcccggcgcctggacgggggagttgtgagtgaacgcggacgggtagcggcgaggtcggcgtgtcgggccggtgtcggcgggcgcggagtttctttgtgggatgcggtggaaggctgctctttggcgtaaattgcaatcgattagggatcgtttctcagaatcaagttagaagtgagagttcagataagtgaggccgccattgctgctttgaacacctcagaaggggagaatggatttatcaggagtgaaaaagaagagcttgctaggagtcaaagaaaataataaaaagtccagcactagggctccttcacctaccaaacgcaaagaccgctcagatgagaagtccaaggatcgctcaaaagataaaggggccaccaaggagtcgagtgagaaggatcgcggccgggacaaaacccgaaagaggcgcagcgcttccagtggtagcagcagtaccaggtctcggtccagctcgacttccagctcaggctccagcaccagcactggctcaagcagtggctccagctcttcctcagcatccagccgctcaggaagctccagcacctcccgcagctccagctctagcagctcttctggctctccaagtccttctcggcgcagacacgacaacaggaggcgctcccgctccaaatccaaaccacctaaaagagatgaaaaggagaggaaaaggcggagcccatctcctaagcccaccaaagtgcacattgggagactcacccggaatgtgacaaaggatcacatcatggagatattttccacctatgggaaaattaaaatgattgacatgcccgtggaaaggatgcatccccatctgtccaaaggctatgcgtacgtagagtttgagaatccagatgaagccgagaaggcgctgaagcacatggatggaggacaaattgatggccaggagatcactgccaccgccgtgctggccccctggcctaggccaccccccaggagattcagccctcccaggagaatgttgccaccaccgcctatgtggcgcaggtctcccccacggatgaggagaaggtcccgctccccgaggcgcaggtcccccgtgcgccggagatcacggtccccgggccgccgccgccacaggagccgctccagctccaactcctcccgataaacaggccactgaagctctcgcccctgtaacttataccccacccagctcagttttgtcacttttctagccaaaggaagaccagtaggaaagcaaacccttgactctggcaggatttgcaggcagcaggcagcacccctctgccagccgggccccggctgcagaagtgctgttggtttggatgctgtgtgcctgtcaagattccctccggttttctggctagaaagctcatccgtttccggtttctaagagtcagttcagtggcagagccaccagggaaaagtgaggctcttgggggtggtttgaccctgcttacctgggagcacacttttcccttccccgatgacctgggatggtggccaggccgtgcccttgctgttgctgggcagtgtccttttggaaagggagctgccccaggctttagtgcagctgccaaccctgttaggcctggcctctcgaggcctcttctgacctcaagggtcacaccccctcaaagatcctctcacccatggtagttgctgctcgtggttctgtctgtccgtgcaccgatgcacacaccgcaccccaccactgtactctgaaattggcgagtgagtggagagccagctctgcggagtcatcacgcagccatggttgtgcctgccgttcatggtggtctttcaggttatcttggcaacatgtacattgcttttattttttttcttttttgctttcattgtacagtcagtactataaaatttctcttttgagttttatacctttgtagcattttagatgacattgtgtttgtactttgttgtgtagagtggaagaattgtgttgaataaacccaagatcggaatgcaaa

SEQ ID NO: 318937 - DNA, 1932 bp, Homo sapiens
  misc_feature (29)..(29): n is a, c, g, or t
  misc_feature (32)..(32): n is a, c, g, or t
tcccacacatacgcgcttaggacgggccnggngttaggcggcggcgggaagatgctgctctttggcgtaaattgcaatcgattagggatcgtttctcagaatcaagttagaagtgagagttcagataagtgaggccgccattgctgctttgaacacctcagaaggggagaatggatttatcaggagtgaaaaagaagagcttgctaggagtcaaagaaaataataaaaagtccagcactagggctccttcacctaccaaacgcaaagaccgctcagatgagaagtccaaggatcgctcaaaagataaaggggccaccaaggagtcgagtgagaaggatcgcggccgggacaaaacccgaaagaggcgcagcgcttccagtggtagcagcagtaccaggtctcggtccagctcgacttccagctcaggctccagcaccagcactggctcaagcagtggctccagctcttcctcagcatccagccgctcaggaagctccagcacctcccgcagctccagctctagcagctcttctggctctccaagtccttctcggcgcagacacgacaacaggaggcgctcccgctccaaatccaaaccacctaaaagagatgaaaaggagaggaaaaggcggagcccatctcctaagcccaccaaagtgcacattgggagactcacccggaatgtgacaaaggatcacatcatggagatattttccacctatgggaaaattaaaatgattgacatgcccgtggaaaggatgcatccccatctgtccaaaggctatgcgtacgtagagtttgagaatccagatgaagccgagaaggcgctgaagcacatggatggaggacaaattgatggccaggagatcactgccaccgccgtgctggccccctggcctaggccaccccccaggagattcagccctcccaggagaatgttgccaccaccgcctatgtggcgcaggtctcccccacggatgaggagaaggtcccgctccccgaggcgcaggtcccccgtgcgccggagatcacggtccccgggccgccgccgccacaggagccgctccagctccaactcctcccgataaacaggccactgaagctctcgcccctgtaacttataccccacccagctcagttttgtcacttttctagccaaaggaagaccagtaggaaagcaaacccttgactctggcaggatttgcaggcagcaggcagcacccctctgccagccgggccccggctgcagaagtgctgttggtttggatgctgtgtgcctgtcaagattccctccggttttctggctagaaagctcatccgtttccggtttctaagagtcagttcagtggcagagccaccagggaaaagtgaggctcttgggggtggtttgaccctgcttacctgggagcacacttttcccttccccgatgacctgggatggtggccaggccgtgcccttgctgttgctgggcagtgtccttttggaaagggagctgccccaggctttagtgcagctgccaaccctgttaggcctggcctctcgaggcctcttctgacctcaagggtcacaccccctcaaagatcctctcacccatggtagttgctgctcgtggttctgtctgtccgtgcaccgatgcacacaccgcaccccaccactgtactctgaaattggcgagtgagtggagagccagctctgcggagtcatcacgcagccatggttgtgcctgccgttcatggtggtctttcaggttatcttggcaacatgtacattgcttttattttttttcttttttgctttcattgtacagtcagtactataaaatttctcttttgagttttatacctttgtagcattttagatgacattgtgtttgtactttgttgtgtagagtggaagaattgtgttgaataaacccaagatcggaatgcaaa

SEQ ID NO: 318938 - DNA, 2229 bp, Homo sapiens
cgacaagcagagggcaaggtagaggatgatgacccgggaacagggctgaagagaaagtctgcgctgggagctgcaggctgggcccatcaggagcctgggggctcggctctggaggggctgaagagaaagtctgcgctgggagctgcaggctgggcccatcaggagcctgggggctcgccggcctcggcggctgaggaaagcaggaggaggtggcggcggcgggaagatgtaagttggggcggaatccgactgcatccgtgtttcgggggctgcccggcaggcccggcaggacgcctcgtgaagccggtccactcctcagccccgcagtgcggcggtggcctggcagcgcggctgctctttggcgtaaattgcaatcgattagggatcgtttctcagaatcaagttagaagtgagagttcagataagtgaggccgccattgctgctttgaacacctcagaaggggagaatggatttatcaggagtgaaaaagaagagcttgctaggagtcaaagaaaataataaaaagtccagcactagggctccttcacctaccaaacgcaaagaccgctcagatgagaagtccaaggatcgctcaaaagataaaggggccaccaaggagtcgagtgagaaggatcgcggccgggacaaaacccgaaagaggcgcagcgcttccagtggtagcagcagtaccaggtctcggtccagctcgacttccagctcaggctccagcaccagcactggctcaagcagtggctccagctcttcctcagcatccagccgctcaggaagctccagcacctcccgcagctccagctctagcagctcttctggctctccaagtccttctcggcgcagacacgacaacaggaggcgctcccgctccaaatccaaaccacctaaaagagatgaaaaggagaggaaaaggcggagcccatctcctaagcccaccaaagtgcacattgggagactcacccggaatgtgacaaaggatcacatcatggagatattttccacctatgggaaaattaaaatgattgacatgcccgtggaaaggatgcatccccatctgtccaaaggctatgcgtacgtagagtttgagaatccagatgaagccgagaaggcgctgaagcacatggatggaggacaaattgatggccaggagatcactgccaccgccgtgctggccccctggcctaggccaccccccaggagattcagccctcccaggagaatgttgccaccaccgcctatgtggcgcaggtctcccccacggatgaggagaaggtcccgctccccgaggcgcaggtcccccgtgcgccggagatcacggtccccgggccgccgccgccacaggagccgctccagctccaactcctcccgataaacaggccactgaagctctcgcccctgtaacttataccccacccagctcagttttgtcacttttctagccaaaggaagaccagtaggaaagcaaacccttgactctggcaggatttgcaggcagcaggcagcacccctctgccagccgggccccggctgcagaagtgctgttggtttggatgctgtgtgcctgtcaagattccctccggttttctggctagaaagctcatccgtttccggtttctaagagtcagttcagtggcagagccaccagggaaaagtgaggctcttgggggtggtttgaccctgcttacctgggagcacacttttcccttccccgatgacctgggatggtggccaggccgtgcccttgctgttgctgggcagtgtccttttggaaagggagctgccccaggctttagtgcagctgccaaccctgttaggcctggcctctcgaggcctcttctgacctcaagggtcacaccccctcaaagatcctctcacccatggtagttgctgctcgtggttctgtctgtccgtgcaccgatgcacacaccgcaccccaccactgtactctgaaattggcgagtgagtggagagccagctctgcggagtcatcacgcagccatggttgtgcctgccgttcatggtggtctttcaggttatcttggcaacatgtacattgcttttattttttttcttttttgctttcattgtacagtcagtactataaaatttctcttttgagttttatacctttgtagcattttagatgacattgtgtttgtactttgttgtgtagagtggaagaattgtgttgaataaacccaagatcggaatgcaaa

SEQ ID NO: 318939 - DNA, 1880 bp, Homo sapiens
ggcacgagggagagagaggaggaggaaagcaggaggaggtggcggcggcgggaagatgctgctctttggcgtaaattgcaatcgattagggatcgtttctcagaatcaagttagaagtgagagttcagataagtgaggccgccattgctgctttgaacacctcagaaggggagaatggatttatcaggagtgaaaaagaagagcttgctaggagtcaaagaaaataataaaaagtccagcactagggctccttcacctaccaaacgcaaagaccgctcagatgagaagtccaaggatcgctcaaaagataaaggggccaccaaggagtcgagtgagaaggatcgcggccgggacaaaacccgaaagaggcgcagcgcttccagtggtagcagcagtaccaggtctcggtccagctcgacttccagctcaggctccagcaccagcactggctcaagcagtggctccagctcttcctcagcatccagccgctcaggaagctccagcacctcccgcagctccagctctagcagctcttctggctctccaagtccttctcggcgcagacacgacaacaggaggcgctcccgctccaaatccaaaccacctaaaagagatgaaaaggagaggaaaaggcggagcccatctcctaagcccaccaaagtgcacattgggagactcacccggaatgtgacaaaggatcacatcatggagatattttccacctatgggaaaattaaaatgattgacatgcccgtggaaaggatgcatccccatctgtccaaaggctatgcgtacgtagagtttgagaatccagatgaagccgagaaggcgctgaagcacatggatggaggacaaattgatggccaggagatcactgccaccgccgtgctggccccctggcctaggccaccccccaggagattcagccctcccaggagaatgttgccaccaccgcctatgtggcgcaggtctcccccacggatgaggagaaggtcccgctccccgaggcgcaggtcccccgtgcgccggagatcacggtccccgggccgccgccgccacaggagccgctccagctccaactcctcccgataaacaggccactgaagctctcgcccctgtaacttataccccacccagctcagttttgtcacttttctagccaaaggaagaccagtaggaaagcaaacccttgactctggcaggatttgcaggcagcaggcagcacccctctgccagccgggccccggctgcagaagtgctgttggtttggatgctgtgtgcctgtcaagattccctccggttttctggctagaaagctcatccgtttccggtttctaagagtcagttcagtggcagagccaccagcccttccccgatgacctgggatggtggccaggccgtgcccttgctgttgctgggcagtgtccttttggaaagggagctgccccaggctttagtgcagctgccaaccctgttaggcctggcctctcgaggcctcttctgacctcaagggtcacaccccctcaaagatcctctcacccatggtagttgctgctcgtggttctgtctgtccgtgcaccgatgcacacaccgcaccccaccactgtactctgaaattggcgagtgagtggagagccagctctgcggagtcatcacgcagccatggttgtgcctgccgttcatggtggtctttcaggttatcttggcaacatgtacattgcttttattttttttcttttttgctttcattgtacagtcagtactataaaatttctcttttgagttttatacctttgtagcattttagatgacattgtgtttgtactttgttgtgtagagtggaagaattgtgttgaataaacccaagatcggaatgcaaa

SEQ ID NO: 318940 - DNA, 2041 bp, Homo sapiens
cgacaagcagagggcaaggtagaggatgatgacccgggaacagggctgaagagaaagtctgcgctgggagctgcaggctgggcccatcaggagcctgggggctcggctctggaggggctgaagagaaagtctgcgctgggagctgcaggctgggcccatcaggagcctgggggctcgccggcctcggcggctgaggaaagcaggaggaggtggcggcggcgggaagatgtaagttggggcggaatccgactgcatccgtgtttcgggggctgcccggcaggcccggcaggacgcctcgtgaagccggtccactcctcagccccgcagtgcggcggtggcctggcagcgcgggctccttcacctaccaaacgcaaagaccgctcagatgagaagtccaaggatcgctcaaaagataaaggggccaccaaggagtcgagtgagaaggatcgcggccgggacaaaacccgaaagaggcgcagcgcttccagtggtagcagcagtaccaggtctcggtccagctcgacttccagctcaggctccagcaccagcactggctcaagcagtggctccagctcttcctcagcatccagccgctcaggaagctccagcacctcccgcagctccagctctagcagctcttctggctctccaagtccttctcggcgcagacacgacaacaggaggcgctcccgctccaaatccaaaccacctaaaagagatgaaaaggagaggaaaaggcggagcccatctcctaagcccaccaaagtgcacattgggagactcacccggaatgtgacaaaggatcacatcatggagatattttccacctatgggaaaattaaaatgattgacatgcccgtggaaaggatgcatccccatctgtccaaaggctatgcgtacgtagagtttgagaatccagatgaagccgagaaggcgctgaagcacatggatggaggacaaattgatggccaggagatcactgccaccgccgtgctggccccctggcctaggccaccccccaggagattcagccctcccaggagaatgttgccaccaccgcctatgtggcgcaggtctcccccacggatgaggagaaggtcccgctccccgaggcgcaggtcccccgtgcgccggagatcacggtccccgggccgccgccgccacaggagccgctccagctccaactcctcccgataaacaggccactgaagctctcgcccctgtaacttataccccacccagctcagttttgtcacttttctagccaaaggaagaccagtaggaaagcaaacccttgactctggcaggatttgcaggcagcaggcagcacccctctgccagccgggccccggctgcagaagtgctgttggtttggatgctgtgtgcctgtcaagattccctccggttttctggctagaaagctcatccgtttccggtttctaagagtcagttcagtggcagagccaccagggaaaagtgaggctcttgggggtggtttgaccctgcttacctgggagcacacttttcccttccccgatgacctgggatggtggccaggccgtgcccttgctgttgctgggcagtgtccttttggaaagggagctgccccaggctttagtgcagctgccaaccctgttaggcctggcctctcgaggcctcttctgacctcaagggtcacaccccctcaaagatcctctcacccatggtagttgctgctcgtggttctgtctgtccgtgcaccgatgcacacaccgcaccccaccactgtactctgaaattggcgagtgagtggagagccagctctgcggagtcatcacgcagccatggttgtgcctgccgttcatggtggtctttcaggttatcttggcaacatgtacattgcttttattttttttcttttttgctttcattgtacagtcagtactataaaatttctcttttgagttttatacctttgtagcattttagatgacattgtgtttgtactttgttgtgtagagtggaagaattgtgttgaataaacccaagatcggaatgcaaa

SEQ ID NO: 318941 - DNA, 1748 bp, Homo sapiens
ggcacgagggagagagaggaggaggaaagcaggaggaggtggcggcggcgggaagatggctccttcacctaccaaacgcaaagaccgctcagatgagaagtccaaggatcgctcaaaagataaaggggccaccaaggagtcgagtgagaaggatcgcggccgggacaaaacccgaaagaggcgcagcgcttccagtggtagcagcagtaccaggtctcggtccagctcgacttccagctcaggctccagcaccagcactggctcaagcagtggctccagctcttcctcagcatccagccgctcaggaagctccagcacctcccgcagctccagctctagcagctcttctggctctccaagtccttctcggcgcagacacgacaacaggaggcgctcccgctccaaatccaaaccacctaaaagagatgaaaaggagaggaaaaggcggagcccatctcctaagcccaccaaagtgcacattgggagactcacccggaatgtgacaaaggatcacatcatggagatattttccacctatgggaaaattaaaatgattgacatgcccgtggaaaggatgcatccccatctgtccaaaggctatgcgtacgtagagtttgagaatccagatgaagccgagaaggcgctgaagcacatggatggaggacaaattgatggccaggagatcactgccaccgccgtgctggccccctggcctaggccaccccccaggagattcagccctcccaggagaatgttgccaccaccgcctatgtggcgcaggtctcccccacggatgaggagaaggtcccgctccccgaggcgcaggtcccccgtgcgccggagatcacggtccccgggccgccgccgccacaggagccgctccagctccaactcctcccgataaacaggccactgaagctctcgcccctgtaacttataccccacccagctcagttttgtcacttttctagccaaaggaagaccagtaggaaagcaaacccttgactctggcaggatttgcaggcagcaggcagcacccctctgccagccgggccccggctgcagaagtgctgttggtttggatgctgtgtgcctgtcaagattccctccggttttctggctagaaagctcatccgtttccggtttctaagagtcagttcagtggcagagccaccagggaaaagtgaggctcttgggggtggtttgaccctgcttacctgggagcacacttttcccttccccgatgacctgggatggtggccaggccgtgcccttgctgttgctgggcagtgtccttttggaaagggagctgccccaggctttagtgcagctgccaaccctgttaggcctggcctctcgaggcctcttctgacctcaagggtcacaccccctcaaagatcctctcacccatggtagttgctgctcgtggttctgtctgtccgtgcaccgatgcacacaccgcaccccaccactgtactctgaaattggcgagtgagtggagagccagctctgcggagtcatcacgcagccatggttgtgcctgccgttcatggtggtctttcaggttatcttggcaacatgtacattgcttttattttttttcttttttgctttcattgtacagtcagtactataaaatttctcttttgagttttatacctttgtagcattttagatgacattgtgtttgtactttgttgtgtagagtggaagaattgtgttgaataaacccaagatcggaatgcaaa

SEQ ID NO: 318942 - DNA, 2702 bp, Homo sapiens
gtggtaggggccgctgcggacggaagggcgcctgtgcttcgtccgctcggcggtggcccagccaggcccgcgggactcagaccagcggggagcgcggcctccgcccttggggccctcccgccgggccggagacccaagcccccaacgccaggccctgccctggaagcgctcgcggcccggcgcctggacgggggagttgtgagtgaacgcggacgggtagcggcgaggtcggcgtgtcgggccggtgtcggcgggcgcggagtttctttgtgggatgcggtggaaggtcggccgatccccccttcggagtcattaattcaaacgtgtacccgcgaacgtttcccggactcccgtgtgcaattatcggcgctaggccgtggggatacggcccactatggaccgagcacggtggccgagctcagtttgatgggttaccccagaggggcggatacgggaaggttaagtttgttggaggagaaacgtggagtaggctttttgtcttgattccgcatgaactgtgcctgaaatgtacttttaaatggggaaggtgctctgaagatttgtgccgaaacgccctctcctcgagatttaactaattgttctctcctctctctggctgttggacgcgcacctttccggaggatgggggaggtaaccgaggtcctgagccggtacctgaacttgggctgctctttggcgtaaattgcaatcgattagggatcgtttctcagaatcaagttagaagtgagagttcagataagtgaggccgccattgctgctttgaacacctcagaaggggagaatggatttatcaggagtgaaaaagaagagcttgctaggagtcaaagaaaataataaaaagtccagcactagggctccttcacctaccaaacgcaaagaccgctcagatgagaagtccaaggatcgctcaaaagataaaggggccaccaaggagtcgagtgagaaggatcgcggccgggacaaaacccgaaagaggcgcagcgcttccagtggtagcagcagtaccaggtctcggtccagctcgacttccagctcaggctccagcaccagcactggctcaagcagtggctccagctcttcctcagcatccagccgctcaggaagctccagcacctcccgcagctccagctctagcagctcttctggctctccaagtccttctcggcgcagacacgacaacaggaggcgctcccgctccaaatccaaaccacctaaaagagatgaaaaggagaggaaaaggcggagcccatctcctaagcccaccaaagtgcacattgggagactcacccggaatgtgacaaaggatcacatcatggagatattttccacctatgggaaaattaaaatgattgacatgcccgtggaaaggatgcatccccatctgtccaaaggctatgcgtacgtagagtttgagaatccagatgaagccgagaaggcgctgaagcacatggatggaggacaaattgatggccaggagatcactgccaccgccgtgctggccccctggcctaggccaccccccaggagattcagccctcccaggagaatgttgccaccaccgcctatgtggcgcaggtctcccccacggatgaggagaaggtcccgctccccgaggcgcaggtcccccgtgcgccggagatcacggtccccgggccgccgccgccacaggagccgctccagctccaactcctcccgataaacaggccactgaagctctcgcccctgtaacttataccccacccagctcagttttgtcacttttctagccaaaggaagaccagtaggaaagcaaacccttgactctggcaggatttgcaggcagcaggcagcacccctctgccagccgggccccggctgcagaagtgctgttggtttggatgctgtgtgcctgtcaagattccctccggttttctggctagaaagctcatccgtttccggtttctaagagtcagttcagtggcagagccaccagggaaaagtgaggctcttgggggtggtttgaccctgcttacctgggagcacacttttcccttccccgatgacctgggatggtggccaggccgtgcccttgctgttgctgggcagtgtccttttggaaagggagctgccccaggctttagtgcagctgccaaccctgttaggcctggcctctcgaggcctcttctgacctcaagggtcacaccccctcaaagatcctctcacccatggtagttgctgctcgtggttctgtctgtccgtgcaccgatgcacacaccgcaccccaccactgtactctgaaattggcgagtgagtggagagccagctctgcggagtcatcacgcagccatggttgtgcctgccgttcatggtggtctttcaggttatcttggcaacatgtacattgcttttattttttttcttttttgctttcattgtacagtcagtactataaaatttctcttttgagttttatacctttgtagcattttagatgacattgtgtttgtactttgttgtgtagagtggaagaattgtgttgaataaacccaagatcggaatgcaaaatctgagatgaatattaattttattctcattttatagatgaggaaatgggagttttaaagacattcaataactttggccaaggtcattcagctattaaattttaagaccataaaccaattggattcctggaggaattc

SEQ ID NO: 318943 - DNA, 2141 bp, Homo sapiens
agtaatttgtaaaattagctgagcgtggtggcatgcatctgtagtcccagctacttgggagggctgaggcaagaggatggcttgagcccaggagtttgaggaaaataaacaaaactagccgggtgtggtggtacacgcctgtactcccagctactcgggaggctgagtcaggaggatggcttgattccagggggttgaagctgcagtgtgcggagatcatgccactgcactccagcttgggtggcagaccctgtctcaaaagaaaaaatcaacctagcctgggtcagcatcagccagcagctgccttcccagcctgagttggcagttgtgacttttgccagagtcctttgcctcccagcaggaaaggcttctgtatgggtagaaggcagcccatcacctctgtcctgtcccacacacaatgtgacacctagggctctgacttgctgggggattggggggtgatgttttccccactgctgaaagcagtgaggcctggaggcacccgaacagcaggtttctcctggggggagcacaacagaattggaggaggcatctgtactgtgagacttggtgtgtggtggttgtgacccctcatcttgccctcaggtctcggtccagctcgacttccagctcaggctccagcaccagcactggctcaagcagtggctccagctcttcctcagcatccagccgctcaggaagctccagcacctcccgcagctccagctctagcagctcttctggctctccaagtccttctcggcgcagacacgacaacaggaggcgctcccgctccaaatccaaaccacctaaaagagatgaaaaggagaggaaaaggcggagcccatctcctaagcccaccaaagtgcacattgggagactcacccggaatgtgacaaaggatcacatcatggagatattttccacctatgggaaaattaaaatgattgacatgcccgtggaaaggatgcatccccatctgtccaaaggctatgcgtacgtagagtttgagaatccagatgaagccgagaaggcgctgaagcacatggatggaggacaaattgatggccaggagatcactgccaccgccgtgctggccccctggcctaggccaccccccaggagattcagccctcccaggagaatgttgccaccaccgcctatgtggcgcaggtctcccccacggatgaggagaaggtcccgctccccgaggcgcaggtcccccgtgcgccggagatcacggtccccgggccgccgccgccacaggagccgctccagctccaactcctcccgataaacaggccactgaagctctcgcccctgtaacttataccccacccagctcagttttgtcacttttctagccaaaggaagaccagtaggaaagcaaacccttgactctggcaggatttgcaggcagcaggcagcacccctctgccagccgggccccggctgcagaagtgctgttggtttggatgctgtgtgcctgtcaagattccctccggttttctggctagaaagctcatccgtttccggtttctaagagtcagttcagtggcagagccaccagggaaaagtgaggctcttgggggtggtttgaccctgcttacctgggagcacacttttcccttccccgatgacctgggatggtggccaggccgtgcccttgctgttgctgggcagtgtccttttggaaagggagctgccccaggctttagtgcagctgccaaccctgttaggcctggcctctcgaggcctcttctgacctcaagggtcacaccccctcaaagatcctctcacccatggtagttgctgctcgtggttctgtctgtccgtgcaccgatgcacacaccgcaccccaccactgtactctgaaattggcgagtgagtggagagccagctctgcggagtcatcacgcagccatggttgtgcctgccgttcatggtggtctttcaggttatcttggcaacatgtacattgcttttattttttttcttttttgctttcattgtacagtcagtactataaaatttctcttttgagttttatacctttgtagcattttagatgacattgtgtttgtactttgttgtgtagagtggaagaattgtgttgaataaacccaagatcggaatgcaaa

SEQ ID NO: 318944 - DNA, 1789 bp, Homo sapiens
aagagcggtagcaggacctcggtgggtgaggaaagcaggaggatgtggtgagcgtgggcataatggttccttaagcatactcacatgcgtcaataggactcagctgcatagtgataatgtccaaggtatcgctcgacaagatggagggggcagcgataggtaggatcgagatgcacgagagtgatcgtcgcgtagcgggacataaactcggatcagatggcgcagggagttccagtgatagcaatattaccatggtctcggtccagctcgacttccagctcaggctccagcaccagcactggctcaagcagtggctccagctcttcctcagcatccagccgctcaggaagctccagcacctcccgcagctccagctctagcagctcttctggctctccaagtccttctcggcgcagacacgacaacaggaggcgctcccgctccaaatccaaaccacctaaaagagatgaaaaggagaggaaaaggcggagcccatctcctaagcccaccaaagtgcacattgggagactcacccggaatgtgacaaaggatcacatcatggagatattttccacctatgggaaaattaaaatgattgacatgcccgtggaaaggatgcatccccatctgtccaaaggctatgcgtacgtagagtttgagaatccagatgaagccgagaaggcgctgaagcacatggatggaggacaaattgatggccaggagatcactgccaccgccgtgctggccccctggcctaggccaccccccaggagattcagccctcccaggagaatgttgccaccaccgcctatgtggcgcaggtctcccccacggatgaggagaaggtcccgctccccgaggcgcaggtcccccgtgcgccggagatcacggtccccgggccgccgccgccacaggagccgctccagctccaactcctcccgataaacaggccactgaagctctcgcccctgtaacttataccccacccagctcagttttgtcacttttctagccaaaggaagaccagtaggaaagcaaacccttgactctggcaggatttgcaggcagcaggcagcacccctctgccagccgggccccggctgcagaagtgctgttggtttggatgctgtgtgcctgtcaagattccctccggttttctggctagaaagctcatccgtttccggtttctaagagtcagttcagtggcagagccaccagggaaaagtgaggctcttgggggtggtttgaccctgcttacctgggagcacacttttcccttccccgatgacctgggatggtggccaggccgtgcccttgctgttgctgggcagtgtccttttggaaagggagctgccccaggctttagtgcagctgccaaccctgttaggcctggcctctcgaggcctcttctgacctcaagggtcacaccccctcaaagatcctctcacccatggtagttgctgctcgtggttctgtctgtccgtgcaccgatgcacacaccgcaccccaccactgtactctgaaattggcgagtgagtggagagccagctctgcggagtcatcacgcagccatggttgtgcctgccgttcatggtggtctttcaggttatcttggcaacatgtacattgcttttattttttttcttttttgctttcattgtacagtcagtactataaaatttctcttttgagttttatacctttgtagcattttagatgacattgtgtttgtactttgttgtgtagagtggaagaattgtgttgaataaacccaagatcggaatgcaaa

SEQ ID NO: 318945 - DNA, 1708 bp, Homo sapiens
  misc_feature (69)..(69): n is a, c, g, or t
aaggatcgctcaaacagataaagggggtcgacacaatgggagctctgaagctgatgaacgcgatcggangagtcgtggcgatccaatagaacctcagatagagagggcgtatggtgcattcacatgatggataagccgacgccaggtggcagagtcgtacgcggtccatggcatacgaacatttccagactgcgaggtctctcgaagcgatcatgcactggctcaagcagtggctccagctcttcctcagcatccagccgctcaggaagctccagcacctcccgcagctccagctctagcagctcttctggctctccaagtccttctcggcgcagacacgacaacaggaggcgctcccgctccaaatccaaaccacctaaaagagatgaaaaggagaggaaaaggcggagcccatctcctaagcccaccaaagtgcacattgggagactcacccggaatgtgacaaaggatcacatcatggagatattttccacctatgggaaaattaaaatgattgacatgcccgtggaaaggatgcatccccatctgtccaaaggctatgcgtacgtagagtttgagaatccagatgaagccgagaaggcgctgaagcacatggatggaggacaaattgatggccaggagatcactgccaccgccgtgctggccccctggcctaggccaccccccaggagattcagccctcccaggagaatgttgccaccaccgcctatgtggcgcaggtctcccccacggatgaggagaaggtcccgctccccgaggcgcaggtcccccgtgcgccggagatcacggtccccgggccgccgccgccacaggagccgctccagctccaactcctcccgataaacaggccactgaagctctcgcccctgtaacttataccccacccagctcagttttgtcacttttctagccaaaggaagaccagtaggaaagcaaacccttgactctggcaggatttgcaggcagcaggcagcacccctctgccagccgggccccggctgcagaagtgctgttggtttggatgctgtgtgcctgtcaagattccctccggttttctggctagaaagctcatccgtttccggtttctaagagtcagttcagtggcagagccaccagggaaaagtgaggctcttgggggtggtttgaccctgcttacctgggagcacacttttcccttccccgatgacctgggatggtggccaggccgtgcccttgctgttgctgggcagtgtccttttggaaagggagctgccccaggctttagtgcagctgccaaccctgttaggcctggcctctcgaggcctcttctgacctcaagggtcacaccccctcaaagatcctctcacccatggtagttgctgctcgtggttctgtctgtccgtgcaccgatgcacacaccgcaccccaccactgtactctgaaattggcgagtgagtggagagccagctctgcggagtcatcacgcagccatggttgtgcctgccgttcatggtggtctttcaggttatcttggcaacatgtacattgcttttattttttttcttttttgctttcattgtacagtcagtactataaaatttctcttttgagttttatacctttgtagcattttagatgacattgtgtttgtactttgttgtgtagagtggaagaattgtgttgaataaacccaagatcggaatgcaaa

SEQ ID NO: 318946 - DNA, 1449 bp, Homo sapiens
ggcacgagggagagagaggaggaggaaagcaggaggaggtggcggcggcgggaagatgctgctctttggcgtaaattgcaatcgattagggatcgtttctcagaatcaagttagaagtgagagttcagataagtgaggccgccattgctgctttgaacacctcagaaggggagaatggatttatcaggagtgaaaaagaagagcttgctaggagtcaaagaaaataataaaaagtccagcactagggctccttcacctaccaaacgcaaagaccgctcagatgagaagtccaaggatcgctcaaaagataaaggggccaccaaggagtcgagtgagaaggatcgcggccgggacaaaacccgaaagaggcgcagcgcttccagtggtagcagcagtaccaggtctcggtccagctcgacttccagctcaggctccagcaccagcactggctcaagcagtggctccagctcttcctcagcatccagccgctcaggaagctccagcacctcccgcagctccagctctagcagctcttctggctctccaagtccttctcggcgcagacacgacaacaggaggcgctcccgctccaaatccaaaccacctaaaagagatgaaaaggagaggaaaaggcggagcccatctcctaagcccaccaaagtgcacattgggagactcacccggaatgtgacaaaggatcacatcatggagatattttccacctatgggaaaattaaaatgattgacatgcccgtggaaaggatgcatccccatctgtccaaaggctatgcgtacgtagagtttgagaatccagatgaagccgagaaggcgctgaagcacatggatggaggacaaattgatggccaggagatcactgccaccgccgtgctggccccctggcctaggccaccccccaggagattcagccctcccaggagaatgttgccaccaccgcctatgtggcgcaggtctcccccacggatgaggagaaggtcccgctccccgaggcgcaggtcccccgtgcgccggagatcacggtccccgggccgccgccgccacaggagccgctccagctccaactcctcccgataaacaggccactgaagctctcgcccctgtaacttataccccacccagctcagttttgtcacttttctagccaaaggaagaccagtaggaaagcaaacccttgactctggcaggatttgcaggcagcaggcagcacccctctgccagccgggccccggctgcagaagtgctgttggtttggatgctgtgtgcctgtcaagattccctccggttttctggctagaaagctcatccgtttccggtttctaagagtcagttcagtggcagagccaccagggaaaagtgaggctcttggggtgccgtacctggggccattcctcccaattcggggtggcgccgctttgggggcgtctgagagcg

SEQ ID NO: 318947 - DNA, 1331 bp, Homo sapiens
ttgggagactcacccggaatgtgcactttggtgggcttaggagatgggctccaaagtgcacattgggagactcacccggaatgtgacaaaggatcacatcatggagatattttccacctatgggaaaattaaaatgattgacatgcccgtggaaaggatgcatccccatctgtccaaaggctatgcgtacgtagagtttgagaatccagatgaagccgagaaggcgctgaagcacatggatggaggacaaattgatggccaggagatcactgccaccgccgtgctggccccctggcctaggccaccccccaggagattcagccctcccaggagaatgttgccaccaccgcctatgtggcgcaggtctcccccacggatgaggagaaggtcccgctccccgaggcgcaggtcccccgtgcgccggagatcacggtccccgggccgccgccgccacaggagccgctccagctccaactcctcccgataaacaggccactgaagctctcgcccctgtaacttataccccacccagctcagttttgtcacttttctagccaaaggaagaccagtaggaaagcaaacccttgactctggcaggatttgcaggcagcaggcagcacccctctgccagccgggccccggctgcagaagtgctgttggtttggatgctgtgtgcctgtcaagattccctccggttttctggctagaaagctcatccgtttccggtttctaagagtcagttcagtggcagagccaccagggaaaagtgaggctcttgggggtggtttgaccctgcttacctgggagcacacttttcccttccccgatgacctgggatggtggccaggccgtgcccttgctgttgctgggcagtgtccttttggaaagggagctgccccaggctttagtgcagctgccaaccctgttaggcctggcctctcgaggcctcttctgacctcaagggtcacaccccctcaaagatcctctcacccatggtagttgctgctcgtggttctgtctgtccgtgcaccgatgcacacaccgcaccccaccactgtactctgaaattggcgagtgagtggagagccagctctgcggagtcatcacgcagccatggttgtgcctgccgttcatggtggtctttcaggttatcttggcaacatgtacattgcttttattttttttcttttttgctttcattgtacagtcagtactataaaatttctcttttgagttttatacctttgtagcattttagatgacattgtgtttgtactttgttgtgtagagtggaagaattgtgttgaataaacccaagatcggaatgcaaa

SEQ ID NO: 318948 - DNA, 1245 bp, Homo sapiens
  misc_feature (38)..(38): n is a, c, g, or t
ggacgcgtgggtcggacgcgtgggtcgacccacgcgtncggattaaaatgattgacatgcccgtggaaaggatgcatccccatctgtccaaaggctatgcgtacgtagagtttgagaatccagatgaagccgagaaggcgctgaagcacatggatggaggacaaattgatggccaggagatcactgccaccgccgtgctggccccctggcctaggccaccccccaggagattcagccctcccaggagaatgttgccaccaccgcctatgtggcgcaggtctcccccacggatgaggagaaggtcccgctccccgaggcgcaggtcccccgtgcgccggagatcacggtccccgggccgccgccgccacaggagccgctccagctccaactcctcccgataaacaggccactgaagctctcgcccctgtaacttataccccacccagctcagttttgtcacttttctagccaaaggaagaccagtaggaaagcaaacccttgactctggcaggatttgcaggcagcaggcagcacccctctgccagccgggccccggctgcagaagtgctgttggtttggatgctgtgtgcctgtcaagattccctccggttttctggctagaaagctcatccgtttccggtttctaagagtcagttcagtggcagagccaccagggaaaagtgaggctcttgggggtggtttgaccctgcttacctgggagcacacttttcccttccccgatgacctgggatggtggccaggccgtgcccttgctgttgctgggcagtgtccttttggaaagggagctgccccaggctttagtgcagctgccaaccctgttaggcctggcctctcgaggcctcttctgacctcaagggtcacaccccctcaaagatcctctcacccatggtagttgctgctcgtggttctgtctgtccgtgcaccgatgcacacaccgcaccccaccactgtactctgaaattggcgagtgagtggagagccagctctgcggagtcatcacgcagccatggttgtgcctgccgttcatggtggtctttcaggttatcttggcaacatgtacattgcttttattttttttcttttttgctttcattgtacagtcagtactataaaatttctcttttgagttttatacctttgtagcattttagatgacattgtgtttgtactttgttgtgtagagtggaagaattgtgttgaataaacccaagatcggaatgcaaa

SEQ ID NO: 318949 - DNA, 1485 bp, Homo sapiens
tgagacggagtttcgctcttgttacccaggctggagtgtagtggcacgatctctgcttactgcagcctctgcctcccgggttcacgccattctcctgcctcagcctcccgagtagctggtactataggcgcccgccacctcgcacagctgatttattgtctttttagtagagacattttcaccatgttagccaggatggtctcgatctcctgacctcgtgatccacctgcctcagcttcccaaagtgctgggattacaggagtgagccaccatgcccggccctgtttctgtgattatcttacattgtcattgtccccccaggcctgtctttcactgtggcatgcattgtctagggtagatgcttgttagatattttatgacttgctgtctttttcaacagacaaattgatggccaggagatcactgccaccgccgtgctggccccctggcctaggccaccccccaggagattcagccctcccaggagaatgttgccaccaccgcctatgtggcgcaggtctcccccacggatgaggagaaggtcccgctccccgaggcgcaggtcccccgtgcgccggagatcacggtccccgggccgccgccgccacaggagccgctccagctccaactcctcccgataaacaggccactgaagctctcgcccctgtaacttataccccacccagctcagttttgtcacttttctagccaaaggaagaccagtaggaaagcaaacccttgactctggcaggatttgcaggcagcaggcagcacccctctgccagccgggccccggctgcagaagtgctgttggtttggatgctgtgtgcctgtcaagattccctccggttttctggctagaaagctcatccgtttccggtttctaagagtcagttcagtggcagagccaccagggaaaagtgaggctcttgggggtggtttgaccctgcttacctgggagcacacttttcccttccccgatgacctgggatggtggccaggccgtgcccttgctgttgctgggcagtgtccttttggaaagggagctgccccaggctttagtgcagctgccaaccctgttaggcctggcctctcgaggcctcttctgacctcaagggtcacaccccctcaaagatcctctcacccatggtagttgctgctcgtggttctgtctgtccgtgcaccgatgcacacaccgcaccccaccactgtactctgaaattggcgagtgagtggagagccagctctgcggagtcatcacgcagccatggttgtgcctgccgttcatggtggtctttcaggttatcttggcaacatgtacattgcttttattttttttcttttttgctttcattgtacagtcagtactataaaatttctcttttgagttttatacctttgtagcattttagatgacattgtgtttgtactttgttgtgtagagtggaagaattgtgttgaataaacccaagatcggaatgcaaa

SEQ ID NO: 318950 - DNA, 1161 bp, Homo sapiens
  misc_feature (38)..(38): n is a, c, g, or t
ggacgcgtgggtcggacgcgtgggtcgacccacgcgtncggatgaagccgagaaggcgctgaagcacatggatgggacaaattgatggccaggagatcactgccaccgccgtgctggccccctggcctaggccaccccccaggagattcagccctcccaggagaatgttgccaccaccgcctatgtggcgcaggtctcccccacggatgaggagaaggtcccgctccccgaggcgcaggtcccccgtgcgccggagatcacggtccccgggccgccgccgccacaggagccgctccagctccaactcctcccgataaacaggccactgaagctctcgcccctgtaacttataccccacccagctcagttttgtcacttttctagccaaaggaagaccagtaggaaagcaaacccttgactctggcaggatttgcaggcagcaggcagcacccctctgccagccgggccccggctgcagaagtgctgttggtttggatgctgtgtgcctgtcaagattccctccggttttctggctagaaagctcatccgtttccggtttctaagagtcagttcagtggcagagccaccagggaaaagtgaggctcttgggggtggtttgaccctgcttacctgggagcacacttttcccttccccgatgacctgggatggtggccaggccgtgcccttgctgttgctgggcagtgtccttttggaaagggagctgccccaggctttagtgcagctgccaaccctgttaggcctggcctctcgaggcctcttctgacctcaagggtcacaccccctcaaagatcctctcacccatggtagttgctgctcgtggttctgtctgtccgtgcaccgatgcacacaccgcaccccaccactgtactctgaaattggcgagtgagtggagagccagctctgcggagtcatcacgcagccatggttgtgcctgccgttcatggtggtctttcaggttatcttggcaacatgtacattgcttttattttttttcttttttgctttcattgtacagtcagtactataaaatttctcttttgagttttatacctttgtagcattttagatgacattgtgtttgtactttgttgtgtagagtggaagaattgtgttgaataaacccaagatcggaatgcaaa

SEQ ID NO: 318951 - DNA, 1154 bp, Homo sapiens
  misc_feature (1051)..(1051): n is a, c, g, or t
ggcacgagggagagagaggaggaggaaagcaggaggaggtggcggcggcgggaagatgctgctctttggcgtaaattgcaatcgattagggatcgtttctcagaatcaagttagaagtgagagttcagataagtgaggccgccattgctgctttgaacacctcagaaggggagaatggatttatcaggagtgaaaaagaagagcttgctaggagtcaaagaaaataataaaaagtccagcactagggctccttcacctaccaaacgcaaagaccgctcagatgagaagtccaaggatcgctcaaaagataaaggggccaccaaggagtcgagtgagaaggatcgcggccgggacaaaacccgaaagaggcgcagcgcttccagtggtagcagcagtaccaggtctcggtccagctcgacttccagctcaggctccagcaccagcactggctcaagcagtggctccagctcttcctcagcatccagccgctcaggaagctccagcacctcccgcagctccagctctagcagctcttctggctctccaagtccttctcggcgcagacacgacaacaggaggcgctcccgctccaaatccaaaccacctaaaagagatgaaaaggagaggaaaaggcggagcccatctcctaagcccaccaaagtgcacattgggagactcacccggaatgtgacaaaggatcacatcatggagatattttccacctatgggaaaattaaaatgattgacatgcccgtggaaaggatgcatccccatctgtccaaaggctatgcgtacgtagagtttgagaatccagatgaagccgagaaggcgctgaagcacatggatggaggacaaattgatggccaggagatcactgccaccgccgtgctggccccctggcctaggccaccccccaggagattcagccctcccaggagaatgttgccaccaccgcctatgtggcgcaggtctcccccacggatgaggagaaggtcccgctccccgaggcgcaggtcccccgtgcgccggagatcacggtccccgggccgcnagaccgtcagttcaattctcccgtaaggccatgagtttggccctgttattttccaccgtcagttggctttctgccagaacctggaggacctttttggggtggg

SEQ ID NO: 318952 - DNA, 1124 bp, Homo sapiens
ggcacgagggagagagaggaggaggaaagcaggaggaggtggcggcggcgggaagatgctgctctttggcgtaaattgcaatcgattagggatcgtttctcagaatcaagttagaagtgagagttcagataagtgaggccgccattgctgctttgaacacctcagaaggggagaatggatttatcaggagtgaaaaagaagagcttgctaggagtcaaagaaaataataaaaagtccagcactagggctccttcacctaccaaacgcaaagaccgctcagatgagaagtccaaggatcgctcaaaagataaaggggccaccaaggagtcgagtgagaaggatcgcggccgggacaaaacccgaaagaggcgcagcgcttccagtggtagcagcagtaccaggtctcggtccagctcgacttccagctcaggctccagcaccagcactggctcaagcagtggctccagctcttcctcagcatccagccgctcaggaagctccagcacctcccgcagctccagctctagcagctcttctggctctccaagtccttctcggcgcagacacgacaacaggaggcgctcccgctccaaatccaaaccacctaaaagagatgaaaaggagaggaaaaggcggagcccatctcctaagcccaccaaagtgcacattgggagactcacccggaatgtgacaaaggatcacatcatggagatattttccacctatgggaaaattaaaatgattgacatgcccgtggaaaggatgcatccccatctgtccaaaggctatgcgtacgtagagtttgagaatccagatgaagccgagaaggcgctgaagcacatggatggaggacaaattgatggccaggagatcactgccaccgccgtgctggccccctggcctaggccaccccccaggagattcagccctcccaggagaatgttgccaccaccgcctatgtggcgcaggtctcccccacggatgaggagaaggtcccgctccccgaggcgcaggtcccccgtgcgccggagatcacggtccccgggccgcaaaccacgagttcacaggatatagctcctagtcgccgactctatcacgattacaggtaatatcatgttccctgc

SEQ ID NO: 318953 - DNA, 1086 bp, Homo sapiens
tgagatcgtgccactgcactctggcctggagacagagtgatattccatctcaaaaagtaaaactatggggaattgcccagaaagaagctagcttgcccctacagcctgagctactctgatgtggtttctcctcttcccgcaggtcccgctccccgaggcgcaggtcccccgtgcgccggagatcacggtccccgggccgccgccgccacaggagccgctccagctccaactcctcccgataaacaggccactgaagctctcgcccctgtaacttataccccacccagctcagttttgtcacttttctagccaaaggaagaccagtaggaaagcaaacccttgactctggcaggatttgcaggcagcaggcagcacccctctgccagccgggccccggctgcagaagtgctgttggtttggatgctgtgtgcctgtcaagattccctccggttttctggctagaaagctcatccgtttccggtttctaagagtcagttcagtggcagagccaccagggaaaagtgaggctcttgggggtggtttgaccctgcttacctgggagcacacttttcccttccccgatgacctgggatggtggccaggccgtgcccttgctgttgctgggcagtgtccttttggaaagggagctgccccaggctttagtgcagctgccaaccctgttaggcctggcctctcgaggcctcttctgacctcaagggtcacaccccctcaaagatcctctcacccatggtagttgctgctcgtggttctgtctgtccgtgcaccgatgcacacaccgcaccccaccactgtactctgaaattggcgagtgagtggagagccagctctgcggagtcatcacgcagccatggttgtgcctgccgttcatggtggtctttcaggttatcttggcaacatgtacattgcttttattttttttcttttttgctttcattgtacagtcagtactataaaatttctcttttgagttttatacctttgtagcattttagatgacattgtgtttgtactttgttgtgtagagtggaagaattgtgttgaataaacccaagatcggaatgcaaa

SEQ ID NO: 318954 - DNA, 1095 bp, Homo sapiens
ggcacgagggagagagaggaggaggaaagcaggaggaggtggcggcggcgggaagatgctgctctttggcgtaaattgcaatcgattagggatcgtttctcagaatcaagttagaagtgagagttcagataagtgaggccgccattgctgctttgaacacctcagaaggggagaatggatttatcaggagtgaaaaagaagagcttgctaggagtcaaagaaaataataaaaagtccagcactagggctccttcacctaccaaacgcaaagaccgctcagatgagaagtccaaggatcgctcaaaagataaaggggccaccaaggagtcgagtgagaaggatcgcggccgggacaaaacccgaaagaggcgcagcgcttccagtggtagcagcagtaccaggtctcggtccagctcgacttccagctcaggctccagcaccagcactggctcaagcagtggctccagctcttcctcagcatccagccgctcaggaagctccagcacctcccgcagctccagctctagcagctcttctggctctccaagtccttctcggcgcagacacgacaacaggaggcgctcccgctccaaatccaaaccacctaaaagagatgaaaaggagaggaaaaggcggagcccatctcctaagcccaccaaagtgcacattgggagactcacccggaatgtgacaaaggatcacatcatggagatattttccacctatgggaaaattaaaatgattgacatgcccgtggaaaggatgcatccccatctgtccaaaggctatgcgtacgtagagtttgagaatccagatgaagccgagaaggcgctgaagcacatggatggagacaaactgatggcaggagatcactggcacgacgtgaaggcccgggctaggcaccccaggagatcagcgtcacagggaaatgtgaacaacgcaagtgggaggtctccccacgataagaaaagtcggaccgaggcagtcccggcgcgaaacacggcccgcgcgacgacagagaggcaaacactcaaaagagagcccgcgataccccacagttgttgcagaacggagaccgcggagaggaacacaagc

SEQ ID NO: 318955 - DNA, 921 bp, Homo sapiens
ggcacgagggagagagaggaggaggaaagcaggaggaggtggcggcggcgggaagatgctgctctttggcgtaaattgcaatcgattagggatcgtttctcagaatcaagttagaagtgagagttcagataagtgaggccgccattgctgctttgaacacctcagaaggggagaatggatttatcaggagtgaaaaagaagagcttgctaggagtcaaagaaaataataaaaagtccagcactagggctccttcacctaccaaacgcaaagaccgctcagatgagaagtccaaggatcgctcaaaagataaaggggccaccaaggagtcgagtgagaaggatcgcggccgggacaaaacccgaaagaggcgcagcgcttccagtggtagcagcagtaccaggtctcggtccagctcgacttccagctcaggctccagcaccagcactggctcaagcagtggctccagctcttcctcagcatccagccgctcaggaagctccagcacctcccgcagctccagctctagcagctcttctggctctccaagtccttctcggcgcagacacgacaacaggaggcgctcccgctccaaatccaaaccacctaaaagagatgaaaaggagaggaaaaggcggagcccatctcctaagcccaccaaagtgcacattgggagactcacccggaatgtgacaaaggatcacatcatggagatattttccacctatgggaaaattaaaatgattgacatgcccgtggaaaggatgcatccccatctgtccaaaggctatgcgtacgtagagtttgagaatccagatgaagccgagaaggcgctgaagcacatggatggagggtgggtgaccctgccacataaccctgacctctcagagacccgccgccgcgaggggctttcaaactgattt

SEQ ID NO: 318956 - DNA, 527 bp, Homo sapiens
aatgagggctaaggggaaagaagctccctatgaatcatgataagcttgatgagaagatgaaggtggagctggcctgcaatcaagcctggaattccaggctttagtgcagctgccaaccctgttaggcctggcctctcgaggcctcttctgacctcaagggtcacaccccctcaaagatcctctcacccatggtagttgctgctcgtggttctgtctgtccgtgcaccgatgcacacaccgcaccccaccactgtactctgaaattggcgagtgagtggagagccagctctgcggagtcatcacgcagccatggttgtgcctgccgttcatggtggtctttcaggttatcttggcaacatgtacattgcttttattttttttcttttttgctttcattgtacagtcagtactataaaatttctcttttgagttttatacctttgtagcattttagatgacattgtgtttgtactttgttgtgtagagtggaagaattgtgttgaataaacccaagatcggaatgcaaa

SEQ ID NO: 318957 - DNA, 904 bp, Homo sapiens
cgacaagcagagggcaaggtagaggatgatgacccgggaacagggctgaagagaaagtctgcgctgggagctgcaggctgggcccatcaggagcctgggggctcggctctggaggggctgaagagaaagtctgcgctgggagctgcaggctgggcccatcaggagcctgggggctcgccggcctcggcggctgaggaaagcaggaggaggtggcggcggcgggaagatggctccttcacctaccaaacgcaaagaccgctcagatgagaagtccaaggatcgctcaaaagataaaggggccaccaaggagtcgagtgagaaggatcgcggccgggacaaaacccgaaagaggcgcagcgcttccagtggtagcagcagtaccaggtctcggtccagctcgacttccagctcaggctccagcaccagcactggctcaagcagtggctccagctcttcctcagcatccagccgctcaggaagctccagcacctcccgcagctccagctctagcagctcttctggctctccaagtccttctcggcgcagacacgacaacaggaggcgctcccgctccaaatccaaaccacctaaaagagatgaaaaggagaggaaaaggcggagcccatctcctaagcccaccaaagtgcacattgggagactcacccggaatgtgacaaaggatcacatcatggagatattttccacctatgggaaaattaaaatgattgacatgcccgtggaaaggatgcatccccatctgtccaaaggctatgcgtacgtagagtttgagaatccagatgaagccgagaaggcgctgaagcacatggatggagggtgggtgaccctgccacataaccctgacctctcagagacccgccgccgcgaggggctttcaaactgattt

SEQ ID NO: 318958 - DNA, 565 bp, Homo sapiens
gctgtgttcatgtgtgctgtgcatgcgtgtgtgctgtgtgtgcatgtgtgtgctgtgtgctgtgttcatgtgtgtgctgtgtgtgcgtgtgctgtgtgcatgtgtgtgctgtgtttgtgtgtgtgctgtgtgtgctgtgttcgtgtgtgctgtgttcgcgtgtgtgtgctgtgtgtgcatgtgtgtgctgtgtctttgtgtgtgtgctgtgtgctagtgtgtgtgctgtgtgtgcatgtgtgcgcgtgtgtgtgctgtgcgtttgtgtgtgtgctgtgtgctcatctgtgtgctgtagtgtgctgtagcgtttgggagagccagctctgcggagtcatcacgcagccatggttgtgcctgccgttcatggtggtctttcaggttatcttggcaacatgtacattgcttttattttttttcttttttgctttcattgtacagtcagtactataaaatttctcttttgagttttatacctttgtagcattttagatgacattgtgtttgtactttgttgtgtagagtggaagaattgtgttgaataaacccaagatcggaatgcaaa

SEQ ID NO: 318959 - DNA, 2602 bp, Homo sapiens
gtggtaggggccgctgcggacggaagggcgcctgtgcttcgtccgctcggcggtggcccagccaggcccgcgggactcagaccagcggggagcgcggcctccgcccttggggccctcccgccgggccggagacccaagcccccaacgccaggccctgccctggaagcgctcgcggcccggcgcctggacgggggagttgtgagtgaacgcggacgggtagcggcgaggtcggcgtgtcgggccggtgtcggcgggcgcggagtttctttgtgggatgcggtggaaggtcggccgatccccccttcggagtcattaattcaaacgtgtacccgcgaacgtttcccggactcccgtgtgcaattatcggcgctaggccgtggggatacggcccactatggaccgagcacggtggccgagctcagtttgatgggttaccccagaggggcggatacgggaaggttaagtttgttggaggagaaacgtggagtaggctttttgtcttgattccgcatgaactgtgcctgaaatgtacttttaaatggggaaggtgctctgaagatttgtgccgaaacgccctctcctcgagatttaactaattgttctctcctctctctggctgttggacgcgcacctttccggaggatgggggaggtaaccgaggtcctgagccggtacctgaacttgggtgaacagagaacctcaacttttgctttctagcactcgaccgcacccagcaaggcgtccgcttactcagtggttcttagtgtttggagtgcttaagaataactggtggtgtttgatttcaccaagtacattcgggcagatcttagttcttgggggggtggggctggaatctgcgggtgtgacctccactctaggtctgtgctgtccagccaagtagccattggccacatgtggctgctaagcatgtgaaatacagctaatcaagactgaaatattaaaacacacaccagttttagaagactaggaaaaaagcaaacttttattagatgtttatgttgattatatgttggaaagataatattttggatgtgtcaaacgttaaaaattaatttcacccatttttgtgacgtggctactaaggaatttcaggtgatgcttgtggctcctcacacggtttctattggacagtgctgctgcaggtgattcgaaggcgggtgggtgcaggaacccagctgagagttcagaaattagtgtaactttggagacaagtgtctgtgggggaaggagcctccggacgtggagatacaactcttgctcctaacatttatcgagtctttaattaatgccctgggtaactataaggttggaactgtaattgtcaccatattgatgatgagaaacttgagaaaggataagtgacttgtctaaaatcacacagtaaaacctcaaatcaaacccaggccctctggctccagactctaaattatactctgaatgatactcactgattgtccgaggacacaaagagtgtcgaggcactatctgctgggtgtctgcagaaccttactgttctaaagcaaaacattttacccctggacaagagcagcaaaggtggcgttcggccctccttggctctcatttgactgttcaaagccaggtgcttttctttcttgggtcagaacgtattttcagcagcattttgaagcacccctggcgtgcactgcacagggaaaccaggaccacattggtgtgctgtgtcctccttaccaactggctcttggagaaggctgctctttggcgtaaattgcaatcgattagggatcgtttctcagaatcaagttagaagtgagagttcagataagtgaggccgccattgctgctttgaacacctcagaaggggagaatggatttatcaggagtgaaaaagaagagcttgctaggagtcaaagaaaataataaaaagtccagcactagaggtaatccttctgtaagatttttctagtgctacttgggggtgcttactgctagggacccgcagaaaggggaaagttgagaatgttctgcattctacagtgagtgttctgagccacagaccactttgctctgtggtcacctcgggtctctgtggccctgctgatgctgatcccccgttttgggttgtgctgtttgggtttggtcagaggagcacgcaatctcacactcttcctcaccatccagggctccttcacctaccaaacgcaaagaccgctcagatgagaagtccaaggatcgctcaaaagataaaggggccaccaaggagtcgagtgagaaggatcgcggccgggacaaaacccgaaagaggcgcagcgcttccagtggtagcagcagtaccaggtggggcgggctggcctggagcctggagaggacctgtgccacagctacacccccactccccacagatggctcggttttcttgattatttacaaagaaaacacatcctctgattgttagtagagaccctaatttatggcagactggctaggtgcagtggtggctcatgcctataatcccagcactttgggaggccgaggcaggaggattgcttggggcctggagttcaagaccagcatgggcaacaaaacaagagctcgtctctac

SEQ ID NO: 318960 - DNA, 631 bp, Homo sapiens
  misc_feature (62)..(62): n is a, c, g, or t
atcccggtcactgcacactaatcagtggtggaagaacggtctcagaactgtttgtttcaatnggccatttaagtttagtagtaaaagactggttaatgataacaatgcatcgtaaaaccttcagaaggaaaggagaatgttttgtggaccactttggttttcttttttgcgtgtagaaattgaacactgggtttgccattcatcccctaggcatggtaaatcttgtgttgttccctgctgtcctctgtattacgtgaccggcaaataaatctcatagcagttaatataaaacatctttggaggatgggagagaacaggagggaagatgggaaacaaaatagagaattcttaagattttgtttaaaccaaatggtttccatgttgaatgcaaaatgtggggacgtcaaaaatatgaatgtgtagaaattgaacgtggtggtctttcaggttatcttggcaacatgtacattgcttttattttttttcttttttgctttcattgtacagtcagtactataaaatttctcttttgagttttatacctttgtagcattttagatgacattgtgtttgtactttgttgtgtagagtggaagaattgtgttgaataaacccaagatcggaatgcaaa

SEQ ID NO: 318961 - DNA, 1009 bp, Homo sapiens
  misc_feature (29)..(29): n is a, c, g, or t
  misc_feature (32)..(32): n is a, c, g, or t
tcccacacatacgcgcttaggacgggccnggngttaggcggcggcgggaagatgctgctctttggcgtaaattgcaatcgattagggatcgtttctcagaatcaagttagaagtgagagttcagataagtgaggccgccattgctgctttgaacacctcagaaggggagaatggatttatcaggagtgaaaaagaagagcttgctaggagtcaaagaaaataataaaaagtccagcactagggctccttcacctaccaaacgcaaagaccgctcagatgagaagtccaaggatcgctcaaaagataaaggggccaccaaggagtcgagtgagaaggatcgcggccgggacaaaacccgaaagaggcgcagcgcttccagtggtagcagcagtaccaggtctcggtccagctcgacttccagctcaggctccagcaccagcactggctcaagcagtggctccagctcttcctcagcatccagccgctcaggaagctccagcacctcccgcagctccagctctagcagctcttctggctctccaagtccttctcggcgcagacacgacaacaggaggcgctcccgctccaaatccaaaccacctaaaagagatgaaaaggagaggaaaaggcggagcccatctcctaagcccaccaaagtgcacattgggagactcacccggaatgtgacaaaggatcacatcatggagatattttccacctatgggaaaattaaaatgattgacatgcccgtggaaaggatgcatccccatctgtccaaaggctatgcgtacgtagagtttgagaatccagatgaagccgagaaggcgctgaagcacatggatggagccaattggtggccagagaacaaatggcagcgcgcgggcggccactgggcaaagcaccccaaggagaatagccctccaggaaagtggcaccaccgctatgagcggagcccagggaagagaagggcaccgggagagcccggcaggaacaagaagccgcgcacaca

SEQ ID NO: 318962 - DNA, 837 bp, Homo sapiens
cgacaagcagagggcaaggtagaggatgatgacccgggaacagggctgaagagaaagtctgcgctgggagctgcaggctgggcccatcaggagcctgggggctcggctctggaggggctgaagagaaagtctgcgctgggagctgcaggctgggcccatcaggagcctgggggctcgccggcctcggcggctgaggaaagcaggaggaggtggcggcggcgggaagatgctgctctttggcgtaaattgcaatcgattagggatcgtttctcagaatcaagttagaagtgagagttcagataagtgaggccgccattgctgctttgaacacctcagaaggggagaatggatttatcaggagtgaaaaagaagagcttgctaggagtcaaagaaaataataaaaagtccagcactagggctccttcacctaccaaacgcaaagaccgctcagatgagaagtccaaggatcgctcaaaagataaaggggccaccaaggagtcgagtgagaaggatcgcggccgggacaaaacccgaaagaggcgcagcgcttccagtggtagcagcagtaccaggtggggcgggctggcctggagcctggagaggacctgtgccacagctacacccccactccccacagatggctcggttttcttgattatttacaaagaaaacacatcctctgattgttagtagagaccctaatttatggcagactggctaggtgcagtggtggctcatgcctataatcccagcactttgggaggccgaggcaggaggattgcttggggcctggagttcaagaccagcatgggcaacaaaacaagagctcgtctctac

SEQ ID NO: 318963 - DNA, 2077 bp, Homo sapiens
gtggtaggggccgctgcggacggaagggcgcctgtgcttcgtccgctcggcggtggcccagccaggcccgcgggactcagaccagcggggagcgcggcctccgcccttggggccctcccgccgggccggagacccaagcccccaacgccaggccctgccctggaagcgctcgcggcccggcgcctggacgggggagttgctgctctttggcgtaaattgcaatcgattagggatcgtttctcagaatcaagttagaagtgagagttcagataagtgaggccgccattgctgctttgaacacctcagaaggggagaatggatttatcaggagtgaaaaagaagagcttgctaggagtcaaagaaaataataaaaagtccagcactagggctccttcacctaccaaacgcaaagaccgctcagatgagaagtccaaggatcgctcaaaagataaaggggccaccaaggagtcgagtgagaaggatcgcggccgggacaaaacccgaaagaggcgcagcgcttccagtggtagcagcagtaccaggtctcggtccagctcgacttccagctcaggctccagcaccagcactggctcaagcagtggctccagctcttcctcagcatccagccgctcaggaagctccagcacctcccgcagctccagctctagcagctcttctggctctccaagtccttctcggcgcagacacgacaacaggaggcgctcccgctccaaatccaaaccacctaaaagagatgaaaaggagaggaaaaggcggagcccatctcctaagcccaccaaagtgcacattgggagactcacccggaatgtgacaaaggatcacatcatggagatattttccacctatgggaaaattaaaatgattgacatgcccgtggaaaggatgcatccccatctgtccaaaggctatgcgtacgtagagtttgagaatccagatgaagccgagaaggcgctgaagcacatggatggaggacaaattgatggccaggagatcactgccaccgccgtgctggccccctggcctaggccaccccccaggagattcagccctcccaggagaatgttgccaccaccgcctatgtggcgcaggtctcccccacggatgaggagaaggtcccgctccccgaggcgcaggtcccccgtgcgccggagatcacggtccccgggccgccgccgccacaggagccgctccagctccaactcctcccgataaacaggccactgaagctctcgcccctgtaacttataccccacccagctcagttttgtcacttttctagccaaaggaagaccagtaggaaagcaaacccttgactctggcaggatttgcaggcagcaggcagcacccctctgccagccgggccccggctgcagaagtgctgttggtttggatgctgtgtgcctgtcaagattccctccggttttctggctagaaagctcatccgtttccggtttctaagagtcagttcagtggcagagccaccagggaaaagtgaggctcttgggggtggtttgaccctgcttacctgggagcacacttttcccttccccgatgacctgggatggtggccaggccgtgcccttgctgttgctgggcagtgtccttttggaaagggagctgccccaggctttagtgcagctgccaaccctgttaggcctggcctctcgaggcctcttctgacctcaagggtcacaccccctcaaagatcctctcacccatggtagttgctgctcgtggttctgtctgtccgtgcaccgatgcacacaccgcaccccaccactgtactctgaaattggcgagtgagtggagagccagctctgcggagtcatcacgcagccatggttgtgcctgccgttcatggtggtctttcaggttatcttggcaacatgtacattgcttttattttttttcttttttgctttcattgtacagtcagtactataaaatttctcttttgagttttatacctttgtagcattttagatgacattgtgtttgtactttgttgtgtagagtggaagaattgtgttgaataaacccaagatcggaatgcaaa

SEQ ID NO: 318964 - DNA, 2184 bp, Homo sapiens
gtggtaggggccgctgcggacggaagggcgcctgtgcttcgtccgctcggcggtggcccagccaggcccgcgggactcagaccagcggggagcgcggcctccgcccttggggccctcccgccgggccggagacccaagcccccaacgccaggccctgccctggaagcgctcgcggcccggcgcctggacgggggagttaacgtattttcagcagcattttgaagcacccctggcgtgcactgcacagggaaaccaggaccacattggtgtgctgtgtcctccttaccaactggctcttggagaaggctgctctttggcgtaaattgcaatcgattagggatcgtttctcagaatcaagttagaagtgagagttcagataagtgaggccgccattgctgctttgaacacctcagaaggggagaatggatttatcaggagtgaaaaagaagagcttgctaggagtcaaagaaaataataaaaagtccagcactagggctccttcacctaccaaacgcaaagaccgctcagatgagaagtccaaggatcgctcaaaagataaaggggccaccaaggagtcgagtgagaaggatcgcggccgggacaaaacccgaaagaggcgcagcgcttccagtggtagcagcagtaccaggtctcggtccagctcgacttccagctcaggctccagcaccagcactggctcaagcagtggctccagctcttcctcagcatccagccgctcaggaagctccagcacctcccgcagctccagctctagcagctcttctggctctccaagtccttctcggcgcagacacgacaacaggaggcgctcccgctccaaatccaaaccacctaaaagagatgaaaaggagaggaaaaggcggagcccatctcctaagcccaccaaagtgcacattgggagactcacccggaatgtgacaaaggatcacatcatggagatattttccacctatgggaaaattaaaatgattgacatgcccgtggaaaggatgcatccccatctgtccaaaggctatgcgtacgtagagtttgagaatccagatgaagccgagaaggcgctgaagcacatggatggaggacaaattgatggccaggagatcactgccaccgccgtgctggccccctggcctaggccaccccccaggagattcagccctcccaggagaatgttgccaccaccgcctatgtggcgcaggtctcccccacggatgaggagaaggtcccgctccccgaggcgcaggtcccccgtgcgccggagatcacggtccccgggccgccgccgccacaggagccgctccagctccaactcctcccgataaacaggccactgaagctctcgcccctgtaacttataccccacccagctcagttttgtcacttttctagccaaaggaagaccagtaggaaagcaaacccttgactctggcaggatttgcaggcagcaggcagcacccctctgccagccgggccccggctgcagaagtgctgttggtttggatgctgtgtgcctgtcaagattccctccggttttctggctagaaagctcatccgtttccggtttctaagagtcagttcagtggcagagccaccagggaaaagtgaggctcttgggggtggtttgaccctgcttacctgggagcacacttttcccttccccgatgacctgggatggtggccaggccgtgcccttgctgttgctgggcagtgtccttttggaaagggagctgccccaggctttagtgcagctgccaaccctgttaggcctggcctctcgaggcctcttctgacctcaagggtcacaccccctcaaagatcctctcacccatggtagttgctgctcgtggttctgtctgtccgtgcaccgatgcacacaccgcaccccaccactgtactctgaaattggcgagtgagtggagagccagctctgcggagtcatcacgcagccatggttgtgcctgccgttcatggtggtctttcaggttatcttggcaacatgtacattgcttttattttttttcttttttgctttcattgtacagtcagtactataaaatttctcttttgagttttatacctttgtagcattttagatgacattgtgtttgtactttgttgtgtagagtggaagaattgtgttgaataaacccaagatcggaatgcaaa

SEQ ID NO: 318965 - DNA, 2530 bp, Homo sapiens
gtggtaggggccgctgcggacggaagggcgcctgtgcttcgtccgctcggcggtggcccagccaggcccgcgggactcagaccagcggggagcgcggcctccgcccttggggccctcccgccgggccggagacccaagcccccaacgccaggccctgccctggaagcgctcgcggcccggcgcctggacgggggagttgtgagtgaacgcggacgggtagcggcgaggtcggcgtgtcgggccggtgtcggcgggcgcggagtttctttgtgggatgcggtggaaggtcggccgatccccccttcggagtcattaattcaaacgtgtacccgcgaacgtttcccggactcccgtgtgcaattatcggcgctaggccgtggggatacggcccactatggaccgagcacggtggccgagctcagtttgatgggttaccccagaggggcggatacgggaaggttaagtttgttggaggagaaacgtggagtaggctttttgtcttgattccgcatgaactgtgcctgaaatgtacttttaaatggggaaggtgctctgaagatttgtgccgaaacgccctctcctcgagatttaactaattgttctctcctctctctggctgttggacgcgcacctttccggaggatgggggaggctgctctttggcgtaaattgcaatcgattagggatcgtttctcagaatcaagttagaagtgagagttcagataagtgaggccgccattgctgctttgaacacctcagaaggggagaatggatttatcaggagtgaaaaagaagagcttgctaggagtcaaagaaaataataaaaagtccagcactagggctccttcacctaccaaacgcaaagaccgctcagatgagaagtccaaggatcgctcaaaagataaaggggccaccaaggagtcgagtgagaaggatcgcggccgggacaaaacccgaaagaggcgcagcgcttccagtggtagcagcagtaccaggtctcggtccagctcgacttccagctcaggctccagcaccagcactggctcaagcagtggctccagctcttcctcagcatccagccgctcaggaagctccagcacctcccgcagctccagctctagcagctcttctggctctccaagtccttctcggcgcagacacgacaacaggaggcgctcccgctccaaatccaaaccacctaaaagagatgaaaaggagaggaaaaggcggagcccatctcctaagcccaccaaagtgcacattgggagactcacccggaatgtgacaaaggatcacatcatggagatattttccacctatgggaaaattaaaatgattgacatgcccgtggaaaggatgcatccccatctgtccaaaggctatgcgtacgtagagtttgagaatccagatgaagccgagaaggcgctgaagcacatggatggaggacaaattgatggccaggagatcactgccaccgccgtgctggccccctggcctaggccaccccccaggagattcagccctcccaggagaatgttgccaccaccgcctatgtggcgcaggtctcccccacggatgaggagaaggtcccgctccccgaggcgcaggtcccccgtgcgccggagatcacggtccccgggccgccgccgccacaggagccgctccagctccaactcctcccgataaacaggccactgaagctctcgcccctgtaacttataccccacccagctcagttttgtcacttttctagccaaaggaagaccagtaggaaagcaaacccttgactctggcaggatttgcaggcagcaggcagcacccctctgccagccgggccccggctgcagaagtgctgttggtttggatgctgtgtgcctgtcaagattccctccggttttctggctagaaagctcatccgtttccggtttctaagagtcagttcagtggcagagccaccagggaaaagtgaggctcttgggggtggtttgaccctgcttacctgggagcacacttttcccttccccgatgacctgggatggtggccaggccgtgcccttgctgttgctgggcagtgtccttttggaaagggagctgccccaggctttagtgcagctgccaaccctgttaggcctggcctctcgaggcctcttctgacctcaagggtcacaccccctcaaagatcctctcacccatggtagttgctgctcgtggttctgtctgtccgtgcaccgatgcacacaccgcaccccaccactgtactctgaaattggcgagtgagtggagagccagctctgcggagtcatcacgcagccatggttgtgcctgccgttcatggtggtctttcaggttatcttggcaacatgtacattgcttttattttttttcttttttgctttcattgtacagtcagtactataaaatttctcttttgagttttatacctttgtagcattttagatgacattgtgtttgtactttgttgtgtagagtggaagaattgtgttgaataaacccaagatcggaatgcaaa

SEQ ID NO: 318966 - DNA, 2266 bp, Homo sapiens
  misc_feature (2118)..(2118): n is a, c, g, or t
  misc_feature (2159)..(2159): n is a, c, g, or t
ggcacgagggagagagaggaggaggaaagcaggaggaggtggcggcggcgggaagatgctgctctttggcgtaaattgcaatcgattagggatcgtttctcagaatcaagttagaagtgagagttcagataagtgaggccgccattgctgctttgaacacctcagaaggggagaatggatttatcaggagtgaaaaagaagagcttgctaggagtcaaagaaaataataaaaagtccagcactagggctccttcacctaccaaacgcaaagaccgctcagatgagaagtccaaggatcgctcaaaagataaaggggccaccaaggagtcgagtgagaaggatcgcggccgggacaaaacccgaaagaggcgcagcgcttccagtggtagcagcagtaccaggtctcggtccagctcgacttccagctcaggctccagcaccagcactggctcaagcagtggctccagctcttcctcagcatccagccgctcaggaagctccagcacctcccgcagctccagctctagcagctcttctggctctccaagtccttctcggcgcagacacgacaacaggaggcgctcccgctccaaatccaaaccacctaaaagagatgaaaaggagaggaaaaggcggagcccatctcctaagcccaccaaagtgcacattgggagactcacccggaatgtgacaaaggatcacatcatggagatattttccacctatgggaaaattaaaatgattgacatgcccgtggaaaggatgcatccccatctgtccaaaggctatgcgtacgtagagtttgagaatccagatgaagccgagaaggcgctgaagcacatggatggaggacaaattgatggccaggagatcactgccaccgccgtgctggccccctggcctaggccaccccccaggagattcagccctcccaggagaatgttgccaccaccgcctatgtggcgcaggtctcccccacggatgaggagaaggtcccgctccccgaggcgcaggtcccccgtgcgccggagatcacggtccccgggccgccgccgccacaggagccgctccagctccaactcctcccgataaacaggccactgaagctctcgcccctgtaacttataccccacccagctcagttttgtcacttttctagccaaaggaagaccagtaggaaagcaaacccttgactctggcaggatttgcaggcagcaggcagcacccctctgccagccgggccccggctgcagaagtgctgttggtttggatgctgtgtgcctgtcaagattccctccggttttctggctagaaagctcatccgtttccggtttctaagagtcagttcagtggcagagccaccagggaaaagtgaggctcttgggggtggtttgaccctgcttacctgggagcacacttttcccttccccgatgacctgggatggtggccaggccgtgcccttgctgttgctgggcagtgtccttttggaaagggagctgccccaggctttagtgcagctgccaaccctgttaggcctggcctctcgaggcctcttctgacctcaagggtcacaccccctcaaagatcctctcacccatggtagttgctgctcgtggttctgtctgtccgtgcaccgatgcacacaccgcaccccaccactgtactctgaaattggcgagtgagtggagagccagctctgcggagtcatcacgcagccatggttgtgcctgccgttcatggtggtctttcaggttatcttggcaacatgtacattgcttttattttttttcttttttgctttcattgtacagtcagtactataaaatttctcttttgagttttatacctttgtagcattttagatgacattgtgtttgtactttgttgtgtagagtggaagaattgtgttgaataaacccaagatcggaatgcaaaaaaaaaaaaaaaaaaaaaaaaaagggggggggggcaaaaagtttccctgggggggccaaagttaaaggggtaccccagttttcgggtacaagggggcccctagggggagccgtataaaagggccaggcagtggccggccgttaaccaagcgtcgtgggggaacctttgtacgtgggactctngtggaagggacctactctcgtgggggaccttcttgggcaanctacccaaaggagataaagctccagggaaatttaacatttcaggggtctatgtgtaaccaagcgatattcgtgcgctagaaattgcttacgggttgattagacatta

SEQ ID NO: 318967 - DNA, 1915 bp, Homo sapiens
ggcacgagggagagagaggaggaggaaagcaggaggaggtggcggcggcgggaagatgctgctctttggcgtaaattgcaatcgattagggatcgtttctcagaatcaagttagaagtgagagttcagataagtgaggccgccattgctgctttgaacacctcagaaggggagaatggatttatcaggagtgaaaaagaagagcttgctaggagtcaaagaaaataataaaaagtccagcactagggctccttcacctaccaaacgcaaagaccgctcagatgagaagtccaaggatcgctcaaaagataaaggggccaccaaggagtcgagtgagaaggatcgcggccgggacaaaacccgaaagaggcgcagcgcttccagtggtagcagcagtaccaggtctcggtccagctcgacttccagctcaggctccagcaccagcactggctcaagcagtggctccagctcttcctcagcatccagccgctcaggaagctccagcacctcccgcagctccagctctagcagctcttctggctctccaagtccttctcggcgcagacacgacaacaggaggcgctcccgctccaaatccaaaccacctaaaagagatgaaaaggagaggaaaaggcggagcccatctcctaagcccaccaaagtgcacattgggagactcacccggaatgtgacaaaggatcacatcatggagatattttccacctatgggaaaattaaaatgattgacatgcccgtggaaaggatgcatccccatctgtccaaaggctatgcgtacgtagagtttgagaatccagatgaagccgagaaggcgctgaagcacatggatggaggacaaattgatggccaggagatcactgccaccgccgtgctggccccctggcctaggccaccccccaggagattcagccctcccaggagaatgttgccaccaccgcctatgtggcgcaggtctcccccacggatgaggagaaggtcccgctccccgaggcgcaggtcccccgtgcgccggagatcacggtccccgggccgccgccgccacaggagccgctccagctccaactcctcccgataaacaggccactgaagctctcgcccctgtaacttataccccacccagctcagttttgtcacttttctagccaaaggaagaccagtaggaaagcaaacccttgactctggcaggatttgcaggcagcaggcagcacccctctgccagccgggccccggctgcagaagtgctgttggtttggatgctgtgtgcctgtcaagattccctccggttttctggctagaaagctcatccgtttccggtttctaagagtcagttcagtggcagagccaccaggtggtttgaccctgcttacctgggagcacacttttcccttccccgatgacctgggatggtggccaggccgtgcccttgctgttgctgggcagtgtccttttggaaagggagctgccccaggctttagtgcagctgccaaccctgttaggcctggcctctcgaggcctcttctgacctcaagggtcacaccccctcaaagatcctctcacccatggtagttgctgctcgtggttctgtctgtccgtgcaccgatgcacacaccgcaccccaccactgtactctgaaattggcgagtgagtggagagccagctctgcggagtcatcacgcagccatggttgtgcctgccgttcatggtggtctttcaggttatcttggcaacatgtacattgcttttattttttttcttttttgctttcattgtacagtcagtactataaaatttctcttttgagttttatacctttgtagcattttagatgacattgtgtttgtactttgttgtgtagagtggaagaattgtgttgaataaacccaagatcggaatgcaaa

SEQ ID NO: 318968 - DNA, 3872 bp, Homo sapiens
gtggtaggggccgctgcggacggaagggcgcctgtgcttcgtccgctcggcggtggcccagccaggcccgcgggactcagaccagcggggagcgcggcctccgcccttggggccctcccgccgggccggagacccaagcccccaacgccaggccctgccctggaagcgctcgcggcccggcgcctggacgggggagttgtgagtgaacgcggacgggtagcggcgaggtcggcgtgtcgggccggtgtcggcgggcgcggagtttctttgtgggatgcggtggaaggtcggccgatccccccttcggagtcattaattcaaacgtgtacccgcgaacgtttcccggactcccgtgtgcaattatcggcgctaggccgtggggatacggcccactatggaccgagcacggtggccgagctcagtttgatgggttaccccagaggggcggatacgggaaggttaagtttgttggaggagaaacgtggagtaggctttttgtcttgattccgcatgaactgtgcctgaaatgtacttttaaatggggaaggtgctctgaagatttgtgccgaaacgccctctcctcgagatttaactaattgttctctcctctctctggctgttggacgcgcacctttccggaggatgggggaggtaaccgaggtcctgagccggtacctgaacttgggtgaacagagaacctcaacttttgctttctagcactcgaccgcacccagcaaggcgtccgcttactcagtggttcttagtgtttggagtgcttaagaataactggtggtgtttgatttcaccaagtacattcgggcagatcttagttcttgggggggtggggctggaatctgcgggtgtgacctccactctaggtctgtgctgtccagccaagtagccattggccacatgtggctgctaagcatgtgaaatacagctaatcaagactgaaatattaaaacacacaccagttttagaagactaggaaaaaagcaaacttttattagatgtttatgttgattatatgttggaaagataatattttggatgtgtcaaacgttaaaaattaatttcacccatttttgtgacgtggctactaaggaatttcaggtgatgcttgtggctcctcacacggtttctattggacagtgctgctgcaggtgattcgaaggcgggtgggtgcaggaacccagctgagagttcagaaattagtgtaactttggagacaagtgtctgtgggggaaggagcctccggacgtggagatacaactcttgctcctaacatttatcgagtctttaattaatgccctgggtaactataaggttggaactgtaattgtcaccatattgatgatgagaaacttgagaaaggataagtgacttgtctaaaatcacacagtaaaacctcaaatcaaacccaggccctctggctccagactctaaattatactctgaatgatactcactgattgtccgaggacacaaagagtgtcgaggcactatctgctgggtgtctgcagaaccttactgttctaaagcaaaacattttacccctggacaagagcagcaaaggtggcgttcggccctccttggctctcatttgactgttcaaagccaggtgcttttctttcttgggtcagaacgtattttcagcagcattttgaagcacccctggcgtgcactgcacagggaaaccaggaccacattggtgtgctgtgtcctccttaccaactggctcttggagaaggctgctctttggcgtaaattgcaatcgattagggatcgtttctcagaatcaagttagaagtgagagttcagataagtgaggccgccattgctgctttgaacacctcagaaggggagaatggatttatcaggagtgaaaaagaagagcttgctaggagtcaaagaaaataataaaaagtccagcactagaggtaatccttctgtaagatttttctagtgctacttgggggtgcttactgctagggacccgcagaaaggggaaagttgagaatgttctgcattctacagtgagtgttctgagccacagaccactttgctctgtggtcacctcgggtctctgtggccctgctgatgctgatcccccgttttgggttgtgctgtttgggtttggtcagaggagcacgcaatctcacactcttcctcaccatccagggctccttcacctaccaaacgcaaagaccgctcagatgagaagtccaaggatcgctcaaaagataaaggggccaccaaggagtcgagtgagaaggatcgcggccgggacaaaacccgaaagaggcgcagcgcttccagtggtagcagcagtaccaggtctcggtccagctcgacttccagctcaggctccagcaccagcactggctcaagcagtggctccagctcttcctcagcatccagccgctcaggaagctccagcacctcccgcagctccagctctagcagctcttctggctctccaagtccttctcggcgcagacacgacaacaggaggcgctcccgctccaaatccaaaccacctaaaagagatgaaaaggagaggaaaaggcggagcccatctcctaagcccaccaaagtgcacattgggagactcacccggaatgtgacaaaggatcacatcatggagatattttccacctatgggaaaattaaaatgattgacatgcccgtggaaaggatgcatccccatctgtccaaaggctatgcgtacgtagagtttgagaatccagatgaagccgagaaggcgctgaagcacatggatggaggacaaattgatggccaggagatcactgccaccgccgtgctggccccctggcctaggccaccccccaggagattcagccctcccaggagaatgttgccaccaccgcctatgtggcgcaggtctcccccacggatgaggagaaggtcccgctccccgaggcgcaggtcccccgtgcgccggagatcacggtccccgggccgccgccgccacaggagccgctccagctccaactcctcccgataaacaggccactgaagctctcgcccctgtaacttataccccacccagctcagttttgtcacttttctagccaaaggaagaccagtaggaaagcaaacccttgactctggcaggatttgcaggcagcaggcagcacccctctgccagccgggccccggctgcagaagtgctgttggtttggatgctgtgtgcctgtcaagattccctccggttttctggctagaaagctcatccgtttccggtttctaagagtcagttcagtggcagagccaccagggaaaagtgaggctcttgggggtggtttgaccctgcttacctgggagcacacttttcccttccccgatgacctgggatggtggccaggccgtgcccttgctgttgctgggcagtgtccttttggaaagggagctgccccaggctttagtgcagctgccaaccctgttaggcctggcctctcgaggcctcttctgacctcaagggtcacaccccctcaaagatcctctcacccatggtagttgctgctcgtggttctgtctgtccgtgcaccgatgcacacaccgcaccccaccactgtactctgaaattggcgagtgagtggagagccagctctgcggagtcatcacgcagccatggttgtgcctgccgttcatggtggtctttcaggttatcttggcaacatgtacattgcttttattttttttcttttttgctttcattgtacagtcagtactataaaatttctcttttgagttttatacctttgtagcattttagatgacattgtgtttgtactttgttgtgtagagtggaagaattgtgttgaataaacccaagatcggaatgcaaa

SEQ ID NO: 318969 - DNA, 1889 bp, Homo sapiens
gtggtaggggccgctgcggacggaagggcgcctgtgcttcgtccgctcggcggtggcccagccaggcccgcgggactcagaccagcggggagcgcggcctccgcccttggggccctcccgccgggccggagacccaagcccccaacgccaggccctgccctggaagcgctcgcggcccggcgcctggacgggggagttggctccttcacctaccaaacgcaaagaccgctcagatgagaagtccaaggatcgctcaaaagataaaggggccaccaaggagtcgagtgagaaggatcgcggccgggacaaaacccgaaagaggcgcagcgcttccagtggtagcagcagtaccaggtctcggtccagctcgacttccagctcaggctccagcaccagcactggctcaagcagtggctccagctcttcctcagcatccagccgctcaggaagctccagcacctcccgcagctccagctctagcagctcttctggctctccaagtccttctcggcgcagacacgacaacaggaggcgctcccgctccaaatccaaaccacctaaaagagatgaaaaggagaggaaaaggcggagcccatctcctaagcccaccaaagtgcacattgggagactcacccggaatgtgacaaaggatcacatcatggagatattttccacctatgggaaaattaaaatgattgacatgcccgtggaaaggatgcatccccatctgtccaaaggctatgcgtacgtagagtttgagaatccagatgaagccgagaaggcgctgaagcacatggatggaggacaaattgatggccaggagatcactgccaccgccgtgctggccccctggcctaggccaccccccaggagattcagccctcccaggagaatgttgccaccaccgcctatgtggcgcaggtctcccccacggatgaggagaaggtcccgctccccgaggcgcaggtcccccgtgcgccggagatcacggtccccgggccgccgccgccacaggagccgctccagctccaactcctcccgataaacaggccactgaagctctcgcccctgtaacttataccccacccagctcagttttgtcacttttctagccaaaggaagaccagtaggaaagcaaacccttgactctggcaggatttgcaggcagcaggcagcacccctctgccagccgggccccggctgcagaagtgctgttggtttggatgctgtgtgcctgtcaagattccctccggttttctggctagaaagctcatccgtttccggtttctaagagtcagttcagtggcagagccaccagggaaaagtgaggctcttgggggtggtttgaccctgcttacctgggagcacacttttcccttccccgatgacctgggatggtggccaggccgtgcccttgctgttgctgggcagtgtccttttggaaagggagctgccccaggctttagtgcagctgccaaccctgttaggcctggcctctcgaggcctcttctgacctcaagggtcacaccccctcaaagatcctctcacccatggtagttgctgctcgtggttctgtctgtccgtgcaccgatgcacacaccgcaccccaccactgtactctgaaattggcgagtgagtggagagccagctctgcggagtcatcacgcagccatggttgtgcctgccgttcatggtggtctttcaggttatcttggcaacatgtacattgcttttattttttttcttttttgctttcattgtacagtcagtactataaaatttctcttttgagttttatacctttgtagcattttagatgacattgtgtttgtactttgttgtgtagagtggaagaattgtgttgaataaacccaagatcggaatgcaaa

SEQ ID NO: 318970 - DNA, 2189 bp, Homo sapiens
gactgcaaagtagacttgttgccttgccaattcgttcactctttaaacccttttatcttgttattaggctgctctttggcgtaaattgcaatcgattagggatcgtttctcagaatcaagttagaagtgagagttcagataagtgaggccgccattgctgctttgaacacctcagaaggggagaatggatttatcaggagtgaaaaagaagagcttgctaggagtcaaagaaaataataaaaagtccagcactagaggtaatccttctgtaagatttttctagtgctacttgggggtgcttactgctagggacccgcagaaaggggaaagttgagaatgttctgcattctacagtgagtgttctgagccacagaccactttgctctgtggtcacctcgggtctctgtggccctgctgatgctgatcccccgttttgggttgtgctgtttgggtttggtcagaggagcacgcaatctcacactcttcctcaccatccagggctccttcacctaccaaacgcaaagaccgctcagatgagaagtccaaggatcgctcaaaagataaaggggccaccaaggagtcgagtgagaaggatcgcggccgggacaaaacccgaaagaggcgcagcgcttccagtggtagcagcagtaccaggtctcggtccagctcgacttccagctcaggctccagcaccagcactggctcaagcagtggctccagctcttcctcagcatccagccgctcaggaagctccagcacctcccgcagctccagctctagcagctcttctggctctccaagtccttctcggcgcagacacgacaacaggaggcgctcccgctccaaatccaaaccacctaaaagagatgaaaaggagaggaaaaggcggagcccatctcctaagcccaccaaagtgcacattgggagactcacccggaatgtgacaaaggatcacatcatggagatattttccacctatgggaaaattaaaatgattgacatgcccgtggaaaggatgcatccccatctgtccaaaggctatgcgtacgtagagtttgagaatccagatgaagccgagaaggcgctgaagcacatggatggaggacaaattgatggccaggagatcactgccaccgccgtgctggccccctggcctaggccaccccccaggagattcagccctcccaggagaatgttgccaccaccgcctatgtggcgcaggtctcccccacggatgaggagaaggtcccgctccccgaggcgcaggtcccccgtgcgccggagatcacggtccccgggccgccgccgccacaggagccgctccagctccaactcctcccgataaacaggccactgaagctctcgcccctgtaacttataccccacccagctcagttttgtcacttttctagccaaaggaagaccagtaggaaagcaaacccttgactctggcaggatttgcaggcagcaggcagcacccctctgccagccgggccccggctgcagaagtgctgttggtttggatgctgtgtgcctgtcaagattccctccggttttctggctagaaagctcatccgtttccggtttctaagagtcagttcagtggcagagccaccagggaaaagtgaggctcttgggggtggtttgaccctgcttacctgggagcacacttttcccttccccgatgacctgggatggtggccaggccgtgcccttgctgttgctgggcagtgtccttttggaaagggagctgccccaggctttagtgcagctgccaaccctgttaggcctggcctctcgaggcctcttctgacctcaagggtcacaccccctcaaagatcctctcacccatggtagttgctgctcgtggttctgtctgtccgtgcaccgatgcacacaccgcaccccaccactgtactctgaaattggcgagtgagtggagagccagctctgcggagtcatcacgcagccatggttgtgcctgccgttcatggtggtctttcaggttatcttggcaacatgtacattgcttttattttttttcttttttgctttcattgtacagtcagtactataaaatttctcttttgagttttatacctttgtagcattttagatgacattgtgtttgtactttgttgtgtagagtggaagaattgtgttgaataaacccaagatcggaatgcaaa

SEQ ID NO: 318971 - DNA, 1951 bp, Homo sapiens
cgacaagcagagggcaaggtagaggatgatgacccgggaacagggctgaagagaaagtctgcgctgggagctgcaggctgggcccatcaggagcctgggggctcggctctggaggggctgaagagaaagtctgcgctgggagctgcaggctgggcccatcaggagcctgggggctcgccggcctcggcggctgaggaaagcaggaggaggtggcggcggcgggaagatgctgctctttggcgtaaattgcaatcgattagggatcgtttctcagaatcaagttagaagtgagagttcagataagtgaggccgccattgctgctttgaacacctcagaaggggagaatggatttatcaggagtgaaaaagaagagcttgctaggagtcaaagaaaataataaaaagtccagcactaggtctcggtccagctcgacttccagctcaggctccagcaccagcactggctcaagcagtggctccagctcttcctcagcatccagccgctcaggaagctccagcacctcccgcagctccagctctagcagctcttctggctctccaagtccttctcggcgcagacacgacaacaggaggcgctcccgctccaaatccaaaccacctaaaagagatgaaaaggagaggaaaaggcggagcccatctcctaagcccaccaaagtgcacattgggagactcacccggaatgtgacaaaggatcacatcatggagatattttccacctatgggaaaattaaaatgattgacatgcccgtggaaaggatgcatccccatctgtccaaaggctatgcgtacgtagagtttgagaatccagatgaagccgagaaggcgctgaagcacatggatggaggacaaattgatggccaggagatcactgccaccgccgtgctggccccctggcctaggccaccccccaggagattcagccctcccaggagaatgttgccaccaccgcctatgtggcgcaggtctcccccacggatgaggagaaggtcccgctccccgaggcgcaggtcccccgtgcgccggagatcacggtccccgggccgccgccgccacaggagccgctccagctccaactcctcccgataaacaggccactgaagctctcgcccctgtaacttataccccacccagctcagttttgtcacttttctagccaaaggaagaccagtaggaaagcaaacccttgactctggcaggatttgcaggcagcaggcagcacccctctgccagccgggccccggctgcagaagtgctgttggtttggatgctgtgtgcctgtcaagattccctccggttttctggctagaaagctcatccgtttccggtttctaagagtcagttcagtggcagagccaccagggaaaagtgaggctcttgggggtggtttgaccctgcttacctgggagcacacttttcccttccccgatgacctgggatggtggccaggccgtgcccttgctgttgctgggcagtgtccttttggaaagggagctgccccaggctttagtgcagctgccaaccctgttaggcctggcctctcgaggcctcttctgacctcaagggtcacaccccctcaaagatcctctcacccatggtagttgctgctcgtggttctgtctgtccgtgcaccgatgcacacaccgcaccccaccactgtactctgaaattggcgagtgagtggagagccagctctgcggagtcatcacgcagccatggttgtgcctgccgttcatggtggtctttcaggttatcttggcaacatgtacattgcttttattttttttcttttttgctttcattgtacagtcagtactataaaatttctcttttgagttttatacctttgtagcattttagatgacattgtgtttgtactttgttgtgtagagtggaagaattgtgttgaataaacccaagatcggaatgcaaa

SEQ ID NO: 318972 - DNA, 3536 bp, Homo sapiens
gtggtaggggccgctgcggacggaagggcgcctgtgcttcgtccgctcggcggtggcccagccaggcccgcgggactcagaccagcggggagcgcggcctccgcccttggggccctcccgccgggccggagacccaagcccccaacgccaggccctgccctggaagcgctcgcggcccggcgcctggacgggggagttgtgagtgaacgcggacgggtagcggcgaggtcggcgtgtcgggccggtgtcggcgggcgcggagtttctttgtgggatgcggtggaaggtcggccgatccccccttcggagtcattaattcaaacgtgtacccgcgaacgtttcccggactcccgtgtgcaattatcggcgctaggccgtggggatacggcccactatggaccgagcacggtggccgagctcagtttgatgggttaccccagaggggcggatacgggaaggttaagtttgttggaggagaaacgtggagtaggctttttgtcttgattccgcatgaactgtgcctgaaatgtacttttaaatggggaaggtgctctgaagatttgtgccgaaacgccctctcctcgagatttaactaattgttctctcctctctctggctgttggacgcgcacctttccggaggatgggggaggtaaccgaggtcctgagccggtacctgaacttgggtgaacagagaacctcaacttttgctttctagcactcgaccgcacccagcaaggcgtccgcttactcagtggttcttagtgtttggagtgcttaagaataactggtggtgtttgatttcaccaagtacattcgggcagatcttagttcttgggggggtggggctggaatctgcgggtgtgacctccactctaggtctgtgctgtccagccaagtagccattggccacatgtggctgctaagcatgtgaaatacagctaatcaagactgaaatattaaaacacacaccagttttagaagactaggaaaaaagcaaacttttattagatgtttatgttgattatatgttggaaagataatattttggatgtgtcaaacgttaaaaattaatttcacccatttttgtgacgtggctactaaggaatttcaggtgatgcttgtggctcctcacacggtttctattggacagtgctgctgcaggtgattcgaaggcgggtgggtgcaggaacccagctgagagttcagaaattagtgtaactttggagacaagtgtctgtgggggaaggagcctccggacgtggagatacaactcttgctcctaacatttatcgagtctttaattaatgccctgggtaactataaggttggaactgtaattgtcaccatattgatgatgagaaacttgagaaaggataagtgacttgtctaaaatcacacagtaaaacctcaaatcaaacccaggccctctggctccagactctaaattatactctgaatgatactcactgattgtccgaggacacaaagagtgtcgaggcactatctgctgggtgtctgcagaaccttactgttctaaagcaaaacattttacccctggacaagagcagcaaaggtggcgttcggccctccttggctctcatttgactgttcaaagccaggtgcttttctttcttgggtcagaacgtattttcagcagcattttgaagcacccctggcgtgcactgcacagggaaaccaggaccacattggtgtgctgtgtcctccttaccaactggctcttggagaaggctgctctttggcgtaaattgcaatcgattagggatcgtttctcagaatcaagttagaagtgagagttcagataagtgaggccgccattgctgctttgaacacctcagaaggggagaatggatttatcaggagtgaaaaagaagagcttgctaggagtcaaagaaaataataaaaagtccagcactagggctccttcacctaccaaacgcaaagaccgctcagatgagaagtccaaggatcgctcaaaagataaaggggccaccaaggagtcgagtgagaaggatcgcggccgggacaaaacccgaaagaggcgcagcgcttcctcagcatccagccgctcaggaagctccagcacctcccgcagctccagctctagcagctcttctggctctccaagtccttctcggcgcagacacgacaacaggaggcgctcccgctccaaatccaaaccacctaaaagagatgaaaaggagaggaaaaggcggagcccatctcctaagcccaccaaagtgcacattgggagactcacccggaatgtgacaaaggatcacatcatggagatattttccacctatgggaaaattaaaatgattgacatgcccgtggaaaggatgcatccccatctgtccaaaggctatgcgtacgtagagtttgagaatccagatgaagccgagaaggcgctgaagcacatggatggaggacaaattgatggccaggagatcactgccaccgccgtgctggccccctggcctaggccaccccccaggagattcagccctcccaggagaatgttgccaccaccgcctatgtggcgcaggtctcccccacggatgaggagaaggtcccgctccccgaggcgcaggtcccccgtgcgccggagatcacggtccccgggccgccgccgccacaggagccgctccagctccaactcctcccgataaacaggccactgaagctctcgcccctgtaacttataccccacccagctcagttttgtcacttttctagccaaaggaagaccagtaggaaagcaaacccttgactctggcaggatttgcaggcagcaggcagcacccctctgccagccgggccccggctgcagaagtgctgttggtttggatgctgtgtgcctgtcaagattccctccggttttctggctagaaagctcatccgtttccggtttctaagagtcagttcagtggcagagccaccagggaaaagtgaggctcttgggggtggtttgaccctgcttacctgggagcacacttttcccttccccgatgacctgggatggtggccaggccgtgcccttgctgttgctgggcagtgtccttttggaaagggagctgccccaggctttagtgcagctgccaaccctgttaggcctggcctctcgaggcctcttctgacctcaagggtcacaccccctcaaagatcctctcacccatggtagttgctgctcgtggttctgtctgtccgtgcaccgatgcacacaccgcaccccaccactgtactctgaaattggcgagtgagtggagagccagctctgcggagtcatcacgcagccatggttgtgcctgccgttcatggtggtctttcaggttatcttggcaacatgtacattgcttttattttttttcttttttgctttcattgtacagtcagtactataaaatttctcttttgagttttatacctttgtagcattttagatgacattgtgtttgtactttgttgtgtagagtggaagaattgtgttgaataaacccaagatcggaatgcaaa

SEQ ID NO: 318973 - DNA, 1855 bp, Homo sapiens
cgacaagcagagggcaaggtagaggatgatgacccgggaacagggctgaagagaaagtctgcgctgggagctgcaggctgggcccatcaggagcctgggggctcggctctggaggggctgaagagaaagtctgcgctgggagctgcaggctgggcccatcaggagcctgggggctcgccggcctcggcggctgaggaaagcaggaggaggtggcggcggcgggaagatgctgctctttggcgtaaattgcaatcgattagggatcgtttctcagaatcaagttagaagtgagagttcagataagtgaggccgccattgctgctttgaacacctcagaaggggagaatggatttatcaggagtgaaaaagaagagcttgctaggagtcaaagaaaataataaaaagtccagcactagctccagcacctcccgcagctccagctctagcagctcttctggctctccaagtccttctcggcgcagacacgacaacaggaggcgctcccgctccaaatccaaaccacctaaaagagatgaaaaggagaggaaaaggcggagcccatctcctaagcccaccaaagtgcacattgggagactcacccggaatgtgacaaaggatcacatcatggagatattttccacctatgggaaaattaaaatgattgacatgcccgtggaaaggatgcatccccatctgtccaaaggctatgcgtacgtagagtttgagaatccagatgaagccgagaaggcgctgaagcacatggatggaggacaaattgatggccaggagatcactgccaccgccgtgctggccccctggcctaggccaccccccaggagattcagccctcccaggagaatgttgccaccaccgcctatgtggcgcaggtctcccccacggatgaggagaaggtcccgctccccgaggcgcaggtcccccgtgcgccggagatcacggtccccgggccgccgccgccacaggagccgctccagctccaactcctcccgataaacaggccactgaagctctcgcccctgtaacttataccccacccagctcagttttgtcacttttctagccaaaggaagaccagtaggaaagcaaacccttgactctggcaggatttgcaggcagcaggcagcacccctctgccagccgggccccggctgcagaagtgctgttggtttggatgctgtgtgcctgtcaagattccctccggttttctggctagaaagctcatccgtttccggtttctaagagtcagttcagtggcagagccaccagggaaaagtgaggctcttgggggtggtttgaccctgcttacctgggagcacacttttcccttccccgatgacctgggatggtggccaggccgtgcccttgctgttgctgggcagtgtccttttggaaagggagctgccccaggctttagtgcagctgccaaccctgttaggcctggcctctcgaggcctcttctgacctcaagggtcacaccccctcaaagatcctctcacccatggtagttgctgctcgtggttctgtctgtccgtgcaccgatgcacacaccgcaccccaccactgtactctgaaattggcgagtgagtggagagccagctctgcggagtcatcacgcagccatggttgtgcctgccgttcatggtggtctttcaggttatcttggcaacatgtacattgcttttattttttttcttttttgctttcattgtacagtcagtactataaaatttctcttttgagttttatacctttgtagcattttagatgacattgtgtttgtactttgttgtgtagagtggaagaattgtgttgaataaacccaagatcggaatgcaaa

SEQ ID NO: 318974 - DNA, 1174 bp, Homo sapiens
ggcacgagggagagagaggaggaggaaagcaggaggaggtggcggcggcgggaagatgctgctctttggcgtaaattgcaatcgattagggatcgtttctcagaatcaagttagaagtgagagttcagataagtgaggccgccattgctgctttgaacacctcagaaggggagaatggatttatcaggagtgaaaaagaagagcttgctaggagtcaaagaaaataataaaaagtccagcactagggctccttcacctaccaaacgcaaagaccgctcagatgagaagtccaaggatcgctcaaaagataaaggggccaccaaggagtcgagtgagaaggatcgcggccgggacaaaacccgaaagaggcgcagcgcttccagtggtagcagcagtaccaggtctcggtccagctcgacttccagctcaggctccagcaccagcactggctcaagcagtggctccagctcttcctcagcatccagccgctcaggaagctccagcacctcccgcagctccagctctagcagctcttctggctctccaagtccttctcggcgcagacacgacaacaggaggcgctcccgctccaaatccaaaccacctaaaagagatgaaaaggagaggaaaaggcggagcccatctcctaagcccaccaaagtgcacattgggagactcacccggaatgtgacaaaggatcacatcatggagatattttccacctatgggaaaattaaaatgattgacatgcccgtggaaaggatgcatccccatctgtccaaaggctatgcgtacgtagagtttgagaatccagatgaagccgagaaggcgctgaagcacatggatggaggacaaattgatggccaggagatcactgccaccgccgtgctggccccctggcctaggccaccccccaggagattcagccctcccaggagaatgttgccaccaccgcctatgtggcgcaggtctcccccacggatgaggagaaggtcccgctccccgaggcgcaggtcccccgtgcgccggagatcacggtccccgggccgccgccgccacaggagccgctccagctccaactcctcccgataaacaggccactgaagctctcgcccctgtaacttataccccacccagctcagtcgaacggactgggtgatcctcagaacgacta

SEQ ID NO: 318975 - DNA, 1777 bp, Homo sapiens
cgacaagcagagggcaaggtagaggatgatgacccgggaacagggctgaagagaaagtctgcgctgggagctgcaggctgggcccatcaggagcctgggggctcggctctggaggggctgaagagaaagtctgcgctgggagctgcaggctgggcccatcaggagcctgggggctcgccggcctcggcggctgaggaaagcaggaggaggtggcggcggcgggaagatggctccttcacctaccaaacgcaaagaccgctcagatgagaagtccaaggatcgctcaaaagataaaggggccaccaaggagtcgagtgagaaggatcgcggccgggacaaaacccgaaagaggcgcagcgcttccagtggtagcagcagtaccaggtctcggtccagctcgacttccagctcaggctccagcaccagcactggctcaagcagtggctccagctcttcctcagcatccagccgctcaggaagctccagcacctcccgcagctccagctctagcagctcttctggctctccaagtccttctcggcgcagacacgacaacaggaggcgctcccgctccaaatccaaaccacctaaaagagatgaaaaggagaggaaaaggcggagcccatctcctaagcccaccaaagtgcacattgggagactcacccggaatgtgacaaaggatcacatcatggagatattttccacctatgggaaaattaaaatgattgacatgcccgtggaaaggatgcatccccatctgtccaaaggctatgcgtacgtagagtttgagaatccagatgaagccgagaaggcgctgaagcacatggatggaggtcccgctccccgaggcgcaggtcccccgtgcgccggagatcacggtccccgggccgccgccgccacaggagccgctccagctccaactcctcccgataaacaggccactgaagctctcgcccctgtaacttataccccacccagctcagttttgtcacttttctagccaaaggaagaccagtaggaaagcaaacccttgactctggcaggatttgcaggcagcaggcagcacccctctgccagccgggccccggctgcagaagtgctgttggtttggatgctgtgtgcctgtcaagattccctccggttttctggctagaaagctcatccgtttccggtttctaagagtcagttcagtggcagagccaccagggaaaagtgaggctcttgggggtggtttgaccctgcttacctgggagcacacttttcccttccccgatgacctgggatggtggccaggccgtgcccttgctgttgctgggcagtgtccttttggaaagggagctgccccaggctttagtgcagctgccaaccctgttaggcctggcctctcgaggcctcttctgacctcaagggtcacaccccctcaaagatcctctcacccatggtagttgctgctcgtggttctgtctgtccgtgcaccgatgcacacaccgcaccccaccactgtactctgaaattggcgagtgagtggagagccagctctgcggagtcatcacgcagccatggttgtgcctgccgttcatggtggtctttcaggttatcttggcaacatgtacattgcttttattttttttcttttttgctttcattgtacagtcagtactataaaatttctcttttgagttttatacctttgtagcattttagatgacattgtgtttgtactttgttgtgtagagtggaagaattgtgttgaataaacccaagatcggaatgcaaa

SEQ ID NO: 318976 - DNA, 1163 bp, Homo sapiens
ggcacgagggagagagaggaggaggaaagcaggaggaggtggcggcggcgggaagatgctgctctttggcgtaaattgcaatcgattagggatcgtttctcagaatcaagttagaagtgagagttcagataagtgaggccgccattgctgctttgaacacctcagaaggggagaatggatttatcaggagtgaaaaagaagagcttgctaggagtcaaagaaaataataaaaagtccagcactagggctccttcacctaccaaacgcaaagaccgctcagatgagaagtccaaggatcgctcaaaagataaaggggccaccaaggagtcgagtgagaaggatcgcggccgggacaaaacccgaaagaggcgcagcgcttccagtggtagcagcagtaccaggtctcggtccagctcgacttccagctcaggctccagcaccagcactggctcaagcagtggctccagctcttcctcagcatccagccgctcaggaagctccagcacctcccgcagctccagctctagcagctcttctggctctccaagtccttctcggcgcagacacgacaacaggaggcgctcccgctccaaatccaaaccacctaaaagagatgaaaaggagaggaaaaggcggagcccatctcctaagcccaccaaagtgcacattgggagactcacccggaatgtgacaaaggatcacatcatggagatattttccacctatgggaaaattaaaatgattgacatgcccgtggaaaggatgcatccccatctgtccaaaggctatgcgtacgtagagtttgagaatccagatgaagccgagaaggcgctgaagcacatggatggaggacaaattgatggccaggagatcactgccaccgccgtgctggccccctggcctaggccaccccccaggagattcagccctcccaggagaatgttgccaccaccgcctatgtggcgcaggtctcccccacggatgaggagaaggtcccgctccccgaggcgcaggtcccccgtgcgccggagatcacggtccccgggccgccgccgccacaggagccgctccagctccaactcctcccgataaacaggccactgaagctctcagtccgttcgactgagcaggttggagggctttagatctcggtggagcacgta

SEQ ID NO: 318977 - DNA, 1414 bp, Homo sapiens
  misc_feature (1311)..(1311): n is a, c, g, or t
ggaggacgagcctcggtcatcgcgctgccctcccaggttcaacagcctacccatgtgcccgctccagtaagcgtgcaaccagcccggtcagtcccagggactttaccggctaggagacaccttgaacgtccccagcgcgactcccacaaactgccttgactctttaacgcttcctcgctggcgcccattgggccaggcgtttacgtcatcgctgcgcgccgggcggcggcgacttcccgctccttgactctgacgtcagagcggcgccggcctcggcggctgaggaaagcaggaggaggtggcggcggcgggaagatgctgctctttggcgtaaattgcaatcgattagggatcgtttctcagaatcaagttagaagtgagagttcagataagtgaggccgccattgctgctttgaacacctcagaaggggagaatggatttatcaggagtgaaaaagaagagcttgctaggagtcaaagaaaataataaaaagtccagcactagggctccttcacctaccaaacgcaaagaccgctcagatgagaagtccaaggatcgctcaaaagataaaggggccaccaaggagtcgagtgagaaggatcgcggccgggacaaaacccgaaagaggcgcagcgcttccagtggtagcagcagtaccaggtctcggtccagctcgacttccagctcaggctccagcaccagcactggctcaagcagtggctccagctcttcctcagcatccagccgctcaggaagctccagcacctcccgcagctccagctctagcagctcttctggctctccaagtccttctcggcgcagacacgacaacaggaggcgctcccgctccaaatccaaaccacctaaaagagatgaaaaggagaggaaaaggcggagcccatctcctaagcccaccaaagtgcacattgggagactcacccggaatgtgacaaaggatcacatcatggagatattttccacctatgggaaaattaaaatgattgacatgcccgtggaaaggatgcatccccatctgtccaaaggctatgcgtacgtagagtttgagaatccagatgaagccgagaaggcgctgaagcacatggatggaggacaaattgatggccaggagatcactgccaccgccgtgctggccccctggcctaggccaccccccaggagattcagccctcccaggagaatgttgccaccaccgcctatgtggcgcaggtctcccccacggatgaggagaaggtcccgctccccgaggcgcaggtcccccgtgcgccggagatcacggtccccgggccgcnagaccgtcagttcaattctcccgtaaggccatgagtttggccctgttattttccaccgtcagttggctttctgccagaacctggaggacctttttggggtggg

SEQ ID NO: 318978 - DNA, 1013 bp, Homo sapiens
ggcacgagggagagagaggaggaggaaagcaggaggaggtggcggcggcgggaagatgctgctctttggcgtaaattgcaatcgattagggatcgtttctcagaatcaagttagaagtgagagttcagataagtgaggccgccattgctgctttgaacacctcagaaggggagaatggatttatcaggagtgaaaaagaagagcttgctaggagtcaaagaaaataataaaaagtccagcactagggctccttcacctaccaaacgcaaagaccgctcagatgagaagtccaaggatcgctcaaaagataaaggggccaccaaggagtcgagtgagaaggatcgcggccgggacaaaacccgaaagaggcgcagcgcttccagtggtagcagcagtaccaggtctcggtccagctcgacttccagctcaggctccagcaccagcactggctcaagcagtggctccagctcttcctcagcatccagccgctcaggaagctccagcacctcccgcagctccagctctagcagctcttctggctctccaagtccttctcggcgcagacacgacaacaggaggcgctcccgctccaaatccaaaccacctaaaagagatgaaaaggagaggaaaaggcggagcccatctcctaagcccaccaaagtgcacattgggagactcacccggaatgtgacaaaggatcacatcatggagatattttccacctatgggaaaattaaaatgattgacatgcccgtggaaaggatgcatccccatctgtccaaaggctatgcgtacgtagagtttgagaatccagatgaagccgagaaggcgctgaagcacatggatggagccaattggtggccagagaacaaatggcagcgcgcgggcggccactgggcaaagcaccccaaggagaatagccctccaggaaagtggcaccaccgctatgagcggagcccagggaagagaagggcaccgggagagcccggcaggaacaagaagccgcgcacaca

SEQ ID NO: 318979 - DNA, 923 bp, Homo sapiens
ggcacgagggagagagaggaggaggaaagcaggaggaggtggcggcggcgggaagatgctgctctttggcgtaaattgcaatcgattagggatcgtttctcagaatcaagttagaagtgagagttcagataagtgaggccgccattgctgctttgaacacctcagaaggggagaatggatttatcaggagtgaaaaagaagagcttgctaggagtcaaagaaaataataaaaagtccagcactagggctccttcacctaccaaacgcaaagaccgctcagatgagaagtccaaggatcgctcaaaagataaaggggccaccaaggagtcgagtgagaaggatcgcggccgggacaaaacccgaaagaggcgcagcgcttccagtggtagcagcagtaccaggtctcggtccagctcgacttccagctcaggctccagcaccagcactggctcaagcagtggctccagctcttcctcagcatccagccgctcaggaagctccagcacctcccgcagctccagctctagcagctcttctggctctccaagtccttctcggcgcagacacgacaacaggaggcgctcccgctccaaatccaaaccacctaaaagagatgaaaaggagaggaaaaggcggagcccatctcctaagcccaccaaagtgcacattgggagactcacccggaatgtgacaaaggatcacatcatggagatattttccacctatgggaaaattaaaatgattgacatgcccgtggaaaggatgcatccccatctgtccaaaggctatgcgtacgtagagtttgagaatccagatgaagccgagaaggcgctgaagcacatggatggagtatttaggcctcattaatgagcaatagatatgattacgcattcactgccggtcgtttttcctaaggagtcagc

SEQ ID NO: 318980 - DNA, 2357 bp, Homo sapiens
gtggtaggggccgctgcggacggaagggcgcctgtgcttcgtccgctcggcggtggcccagccaggcccgcgggactcagaccagcggggagcgcggcctccgcccttggggccctcccgccgggccggagacccaagcccccaacgccaggccctgccctggaagcgctcgcggcccggcgcctggacgggggagttgtgagtgaacgcggacgggtagcggcgaggtcggcgtgtcgggccggtgtcggcgggcgcggagtttctttgtgggatgcggtggaaggtcggccgatccccccttcggagtcattaattcaaacgtgtacccgcgaacgtttcccggactcccgtgtgcaattatcggcgctaggccgtggggatacggcccactatggaccgagcacggtggccgagctcagtttgatgggttaccccagaggggcggatacgggaaggttaagtttgttggaggagaaacgtggagtaggctttttgtcttgattccgcatgaactgtgcctgaaatgtacttttaaatggggaaggtgctctgaagatttgtgccgaaacgccctctcctcgagatttaactaattgttctctcctctctctggctgttggacgcgcacctttccggaggatgggggaggtaaccgaggtcctgagccggtacctgaacttgggtgaacagagaacctcaacttttgctttctagcactcgaccgcacccagcaaggcgtccgcttactcagtggttcttagtgtttggagtgcttaagaataactggtggtgtttgatttcaccaagtacattcgggcagatcttagttcttgggggggtggggctggaatctgcgggtgtgacctccactctaggtctgtgctgtccagccaagtagccattggccacatgtggctgctaagcatgtgaaatacagctaatcaagactgaaatattaaaacacacaccagttttagaagactaggaaaaaagcaaacttttattagatgtttatgttgattatatgttggaaagataatattttggatgtgtcaaacgttaaaaattaatttcacccatttttgtgacgtggctactaaggaatttcaggtgatgcttgtggctcctcacacggtttctattggacagtgctgctgcaggtgattcgaaggcgggtgggtgcaggaacccagctgagagttcagaaattagtgtaactttggagacaagtgtctgtgggggaaggagcctccggacgtggagatacaactcttgctcctaacatttatcgagtctttaattaatgccctgggtaactataaggttggaactgtaattgtcaccatattgatgatgagaaacttgagaaaggataagtgacttgtctaaaatcacacagtaaaacctcaaatcaaacccaggccctctggctccagactctaaattatactctgaatgatactcactgattgtccgaggacacaaagagtgtcgaggcactatctgctgggtgtctgcagaaccttactgttctaaagcaaaacattttacccctggacaagagcagcaaaggtggcgttcggccctccttggctctcatttgactgttcaaagccaggtgcttttctttcttgggtcagaacgtattttcagcagcattttgaagcacccctggcgtgcactgcacagggaaaccaggaccacattggtgtgctgtgtcctccttaccaactggctcttggagaaggtgagacagaagtagctgagactccattcctgagatcttcacttaacaactcctgcagcttgtgcagagccttactagaaatactgaaggcagaagtccctggaaaatagggcccataactaattagtaatttgtttttgagtaatttgttaccgttatttgagcacattctgcagtccaggcattttgctaaactcttacatggcaggcagtctctcacgcaatttcaatgcctactttttttctccatcttatttttgaaaaatgttaaaaaaaacacaggaaggtcgagttatacagttaatactcacataaagaccacttaagggccgggtctggtggctcacgcctgtaatcccagcactttgggaggccgaggttggcggatcacgaggtcaggagttggagaccagcctggtcaatatggtgaaaccctgtctctactgaaaatacaaaaattagctaggcctggtggcgtgcatctgtagtcccagctactcgggaggctgacgcagaagaaatgcttgaacccgggaggcggaggttgcagtgagccaagatcgcaccactgcactccagcctgggtgacagagcaagactctgtctc

SEQ ID NO: 318981 - DNA, 2359 bp, Homo sapiens
gtggtaggggccgctgcggacggaagggcgcctgtgcttcgtccgctcggcggtggcccagccaggcccgcgggactcagaccagcggggagcgcggcctccgcccttggggccctcccgccgggccggagacccaagcccccaacgccaggccctgccctggaagcgctcgcggcccggcgcctggacgggggagttgtgagtgaacgcggacgggtagcggcgaggtcggcgtgtcgggccggtgtcggcgggcgcggagtttctttgtgggatgcggtggaaggtcggccgatccccccttcggagtcattaattcaaacgtgtacccgcgaacgtttcccggactcccgtgtgcaattatcggcgctaggccgtggggatacggcccactatggaccgagcacggtggccgagctcagtttgatgggttaccccagaggggcggatacgggaaggttaagtttgttggaggagaaacgtggagtaggctttttgtcttgattccgcatgaactgtgcctgaaatgtacttttaaatggggaaggtgctctgaagatttgtgccgaaacgccctctcctcgagatttaactaattgttctctcctctctctggctgttggacgcgcacctttccggaggatgggggaggtaaccgaggtcctgagccggtacctgaacttgggtgaacagagaacctcaacttttgctttctagcactcgaccgcacccagcaaggcgtccgcttactcagtggttcttagtgtttggagtgcttaagaataactggtggtgtttgatttcaccaagtacattcgggcagatcttagttcttgggggggtggggctggaatctgcgggtgtgacctccactctaggtctgtgctgtccagccaagtagccattggccacatgtggctgctaagcatgtgaaatacagctaatcaagactgaaatattaaaacacacaccagttttagaagactaggaaaaaagcaaacttttattagatgtttatgttgattatatgttggaaagataatattttggatgtgtcaaacgttaaaaattaatttcacccatttttgtgacgtggctactaaggaatttcaggtgatgcttgtggctcctcacacggtttctattggacagtgctgctgcaggtgattcgaaggcgggtgggtgcaggaacccagctgagagttcagaaattagtgtaactttggagacaagtgtctgtgggggaaggagcctccggacgtggagatacaactcttgctcctaacatttatcgagtctttaattaatgccctgggtaactataaggttggaactgtaattgtcaccatattgatgatgagaaacttgagaaaggataagtgacttgtctaaaatcacacagtaaaacctcaaatcaaacccaggccctctggctccagactctaaattatactctgaatgatactcactgattgtccgaggacacaaagagtgtcgaggcactatctgctgggtgtctgcagaaccttactgttctaaagcaaaacattttacccctggacaagagcagcaaaggtggcgttcggccctccttggctctcatttgactgttcaaagccaggtgcttttctttcttgggtcagaacgtattttcagcagcattttgaagcacccctggcgtgcactgcacagggaaaccaggaccacattggtgtgctgtgtcctccttaccaactggctcttggagaaggctgctctttggcgtaaattgcaatcgattagggatcgtttctcagaatcaagttagaagtgagagttcagataagtgaggccgccattgctgctttgaacacctcagaaggggagaatggatttatcaggagtgaaaaagaagagcttgctaggagtcaaagaaaataataaaaagtccagcactagggctccttcacctaccaaacgcaaagaccgctcagatgagaagtccaaggatcgctcaaaagataaaggggccaccaaggagtcgagtgagaaggatcgcggccgggacaaaacccgaaagaggcgcagcgcttccagtggtagcagcagtaccaggtggggcgggctggcctggagcctggagaggacctgtgccacagctacacccccactccccacagatggctcggttttcttgattatttacaaagaaaacacatcctctgattgttagtagagaccctaatttatggcagactggctaggtgcagtggtggctcatgcctataatcccagcactttgggaggccgaggcaggaggattgcttggggcctggagttcaagaccagcatgggcaacaaaacaagagctcgtctctac

SEQ ID NO: 318982 - DNA, 397 bp, Homo sapiens
attgtgccactgcactccagcctgggcgacagagcaagactccatcgctaaataaataatttaattaattaattaattaatttagaaattgcatattttaaaaaaataaattgaaacagtatgcgtcatacagtctggtatgaatgccgcaggaggaacacctagcccagcctattaggaggggtctttgtactgctgactataatcttatccccatctctactaaaaatacaaaaattagccgggcacagtggcacatgcctataatcacagctacttgggaggctaaggcaggagaattgcttgaactcgggaggcagaggttgcagtgagccaagatggtgccactgcactccagcctgtgtgacagagcaagactctgtctcaaaaattaaaa

SEQ ID NO: 318983 - DNA, 319 bp, Homo sapiens
gatgggcacccagcttgtatcaagtttgcaaattcttgggttaaggtgtcccaggccccaggatagggacccagtgagctgctgttgggtgcctaccctggaccccagattcagtcatctgagcacagaaccaagtcctgaggggtggcaatgagaggaaagatcaaagaccttgaacatgggacagaccagaagagaaaagaccaggggggtttggactgtggtccccaagaggaagagagggcacccaaaaccaactgtgcttcaatcactatggcatggccgggggaattgataatgatggtccgagatcaccaaa

SEQ ID NO: 318984 - DNA, 310 bp, Homo sapiens
gggtagaatccatgaacttgggcgccagttgcatattgacgacctgatggtgtaatgagcaggggaggaagacacctcagacggtgctttggcttgggtgactgagctaagggctgctttccctttctggggcgggggggtggccacttggaagctggtgccattatgaggaaggagagggtgcttatgcttatagcccaggaagattgaagccaagaagtgctttcttttttttttggagatggagtcttgctcttgttgcccaggctggagtacagtggcaagatcttggctcactgcaacctctgcc

SEQ ID NO: 318985 - DNA, 1703 bp, Homo sapiens
acgcacgtctctcgctttcgcatacttaaggcgtctgttctcggcagcggcggcacagcgaggtcggcagcggcacagcgaggtcggcagcggcacagcgaggtcggcagcggcacagcgaggtcggcagcggcacagcgaggtcggcagcggcagcgaggtcggcagcggcacagcgaggtcggcagcggcagcgaggtcggcagcggcgcgcgctgtgctcttccgcggactctgaatcatggcgaccacggccacgatggcgacctcgggctcggcgcgaaagcggctgctcaaagaggaagacatgactaaagtggaattcgagaccagcgaggaggtggatgtgacccccacgttcgacaccatgggcctgcgggaggacctgctgcggggcatctacgcttacggttttgaaaaaccatcagcaatccagcaacgagcaatcaagcagatcatcaaagggagagatgtcatcgcacagtctcagtccggcacaggaaaaacagccaccttcagtatctcagtcctccagtgtttggatattcaggttcgtgaaactcaagctttgatcttggctcccacaagagagttggctgtgcagatccagaaggggctgcttgctctcggtgactacatgaatgtccagtgccatgcctgcattggaggcaccaatgttggcgaggacatcaggaagctggattacggacagcatgttgtcgcgggcactccagggcgtgtttttgatatgattcgtcgcagaagcctaaggacacgtgctatcaaaatgttggttttggatgaagctgatgaaatgttgaataaaggtttcaaagagcagatttacgatgtatacaggtacctgcctccagccacacaggtggttctcatcagtgccacgctgccacacgagattctggagatgaccaacaagttcatgaccgacccaatccgcatcttggtgaaacgtgatgaattgactctggaaggcatcaagcaatttttcgtggcagtggagagggaagagtggaaatttgacactctgtgtgacctctacgacacactgaccatcactcaggcggtcatcttctgcaacaccaaaagaaaggtggactggctgacggagaaaatgagggaagccaacttcactgtatcctcaatgcatggagacatgccccagaaagagcgggagtccatcatgaaggagttccggtcgggcgccagccgagtgcttatttctacagatgtctgggccagggggttggatgtccctcaggtgtccctcatcattaactatgatctccctaataacagagaattgtacatacacagaattgggagatcaggtcgatacggccggaagggtgtggccattaactttgtaaagaatgacgacatccgcatcctcagagatatcgagcagtactattccactcagattgatgagatgccgatgaacgttgctgatcttatctgaagcagcagatcagtgggatgagggagactgttcacctgctgtgtactcctgtttggaagtatttagatccagattctacttaatggggtttatatggactttcttctcataaatggcctgccgtctcccttcctttgaagaggatatggggattctgctctcttttcttatttacatgtaaataatacattgttctaagtctttttcattaaaaatttaaaacttt

SEQ ID NO: 318986 - DNA, 486 bp, Homo sapiens
tcaaaaaaaaaataaattgtacccattttatacttaacgtagtataaagatgtatgtttaaaaagatgtatattaagatgttaatgttggtttcttcggtggatgggattacaggcgtgagccactatgtctggcctgttttttgttttgagaagtctgttgtgaggttttagttaaatttacgttaacaaattttcattttgtttgtgttgttccttaatctgtttctttcttcactttcagttgctgatcttatctgaagcagcagatcagtgggatgagggagactgttcacctgctgtgtactcctgtttggaagtatttagatccagattctacttaatggggtttatatggactttcttctcataaatggcctgccgtctcccttcctttgaagaggatatggggattctgctctcttttcttatttacatgtaaataatacattgttctaagtctttttcattaaaaatttaaaacttt

SEQ ID NO: 318987 - DNA, 482 bp, Homo sapiens
tcaaaaaaaaaataaattgtacccattttatacttaacgtagtataaagatgtatgtttaaaaagatgtatattaagatgttaatgttggtttcttcggtggatgggattatgaattttatatattcttttctgttaatgatatagcttttgtaataagaaaccagcaggccgggtgtggtggctcacgcctgtaatcccagcactttgagaggctgaggcaggccaattacgaggtcaggagataacgactctctgaatacacatatagggtgcacacagcacggtgtgctaacacggtgaaaccccatctctactaaaaatacaaaaacaaaattagcctggtgtggtggcgggcgcctgtagtcccagctactcaggaagctgaggcgggagaatggcgtgaaccctggaggcggagcttgcagtgagctaagattgcgctgctgccccccagcatgggccacagagtgagactccgtc

SEQ ID NO: 318988 - DNA, 1928 bp, Homo sapiens
acgcacgtctctcgctttcgcatacttaaggcgtctgttctcggcagcggcggcacagcgaggtcggcagcggcacagcgaggtcggcagcggcacagcgaggtcggcagcggcacagcgaggtcggcagcggcagcgaggtcggcagcggcacagcgaggtcggcagcggcagcgaggtcggcagcggcgcgcgctgtgctcttccgcggactctgaatcatggcgaccacggccacgatggcgacctcgggctcggcgcgaaagcggctgctcaaagaggaagacatgactaaagtggaattcgagaccagcgaggaggtggatgtgacccccacgttcgacaccatgggcctgcgggaggacctgctgcggggcatctacgcttacggttttgaaaaaccatcagcaatccagcaacgagcaatcaagcagatcatcaaagggagagatgtcatcgcacagtctcagtccggcacaggaaaaacagccaccttcagtatctcagtcctccagtgtttggatattcaggttcgtgaaactcaagctttgatcttggctcccacaagagagttggctgtgcagatccagaaggggctgcttgctctcggtgactacatgaatgtccagtgccatgcctgcattggaggcaccaatgttggcgaggacatcaggaagctggattacggacagcatgttgtcgcgggcactccagggcgtgtttttgatatgattcgtcgcagaagcctaaggacacgtgctatcaaaatgttggttttggatgaagctgatgaaatgttgaataaaggtttcaaagagcagatttacgatgtatacaggtacctgcctccagccacacaggtggttctcatcagtgccacgctgccacacgagattctggagatgaccaacaagttcatgaccgacccaatccgcatcttggtgaaacgtgatgaattgactctggaaggcatcaagcaatttttcgtggcagtggagagggaagagtggaaatttgacactctgtgtgacctctacgacacactgaccatcactcaggcggtcatcttctgcaacaccaaaagaaaggtggactggctgacggagaaaatgagggaagccaacttcactgtatcctcaatgcatggagacatgccccagaaagagcgggagtccatcatgaaggagttccggtcgggcgccagccgagtgcttatttctacagatgtctgggccagggggttggatgtccctcaggtgtccctcatcattaactatgatctccctaataacagagaattgtacatacacagaattgggagatcaggtcgatacggccggaagggtgtggccattaactttgtaaagaatgacgacatccgcatcctcagagatatcgagcagtactattccactcagattgatgagatgccgatgaacgttgctgatcttatctgaagcagcagatcagtgggatgagggagactgttcacctgctgtgtactcctgtttggaagtatttagatccagattctacttaatggggtttatatggactttcttctcataaatggcctgccgtctcccttcctttgaagaggatatggggattctgctctcttttcttatttacatgtaaataatacattgttctaagtctttttcattaaaaatttaaaacttttcccataaactctatacttctaaggtgccaccaccttctctagtaacttactgtgtagtcttgggtcatttcactcacttttctttttttcttttctttttcttttttttttttgagacagtctccctctgttgcccaggcaggagcgcagtggcgtgatctcctctcaccgcaagctccacttcctgggttcatgccattctcctacctcagcctcccacgtagctgggagtacaggcggccgc

SEQ ID NO: 318989 - DNA, 1921 bp, Homo sapiens
cttaaggcgtctgttctcggcagcggcacagcgaggtcggcagcggcacagcgaggtcggcagcggcacagcgaggtcggcagcggcacagcgaggtcggcagcggcacagcgaggtcggcagcggcagcgaggtcggcagcggcacagcgaggtcggcagcggcagcgaggtcggcagcggcgcgcgctgtgctcttccgcggactctgaatcatggcgaccacggccacgatggcgacctcgggctcggcgcgaaagcggctgctcaaagaggaagacatgactaaagtggaattcgagaccagcgaggaggtggatgtgacccccacgttcgacaccatgggcctgcgggaggacctgctgcggggcatctacgcttacggttttgaaaaaccatcagcaatccagcaacgagcaatcaagcagatcatcaaagggagagatgtcatcgcacagtctcagtccggcacaggaaaaacagccaccttcagtatctcagtcctccagtgtttggatattcaggttcgtgaaactcaagctttgatcttggctcccacaagagagttggctgtgcagatccagaaggggctgcttgctctcggtgactacatgaatgtccagtgccatgcctgcattggaggcaccaatgttggcgaggacatcaggaagctggattacggacagcatgttgtcgcgggcactccagggcgtgtttttgatatgattcgtcgcagaagcctaaggacacgtgctatcaaaatgttggttttggatgaagctgatgaaatgttgaataaaggtttcaaagagcagatttacgatgtatacaggtacctgcctccagccacacaggtggttctcatcagtgccacgctgccacacgagattctggagatgaccaacaagttcatgaccgacccaatccgcatcttggtgaaacgtgatgaattgactctggaaggcatcaagcaatttttcgtggcagtggagagggaagagtggaaatttgacactctgtgtgacctctacgacacactgaccatcactcaggcggtcatcttctgcaacaccaaaagaaaggtggactggctgacggagaaaatgagggaagccaacttcactgtatcctcaatgcatggagacatgccccagaaagagcgggagtccatcatgaaggagttccggtcgggcgccagccgagtgcttatttctacagatgtctgggccagggggttggatgtccctcaggtgtccctcatcattaactatgatctccctaataacagagaattgtacatacacagaattgggagatcaggtcgatacggccggaagggtgtggccattaactttgtaaagaatgacgacatccgcatcctcagagatatcgagcagtactattccactcagattgatgagatgccgatgaacgttgctgatcttatctgaagcagcagatcagtgggatgagggagactgttcacctgctgtgtactcctgtttggaagtatttagatccagattctacttaatggggtttatatggactttcttctcataaatggcctgccgtctcccttcctttgaagaggatatggggattctgctctcttttcttatttacatgtaaataatacattgttctaagtctttttcattaaaaatttaaaacttttcccataaactctatacttctaaggtgccaccaccttctctagtaacttactgtgtagtcttgggtcatttcactcacttttctttttttcttttctttttcttttttttttttgagacagtctccctctgttgcccaggcaggagcgcagtggcgtgatctcctctcaccgcaagctccacttcctgggttcatgccattctcctacctcagcctcccacgtagctgggagtacaggcggccgc

SEQ ID NO: 318990 - DNA, 1946 bp, Homo sapiens
ccggttaatttcagtacggggccgcgggtttgcttgtactttcatgggccgctgcgcagtacacatttaggcacagcgaggtcggcagcggcacagcgaggtcggcagcggcacagcgaggtcggcagcggcacagcgaggtcggcagcggcagcgaggtcggcagcggcacagcgaggtcggcagcggcagcgaggtcggcagcggcgcgcgctgtgctcttccgcggactctgaatcatggcgaccacggccacgatggcgacctcgggctcggcgcgaaagcggctgctcaaagaggaagacatgactaaagtggaattcgagaccagcgaggaggtggatgtgacccccacgttcgacaccatgggcctgcgggaggacctgctgcggggcatctacgcttacggttttgaaaaaccatcagcaatccagcaacgagcaatcaagcagatcatcaaagggagagatgtcatcgcacagtctcagtccggcacaggaaaaacagccaccttcagtatctcagtcctccagtgtttggatattcaggttcgtgaaactcaagctttgatcttggctcccacaagagagttggctgtgcagatccagaaggggctgcttgctctcggtgactacatgaatgtccagtgccatgcctgcattggaggcaccaatgttggcgaggacatcaggaagctggattacggacagcatgttgtcgcgggcactccagggcgtgtttttgatatgattcgtcgcagaagcctaaggacacgtgctatcaaaatgttggttttggatgaagctgatgaaatgttgaataaaggtttcaaagagcagatttacgatgtatacaggtacctgcctccagccacacaggtggttctcatcagtgccacgctgccacacgagattctggagatgaccaacaagttcatgaccgacccaatccgcatcttggtgaaacgtgatgaattgactctggaaggcatcaagcaatttttcgtggcagtggagagggaagagtggaaatttgacactctgtgtgacctctacgacacactgaccatcactcaggcggtcatcttctgcaacaccaaaagaaaggtggactggctgacggagaaaatgagggaagccaacttcactgtatcctcaatgcatggagacatgccccagaaagagcgggagtccatcatgaaggagttccggtcgggcgccagccgagtgcttatttctacagatgtctgggccagggggttggatgtccctcaggtgtccctcatcattaactatgatctccctaataacagagaattgtacatacacagaattgggagatcaggtcgatacggccggaagggtgtggccattaactttgtaaagaatgacgacatccgcatcctcagagatatcgagcagtactattccactcagattgatgagatgccgatgaacgttgctgatcttatctgaagcagcagatcagtgggatgagggagactgttcacctgctgtgtactcctgtttggaagtatttagatccagattctacttaatggggtttatatggactttcttctcataaatggcctgccgtctcccttcctttgaagaggatatggggattctgctctcttttcttatttacatgtaaataatacattgttctaagtctttttcattaaaaatttaaaacttttcccataaactctatacttctaaggtgccaccaccttctctagtaacttactgtgtagtcttgggtcatttcactcacttttctttttttcttttctttttcttttttttttttgagacagtctccctctgttgcccaggcaggagcgcagtggcgtgatctcctctcaccgcaagctccacttcctgggttcatgccattctcctacctcagcctcccacgtagctgggagtacaggcggccgc

SEQ ID NO: 318991 - DNA, 1897 bp, Homo sapiens
acgcacgtctctcgctttcgcatacttaaggcgtctgttctcggcagcggcgtcggcagcggcacagcgaggtcggcagcggcacagcgaggtcggcagcggcagcgaggtcggcagcggcacagcgaggtcggcagcggcagcgaggtcggcagcggcgcgcgctgtgctcttccgcggactctgaatcatggcgaccacggccacgatggcgacctcgggctcggcgcgaaagcggctgctcaaagaggaagacatgactaaagtggaattcgagaccagcgaggaggtggatgtgacccccacgttcgacaccatgggcctgcgggaggacctgctgcggggcatctacgcttacggttttgaaaaaccatcagcaatccagcaacgagcaatcaagcagatcatcaaagggagagatgtcatcgcacagtctcagtccggcacaggaaaaacagccaccttcagtatctcagtcctccagtgtttggatattcaggttcgtgaaactcaagctttgatcttggctcccacaagagagttggctgtgcagatccagaaggggctgcttgctctcggtgactacatgaatgtccagtgccatgcctgcattggaggcaccaatgttggcgaggacatcaggaagctggattacggacagcatgttgtcgcgggcactccagggcgtgtttttgatatgattcgtcgcagaagcctaaggacacgtgctatcaaaatgttggttttggatgaagctgatgaaatgttgaataaaggtttcaaagagcagatttacgatgtatacaggtacctgcctccagccacacaggtggttctcatcagtgccacgctgccacacgagattctggagatgaccaacaagttcatgaccgacccaatccgcatcttggtgaaacgtgatgaattgactctggaaggcatcaagcaatttttcgtggcagtggagagggaagagtggaaatttgacactctgtgtgacctctacgacacactgaccatcactcaggcggtcatcttctgcaacaccaaaagaaaggtggactggctgacggagaaaatgagggaagccaacttcactgtatcctcaatgcatggagacatgccccagaaagagcgggagtccatcatgaaggagttccggtcgggcgccagccgagtgcttatttctacagatgtctgggccagggggttggatgtccctcaggtgtccctcatcattaactatgatctccctaataacagagaattgtacatacacagaattgggagatcaggtcgatacggccggaagggtgtggccattaactttgtaaagaatgacgacatccgcatcctcagagatatcgagcagtactattccactcagattgatgagatgccgatgaacgttgctgatcttatctgaagcagcagatcagtgggatgagggagactgttcacctgctgtgtactcctgtttggaagtatttagatccagattctacttaatggggtttatatggactttcttctcataaatggcctgccgtctcccttcctttgaagaggatatggggattctgctctcttttcttatttacatgtaaataatacattgttctaagtctttttcattaaaaatttaaaacttttcccataaactctatacttctaaggtgccaccaccttctctagtaacttactgtgtagtcttgggtcatttcactcacttttctttttttcttttctttttcttttttttttttgagacagtctccctctgttgcccaggcaggagcgcagtggcgtgatctcctctcaccgcaagctccacttcctgggttcatgccattctcctacctcagcctcccacgtagctgggagtacaggcggccgc

SEQ ID NO: 318992 - DNA, 2251 bp, Homo sapiens
acgcacgtctctcgctttcgcatacttaaggcgtctgttctcggcagcggcggcacagcgaggtcggcagcggcacagcgaggtcggcagcggcacagcgaggtcggcagcggcacagcgaggtcggcagcggcagcgaggtcggcagcggcacagcgaggtcggcagcggcagcgaggtcggcagcggcgcgcgctgtgctcttccgcggactctgaatcatggcgaccacggccacgatggcgacctcgggctcggcgcgaaagcggctgctcaaagaggaagacatgactaaagtggaattcgagaccagcgaggaggtggatgtgacccccacgttcgacaccatgggcctgcgggaggacctgctgcggggcatctacgcttacggttttgaaaaaccatcagcaatccagcaacgagcaatcaagcagatcatcaaagggagagatgtcatcgcacagtctcagtccggcacaggaaaaacagccaccttcagtatctcagtcctccagtgtttggatattcaggttcgtgaaactcaagctttgatcttggctcccacaagagagttggctgtgcagatccagaaggggctgcttgctctcggtgactacatgaatgtccagtgccatgcctgcattggaggcaccaatgttggcgaggacatcaggaagctggattacggacagcatgttgtcgcgggcactccagggcgtgtttttgatatgattcgtcgcagaagcctaaggacacgtgctatcaaaatgttggttttggatgaagctgatgaaatgttgaataaaggtttcaaagagcagatttacgatgtatacaggtacctgcctccagccacacaggtggttctcatcagtgccacgctgccacacgagattctggagatgaccaacaagttcatgaccgacccaatccgcatcttggtgaaacgtgatgaattgactctggaaggcatcaagcaatttttcgtggcagtggagagggaagagtggaaatttgacactctgtgtgacctctacgacacactgaccatcactcaggcggtcatcttctgcaacaccaaaagaaaggtggactggctgacggagaaaatgagggaagccaacttcactgtatcctcaatgcatggagacatgccccagaaagagcgggagtccatcatgaaggagttccggtcgggcgccagccgagtgcttatttctacagatgtctgggccagggggttggatgtccctcaggtgtccctcatcattaactatgatctccctaataacagagaattgtacatacacagaattgggagatcaggtcgatacggccggaagggtgtggccattaactttgtaaagaatgacgacatccgcatcctcagagatatcgagcagtactattccactcagattgatgagatgccgatgaacgttgctgatcttatctgaagcagcagatcagtgggatgagggagactgttcacctgctgtgtactcctgtttggaagtatttagatccagattctacttaatggggtttatatggactttcttctcataaatggcctgccgtctcccttcctttgaagaggatatggggattctgctctcttttcttatttacatgtaaataatacattgttctaagtctttttcattaaaaatttaaaactttaaaaaaaaaaaaaaaaaaaaaaaactttgtgggccgccccggggacccggaaaaagtttttcaagacccttccgtgtgggggccgggcgacccagttggtttacaggtgaaccccgggtcgacaaggcggctgccaaagggacacccgggccgggacactgtgctcggttgctccacccataaaaaaccgcccgggcaccgcggcgtttcggaacacaatccgaaggggcgctgtgggcgggcagtgccggggcctatcacaccgggggcccaagcggagggccaagaataacgcgcccggggggggggggaaaaaaaaaaacataaaaacagaaaaggaaggaaggaaagagaagagagaagaagaggattaaaaaatgaaaaaaaaaaaaagaaggataaaaagaagagaagaaaacatgagaaaggaaggaaagagaaaaaaattaaacaaaagaaagaagaaaataaaaatacaagtaaagaagagatgaaaaaaaatgatagataatgaatagaaaaaagaataagaataatagtaaaacgatagacctaaagaaaatatacc

SEQ ID NO: 318993 - DNA, 1873 bp, Homo sapiens
acgcacgtctctcgctttcgcatacttaaggcgtctgttctcggcagcggcggcacagcgaggtcggcagcggcacagcgaggtcggcagcggcacagcgaggtcggcagcggcacagcgaggtcggcagcggcagcgaggtcggcagcggcacagcgaggtcggcagcggcagcgaggtcggcagcggcgcgcgctgtgctcttccgcggactctgaatcatggcgaccacggccacgatggcgacctcgggctcggcgcgaaagcggctgctcaaagaggaagacatgactaaagtggaattcgagaccagcgaggaggtggatgtgacccccacgttcgacaccatgggcctgcgggaggacctgctgcggggcatctacgcttacggttttgaaaaaccatcagcaatccagcaacgagcaatcaagcagatcatcaaagggagagatgtcatcgcacagtctcagtccggcacaggaaaaacagccaccttcagtatctcagtcctccagtgtttggatattcaggttcgtgaaactcaagctttgatcttggctcccacaagagagttggctgtgcagatccagaaggggctgcttgctctcggtgactacatgaatgtccagtgccatgcctgcattggaggcaccaatgttggcgaggacatcaggaagctggattacggacagcatgttgtcgcgggcactccagggcgtgtttttgatatgattcgtcgcagaagcctaaggacacgtgctatcaaaatgttggttttggatgaagctgatgaaatgttgaataaaggtttcaaagagcagatttacgatgtatacaggtacctgcctccagccacacaggtggttctcatcagtgccacgctgccacacgagattctggagatgaccaacaagttcatgaccgacccaatccgcatcttggtgaaacgtgatgaattgactctggaaggcatcaagcaatttttcgtggcagtggagagggaagagtggaaatttgacactctgtgtgacctctacgacacactgaccatcactcaggcggtcatcttctgcaacaccaaaagaaagatggagacatgccccagaaagagcgggagtccatcatgaaggagttccggtcgggcgccagccgagtgcttatttctacagatgtctgggccagggggttggatgtccctcaggtgtccctcatcattaactatgatctccctaataacagagaattgtacatacacagaattgggagatcaggtcgatacggccggaagggtgtggccattaactttgtaaagaatgacgacatccgcatcctcagagatatcgagcagtactattccactcagattgatgagatgccgatgaacgttgctgatcttatctgaagcagcagatcagtgggatgagggagactgttcacctgctgtgtactcctgtttggaagtatttagatccagattctacttaatggggtttatatggactttcttctcataaatggcctgccgtctcccttcctttgaagaggatatggggattctgctctcttttcttatttacatgtaaataatacattgttctaagtctttttcattaaaaatttaaaacttttcccataaactctatacttctaaggtgccaccaccttctctagtaacttactgtgtagtcttgggtcatttcactcacttttctttttttcttttctttttcttttttttttttgagacagtctccctctgttgcccaggcaggagcgcagtggcgtgatctcctctcaccgcaagctccacttcctgggttcatgccattctcctacctcagcctcccacgtagctgggagtacaggcggccgc

SEQ ID NO: 318994 - DNA, 1905 bp, Homo sapiens
acgcacgtctctcgctttcgcatacttaaggcgtctgttctcggcagcggcggcacagcgaggtcggcagcggcacagcgaggtcggcagcggcacagcgaggtcggcagcggcacagcgaggtcggcagcggcacagcgaggtcggcagcggcagcgaggtcggcagcggcacagcgaggtcggcagcggcagcgaggtcggcagcggcgcgcgctgtgctcttccgcggactctgaatcatggcgaccacggccacgatggcgacctcgggctcggcgcgaaagcggctgctcaaagaggaagacatgactaaagtggaattcgagaccagcgaggaggtggatgtgacccccacgttcgacaccatgggcctgcgggaggacctgctgcggggcatctacgcttacggttttgaaaaaccatcagcaatccagcaacgagcaatcaagcagatcatcaaagggagagatgtcatcgcacagtctcagtccggcacaggaaaaacagccaccttcagtatctcagtcctccagtgtttggatattcaggttcgtgaaactcaagctttgatcttggctcccacaagagagttggctgtgcagatccagaaggggctgcttgctctcggtgactacatgaatgtccagtgccatgcctgcattggaggcaccaatgttggcgaggacatcaggaagctggattacggacagcatgttgtcgcgggcactccagggcgtgtttttgatatgattcgtcgcagaagcctaaggacacgtgctatcgtttcaaagagcagatttacgatgtatacaggtacctgcctccagccacacaggtggttctcatcagtgccacgctgccacacgagattctggagatgaccaacaagttcatgaccgacccaatccgcatcttggtgaaacgtgatgaattgactctggaaggcatcaagcaatttttcgtggcagtggagagggaagagtggaaatttgacactctgtgtgacctctacgacacactgaccatcactcaggcggtcatcttctgcaacaccaaaagaaaggtggactggctgacggagaaaatgagggaagccaacttcactgtatcctcaatgcatggagacatgccccagaaagagcgggagtccatcatgaaggagttccggtcgggcgccagccgagtgcttatttctacagatgtctgggccagggggttggatgtccctcaggtgtccctcatcattaactatgatctccctaataacagagaattgtacatacacagaattgggagatcaggtcgatacggccggaagggtgtggccattaactttgtaaagaatgacgacatccgcatcctcagagatatcgagcagtactattccactcagattgatgagatgccgatgaacgttgctgatcttatctgaagcagcagatcagtgggatgagggagactgttcacctgctgtgtactcctgtttggaagtatttagatccagattctacttaatggggtttatatggactttcttctcataaatggcctgccgtctcccttcctttgaagaggatatggggattctgctctcttttcttatttacatgtaaataatacattgttctaagtctttttcattaaaaatttaaaacttttcccataaactctatacttctaaggtgccaccaccttctctagtaacttactgtgtagtcttgggtcatttcactcacttttctttttttcttttctttttcttttttttttttgagacagtctccctctgttgcccaggcaggagcgcagtggcgtgatctcctctcaccgcaagctccacttcctgggttcatgccattctcctacctcagcctcccacgtagctgggagtacaggcggccgc

SEQ ID NO: 318995 - DNA, 2192 bp, Homo sapiens
tggggtctcttgctgtattgcccaggctggtctcgaattcctggcttcaattaatgctgcctctgcgtcccagagtgttgggaatacaggcctgagccaccacgccgtgacatgagggtctttatgactcacaatctgaaaggcagggaagattagagccctgctgtggagcaggtgaaaggagagcagaaggtcagagagattgtttcctgaggcctaacccatcaatttaataagactgtaataagggctatgggagctgtgagccaggaactatggatgaaaacttgtatatagccatatctcctagcaccacaaatcctcttttaatagctttattcctcgtttgcctaatttcaaaaaagactcatttacacaaaaatttctttggaagagagagttagtccaaaatcctagaaggaaaagagttgtatttagataaaggggagtcctcctttttctgacacctatgaaacacctcttgaagttagagagtctgtggctccattgcccccgtgcagaagccatgtctactctctttcttcatggacacttaacaagctgtgacactgggcccgagtcctgcctcctcgcagttaagatgttattaggtacgggggcttgctggaagaaggtacctaagtgcctctggagcccaggccttggagtgcagctgtggcgtggcctgtcctccctctaatcccactgcttttgtttccttgaataggtctcagtccggcacaggaaaaacagccaccttcagtatctcagtcctccagtgtttggatattcaggttcgtgaaactcaagctttgatcttggctcccacaagagagttggctgtgcagatccagaaggggctgcttgctctcggtgactacatgaatgtccagtgccatgcctgcattggaggcaccaatgttggcgaggacatcaggaagctggattacggacagcatgttgtcgcgggcactccagggcgtgtttttgatatgattcgtcgcagaagcctaaggacacgtgctatcaaaatgttggttttggatgaagctgatgaaatgttgaataaaggtttcaaagagcagatttacgatgtatacaggtacctgcctccagccacacaggtggttctcatcagtgccacgctgccacacgagattctggagatgaccaacaagttcatgaccgacccaatccgcatcttggtgaaacgtgatgaattgactctggaaggcatcaagcaatttttcgtggcagtggagagggaagagtggaaatttgacactctgtgtgacctctacgacacactgaccatcactcaggcggtcatcttctgcaacaccaaaagaaaggtggactggctgacggagaaaatgagggaagccaacttcactgtatcctcaatgcatggagacatgccccagaaagagcgggagtccatcatgaaggagttccggtcgggcgccagccgagtgcttatttctacagatgtctgggccagggggttggatgtccctcaggtgtccctcatcattaactatgatctccctaataacagagaattgtacatacacagaattgggagatcaggtcgatacggccggaagggtgtggccattaactttgtaaagaatgacgacatccgcatcctcagagatatcgagcagtactattccactcagattgatgagatgccgatgaacgttgctgatcttatctgaagcagcagatcagtgggatgagggagactgttcacctgctgtgtactcctgtttggaagtatttagatccagattctacttaatggggtttatatggactttcttctcataaatggcctgccgtctcccttcctttgaagaggatatggggattctgctctcttttcttatttacatgtaaataatacattgttctaagtctttttcattaaaaatttaaaacttttcccataaactctatacttctaaggtgccaccaccttctctagtaacttactgtgtagtcttgggtcatttcactcacttttctttttttcttttctttttcttttttttttttgagacagtctccctctgttgcccaggcaggagcgcagtggcgtgatctcctctcaccgcaagctccacttcctgggttcatgccattctcctacctcagcctcccacgtagctgggagtacaggcggccgc

SEQ ID NO: 318996 - DNA, 1029 bp, Homo sapiens
acgcacgtctctcgctttcgcatacttaaggcgtctgttctcggcagcggcggcacagcgaggtcggcagcggcacagcgaggtcggcagcggcacagcgaggtcggcagcggcacagcgaggtcggcagcggcagcgaggtcggcagcggcacagcgaggtcggcagcggcagcgaggtcggcagcggcgcgcgctgtgctcttccgcggactctgaatcatggcgaccacggccacgatggcgacctcgggctcggcgcgaaagcggctgctcaaagaggaagacatgactaaagtggaattcgagaccagcgaggaggtggatgtgacccccacgttcgacaccatgggcctgcgggaggacctgctgcggggcatctacgcttacggttttgaaaaaccatcagcaatccagcaacgagcaatcaagcagatcatcaaagggagagatgtcatcgcacagtctcagtccggcacaggaaaaacagccaccttcagtatctcagtcctccagtgtttggatattcaggttcgtgaaactcaagctttgatcttggctcccacaagagagttggctgtgcagatccagaaggggctgcttgctctcggtgactacatgaatgtccagtgccatgcctgcattggaggcaccaatgttggcgaggacatcaggaagctggattacggacagcatgttgtcgcgggcactccagggcgtgtttttgatatgattcgtcgcagaagcctaaggacacgtgctatcaaaatgttggttttggatgaagctgatgaaatgttgaataaaggtttcaaagagcagatttacgatgtatacaggtacctgcctccagccacacaggtggttctcatcagtgccacgctgccacacgagattctggagatgaccaacaagttcatgaccgacccaatccgcatcttggtgaaacggtaggagcccctcttgtcaagtttactaaaacactgggccgcatttataaaggattttatgtcgtaatttcaaaaacttt

SEQ ID NO: 318997 - DNA, 1412 bp, Homo sapiens
gtggtgggaggatcgcttgaggtcaggaggctgaggctgcagtgagctttgattgtgccactgtacttcagccagggcaacagagcaagaccctgtctcaaacaaaacaaaacaacccatcttttataatcctcattgtggtttgaaccaataattctaaatttaaaaattaggtgactatttatttatcagtgtttcgtttagaatcgtattccatgtggtgcacattgtgaaatgttaagtaggatacagaatggaggcctgtgtgacggaagtggtgataggatggaggacagggctggggctgctgggtctgcaccagatatcacggtgtgaccttttccaccagggtctccctggatcctggcttggcccaccctcaagtcctagaaggaaggatgagtatgtaacaggatttgtctttgtccttcagtgatgaattgactctggaaggcatcaagcaatttttcgtggcagtggagagggaagagtggaaatttgacactctgtgtgacctctacgacacactgaccatcactcaggcggtcatcttctgcaacaccaaaagaaaggtggactggctgacggagaaaatgagggaagccaacttcactgtatcctcaatgcatggagacatgccccagaaagagcgggagtccatcatgaaggagttccggtcgggcgccagccgagtgcttatttctacagatgtctgggccagggggttggatgtccctcaggtgtccctcatcattaactatgatctccctaataacagagaattgtacatacacagaattgggagatcaggtcgatacggccggaagggtgtggccattaactttgtaaagaatgacgacatccgcatcctcagagatatcgagcagtactattccactcagattgatgagatgccgatgaacgttgctgatcttatctgaagcagcagatcagtgggatgagggagactgttcacctgctgtgtactcctgtttggaagtatttagatccagattctacttaatggggtttatatggactttcttctcataaatggcctgccgtctcccttcctttgaagaggatatggggattctgctctcttttcttatttacatgtaaataatacattgttctaagtctttttcattaaaaatttaaaacttttcccataaactctatacttctaaggtgccaccaccttctctagtaacttactgtgtagtcttgggtcatttcactcacttttctttttttcttttctttttcttttttttttttgagacagtctccctctgttgcccaggcaggagcgcagtggcgtgatctcctctcaccgcaagctccacttcctgggttcatgccattctcctacctcagcctcccacgtagctgggagtacaggcggccgc

SEQ ID NO: 318998 - DNA, 1021 bp, Homo sapiens
aaatcctctaccctctccgaatcctccgcatctggtgaaacgtgatgaattgactctggaaggcatcaagcaatttttcgtggcagtggagagggaagagtggaaatttgacactctgtgtgacctctacgacacactgaccatcactcaggcggtcatcttctgcaacaccaaaagaaaggtggactggctgacggagaaaatgagggaagccaacttcactgtatcctcaatgcatggagacatgccccagaaagagcgggagtccatcatgaaggagttccggtcgggcgccagccgagtgcttatttctacagatgtctgggccagggggttggatgtccctcaggtgtccctcatcattaactatgatctccctaataacagagaattgtacatacacagaattgggagatcaggtcgatacggccggaagggtgtggccattaactttgtaaagaatgacgacatccgcatcctcagagatatcgagcagtactattccactcagattgatgagatgccgatgaacgttgctgatcttatctgaagcagcagatcagtgggatgagggagactgttcacctgctgtgtactcctgtttggaagtatttagatccagattctacttaatggggtttatatggactttcttctcataaatggcctgccgtctcccttcctttgaagaggatatggggattctgctctcttttcttatttacatgtaaataatacattgttctaagtctttttcattaaaaatttaaaacttttcccataaactctatacttctaaggtgccaccaccttctctagtaacttactgtgtagtcttgggtcatttcactcacttttctttttttcttttctttttcttttttttttttgagacagtctccctctgttgcccaggcaggagcgcagtggcgtgatctcctctcaccgcaagctccacttcctgggttcatgccattctcctacctcagcctcccacgtagctgggagtacaggcggccgc

SEQ ID NO: 318999 - DNA, 340 bp, Homo sapiens
tgcagacagactgttgagagaggagaatctcgtatattttggacctgcagccaggattccttaaaattagcaatggaagcaagtccagtcttacacttgtatgagtaatttaatcgcctcaaacactctttctttttgcagccgagtgcttatttctacagatgtctgggccagggggttggatgtccctcaggtgtccctcatcattaactatgatctccctaataacagagaattgtacatacacaggtaaggtgcaagctctcattggcttcacttctgtgacacatttactaaatcttgattgttatatatactaactgtaatattattttattcc

SEQ ID NO: 319000 - DNA, 686 bp, Homo sapiens
tggtttcgagataataatggcataaataataatcggtgatcatctcggaggagaaacagtctttctttttggaaaacgtggatgtttctctctcccaccctggacgtgaacctgtgctttgtttcagggctgcttgctctcggtgactacatgaatgtccagtgccatgcctgcattggaggcaccaatgttggcgaggacatcaggaagctggattacggacagcatgttgtcgcgggcactccagggcgtgtttttggtaagcacttttgtcgctaaaaatggtgctgccggtagtatttgtaagaagtgcttaaatggtacaggacagctttcgatttggtaggccgcacggtagacttttgcacctgggtcacttgcaggaggtagagggaaggtctctggaaccctgagaccagtggaatgatgagctctttcttgggagcctcaggtgtgattatttcaaaatctcatagatgtgatttgtcgtaagtatttcaaaatctcatgttatagatatgattcgtcgcagaagcctaaggacacgtgctatcaaaatgttggttttggatgaagctgatgaaatgttgaataaaggtatgagcaacaaaagaattactcttctactgacataattcttagttcttaaattttcacagtgtaaaattgaaacagccagtgactgt

SEQ ID NO: 319001 - DNA, 1948 bp, Homo sapiens
acgcacgtctctcgctttcgcatacttaaggcgtctgttctcggcagcggcggcacagcgaggtcggcagcggcacagcgaggtcggcagcggcacagcgaggtcggcagcggcacagcgaggtcggcagcggcacagcgaggtcggcagcggcagcgaggtcggcagcggcacagcgaggtcggcagcggcagcgaggtcggcagcggcgcgcgctgtgctcttccgcggactctgaatcatggcgaccacggccacgatggcgacctcgggctcggcgcgaaagcggctgctcaaagaggaagacatgactaaagtggaattcgagaccagcgaggaggtggatgtgacccccacgttcgacaccatgggcctgcgggaggacctgctgcggggcatctacgcttacggttttgaaaaaccatcagcaatccagcaacgagcaatcaagcagatcatcaaagggagagatgtcatcgcacagtctcagtccggcacaggaaaaacagccaccttcagtatctcagtcctccagtgtttggatattcaggttcgtgaaactcaagctttgatcttggctcccacaagagagttggctgtgcagatccagaaggggctgcttgctctcggtgactacatgaatgtccagtgccatgcctgcattggaggcaccaatgttggcgaggacatcaggaagctggattacggacagcatgttgtcgcgggcactccagggcgtgtttttgatatgattcgtcgcagaagcctaaggacacgtgctatcaaaatgttggttttggatgaagctgatgaaatgttgaataaaggtttcaaagagcagatttacgatgtatacaggtacctgcctccagccacacaggtggttctcatcagtgccacgctgccacacgagattctggagatgaccaacaagttcatgaccgacccaatccgcatcttggtgaaacgtgatgaattgactctggaaggcatcaagcaatttttcgtggcagtggagagggaagagtggaaatttgacactctgtgtgacctctacgacacactgaccatcactcaggcggtcatcttctgcaacaccaaaagaaaggtggactggctgacggagaaaatgagggaagccaacttcactgtatcctcaatgcatggagacatgccccagaaagagcgggagtccatcatgaaggagttccggtcgggcgccagccgagtgcttatttctacagatgtctgggccagggggttggatgtccctcaggtgtccctcatcattaactatgatctccctaataacagagaattgtacatacacagaattgggagatcaggtcgatacggccggaagggtgtggccattaactttgtaaagaatgacgacatccgcatcctcagagatatcgagcagtactattccactcagattgatgagatgccgatgaacgttgctgatcttatctgaagcagcagatcagtgggatgagggagactgttcacctgctgtgtactcctgtttggaagtatttagatccagattctacttaatggggtttatatggactttcttctcataaatggcctgccgtctcccttcctttgaagaggatatggggattctgctctcttttcttatttacatgtaaataatacattgttctaagtctttttcattaaaaatttaaaacttttcccataaactctatacttctaaggtgccaccaccttctctagtaacttactgtgtagtcttgggtcatttcactcacttttctttttttcttttctttttcttttttttttttgagacagtctccctctgttgcccaggcaggagcgcagtggcgtgatctcctctcaccgcaagctccacttcctgggttcatgccattctcctacctcagcctcccacgtagctgggagtacaggcggccgc

SEQ ID NO: 319002 - DNA, 1987 bp, Homo sapiens
  misc_feature (1714)..(1714): n is a, c, g, or t
  misc_feature (1723)..(1723): n is a, c, g, or t
  misc_feature (1796)..(1796): n is a, c, g, or t
  misc_feature (1883)..(1883): n is a, c, g, or t
  misc_feature (1943)..(1943): n is a, c, g, or t
acgcacgtctctcgctttcgcatacttaaggcgtctgttctcggcagcggcggcacagcgaggtcggcagcggcacagcgaggtcggcagcggcacagcgaggtcggcagcggcacagcgaggtcggcagcggcagcgaggtcggcagcggcacagcgaggtcggcagcggcagcgaggtcggcagcggcgcgcgctgtgctcttccgcggactctgaatcatggcgaccacggccacgatggcgacctcgggctcggcgcgaaagcggctgctcaaagaggaagacatgactaaagtggaattcgagaccagcgaggaggtggatgtgacccccacgttcgacaccatgggcctgcgggaggacctgctgcggggcatctacgcttacggttttgaaaaaccatcagcaatccagcaacgagcaatcaagcagatcatcaaagggagagatgtcatcgcacagtctcagtccggcacaggaaaaacagccaccttcagtatctcagtcctccagtgtttggatattcaggttcgtgaaactcaagctttgatcttggctcccacaagagagttggctgtgcagatccagaaggggctgcttgctctcggtgactacatgaatgtccagtgccatgcctgcattggaggcaccaatgttggcgaggacatcaggaagctggattacggacagcatgttgtcgcgggcactccagggcgtgtttttgatatgattcgtcgcagaagcctaaggacacgtgctatcaaaatgttggttttggatgaagctgatgaaatgttgaataaaggtttcaaagagcagatttacgatgtatacaggtacctgcctccagccacacaggtggttctcatcagtgccacgctgccacacgagattctggagatgaccaacaagttcatgaccgacccaatccgcatcttggtgaaacgtgatgaattgactctggaaggcatcaagcaatttttcgtggcagtggagagggaagagtggaaatttgacactctgtgtgacctctacgacacactgaccatcactcaggcggtcatcttctgcaacaccaaaagaaaggtggactggctgacggagaaaatgagggaagccaacttcactgtatcctcaatgcatggagacatgccccagaaagagcgggagtccatcatgaaggagttccggtcgggcgccagccgagtgcttatttctacagatgtctgggccagggggttggatgtccctcaggtgtccctcatcattaactatgatctccctaataacagagaattgtacatacacagaattgggagatcaggtcgatacggccggaagggtgtggccattaactttgtaaagaatgacgacatccgcatcctcagagatatcgagcagtactattccactcagattgatgagatgccgatgaacgttgctgatcttatctgaagcagcagatcagtgggatgagggagactgttcacctgctgtgtactcctgtttggaagtatttagatccagattctacttaatggggtttatatggactttcttctcataaatggcctgccgtctcccttcctttgaagaggatatggggattctgctctcttttcttatttacatgtaaataatacattgttctaagtctttttcattaaaaatttaaaactttaggaaaaggaaaaaaaaagatctttagttangcggcgcancctaatccgttagtgggggtaattagcctgcaatgcggtcgtttagacggcgtcatggaaacttgcggtccanctactcctgaggacccctttcactgtatacgaagcgacgatcgtcacatccatgaaggatgcgcgttagcgtaggggttgtttcggntgtaatcgggcggggtctctctctcgggcgccaaagggtggtttcccaaaaggtggccanatttcggtagtgcactgttagggaaacaaaaggggttaaagctg

SEQ ID NO: 319003 - DNA, 1706 bp, Homo sapiens
acgcacgtctctcgctttcgcatacttaaggcgtctgttctcggcagcggcggcacagcgaggtcggcagcggcacagcgaggtcggcagcggcacagcgaggtcggcagcggcacagcgaggtcggcagcggcagcgaggtcggcagcggcacagcgaggtcggcagcggcagcgaggtcggcagcggcgcgcgctgtgctcttccgcggactctgaatcatggcgaccacggccacgatggcgacctcgggctcggcgcgaaagcggctgctcaaagaggaagacatgactaaagtggaattcgagaccagcgaggaggtggatgtgacccccacgttcgacaccatgggcctgcgggaggacctgctgcggggcatctacgcttacggttttgaaaaaccatcagcaatccagcaacgagcaatcaagcagatcatcaaagggagagatgtcatcgcacagtctcagtccggcacaggaaaaacagccaccttcagtatctcagtcctccagtgtttggatattcaggttcgtgaaactcaagctttgatcttggctcccacaagagagttggctgtgcagatccagaaggggctgcttgctctcggtgactacatgaatgtccagtgccatgcctgcattggaggcaccaatgttggcgaggacatcaggaagctggattacggacagcatgttgtcgcgggcactccagggcgtgtttttgatatgattcgtcgcagaagcctaaggacacgtgctatcaaaatgttggttttggatgaagctgatgaaatgttgaataaaggtttcaaagagcagatttacgatgtatacaggtacctgcctccagccacacaggtggttctcatcagtgccacgctgccacacgagattctggagatgaccaacaagttcatgaccgacccaatccgcatcttggtgaaacgtgatgaattgactctggaaggcatcaagcaatttttcgtggcagtggagagggaagagtggaaatttgacactctgtgtgacctctacgacacactgaccatcactcaggcggtcatcttctgcaacaccaaaagaaaggtggactggctgacggagaaaatgagggaagccaacttcactgtatcctcaatgcatggagacatgccccagaaagagcgggagtccatcatgaaggagttccggtcgggcgccagccgagtgcttatttctacagatgtctgggccagggggttggatgtccctcaggtgtccctcatcattaactatgatctccctaataacagagaattgtacatacacagaattgggagatcaggtcgatacggccggaagggtgtggccattaactttgtaaagaatgacgacatccgcatcctcagagatatcgagcagtactattccactcagattgatgagatgccgatgaacgttgctgatcttatctgaagcagcagatcagtgggatgagggagactgttcacctgctgtgtactcctgtttggaagtatttagatccagattctacttaatggggtttatatggactttcttctcataaatggcctgccgtctcccttcctttgaagaggatatggggattctgctctcttttcttatttacatgtaaataatacattgttctaataactctcattaatgtaacttcatcttttttgttgtgttgtttgttctgtt

SEQ ID NO: 319004 - DNA, 1881 bp, Homo sapiens
acgcacgtctctcgctttcgcatacttaaggcgtctgttctcggcagcggcggcacagcgaggtcggcagcggcacagcgaggtcggcagcggcacagcgaggtcggcagcggcacagcgaggtcggcagcggcacagcgaggtcggcagcggcagcgaggtcggcagcggcacagcgaggtcggcagcggcagcgaggtcggcagcggcgcgcgctgtgctcttccgcggactctgaatcatggcgaccacggccacgatggcgacctcgggctcggcgcgaaagcggctgctcaaagaggaagacatgactaaagtggaattcgagaccagcgaggaggtggatgtgacccccacgttcgacaccatgggcctgcgggaggacctgctgcggggcatctacgcttacggttttgaaaaaccatcagcaatccagcaacgagcaatcaagcagatcatcaaagggagagatgtcatcgcacagttcgtgaaactcaagctttgatcttggctcccacaagagagttggctgtgcagatccagaaggggctgcttgctctcggtgactacatgaatgtccagtgccatgcctgcattggaggcaccaatgttggcgaggacatcaggaagctggattacggacagcatgttgtcgcgggcactccagggcgtgtttttgatatgattcgtcgcagaagcctaaggacacgtgctatcaaaatgttggttttggatgaagctgatgaaatgttgaataaaggtttcaaagagcagatttacgatgtatacaggtacctgcctccagccacacaggtggttctcatcagtgccacgctgccacacgagattctggagatgaccaacaagttcatgaccgacccaatccgcatcttggtgaaacgtgatgaattgactctggaaggcatcaagcaatttttcgtggcagtggagagggaagagtggaaatttgacactctgtgtgacctctacgacacactgaccatcactcaggcggtcatcttctgcaacaccaaaagaaaggtggactggctgacggagaaaatgagggaagccaacttcactgtatcctcaatgcatggagacatgccccagaaagagcgggagtccatcatgaaggagttccggtcgggcgccagccgagtgcttatttctacagatgtctgggccagggggttggatgtccctcaggtgtccctcatcattaactatgatctccctaataacagagaattgtacatacacagaattgggagatcaggtcgatacggccggaagggtgtggccattaactttgtaaagaatgacgacatccgcatcctcagagatatcgagcagtactattccactcagattgatgagatgccgatgaacgttgctgatcttatctgaagcagcagatcagtgggatgagggagactgttcacctgctgtgtactcctgtttggaagtatttagatccagattctacttaatggggtttatatggactttcttctcataaatggcctgccgtctcccttcctttgaagaggatatggggattctgctctcttttcttatttacatgtaaataatacattgttctaagtctttttcattaaaaatttaaaacttttcccataaactctatacttctaaggtgccaccaccttctctagtaacttactgtgtagtcttgggtcatttcactcacttttctttttttcttttctttttcttttttttttttgagacagtctccctctgttgcccaggcaggagcgcagtggcgtgatctcctctcaccgcaagctccacttcctgggttcatgccattctcctacctcagcctcccacgtagctgggagtacaggcggccgc

SEQ ID NO: 319005 - DNA, 1847 bp, Homo sapiens
ccaggctggtactggtcccgaagttcgttttgaggcacagcgaggtcggcagcggcacagcgaggtcggcagcggcacagcgaggtcggcagcggcacagcgaggtcggcagcggcagcgaggtcggcagcggcacagcgaggtcggcagcggcagcgaggtcggcagcggcgcgcgctgtgctcttccgcggactctgaatcatggcgaccacggccacgatggcgacctcgggctcggcgcgaaagcggctgctcaaagaggaagacatgactaaagtggaattcgagaccagcgaggaggtggatgtgacccccacgttcgacaccatgggcctgcgggaggacctgctgcggggcatctacgcttacggttttgaaaaaccatcagcaatccagcaacgagcaatcaagcagatcatcaaagggagagatgtcatcgcacagtctcagtccggcacaggaaaaacagccaccttcagtatctcagtcctccagtgtttggatattcaggggctgcttgctctcggtgactacatgaatgtccagtgccatgcctgcattggaggcaccaatgttggcgaggacatcaggaagctggattacggacagcatgttgtcgcgggcactccagggcgtgtttttgatatgattcgtcgcagaagcctaaggacacgtgctatcaaaatgttggttttggatgaagctgatgaaatgttgaataaaggtttcaaagagcagatttacgatgtatacaggtacctgcctccagccacacaggtggttctcatcagtgccacgctgccacacgagattctggagatgaccaacaagttcatgaccgacccaatccgcatcttggtgaaacgtgatgaattgactctggaaggcatcaagcaatttttcgtggcagtggagagggaagagtggaaatttgacactctgtgtgacctctacgacacactgaccatcactcaggcggtcatcttctgcaacaccaaaagaaaggtggactggctgacggagaaaatgagggaagccaacttcactgtatcctcaatgcatggagacatgccccagaaagagcgggagtccatcatgaaggagttccggtcgggcgccagccgagtgcttatttctacagatgtctgggccagggggttggatgtccctcaggtgtccctcatcattaactatgatctccctaataacagagaattgtacatacacagaattgggagatcaggtcgatacggccggaagggtgtggccattaactttgtaaagaatgacgacatccgcatcctcagagatatcgagcagtactattccactcagattgatgagatgccgatgaacgttgctgatcttatctgaagcagcagatcagtgggatgagggagactgttcacctgctgtgtactcctgtttggaagtatttagatccagattctacttaatggggtttatatggactttcttctcataaatggcctgccgtctcccttcctttgaagaggatatggggattctgctctcttttcttatttacatgtaaataatacattgttctaagtctttttcattaaaaatttaaaacttttcccataaactctatacttctaaggtgccaccaccttctctagtaacttactgtgtagtcttgggtcatttcactcacttttctttttttcttttctttttcttttttttttttgagacagtctccctctgttgcccaggcaggagcgcagtggcgtgatctcctctcaccgcaagctccacttcctgggttcatgccattctcctacctcagcctcccacgtagctgggagtacaggcggccgc

SEQ ID NO: 319006 - DNA, 1143 bp, Homo sapiens
cccacgcgtcgcccacgcgtccgtttcaaagagcagatttacgatgtatacaggtacctgcctccagccacacaggtggttctcatcagtgccacgctgccacacgagattctggagatgaccaacaagttcatgaccgacccaatccgcatcttggtgaaacgtgatgaattgactctggaaggcatcaagcaatttttcgtggcagtggagagggaagagtggaaatttgacactctgtgtgacctctacgacacactgaccatcactcaggcggtcatcttctgcaacaccaaaagaaaggtggactggctgacggagaaaatgagggaagccaacttcactgtatcctcaatgcatggagacatgccccagaaagagcgggagtccatcatgaaggagttccggtcgggcgccagccgagtgcttatttctacagatgtctgggccagggggttggatgtccctcaggtgtccctcatcattaactatgatctccctaataacagagaattgtacatacacagaattgggagatcaggtcgatacggccggaagggtgtggccattaactttgtaaagaatgacgacatccgcatcctcagagatatcgagcagtactattccactcagattgatgagatgccgatgaacgttgctgatcttatctgaagcagcagatcagtgggatgagggagactgttcacctgctgtgtactcctgtttggaagtatttagatccagattctacttaatggggtttatatggactttcttctcataaatggcctgccgtctcccttcctttgaagaggatatggggattctgctctcttttcttatttacatgtaaataatacattgttctaagtctttttcattaaaaatttaaaacttttcccataaactctatacttctaaggtgccaccaccttctctagtaacttactgtgtagtcttgggtcatttcactcacttttctttttttcttttctttttcttttttttttttgagacagtctccctctgttgcccaggcaggagcgcagtggcgtgatctcctctcaccgcaagctccacttcctgggttcatgccattctcctacctcagcctcccacgtagctgggagtacaggcggccgc

SEQ ID NO: 319007 - DNA, 1007 bp, Homo sapiens
acgcacgtctctcgctttcgcatacttaaggcgtctgttctcggcagcggcggcacagcgaggtcggcagcggcacagcgaggtcggcagcggcacagcgaggtcggcagcggcacagcgaggtcggcagcggcacagcgaggtcggcagcggcagcgaggtcggcagcggcacagcgaggtcggcagcggcagcgaggtcggcagcggcgcgcgctgtgctcttccgcggactctgaatcatggcgaccacggccacgatggcgacctcgggctcggcgcgaaagcggctgctcaaagaggaagacatgactaaagtggaattcgagaccagcgaggaggtggatgtgacccccacgttcgacaccatgggcctgcgggaggacctgctgcggggcatctacgcttacggttttgaaaaaccatcagcaatccagcaacgagcaatcaagcagatcatcaaagggagagatgtcatcgcacagtctcagtccggcacaggaaaaacagccaccttcagtatctcagtcctccagtgtttggatattcaggttcgtgaaactcaagctttgatcttggctcccacaagagagttggctgtgcagatccagaaggggctgcttgctctcggtgactacatgaatgtccagtgccatgcctgcattggaggcaccaatgttggcgaggacatcaggaagctggattacggacagcatgttgtcgcgggcactccagggcgtgtttttgatatgattcgtcgcagaagctaggacacgtgctatcaaaggtggttggatgacgtgagcaatggtgcactacaggggtccacagagcagaattacccggtataacagggaccgggctcacggcaacccagggggcacaacaagggcacgctgacaccgaaaactgggaacgccccacagtccaggaccggcccaacggcgactgcgcacagcaccatgcactcgaggcaacaacgatctgaagccaacacagagaacacgg

SEQ ID NO: 319008 - DNA, 882 bp, Homo sapiens
cccggaagtacttgttgcctgagcagtgggctgcttaggaagagaaggtcagagttcgcgggggcagaggcattcttgccgctggcccagtcactatgtagtggaggggcagacaccctcccgcaaattctggaaggttcttagtctcgactagggcagtagccccaggactcctagtcgccggcttcaggtcactgccggctgaacggagctgccgtcgccatgtttggctgcttggtggcggggaggctggagaaggaagccaacatccttttggagccatgaatattgtccgaactccatctgttgctcagattggaatttcagtggaattattagacagtatggctcagcagactcctgtaggtaatgctgctgtatcctcagttgactcattcactcagttcacacaaaagatgttggacaatttctacaattttgcttcatcatttgctgtctctcaggcccagatgacaccaagcccatctgaaatgttcattccggcaaatgtggttctgaaatggtatgaaaactttcaaagacgactagcacagaaccctctcttttggaaaacataatttgaataaaataatttttaatggattctgaaatttgtcatgttttgaagataactgactccatctaaaagtatgaggtcaaaggatcacgaaacctaagtttaaaaactgcttagagactgaagcttaattaaaaatctttattaaaaattaaaaacattgaaaaatgaaaatatgttcatcattaaagacttttttccccttaagcttaaaataccattcaaaggcaagacattttgttttggctatgattcattttttttacttaaaaataaaacctataccaaacagtaaaaaaaaccaa

SEQ ID NO: 319009 - DNA, 841 bp, Homo sapiens
cccggaagtacttgttgcctgagcagtgggctgcttaggaagagaaggtcagagttcgcgggggcagaggcattcttgccgctggcccagtcactatgtagtggaggggcagacaccctcccgcaaattctggaaggttcttagtctcgactagggcagtagccccaggactcctagtcgccggcttcaggtcactgccggctgaacggagctgccgtcgccatgtttggctgcttggtggcggggaggctggtgcaaacagctgcacagcaagtggcagaggataaatttgtttttgacttacctgattatgaaagtatcaaccatgttgtggtttttatgctgggaacaatcccatttcctgagggaatgggaggatctgtctacttttcttatcctgattcaaatggaatgccagtatggcaactcctaggatttgtcacgaatgggaagccaagtgccatcttcaaaatttcaggtcttaaatctggagaaggaagccaacatccttttggagccatgaatattgtccgaactccatctgttgctcagattggaatttcagtggaattattagacagtatggctcagcagactcctgtaggtaatgctgctgtatcctcagttgactcattcactcagttcacacaaaagatgttggacaatttctacaattttgcttcatcatttgctgtctctcaggcccagatgacaccaagcccatctgaaatgttcattccggcaaatgtggttctgaaatggtatgaaaactttcaaagacgactagcacagaaccctctcttttggaaaacataatttgaataaaataatttttaatgga

SEQ ID NO: 319010 - DNA, 834 bp, Homo sapiens
cccggaagtacttgttgcctgagcagtgggctgcttaggaagagaaggtcagagttcgcgggggcagaggcattcttgccgctggcccagtcactatgtagtggaggggcagacaccctcccgcaaattctggaaggttcttagtctcgactagggcagtagccccaggactcctagtcgccggcttcaggtcactgccggctgaacggagctgccgtcgccatgtttggctgcttggtggcggggaggctggtgcaaacagctgcacagcaagtggcagaggataaatttgtttttgacttacctgattatgaaagtatcaaccatgttgtggtttttatgctgggaacaatcccatttcctgagggaatgggaggatctgtctacttttcttatcctgattcaaatggaatgccagtatggcaactcctaggatttgtcacgaatgggaagccaagtgccatcttcaaaatttcaggtcttaaatctggagaaggaagccaacatccttttggagccatgaatattgtccgaactccatctgttgctcagattggaatttcagtggaattattagacagtatggctcagcagactcctgtaggtaatgctgctgtatcctcagttgactcattcactcagttcacacaaaagatgttggacaatttctacaattttgcttcatcatttgctgtctctcaggcccagatgacaccaagcccatctgaaatgttcattccggcaaatgtggttctgaaatggttttgaaacttcacgacgactagacagaacctccacacgacaaccaatatctgcatcaacctactttaccgg

SEQ ID NO: 319011 - DNA, 1100 bp, Homo sapiens
tttcatatgatgaaggaattacaaagaagttagcttttgctgctgaacaaaacacctccaacctctatggcttaggacagcaatttatttaactcatgattctatttgggctgagctcagctgggtggttcttttggacttgactggacttactcatgactgtggtcagctgcaagtcagctaggtagctttgctcatgggatctggctgttagctgaggaaatgagtccaggtgtctttacttatccagcaggctctccttggcttattcctgtagtaaatcagcaaacttacaaggactagagcagatgcttgcaagtagttttgaaacctaagcttggaactggaacattatcagttctgctgcattctttaggtcaaatcaagtaagaaggccaagagggtgaagaaatagattccatctcttgagaggaggagcttcaaagtcacattgcaagggcatggacccaggtagggaaagaacttgtgacacttttgcaatttatcacaggtggtaagagtaacagggaaagctacctagatctgccttcaagagagaactatcctttgtaaagtttcaaatcaacaatatgtctactctgagctgaaattcttatactagtataactgttactgatggtttcattacactgttctaggtagcaaaagttcaggggttgtgatgctgtgatttaaaacaataatattagggttttctgagcttcttcctgaggggcaaggagatctgtggtctcatttttggcatttccacacaacatggccccccaaatcccatgatttctatttctgcttcaaaagaaaaaaccaagagcaccttctgccttgaggctggaagagacatcagtctgtctgggcttgctgaagaagggagaaaaagaacagcaagaagcaactgaacatattgatgaagtacaaaatgaagtagacttaataagccaatgaggagactttgaaaacagaacagaaatataacaaactcggccaactgttttttcagatgaggtctgaattgatagccaaaatcccaaactttggggtaacagcatttgtcaaccatccacaaatgtctgcactgcttg

SEQ ID NO: 319012 - DNA, 1703 bp, Homo sapiens
cccggaagtacttgttgcctgagcagtgggctgcttaggaagagaaggtcagagttcgcgggggcagaggcattcttgccgctggcccagtcactatgtagtggaggggcagacaccctcccgcaaattctggaaggttcttagtctcgactagggcagtagccccaggactcctagtcgccggcttcaggtcactgccggctgaacggagctgccgtcgccatgtttggctgcttggtggcggggaggctggtgcaaacagctgcacagcaagtggcagaggataaatttgtttttgacttacctgattatgaaagtatcaaccatgttgtggtttttatgctgggaacaatcccatttcctgagggaatgggaggatctgtctacttttcttatcctgattcaaatggaatgccagtatggcaactcctaggatttgtcacgaatgggaagccaagtgccatcttcaaaatttcaggtcttaaatctggagaaggaagccaacatccttttggagccatgaatattgtccgaactccatctgttgctcagattggaatttcagtggaattattagacagtatggctcagcagactcctgtaggtaatgctgctgtatcctcagttgactcattcactcagttcacacaaaagatgttggacaatttctacaattttgcttcatcatttgctgtctctcaggcccagatgacaccaagcccatctgaaatgttcattccggcaaatgtggttctgaaatggtatgaggcattttctgtctccaatattaaggctttttataactgaatatctattttgtctatgaatatattccttttttgacatttaaacatattcttttattgtgaacatcagcactgcatgccattaaagtatgtactatagagatctgatgagaaacagttcttaccctaaatattttgttatattgtctccattatgaatttataaagacaggaaaatatagttgcctatgttttagggaccactattaaagcttataaatatttgtgtattttcatttagaagtaccatctatgagagtagtttatactgcactgtgtacatgaatggctaatgaatctattttccaactttcccgtgttttatagatatttcttttcactttgagtatcctagagatgggaggatgcctaggaagagtttgttgagaagtggtaccatggtgtagcatggagagcattggaatgcactaggtttgaattttggcataatgtagctatgtgaccctgagcaaatttctctcatctgctcatctgtggaatgaggaaataggagttgaatttgatttttttccttaggtcccttctaggtcttaaatttgcagaagataaacaattactaaaatttcttatgatttgtgctctctgataaaagctaatcaaaactgccccgatatttaaattcctatgcttgctgtctttttataagaataattacatttccagattatctttttagattttttatagctttttagaaatgacatgtaaaattgttttggataagtcatttggcagttaatgaaagatcctattttaattttcttgtgaatgtaaatatatgtgttttcttttctaggtatgaaaactttcaaagacgactagcacagaaccctctcttttggaaaacataatttgaataaaataatttttaatgga

SEQ ID NO: 319013 - DNA, 1331 bp, Homo sapiens
cccggaagtacttgttgcctgagcagtgggctgcttaggaagagaaggtcagagttcgcgggggcagaggcattcttgccgctggcccagtcactatgtagtggaggggcagacaccctcccgcaaattctggaaggttcttagtctcgactagggcagtagccccaggactcctagtcgccggcttcaggtcactgccggctgaacggagctgccgtcgccatgtttggctgcttggtggcggggaggctggtgcaaacagctgcacagcaagtggcagaggataaatttgtttttgacttacctgattatgaaagtatcaaccatgttgtggtttttatgctgggaacaatcccatttcctgagggaatgggaggatctgtctacttttcttatcctgattcaaatggaatgccagtatggcaactcctaggatttgtcacgaatgggaagccaagtgccatcttcaaaatttcaggtcttaaatctggagaaggaagccaacatccttttggagccatgaatattgtccgaactccatctgttgctcagattggaatttcagtggaattattagacagtatggctcagcagactcctgtaggtaatgctgctgtatcctcagttgactcattcactcagttcacacaaaagatgttggacaatttctacaattttgcttcatcatttgctgtctctcaggcccagatgacaccaagcccatctgaaatgttcattccggcaaatgtggttctgaaatgatatttcttttcactttgagtatcctagagatgggaggatgcctaggaagagtttgttgagaagtggtaccatggtgtagcatggagagcattggaatgcactaggtttgaattttggcataatgtagctatgtgaccctgagcaaatttctctcatctgctcatctgtggaatgaggaaataggagttgaatttgatttttttccttaggtcccttctaggtcttaaatttgcagaagataaacaattactaaaatttcttatgatttgtgctctctgataaaagctaatcaaaactgccccgatatttaaattcctatgcttgctgtctttttataagaataattacatttccagattatctttttagattttttatagctttttagaaatgacatgtaaaattgttttggataagtcatttggcagttaatgaaagatcctattttaattttcttgtgaatgtaaatatatgtgttttcttttctaggtatgaaaactttcaaagacgactagcacagaaccctctcttttggaaaacataatttgaataaaataatttttaatgga

SEQ ID NO: 319014 - DNA, 946 bp, Homo sapiens
cccggaagtacttgttgcctgagcagtgggctgcttaggaagagaaggtcagagttcgcgggggcagaggcattcttgccgctggcccagtcactatgtagtggaggggcagacaccctcccgcaaattctggaaggttcttagtctcgactagggcagtagccccaggactcctagtcgccggcttcaggtcactgccggctgaacggagctgccgtcgccatgtttggctgcttggtggcggggaggctggtgcaaacagctgcacagcaagtggcagaggataaatttgtttttgacttacctgattatgaaagtatcaaccatgttgtggtttttatgctgggaacaatcccatttcctgagggaatgggaggatctgtctacttttcttatcctgattcaaatggaatgccagtatggcaactcctaggatttgtcacgaatgggaagccaagtgccatcttcaaaatttcaggtcttaaatctggagaaggaagccaacatccttttggagccatgaatattgtccgaactccatctgttgctcagattggaatttcagtggaattattagacagtatggctcagcagactcctgtaggtaatgctgctgtatcctcagttgactcattcactcagttcacacaaaagatgttggacaatttctacaattttgcttcatcatttgctgtctctcaggcccagatgacaccaagcccatctgaaatgttcattccggcaaatgtggttctgaaatgatatttcttttcactttgagtatcctagagatgggaggatgcctaggaagagtttgttgagaagtggtaccatggtgtagcatggagagcattggaatgcactaggtatgaaaactttcaaagacgactagcacagaaccctctcttttggaaaacataatttgaataaaataatttttaatgga

SEQ ID NO: 319015 - DNA, 1015 bp, Homo sapiens
cccggaagtacttgttgcctgagcagtgggctgcttaggaagagaaggtcagagttcgcgggggcagaggcattcttgccgctggcccagtcactatgtagtggaggggcagacaccctcccgcaaattctggaaggttcttagtctcgactagggcagtagccccaggactcctagtcgccggcttcaggtcactgccggctgaacggagctgccgtcgccatgtttggctgcttggtggcggggaggctgttctaagaagccagaaagataagttggagatgactagcctcataaagtttgtctcttgaatgactgggagacccctgtggtgatggtggtaattcataatcctggtgagataattttgccctgctcttaatagggaaaaaggacaaacctggaatgattgtgtgactcagacgagtgcaaacagctgcacagcaagtggcagaggataaatttgtttttgacttacctgattatgaaagtatcaaccatgttgtggtttttatgctgggaacaatcccatttcctgagggaatgggaggatctgtctacttttcttatcctgattcaaatggaatgccagtatggcaactcctaggatttgtcacgaatgggaagccaagtgccatcttcaaaatttcaggtcttaaatctggagaaggaagccaacatccttttggagccatgaatattgtccgaactccatctgttgctcagattggaatttcagtggaattattagacagtatggctcagcagactcctgtaggtaatgctgctgtatcctcagttgactcattcactcagttcacacaaaagatgttggacaatttctacaattttgcttcatcatttgctgtctctcaggcccagatgacaccaagcccatctgaaatgttcattccggcaaatgtggttctgaaatggtatgaaaactttcaaagacgactagcacagaaccctctcttttggaaaacataatttgaataaaataatttttaatgga

SEQ ID NO: 319016 - DNA, 2180 bp, Homo sapiens
cccggaagtacttgttgcctgagcagtgggctgcttaggaagagaaggtcagagttcgcgggggcagaggcattcttgccgctggcccagtcactatgtagtggaggggcagacaccctcccgcaaattctggaaggttcttagtctcgactagggcagtagccccaggactcctagtcgccggcttcaggtcactgccggctgaacggagctgccgtcgccatgtttggctgcttggtggcggggaggctggtgcaaacagctgcacagcaagtggcagaggataaatttgtttttgacttacctgattatgaaagtatcaaccatgttgtggtttttatgctgggaacaatcccatttcctgagggaatgggaggatctgtctacttttcttatcctgattcaaatggaatgccagtatggcaactcctaggatttgtcacgaatgggaagccaagtgccatcttcaaaatttcaggtcttaaatctggtaattattgaacatctacttgctgcctactttcaacatctgcatgtgtgtgtgaatattaaatatcacaccaagacattgttcagaggagacagaatagtgagctgagataaatgagaatctctctatggaagattagactggagcatgaacttgaaatatgagagaaggaagccaacatccttttggagccatgaatattgtccgaactccatctgttgctcagattggaatttcagtggaattattagacagtatggctcagcagactcctgtaggtaatgctgctgtatcctcagttgactcattcactcaggtaaaagacttcttagagatggttactattttatatgagaaaataggttgatttgaggagagtgataattgaggagggacatagtggatgcagacatggagatgaaagaaaatattttgaagaaaaatttttttctttttttttccccaaaggcctcactatgttgcacaggctggtcttgaatgcctggcctcaagtgattctcctgcctcagcctcccaaagttttgggattacaggcatgagccaccgcacccagccagctttcagcattagactctcttagaactgacactccctataaacaagttaatttcacacaaaagatgttggacaatttctacaattttgcttcatcatttgctgtctctcaggcccagatgacaccaagcccatctgaaatgttcattccggcaaatgtggttctgaaatggtatgaggcattttctgtctccaatattaaggctttttataactgaatatctattttgtctatgaatatattccttttttgacatttaaacatattcttttattgtgaacatcagcactgcatgccattaaagtatgtactatagagatctgatgagaaacagttcttaccctaaatattttgttatattgtctccattatgaatttataaagacaggaaaatatagttgcctatgttttagggaccactattaaagcttataaatatttgtgtattttcatttagaagtaccatctatgagagtagtttatactgcactgtgtacatgaatggctaatgaatctattttccaactttcccgtgttttatagatatttcttttcactttgagtatcctagagatgggaggatgcctaggaagagtttgttgagaagtggtaccatggtgtagcatggagagcattggaatgcactaggtttgaattttggcataatgtagctatgtgaccctgagcaaatttctctcatctgctcatctgtggaatgaggaaataggagttgaatttgatttttttccttaggtcccttctaggtcttaaatttgcagaagataaacaattactaaaatttcttatgatttgtgctctctgataaaagctaatcaaaactgccccgatatttaaattcctatgcttgctgtctttttataagaataattacatttccagattatctttttagattttttatagctttttagaaatgacatgtaaaattgttttggataagtcatttggcagttaatgaaagatcctattttaattttcttgtgaatgtaaatatatgtgttttcttttctaggtatgaaaactttcaaagacgactagcacagaaccctctcttttggaaaacataatttgaataaaataatttttaatgga

SEQ ID NO: 319017 - DNA, 1060 bp, Homo sapiens
tttcatatgatgaaggaattacaaagaagttagcttttgctgctgaacaaaacacctccaacctctatggcttaggacagcaatttatttaactcatgattctatttgggctgagctcagctgggtggttcttttggacttgactggacttactcatgactgtggtcagctgcaagtcagctaggtagctttgctcatgggatctggctgttagctgaggaaatgagtccaggtgtctttacttatccagcaggctctccttggcttattcctgtagtaaatcagcaaacttacaaggactagagcagatgcttgcaagtagttttgaaacctaagcttggaactggaacattatcagttctgctgcattctttaggtcaaatcaagtaagaaggccaagagggtgaagaaatagattccatctcttgagaggaggagcttcaaagtcacattgcaagggcatggacccaggtgcaaacagctgcacagcaagtggcagaggataaatttgtttttgacttacctgattatgaaagtatcaaccatgttgtggtttttatgctgggaacaatcccatttcctgagggaatgggaggatctgtctacttttcttatcctgattcaaatggaatgccagtatggcaactcctaggatttgtcacgaatgggaagccaagtgccatcttcaaaatttcaggtcttaaatctggagaaggaagccaacatccttttggagccatgaatattgtccgaactccatctgttgctcagattggaatttcagtggaattattagacagtatggctcagcagactcctgtaggtaatgctgctgtatcctcagttgactcattcactcagttcacacaaaagatgttggacaatttctacaattttgcttcatcatttgctgtctctcaggcccagatgacaccaagcccatctgaaatgttcattccggcaaatgtggttctgaaatggtatgaaaactttcaaagacgactagcacagaaccctctcttttggaaaacataatttgaataaaataatttttaatgga

SEQ ID NO: 319018 - DNA, 1827 bp, Homo sapiens
cccggaagtacttgttgcctgagcagtgggctgcttaggaagagaaggtcagagttcgcgggggcagaggcattcttgccgctggcccagtcactatgtagtggaggggcagacaccctcccgcaaattctggaaggttcttagtctcgactagggcagtagccccaggactcctagtcgccggcttcaggtcactgccggctgaacggagctgccgtcgccatgtttggctgcttggtggcggggaggctggtgcaaacagctgcacagcaagtggcagaggataaatttgtttttgacttacctgattatgaaagtatcaaccatgttgtggtttttatgctgggaacaatcccatttcctgagggaatgggaggatctgtctacttttcttatcctgattcaaatggaatgccagtatggcaactcctaggatttgtcacgaatgggaagccaagtgccatcttcaaaatttcaggtcttaaatctgagacaggatcttactctgttttccaggctggagtgcaatgtccacattatagctcactatagcttcaaactcctgggctcaagccatcctcctgccttagcctcctgagtagctaggactacaggagaaggaagccaacatccttttggagccatgaatattgtccgaactccatctgttgctcagattggaatttcagtggaattattagacagtatggctcagcagactcctgtaggtaatgctgctgtatcctcagttgactcattcactcagttcacacaaaagatgttggacaatttctacaattttgcttcatcatttgctgtctctcaggcccagatgacaccaagcccatctgaaatgttcattccggcaaatgtggttctgaaatggtatgaggcattttctgtctccaatattaaggctttttataactgaatatctattttgtctatgaatatattccttttttgacatttaaacatattcttttattgtgaacatcagcactgcatgccattaaagtatgtactatagagatctgatgagaaacagttcttaccctaaatattttgttatattgtctccattatgaatttataaagacaggaaaatatagttgcctatgttttagggaccactattaaagcttataaatatttgtgtattttcatttagaagtaccatctatgagagtagtttatactgcactgtgtacatgaatggctaatgaatctattttccaactttcccgtgttttatagatatttcttttcactttgagtatcctagagatgggaggatgcctaggaagagtttgttgagaagtggtaccatggtgtagcatggagagcattggaatgcactaggtttgaattttggcataatgtagctatgtgaccctgagcaaatttctctcatctgctcatctgtggaatgaggaaataggagttgaatttgatttttttccttaggtcccttctaggtcttaaatttgcagaagataaacaattactaaaatttcttatgatttgtgctctctgataaaagctaatcaaaactgccccgatatttaaattcctatgcttgctgtctttttataagaataattacatttccagattatctttttagattttttatagctttttagaaatgacatgtaaaattgttttggataagtcatttggcagttaatgaaagatcctattttaattttcttgtgaatgtaaatatatgtgttttcttttctaggtatgaaaactttcaaagacgactagcacagaaccctctcttttggaaaacataatttgaataaaataatttttaatgga

SEQ ID NO: 319019 - DNA, 1465 bp, Homo sapiens
cccggaagtacttgttgcctgagcagtgggctgcttaggaagagaaggtcagagttcgcgggggcagaggcattcttgccgctggcccagtcactatgtagtggaggggcagacaccctcccgcaaattctggaaggttcttagtctcgactagggcagtagccccaggactcctagtcgccggcttcaggtcactgccggctgaacggagctgccgtcgccatgtttggctgcttggtggcggggaggctggagaaggaagccaacatccttttggagccatgaatattgtccgaactccatctgttgctcagattggaatttcagtggaattattagacagtatggctcagcagactcctgtaggtaatgctgctgtatcctcagttgactcattcactcagttcacacaaaagatgttggacaatttctacaattttgcttcatcatttgctgtctctcaggcccagatgacaccaagcccatctgaaatgttcattccggcaaatgtggttctgaaatggtatgaggcattttctgtctccaatattaaggctttttataactgaatatctattttgtctatgaatatattccttttttgacatttaaacatattcttttattgtgaacatcagcactgcatgccattaaagtatgtactatagagatctgatgagaaacagttcttaccctaaatattttgttatattgtctccattatgaatttataaagacaggaaaatatagttgcctatgttttagggaccactattaaagcttataaatatttgtgtattttcatttagaagtaccatctatgagagtagtttatactgcactgtgtacatgaatggctaatgaatctattttccaactttcccgtgttttatagatatttcttttcactttgagtatcctagagatgggaggatgcctaggaagagtttgttgagaagtggtaccatggtgtagcatggagagcattggaatgcactaggtttgaattttggcataatgtagctatgtgaccctgagcaaatttctctcatctgctcatctgtggaatgaggaaataggagttgaatttgatttttttccttaggtcccttctaggtcttaaatttgcagaagataaacaattactaaaatttcttatgatttgtgctctctgataaaagctaatcaaaactgccccgatatttaaattcctatgcttgctgtctttttataagaataattacatttccagattatctttttagattttttatagctttttagaaatgacatgtaaaattgttttggataagtcatttggcagttaatgaaagatcctattttaattttcttgtgaatgtaaatatatgtgttttcttttctaggtatgaaaactttcaaagacgactagcacagaaccctctcttttggaaaacataatttgaataaaataatttttaatgga

SEQ ID NO: 319020 - DNA, 1154 bp, Homo sapiens
cccggaagtacttgttgcctgagcagtgggctgcttaggaagagaaggtcagagttcgcgggggcagaggcattcttgccgctggcccagtcactatgtagtggaggggcagacaccctcccgcaaattctggaaggttcttagtctcgactagggcagtagccccaggactcctagtcgccggcttcaggtcactgccggctgaacggagctgccgtcgccatgtttggctgcttggtggcggggaggctggtgcaaacagctgcacagcaagtggcagaggataaatttgtttttgacttacctgattatgaaagtatcaaccatgttgtggtttttatgctgggaacaatcccatttcctgagggaatgggaggatctgtctacttttcttatcctgattcaaatggaatgccagtatggcaactcctaggatttgtcacgaatgggaagccaagtgccatcttcaaaatttcaggtcttaaatctggagaaggaagccaacatccttttggagccatgaatattgtccgaactccatctgttgctcagattggaatttcagtggaattattagacagtatggctcagcagactcctgtaggtaatgctgctgtatcctcagttgactcattcactcaggtaaaagacttcttagagatggttactattttatatgagaaaataggttgatttgaggagagtgataattgaggagggacatagtggatgcagacatggagatgaaagaaaatattttgaagaaaaatttttttctttttttttccccaaaggcctcactatgttgcacaggctggtcttgaatgcctggcctcaagtgattctcctgcctcagcctcccaaagttttgggattacaggcatgagccaccgcacccagccagctttcagcattagactctcttagaactgacactccctataaacaagttaatttcacacaaaagatgttggacaatttctacaattttgcttcatcatttgctgtctctcaggcccagatgacaccaagcccatctgaaatgttcattccggcaaatgtggttctgaaatggtatgaaaactttcaaagacgactagcacagaaccctctcttttggaaaacataatttgaataaaataatttttaatgga

SEQ ID NO: 319021 - DNA, 603 bp, Homo sapiens
cccggaagtacttgttgcctgagcagtgggctgcttaggaagagaaggtcagagttcgcgggggcagaggcattcttgccgctggcccagtcactatgtagtggaggggcagacaccctcccgcaaattctggaaggttcttagtctcgactagggcagtagccccaggactcctagtcgccggcttcaggtcactgccggctgaacggagctgccgtcgccatgtttggctgcttggtggcggggaggctggagaaggaagccaacatccttttggagccatgaatattgtccgaactccatctgttgctcagattggaatttcagtggaattattagacagtatggctcagcagactcctgtaggtaatgctgctgtatcctcagttgactcattcactcagttcacacaaaagatgttggacaatttctacaattttgcttcatcatttgctgtctctcaggcccagatgacaccaagcccatctgaaatgttcattccggcaaatgtggttctgaaatggtatgaaaactttcaaagacgactagcacagaaccctctcttttggaaaacataatttgaataaaataatttttaatgga

SEQ ID NO: 319022 - DNA, 987 bp, Homo sapiens
cccggaagtacttgttgcctgagcagtgggctgcttaggaagagaaggtcagagttcgcgggggcagaggcattcttgccgctggcccagtcactatgtagtggaggggcagacaccctcccgcaaattctggaaggttcttagtctcgactagggcagtagccccaggactcctagtcgccggcttcaggtcactgccggctgaacggagctgccgtcgccatgtttggctgcttggtggcggggaggctggagaaggaagccaacatccttttggagccatgaatattgtccgaactccatctgttgctcagattggaatttcagtggaattattagacagtatggctcagcagactcctgtaggtaatgctgctgtatcctcagttgactcattcactcagttcacacaaaagatgttggacaatttctacaattttgcttcatcatttgctgtctctcaggcccagatgacaccaagcccatctgaaatgttcattccggcaaatgtggttctgaaatgatatttcttttcactttgagtatcctagagatgggaggatgcctaggaagagtttgttgagaagtggtaccatggtgtagcatggagagcattggaatgcactaggtatgaaaactttcaaagacgactagcacagaaccctctcttttggaaaacataatttgaataaaataatttttaatggattctgaaatttgtcatgttttgaagataactgactccatctaaaagtatgaggtcaaaggatcacgaaacctaagtttaaaaactgcttagagactgaagcttaattaaaaatctttattaaaaattaaaaacattgaaaaatgaaaatatgttcatcattaaagacttttttccccttaagcttaaaataccattcaaaggcaagacattttgttttggctatgattcattttttttacttaaaaataaaacctataccaaacagtaaaaaaaaccaa

SEQ ID NO: 319023 - DNA, 371 bp, Homo sapiens
gattaggaaacagaggaaatggaatagtgctgcctttatcttctttccagcaatggaaataaccagttgctcctttataatatgtaaactcttatctttctggcaggtaaaagacttcttagagatggttactattttatatgagaaaataggttgatttgaggagagtgataattgaggagggacatagtggatgcagacatggagatgaaagaaaatattttgaagaaaaatttttttctttttttttccccaaagtgagtagcatatttcacagtgtcattgtatgtatgattactcttaacattcttttttattcatttatttaattttatttttttgacacagggcctcactatgttgcacaggct

SEQ ID NO: 319024 - DNA, 331 bp, Homo sapiens
gctttttaaaatgttgcagtccctttgctgaattgtctttttttcccatcaagttttgataatgtattgtattctgtacatatacagttctaagaagccagaaagataagttggagatgactagcctcataaagtttgtctcttgaatgactgggagacccctgtggtgatggtggtaattcataatcctggtgagataattttgccctgctcttaatagggaaaaaggacaaacctggaatgattgtgtgactcagacgagtgagtgttattaatgaatgacattaaaattgtgtttcttaaagaataaaaagcctatttggaatccatg

SEQ ID NO: 319025 - DNA, 1120 bp, Homo sapiens
cccggaagtacttgttgcctgagcagtgggctgcttaggaagagaaggtcagagttcgcgggggcagaggcattcttgccgctggcccagtcactatgtagtggaggggcagacaccctcccgcaaattctggaaggttcttagtctcgactagggcagtagccccaggactcctagtcgccggcttcaggtcactgccggctgaacggagctgccgtcgccatgtttggctgcttggtggcggggaggctggtgcaaacagctgcacagcaagtggcagaggataaatttgtttttgacttacctgattatgaaagtatcaaccatgttgtggtttttatgctgggaacaatcccatttcctgagggaatgggaggatctgtctacttttcttatcctgattcaaatggaatgccagtatggcaactcctaggatttgtcacgaatgggaagccaagtgccatcttcaaaatttcaggtcttaaatctggagaaggaagccaacatccttttggagccatgaatattgtccgaactccatctgttgctcagattggaatttcagtggaattattagacagtatggctcagcagactcctgtaggtaatgctgctgtatcctcagttgactcattcactcagttcacacaaaagatgttggacaatttctacaattttgcttcatcatttgctgtctctcaggcccagatgacaccaagcccatctgaaatgttcattccggcaaatgtggttctgaaatggtatgaaaactttcaaagacgactagcacagaaccctctcttttggaaaacataatttgaataaaataatttttaatggattctgaaatttgtcatgttttgaagataactgactccatctaaaagtatgaggtcaaaggatcacgaaacctaagtttaaaaactgcttagagactgaagcttaattaaaaatctttattaaaaattaaaaacattgaaaaatgaaaatatgttcatcattaaagacttttttccccttaagcttaaaataccattcaaaggcaagacattttgttttggctatgattcattttttttacttaaaaataaaacctataccaaacagtaaaaaaaaccaa

SEQ ID NO: 319026 - DNA, 1982 bp, Homo sapiens
cccggaagtacttgttgcctgagcagtgggctgcttaggaagagaaggtcagagttcgcgggggcagaggcattcttgccgctggcccagtcactatgtagtggaggggcagacaccctcccgcaaattctggaaggttcttagtctcgactagggcagtagccccaggactcctagtcgccggcttcaggtcactgccggctgaacggagctgccgtcgccatgtttggctgcttggtggcggggaggctggtgcaaacagctgcacagcaagtggcagaggataaatttgtttttgacttacctgattatgaaagtatcaaccatgttgtggtttttatgctgggaacaatcccatttcctgagggaatgggaggatctgtctacttttcttatcctgattcaaatggaatgccagtatggcaactcctaggatttgtcacgaatgggaagccaagtgccatcttcaaaatttcaggtcttaaatctggagaaggaagccaacatccttttggagccatgaatattgtccgaactccatctgttgctcagattggaatttcagtggaattattagacagtatggctcagcagactcctgtaggtaatgctgctgtatcctcagttgactcattcactcagttcacacaaaagatgttggacaatttctacaattttgcttcatcatttgctgtctctcaggcccagatgacaccaagcccatctgaaatgttcattccggcaaatgtggttctgaaatggtatgaggcattttctgtctccaatattaaggctttttataactgaatatctattttgtctatgaatatattccttttttgacatttaaacatattcttttattgtgaacatcagcactgcatgccattaaagtatgtactatagagatctgatgagaaacagttcttaccctaaatattttgttatattgtctccattatgaatttataaagacaggaaaatatagttgcctatgttttagggaccactattaaagcttataaatatttgtgtattttcatttagaagtaccatctatgagagtagtttatactgcactgtgtacatgaatggctaatgaatctattttccaactttcccgtgttttatagatatttcttttcactttgagtatcctagagatgggaggatgcctaggaagagtttgttgagaagtggtaccatggtgtagcatggagagcattggaatgcactaggtttgaattttggcataatgtagctatgtgaccctgagcaaatttctctcatctgctcatctgtggaatgaggaaataggagttgaatttgatttttttccttaggtcccttctaggtcttaaatttgcagaagataaacaattactaaaatttcttatgatttgtgctctctgataaaagctaatcaaaactgccccgatatttaaattcctatgcttgctgtctttttataagaataattacatttccagattatctttttagattttttatagctttttagaaatgacatgtaaaattgttttggataagtcatttggcagttaatgaaagatcctattttaattttcttgtgaatgtaaatatatgtgttttcttttctaggtatgaaaactttcaaagacgactagcacagaaccctctcttttggaaaacataatttgaataaaataatttttaatggattctgaaatttgtcatgttttgaagataactgactccatctaaaagtatgaggtcaaaggatcacgaaacctaagtttaaaaactgcttagagactgaagcttaattaaaaatctttattaaaaattaaaaacattgaaaaatgaaaatatgttcatcattaaagacttttttccccttaagcttaaaataccattcaaaggcaagacattttgttttggctatgattcattttttttacttaaaaataaaacctataccaaacagtaaaaaaaaccaa

SEQ ID NO: 319027 - DNA, 926 bp, Homo sapiens
cccggaagtacttgttgcctgagcagtgggctgcttaggaagagaaggtcagagttcgcgggggcagaggcattcttgccgctggcccagtcactatgtagtggaggggcagacaccctcccgcaaattctggaaggttcttagtctcgactagggcagtagccccaggactcctagtcgccggcttcaggtcactgccggctgaacggagctgccgtcgccatgtttggctgcttggtggcggggaggctggtgcaaacagctgcacagcaagtggcagaggataaatttgtttttgacttacctgattatgaaagtatcaaccatgttgtggtttttatgctgggaacaatcccatttcctgagggaatgggaggatctgtctacttttcttatcctgattcaaatggaatgccagtatggcaactcctaggatttgtcacgaatgggaagccaagtgccatcttcaaaatttcaggtcttaaatctggagaaggaagccaacatccttttggagccatgaatattgtccgaactccatctgttgctcagattggaatttcagtggaattattagacagtatggctcagcagactcctgtaggtaatgctgctgtatcctcagttgactcattcactcagttcacacaaaagatgttggacaatttctacaattttgcttcatcatttgctgtctctcaggcccagatgacaccaagcccatctgaaatgttcattccggcaaatgtggttctgaaatgtatcctagagatgggaggatgcctaggaagagtttgttgagaagtggtaccatggtgtagcatggagagcattggaatgcactaggtatgaaaactttcaaagacgactagcacagaaccctctcttttggaaaacataatttgaataaaataatttttaatgga

SEQ ID NO: 319028 - DNA, 1867 bp, Homo sapiens
cccggaagtacttgttgcctgagcagtgggctgcttaggaagagaaggtcagagttcgcgggggcagaggcattcttgccgctggcccagtcactatgtagtggaggggcagacaccctcccgcaaattctggaaggttcttagtctcgactagggcagtagccccaggactcctagtcgccggcttcaggtcactgccggctgaacggagctgccgtcgccatgtttggctgcttggtggcggggaggctggtgcaaacagctgcacagcaagtggcagaggataaatttgtttttgacttacctgattatgaaagtatcaaccatgttgtggtttttatgctgggaacaatcccatttcctgagggaatgggaggatctgtctacttttcttatcctgattcaaatggaatgccagtatggcaactcctaggatttgtcacgaatgggaagccaagtgccatcttcaaaatttcaggtcttaaatctggtaattattgaacatctacttgctgcctactttcaacatctgcatgtgtgtgtgaatattaaatatcacaccaagacattgttcagaggagacagaatagtgagctgagataaatgagaatctctctatggaagattagactggagcatgaacttgaaatatgagagaaggaagccaacatccttttggagccatgaatattgtccgaactccatctgttgctcagattggaatttcagtggaattattagacagtatggctcagcagactcctgtaggtaatgctgctgtatcctcagttgactcattcactcagttcacacaaaagatgttggacaatttctacaattttgcttcatcatttgctgtctctcaggcccagatgacaccaagcccatctgaaatgttcattccggcaaatgtggttctgaaatggtatgaggcattttctgtctccaatattaaggctttttataactgaatatctattttgtctatgaatatattccttttttgacatttaaacatattcttttattgtgaacatcagcactgcatgccattaaagtatgtactatagagatctgatgagaaacagttcttaccctaaatattttgttatattgtctccattatgaatttataaagacaggaaaatatagttgcctatgttttagggaccactattaaagcttataaatatttgtgtattttcatttagaagtaccatctatgagagtagtttatactgcactgtgtacatgaatggctaatgaatctattttccaactttcccgtgttttatagatatttcttttcactttgagtatcctagagatgggaggatgcctaggaagagtttgttgagaagtggtaccatggtgtagcatggagagcattggaatgcactaggtttgaattttggcataatgtagctatgtgaccctgagcaaatttctctcatctgctcatctgtggaatgaggaaataggagttgaatttgatttttttccttaggtcccttctaggtcttaaatttgcagaagataaacaattactaaaatttcttatgatttgtgctctctgataaaagctaatcaaaactgccccgatatttaaattcctatgcttgctgtctttttataagaataattacatttccagattatctttttagattttttatagctttttagaaatgacatgtaaaattgttttggataagtcatttggcagttaatgaaagatcctattttaattttcttgtgaatgtaaatatatgtgttttcttttctaggtatgaaaactttcaaagacgactagcacagaaccctctcttttggaaaacataatttgaataaaataatttttaatgga

SEQ ID NO: 319029 - DNA, 696 bp, Homo sapiens
  misc_feature (1)..(2): n is a, c, g, or t
  misc_feature (20)..(20): n is a, c, g, or t
  misc_feature (23)..(23): n is a, c, g, or t
  misc_feature (29)..(29): n is a, c, g, or t
nnttcagcttgcactcgcanatntgggcnagttcttggggcgagagaatccattccatctcttgagaggaggagcttcaaagtcacattgcaagggcatggacccaggtgcaaacagctgcacagcaagtggcagaggataaatttgtttttgacttacctgattatgaaagtatcaaccatgttgtggtttttatgctgggaacaatcccatttcctgagggaatgggaggatctgtctacttttcttatcctgattcaaatggaatgccagtatggcaactcctaggatttgtcacgaatgggaagccaagtgccatcttcaaaatttcaggtcttaaatctggagaaggaagccaacatccttttggagccatgaatattgtccgaactccatctgttgctcagattggaatttcagtggaattattagacagtatggctcagcagactcctgtaggtaatgctgctgtatcctcagttgactcattcactcagttcacacaaaagatgttggacaatttctacaattttgcttcatcatttgctgtctctcaggcccagatgacaccaagcccatctgaaatgttcattccggcaaatgtggttctgaaatggtatgaaaactttcaaagacgactagcacagaaccctctcttttggaaaacataatttgaataaaataatttttaatgga

SEQ ID NO: 319030 - DNA, 799 bp, Homo sapiens
cccggaagtacttgttgcctgagcagtgggctgcttaggaagagaaggtcagagttcgcgggggcagaggcattcttgccgctggcccagtcactatgtagtggaggggcagacaccctcccgcaaattctggaaggttcttagtctcgactagggcagtagccccaggactcctagtcgccggcttcaggtcactgccggctgaacggagctgccgtcgccatgtttggctgcttggtggcggggaggctggtgcaaacagctgcacagcaagtggcagaggataaatttgtttttgacttacctgattatgaaagtatcaaccatgttgtggtttttatgctgggaacaatcccatttcctgagggaatgggaggatctgtctacttttcttatcctgattcaaatggaatgccagtatggcaactcctaggatttgtcacgaatgggaagccaagtgccatcttcaaaatttcaggtcttaaatctggagaaggaagccaacatccttttggagccatgaatattgtccgaactccatctgttgctcagattggaatttcagtggaattattagacagtatggctcagcagactcctttcacacaaaagatgttggacaatttctacaattttgcttcatcatttgctgtctctcaggcccagatgacaccaagcccatctgaaatgttcattccggcaaatgtggttctgaaatggtatgaaaactttcaaagacgactagcacagaaccctctcttttggaaaacataatttgaataaaataatttttaatgga

SEQ ID NO: 319031 - DNA, 5873 bp, Homo sapiens
  misc_feature (4646)..(4646): n is a, c, g, or t
  misc_feature (4844)..(4844): n is a, c, g, or t
  misc_feature (5492)..(5492): n is a, c, g, or t
  misc_feature (5620)..(5620): n is a, c, g, or t
ggagcctaccataagcacctcatggaactcgctcttcagcaaacatatcaggacacctgtaattgcatcaagtcgcggatcaagttggaatttgaaaaacgtcaacaggagcggcttctgctctccctgctgccggcccacatcgccatggagatgaaagcggagatcatccagaggctgcagggccccaaggcgggccagatggagaacacaaataacttccacaacctgtatgtgaagcggcatacaaacgtgagcatcttatacgctgacatcgttggctttacccggctggcaagtgactgctccccgggagaactagtccacatgctgaatgagctctttggaaagtttgatcaaattgcaaaggagaatgaatgcatgagaattaaaattttaggagactgctactactgtgtatctggactccctatatctctccctaaccatgccaagaactgtgtgaaaatggggctggacatgtgtgaagccataaagaaagtgagggatgctactggagttgatatcaacatgcgcgtgggcgtgcattctgggaatgtcctgtgtggcgtgattggtctgcagaagtggcaatatgatgtgtggtcacatgatgtgaccttggccaaccacatggaagctggaggggtccctggacgtgttcacatttcttctgtcaccctggagcacttgaatggcgcttataaagtggaggagggagatggtgacattagggacccatatttaaaacagcacctggtgaaaacctactttgtgatcaaccccaagggagaacgacggagcccccagcatctcttcagacctcgccacacccttgatggagccaaaatgagggcctcggtccgcatgacccggtacttggagtcctggggggcagccaagccctttgcacacctacatcacagggacagcatgaccacagagaacggcaagatcagcaccacggatgtacccatgggtcagcataattttcaaaatcgcaccttaagaaccaagtcacaaaagaagagatttgaagaagaattgaatgaaaggatgattcaagcaattgatgggattaatgcacagaagcaatggctcaagtctgaagacattcagagaatctcactgcttttctataacaaagtactagaaaaagagtaccgggccacggcactgccagcgttcaagtattatgtgacttgtgcctgtctcatattcttctgcatcttcattgtgcagattctcgtgctgccaaaaacgtctgtcctgggcatctcctttggggctgcgtttctcttgctggccttcatcctcttcgtctgctttgctggacagcttctgcaatgcagcaaaaaagcctctcccctgctcatgtggcttttgaagtcctcgggcatcattgccaaccgcccctggccacggatctctctcacgatcatcaccacagccatcatattaatgatggccgtgttcaacatgtttttcctgagtgactcagaggaaacaatccctccaactgccaacacaacaaacacaagcttttcagcctcaaataatcaggtggcgattctgcgtgcgcagaatttatttttcctcccgtactttatctacagctgcattctgggactgatatcctgttccgtgttcctgcgggtaaactatgagctgaagatgttgatcatgatggtggccttggtgggctacaacaccatcctactccacacccacgcccacgtcctgggcgactacagccaggtcttatttgagagaccaggcatttggaaagacctgaagaccatgggctctgtgtctctctctatattcttcatcacactgcttgttctgggtagacagaatgaatattactgtaggttagacttcttatggaagaacaaattcaaaaaagagcgggaggagatagagaccatggagaacctgaaccgcgtgctgctggagaacgtgcttcccgcgcacgtggctgagcacttcctggccaggagcctgaagaatgaggagctataccaccagtcctatgactgcgtctgcgtcatgtttgcctccattccggatttcaaagaattttatacagaatccgacgtgaacaaggagggcttggaatgccttcggctcctgaacgagatcatcgctgactttgatgatcttctttccaagccaaaattcagtggagttgaaaagattaagaccattggcagcacatacatggcagcaacaggtctgagcgctgtgcccagccaggagcactcccaggagcccgagcggcagtacatgcacattggcaccatggtggagtttgcttttgccctggtagggaagctggatgccatcaacaagcactccttcaacgacttcaaattgcgagtgggtattaaccatggacctgtgatagctggtgtgattggagctcagaagccacaatatgatatctggggcaacactgtcaatgtggccagtaggatggacagcaccggagtcctggacaaaatacaggttaccgaggagacgagcctcgtcctgcagaccctcggatacacgtgcacctgtcgaggaataatcaacgtgaaaggaaagggggacctgaagacgtactttgtaaacacagaaatgtcaaggtccctttcccagagcaacgtggcatcctgaagagtcaccttcattttggcaagaagactgtattttcaggaaggtatcacacactttctgactgcaacttctgtcccttgtttttgatgtgcgtgctgtctgtcctatggagcctctgcagactcgttctcgtgacccagtggcataccgtttggtgtctgatgtgtgcccagatcgttctgccacttgcactgtgcttgctcctaagcaaaagggaaaaggagcgcgcgtgatagaagaaaagcactgggagaactaacagaggagaaaggtgaaacacacacacattcttaaggcaataaaactagggggtgtatattatcttctggtgcatgttcttttctggaaaatatggtagctcgccaaccgcatctgctcatctgatattcaaacacacagtattcgtgaataagttgattctgtcccccacgtggactctgtgctcacccattgtctcattgccagtggtgtccaagggcccccgttgggacccacggctctcgtccctctgctccgtgtgtctcatgccagcagcacgtcgccatccgtcaccagaattagtcctcacagcctaggaccagttttgtatcaaactcgtctgatgttttgatgccatttgtcttttgtaaagttaattcattaaaagttttatgtactttgatttacagtgcctgtatcttttattttcctgtcttctttctcctgtggtttgctccagaattaaggtttgttttccatccattctcccttttgacacagttgtttcagaaagagctctccagaagccaatattgagatgtaattcagattaggacacagtgtgtgacgcagataactggttactcagctccctggaaagcaggcaagcatgttgaatgtatctagtggtctgattttaatttgggcatctctagagaacgctttcagggaaaaatactttaatagtaaaaagattctctgcgagcaacagtgccccctccgtccactacgctcctgtctccaagaatgttttgctagagctaacagacatagactgcaaaagaataatttggaatcagctatgcaaatcagtctcacaatagcgtgagctaactgagagaagtactaagacccacaaactgcctgttaagtctgagaaggctaaagaagacacacagccaacgttcatgcatttttaaagacagaaggccttgaagaatttgttcttgtaaatccaacacaagttgtttggtacttttaacataaagaaatcatactttgccaaatagtgaaaagtagagcaatcgtgtataagctaatgtttaaaagcaaaactgcaaattgtagcccagttggtcaaacttgttttctttttataactcatggcaggcatctgtaagaagtagagaacccagatgatctcttaggaagccttttattcgtgggaactcgaacttgaagcacaagttcctggtttgaatcctggctctgattttttactggctgtgtgactttgaacacatctcttagtccctcttaggagtactttccttattggcaacttatggactcgctagtgattaaacgaggcaatgactgtgagcgagcctggcaggtgccccgtggtacattcacagcacgggcacagctgctgtgccaggactgtgactcattcccagtaaaaggcacttatcgaagctgataaccgtccttcatcaccgaagtgtgagtagagcatgacttatttagtattctgcctcaatggggaattttttgatcctgtaatcacaactcagcattggccttaatatacctaaatctccaaaaacagtgattaaagcaagagaattattacaagggcttttctctttcctctaactcattcttcacggatgccgtagcgtttccgtgagctcaaactggccttggtgtaaaatgtgtaaggatgagcagcaggcgtgcctcgtgggttcttcctctgttacatcctgctacactcatcngcaggtcaccttagttcacctaccctgagtgaacacccccagctgggtggtccaccaagttctcataaacagagtccctcccattcccccacggggtgcaccgaacttgggtttgcgctaaaaagaactcaaaaggagaactgtgctctcccaaagccatatcaccagtcttaccaaacaataggcttttaaaagcantgagtcattgtcagaatccactatgggaagctctgtgtgtacctggtcccttctaggtgtggtcccataggagcagccttagcatcccctgtgaacttatcaaaaatgcaaattctcaggccccaacctgaaggaggaccctgaatttgagatccccggggctggggcccagcacaactgctgtttagtgaacaggttctccaggtgattctgatccctgatcaagcttcagacctccctccctccccagtgtttttgcaggtgaggaaacaggggcagagtaattcaggcacatgtgttcagagttccacagttgattagcagttgaggccaggctagaatggaaaactgcctgttccttgaatctgaaagagcattattcctggtcaaagctccttaaagttctgggcagctaaaagcatccctgtgagcaaaaatgccaggcagaaaactggcagtgcacctctcatcagcccaggtcccagtgccattggcttcaagaaaaaaaaaaatctctccccaatgctctccttaacctttaagtcttacaggaagcctctcatagaaattgcctccagtccagtttcccaaaaaccccagtgttttacatatctgtttaggagtgtctaagttttgtcatcaatccangatgttattcttccttcccaactcactgtgctcctaaaggcagcaaccattcatctttcctttgctctggatacaccgaatgaccaggtaacatcatcaggccgggtgcagtggctcctataatcccnatattttgggaggccgaggagagaggatcacttaagcccaggagtctgagaccagcctgggcaacatagcaagacccccatctctgcaaaaaaataagaaaattagcttggcatggtggcacgtgcctgtagtcccagctacatgggaggctgaggtgggaggatcacttgagcccaggaagtccagaacgtagtgagccttgattataccactgcactccagcctgggtgacagagcgagactctgtctcag

SEQ ID NO: 319032 - DNA, 3325 bp, Homo sapiens
ggagcctaccataagcacctcatggaactcgctcttcagcaaacatatcaggacacctgtaattgcatcaagtcgcggatcaagttggaatttgaaaaacgtcaacaggagcggcttctgctctccctgctgccggcccacatcgccatggagatgaaagcggagatcatccagaggctgcagggccccaaggcgggccagatggagaacacaaataacttccacaacctgtatgtgaagcggcatacaaacgtgagcatcttatacgctgacatcgttggctttacccggctggcaagtgactgctccccgggagaactagtccacatgctgaatgagctctttggaaagtttgatcaaattgcaaaggagaatgaatgcatgagaattaaaattttaggagactgctactactgtgtatctggactccctatatctctccctaaccatgccaagaactgtgtgaaaatggggctggacatgtgtgaagccataaagaaagtgagggatgctactggagttgatatcaacatgcgcgtgggcgtgcattctgggaatgtcctgtgtggcgtgattggtctgcagaagtggcaatatgatgtgtggtcacatgatgtgaccttggccaaccacatggaagctggaggggtccctggacgtgttcacatttcttctgtcaccctggagcacttgaatggcgcttataaagtggaggagggagatggtgacattagggacccatatttaaaacagcacctggtgaaaacctactttgtgatcaaccccaagggagaacgacggagcccccagcatctcttcagacctcgccacacccttgatggagccaaaatgagggcctcggtccgcatgacccggtacttggagtcctggggggcagccaagccctttgcacacctacatcacagggacagcatgaccacagagaacggcaagatcagcaccacggatgtacccatgggtcagcataattttcaaaatcgcaccttaagaaccaagtcacaaaagaagagatttgaagaagaattgaatgaaaggatgattcaagcaattgatgggattaatgcacagaagcaatggctcaagtctgaagacattcagagaatctcactgcttttctataacaaagtactagaaaaagagtaccgggccacggcactgccagcgttcaagtattatgtgacttgtgcctgtctcatattcttctgcatcttcattgtgcagattctcgtgctgccaaaaacgtctgtcctgggcatctcctttggggctgcgtttctcttgctggccttcatcctcttcgtctgctttgctggacagcttctgcaatgcagcaaaaaagcctctcccctgctcatgtggcttttgaagtcctcgggcatcattgccaaccgcccctggccacggatctctctcacgatcatcaccacagccatcatattaatgatggccgtgttcaacatgtttttcctgagtgactcagaggaaacaatccctccaactgccaacacaacaaacacaagcttttcagcctcaaataatcaggtggcgattctgcgtgcgcagaatttatttttcctcccgtactttatctacagctgcattctgggactgatatcctgttccgtgttcctgcgggtaaactatgagctgaagatgttgatcatgatggtggccttggtgggctacaacaccatcctactccacacccacgcccacgtcctgggcgactacagccaggtcttatttgagagaccaggcatttggaaagacctgaagaccatgggctctgtgtctctctctatattcttcatcacactgcttgttctgggtagacagaatgaatattactgtaggttagacttcttatggaagaacaaattcaaaaaagagcgggaggagatagagaccatggagaacctgaaccgcgtgctgctggagaacgtgcttcccgcgcacgtggctgagcacttcctggccaggagcctgaagaatgaggagctataccaccagtcctatgactgcgtctgcgtcatgtttgcctccattccggatttcaaagaattttatacagaatccgacgtgaacaaggagggcttggaatgccttcggctcctgaacgagatcatcgctgactttgatgatcttctttccaagccaaaattcagtggagttgaaaagattaagaccattggcagcacatacatggcagcaacaggtctgagcgctgtgcccagccaggagcactcccaggagcccgagcggcagtacatgcacattggcaccatggtggagtttgcttttgccctggtagggaagctggatgccatcaacaagcactccttcaacgacttcaaattgcgagtgggtattaaccatggacctgtgatagctggtgtgattggagctcagaagccacaatatgatatctggggcaacactgtcaatgtggccagtaggatggacagcaccggagtcctggacaaaatacaggttaccgaggagacgagcctcgtcctgcagaccctcggatacacgtgcacctgtcgaggaataatcaacgtgaaaggaaagggggacctgaagacgtactttgtaaacacagaaatgtcaaggtccctttcccagagcaacgtggcatcctgaagagtcaccttcattttggcaagaagactgtattttcaggaaggtatcacacactttctgactgcaacttctgtcccttgtttttgatgtgcgtgctgtctgtcctatggagcctctgcagactcgttctcgtgacccagtggcataccgtttggtgtctgatgtgtgcccagatcgttctgccacttgcactgtgcttgctcctaagcaaaagggaaaaggagcgcgcgtgatagaagaaaagcactgggagaactaacagaggagaaaggtgaaacacacacacattcttaaggcaataaaactagggggtgtatattatcttctggtgcatgttcttttctggaaaatatggtagctcgccaaccgcatctgctcatctgatattcaaacacacagtattcgtgaataagttgattctgtcccccacgtggactctgtgctcacccattgtctcattgccagtggtgtccaagggcccccgttgggacccacggctctcgtccctctgctccgtgtgtctcatgccagcagcacgtcgccatccgtcaccagaattagtcctcacagcctaggaccagttttgtatcaaactcgtctgatgttttgatgccatttgtcttttgtaaagttaattcattaaaagttttatgtactttga

SEQ ID NO: 319033 - DNA, 1655 bp, Homo sapiens
atccatgtcagaggttgactgaaggacatttcagggacacagagggctttatggggagggtggaagttctgtttgggggttcttttttcggtttcattttgttctttttgttttctctttaaaacctccactctctggcaggacaagatgcctattgtttctttacctctgtgtcctcttgtaacagaatgaatattactgtaggttagacttcttatggaagaacaaattcaaaaaagagcgggaggagatagagaccatggagaacctgaaccgcgtgctgctggagaacgtgcttcccgcgcacgtggctgagcacttcctggccaggagcctgaagaatgaggagctataccaccagtcctatgactgcgtctgcgtcatgtttgcctccattccggatttcaaagaattttatacagaatccgacgtgaacaaggagggcttggaatgccttcggctcctgaacgagatcatcgctgactttgatgatcttctttccaagccaaaattcagtggagttgaaaagattaagaccattggcagcacatacatggcagcaacaggtctgagcgctgtgcccagccaggagcactcccaggagcccgagcggcagtacatgcacattggcaccatggtggagtttgcttttgccctggtagggaagctggatgccatcaacaagcactccttcaacgacttcaaattgcgagtgggtattaaccatggacctgtgatagctggtgtgattggagctcagaagccacaatatgatatctggggcaacactgtcaatgtggccagtaggatggacagcaccggagtcctggacaaaatacaggttaccgaggagacgagcctcgtcctgcagaccctcggatacacgtgcacctgtcgaggaataatcaacgtgaaaggaaagggggacctgaagacgtactttgtaaacacagaaatgtcaaggtccctttcccagagcaacgtggcatcctgaagagtcaccttcattttggcaagaagactgtattttcaggaaggtatcacacactttctgactgcaacttctgtcccttgtttttgatgtgcgtgctgtctgtcctatggagcctctgcagactcgttctcgtgacccagtggcataccgtttggtgtctgatgtgtgcccagatcgttctgccacttgcactgtgcttgctcctaagcaaaagggaaaaggagcgcgcgtgatagaagaaaagcactgggagaactaacagaggagaaaggtgaaacacacacacattcttaaggcaataaaactagggggtgtatattatcttctggtgcatgttcttttctggaaaatatggtagctcgccaaccgcatctgctcatctgatattcaaacacacagtattcgtgaataagttgattctgtcccccacgtggactctgtgctcacccattgtctcattgccagtggtgtccaagggcccccgttgggacccacggctctcgtccctctgctccgtgtgtctcatgccagcagcacgtcgccatccgtcaccagaattagtcctcacagcctaggaccagttttgtatcaaactcgtctgatgttttgatgccatttgtcttttgtaaagttaattcattaaaagttttatgtactttga

SEQ ID NO: 319034 - DNA, 1320 bp, Homo sapiens
ctcttttccggttagcgcggcgtgagaagccatgagcagcaaagtctctcgcgacaccctgtacgaggcggtgcgggaagtcctgcacgggaaccagcgcaagcgccgcaagttcctggagacggtggagttgcagatcagcttgaagaactatgatccccagaaggacaagcgcttctcgtgacccagtggcataccgtttggtgtctgatgtgtgcccagatcgttctgccacttgcactgtgcccagccaggagcactcccaggagcccgagcggcagtacatgcacattggcaccatggtggagtttgcttttgccctggtagggaagctggatgccatcaacaagcactccttcaacgacttcaaattgcgagtgggtattaaccatggacctgtgatagctggtgtgattggagctcagaagccacaatatgatatctggggcaacactgtcaatgtggccagtaggatggacagcaccggagtcctggacaaaatacaggttaccgaggagacgagcctcgtcctgcagaccctcggatacacgtgcacctgtcgaggaataatcaacgtgaaaggaaagggggacctgaagacgtactttgtaaacacagaaatgtcaaggtccctttcccagagcaacgtggcatcctgaagagtcaccttcattttggcaagaagactgtattttcaggaaggtatcacacactttctgactgcaacttctgtcccttgtttttgatgtgcgtgctgtctgtcctatggagcctctgcagactcgttctcgtgacccagtggcataccgtttggtgtctgatgtgtgcccagatcgttctgccacttgcactgtgcttgctcctaagcaaaagggaaaaggagcgcgcgtgatagaagaaaagcactgggagaactaacagaggagaaaggtgaaacacacacacattcttaaggcaataaaactagggggtgtatattatcttctggtgcatgttcttttctggaaaatatggtagctcgccaaccgcatctgctcatctgatattcaaacacacagtattcgtgaataagttgattctgtcccccacgtggactctgtgctcacccattgtctcattgccagtggtgtccaagggcccccgttgggacccacggctctcgtccctctgctccgtgtgtctcatgccagcagcacgtcgccatccgtcaccagaattagtcctcacagcctaggaccagttttgtatcaaactcgtctgatgttttgatgccatttgtcttttgtaaagttaattcattaaaagttttatgtactttga
